United States Patent Application Publication US 2005/0208558 A1 - sequence listing, part 23

SEQ ID NO: 22734 - protein, 1139 aa, DROSOPHILA
MLLGSPSRRGFPEISDRFWVRREIFRQGQGCLRYRYRDSKRIRCRSSEGSFHRPKTAKLNNVAGTSLARNTGQSQKPTHLVLNTRMQHECGGLQPENEDREWMADGWAPSQDVPSQRDLRKTQSKLMARQSRSQAQSVASGDDGDVDMDVTATVTMTLDDAVDAELNSIYGYFTCRRGTKKDRREPLVGQSVSESRSERYAGAQSHIRQHSKRQKPTPLVPIQIQCDNLNTRSHHQPYRGAKREKDARQGVQTYRRRSNADKKAKIQRGQIKAIRSQVEGAPPSGVAKGTRDRDLRPAGKMYDIKRLEAGQQKLQQAQQPLGLDLSGQQQQLTCSVITAPEHRANPNPSSISQSNPSEATHMTLLTLRRRRSLQRRACLLSILAAFVFGMALGVVVPMFGLPRHQDSPPDLPEEQIQMVAVEPLSSYRVEFIKETDELSAEQVFRNAFHLEQDKDAPDSMVVKKLDTNDGSIKEFHVQRTASGRYRKGPERRLSKKMPERVQPQETSRSPTTSPTNPTSEHQAGFIEEDVYWGPTVEQALPKGFAAKDQVSWERFVGEQGRVVRLEQGCGRMQNRMVVFADGTRACARYRQNTDQIQGEIFSYYLGQLLNISNLAPSAATVVDTSTPNWAAALGDITQAQWKERRPVVLTRWLSDLEPAGIPQPFQPLERHLNKHDVWNLTRHMQSERQAQSQPHGLLKRLGAASSPGSAHQSNAIEETGTGTETANGALVQRLIELAQWSDLIVFDYLIANLDRVVNNLYNFQWNADIMAAPAHNLARQSASQLLVFLDNESGLLHGYRLLKKYEAYHSLLLDNLCVFRRPTIDALRRLRAAGAGRRLRDLFERTTSAGVRDVLPSLPDKSVKILVERIDRVLGQICAPTNRDFVYILQFTPVYGPKTANAKQVCQHLRLSFMNLLMLANEIKTLYDQIIRRPRATASQQLVAVAGAFTAKILNKLLPHLQLRCCCCRRVVVDVAYWLLSSKRIAAMRLPPMSMPSTSQPASRLGFQIGKLFCFANSRPNFELQFETEFGFELEFERYAVLVFVVLMVTSSCLTCVNMPPTPTPTAAPRPQTPDAAPPADAPTAFWPPKGARVNAVADRLVGCSINNICDVHRSAEYFRDTRAYLCISVINRKQKYFQ

SEQ ID NO: 22735 - DNA, 2552 bp, DROSOPHILA
tcaggaacttaatccacattcactctaagatgttcgatcttctatacatatttttttattaatataagaaatatatgtttattacttggcagttgatatagatagattttagacataaataaatggcgcaaatgaaggctaagcatgtgtatttacaaatcaattgacttatttctgcgaataagtgttaccaattgaaaggccttaaaaactaatgaatttacatagttcctaacttttaataaagcatgagaaaattcaactttcgatgctggagtataaaacaatgctatagtcgagtaaaccgactaacagatacccgttgcatacgcttctacgactctagtatacccctttactcagcaagtaacaggtataaatatgtaaatgaaaaaatgaacaaaaaatataatttttccgactgagtcatagattttaagagaacttttaaacgagtgctattagaataagtaacccagttgttgacaacaaataaacaaagtaaataaacaaaaatttgcagtagggttataaaccttcaaatagacattcattttcttctaagcaaatttacaattcgtcttagtatttggctaacgttatgattgttttttgtttcattgtgaggatactgcgtaaatttctgtaaacttccctctctgacacagcacttttttttaaactcaaacggttgtattaaaatagaagaatagaacaatggaactaattcaaacatcgaccagctgttgccacacgacgaatgaaacaagagaaacacacggattattagatgcgaagaattcgagctcagctcttcagggagttcttcgctctattttccattcttcggagtatccagctaagcacacagccaatgctgccgtcacgggggattcttagcaaaaaggctgatggatgaattcgacaccgaatttttgggtataaaaggggctacacgtacataactcaaatcagttgctattggagcaaaagtcccacaatgcgtgcctacattgcaattaccctgctggccctggtggcagttgtcgtggcccaagggggaggcggaagacgtggtggacgcggtggcggcggaggcggtggccgaagtcttggaggattcggaggacgtggaggcggtggcttcggcggtcgcggtggtcctggtggtactggtggccccggtggcttcggcggacctggtcgctttggagggcctggaggacttggcggtggtggaggattcggaggtcccggccgctttggcggtcccggaagcttcaatggtggattcggcggtcctggcggttggggcccacgtccacgtcctcgtcgcccaagaccttggtggacgacaacggagagttccttggccgacaccagcagcacaactagcagctcctccagctccaccgacagcagctcctctgccagctccactgatagctccaccgatagctccaccgatagctccaccgatagctctaccgatagctccaccgatagctccactgatagcagctccacggagagcactactggttcgggatagattctgagtctcaattgcagcgtattgaaaactttctgggaaatgtatgaaaataaaatctaattggcacattgaaacttaatttcattaacttggaatatattagtcatatacagtcatattagtcttacagactagccgaatctattcagcaatgtccgttcgtattaagacctttgattcgcaccaaaaaatatctcgattagcatatgagattgaaagctgtctcttaagagaattatcgtttctgttatttcttcgatatcgacaggcaaatcaatcatctgattaatgaaatatcatcatttgttatcataaagtaaacagcatgaaggctagttattttgataatttaattttggcagctgcctgccgaatagctctattagggcaaattgaattttcaataagtggtaggctaagcgagaattggacataataggaaacacccgacaccgctgagaacaccacatgacatatgctgcaccatttcgagtccaaaggggtggtgcaacgaacgggggcacgggcacaaacgtgcggggaacctagtaggagtagggaccgaaaatccggacgccatatagaagagggctgagagtgcggaatgtccaaatccaataaattgaccaataatgaacgctcgaatgcagctcgaggcgagagcgctgtgcagtgggtgaacgtgggagcaaagttgaaaagccaaaaaacaatgatggtcagtggctctggcctgcggtactttggtccttcgcttttccgtctgcgctccctggggcggcttcaagacaacgtcaaaggcaagggcgaggggccagaagctcgaaaaaaaagacacgaaaagaacgcaaaaaatcaacttgcaaaaaattccgaaaagaacaaaaaaaaaaaaaaaaacaaactcaacacgacacggacaacatggaaaagctccaaagggcaagcccaatgaattaatggcacgtccttggcgaactaaaaatgctctattcga

SEQ ID NO: 22736 - DNA, 552 bp, DROSOPHILA
atgcgtgcctacattgcaattaccctgctggccctggtggcagttgtcgtggcccaagggggaggcggaagacgtggtggacgcggtggcggcggaggcggtggccgaagtcttggaggattcggaggacgtggaggcggtggcttcggcggtcgcggtggtcctggtggtactggtggccccggtggcttcggcggacctggtcgctttggagggcctggaggacttggcggtggtggaggattcggaggtcccggccgctttggcggtcccggaagcttcaatggtggattcggcggtcctggcggttggggcccacgtccacgtcctcgtcgcccaagaccttggtggacgacaacggagagttccttggccgacaccagcagcacaactagcagctcctccagctccaccgacagcagctcctctgccagctccactgatagctccaccgatagctccaccgatagctccaccgatagctctaccgatagctccaccgatagctccactgatagcagctccacggagagcactactggttcgggatag

SEQ ID NO: 22737 - protein, 183 aa, DROSOPHILA
MRAYIAITLLALVAVVVAQGGGGRRGGRGGGGGGGRSLGGFGGRGGGGFGGRGGPGGTGGPGGFGGPGRFGGPGGLGGGGGFGGPGRFGGPGSFNGGFGGPGGWGPRPRPRRPRPWWTTTESSLADTSSTTSSSSSSTDSSSSASSTDSSTDSSTDSSTDSSTDSSTDSSTDSSSTESTTGSG

SEQ ID NO: 22738 - DNA, 3596 bp, DROSOPHILA
ccttcagaacgcacttgcacatttagctattacatacatgcatagatatggattagatcgactgttgtacacttaaaaggatagagcctcgaggagcctcgtttgtaaatcgtgttagtctagtgaataagcagaggagaataccgagaattcctggctgaagctttgtacattttctgccggctacagagagatccgcttgagcgcaccccaccactttctatttataaaggagctaacttacacgtcgctacacattatattatcgcagatcgcaacgcgatgccgttgtttataactgttcaaagtatgcgtaaaagttgattaagtacatgtaatcataactcttgtatccgcatatatcaaatgcacatatattcgaccttacttgtaccctgctcctgcattcgtttcagcacgagcgacgtattgatcatacagaatacatcgatattcgcaatacgattcccagttcagaaaaaaaaaatttcgattgttgaaatagttatccgaaaatgttgtgaaacttttgtgcttgcgcagatctttgtttacgttgtgaagttttcgttttgttcccctattaactacaatgtcaatgtataacgcaagaactacttgatagcctaatttaattttagtcggcgttgctatgcagcccaaactatttagttaattcgcttagttttaattctccctaagtgcgtctaagttgtaagcgacgtctatataattgtacaagctgatgatgcaaagcaaacccctaacgaacattatattacctaattgtagctgctattatagtttttctaaccgtttttgaacaattttgtttgatttatctgtaattgtaaatgcatttaagtacttgtaatattaaattttatgcttttaagttaaattcatttacaataatttaatacacacacgaacacacaaagagatcgaaaatacacaaaacagcaataataaatgaaaatacaaactaaagaacaagattcaggttttacacactggtctttatttgtagctttctgctgagggaaacaattggattcatagtcttctatgtaaaataaattagagcccacctcgttatttaggtaacagactatacatgcatatttgaagaatattctgtacctgcaacgattattttgaaaactaagagaaagcaagtattatatatgtaaggccttaaagctaggtcaactagatctaccgagtaacaattaagcttggtctactgcgatcaaaagactcgggtggcggaatataggtggatgagttaatccccacgcgccttcttaccaccgccatgtttgtggtcgtttccgccgtggcgcttgcgattgaagcgcttgcccttgttcctggtgaaatcgcgtcgcttcttcatgaattctatggccttgtcgatgaactccttctcctcctcctcggtggcctttcgcagcgacagagagacctcatctttgaacttgagctgtggataggcaagtacaattacggattagctgataagggaaaagttataatcccaattctgattcttaccttgccttcctccaccttggcaatgtacttttcggccgcatcggcctccgtcagccgcacagagcccttggtttcgcccttggcgaactcaatgtaggccacctcgaagtccttgatcttctcgaaggcttcgcgaatttcctcgcggctagatgtctccggagcgccctcgaagacaacaatggcgttcttgggcagctcgaaggcaggctcaggcttggcctcctttttgtttttgcgcttctcgttcttctgggcgtattcctcctgcttctccttaaggtagtccacctgccatttacgcagcagctcgcgctccttataaacgatcttctcctgttcgaggaaggcctttgcctggtccttggtctcgaaagtaaggaagatgctgcccttgaacttgtacgacttggtgggcttgtcatagtgcttgcgcatggtcaggttgaccactttgtcgtagttggcagcaaagtcgagcagttcgctaatctgcgaatctagggggaagcccttggcgtatgcggtccgctcctggatctccttgcgccgctcttcgttgtgctctggaataggacgctccggatggcgacgcaggctaagtttgtcttcgctaatctccacgaggccctcctcggatttgttcagggcagccacgatctcagataagtccgtggacagggaggccaatctcttgaaggtaacgagcaccgacaggggcacccagccgtcctcgttcttgccgatctgctcgcgcagaaacttgtcccgattcagattggcatcgccgaagtagtactctacctgccggattatggcgcgctcctgtttggtgaagccgccagcggcttcctctgctgcgggagccgggtccttcttggcgtcgccgttcttcgcctccagcacctgcgcctcggcgggctgtgctacctcttcctgggcttccacactcggggtttcagcaacttcggccattttagctgtgaaaatttcgcaaagaactgaaatgtgcgctcactgaaacacgtgtgaaatcggtaaaatgagtcacggcgtttgacaacactagccccgaaatgccgtgatagagatgcacaggtcaaaaaccgtgactagcgccaagcattaacttgaaaatgcagtgcggacatcttgaccaaagaccctagaattctagtgtctttgtcttgactatgtattatttaaaggctttgaaaatatacgtttgattatttaatttttgtagtagtggtaatggtaatatatcaacaagaattaaaaaaaaacctttactcatttacaattaccgcgatattcaaaaacaagaacataccaaactaaaacttataattcaaaatatatgtgacgaaaagtggtttatattatttttgaatgtgatttatcaatttactccaaaactatcgatgcaaagttacggaatgctccccgatagccctatcgatgccgaggacctgttggcacgtacacatctttagtttggctgcggccgattgcagccctggttttctaggtttctattttggtcgagcgctgtgttttatttatgtttgccatgggaaaagagagttgctaaaagtgcctaaatacgtgcacctggttcacaaacgggcgctccaaccagttgaccccagccccacggaatcggcatatgagtaaacaagtatttgaaaaaaatagtgagagcagttcaaatcgcgtcggcctagaaaagaaaccaaaaaatcgggcaataaatagtgaaaagtgtgctccttttgctatataaccaattgtgtatatataataacaagggtggataagtcgcgcaatcaacgaaacttggaaaactaaactattagtcactattctattattgctcaacgaacgacagggaacaacaacaaacggatcaacaaatgtttgataaaacgcaacgcagctgaaggtgagcgaaaaactaaagtggttaagaaaacccttcagacagcttggctgcaatatatctagccgtggaaatgaatcaggttttccaataactg

SEQ ID NO: 22739 - DNA, 1525 bp, DROSOPHILA
accgatttcacacgtgtttcagtgagcgcacatttcagttctttgcgaaattttcacagctaaaatggccgaagttgctgaaaccccgagtgtggaagcccaggaagaggtagcacagcccgccgaggcgcaggtgctggaggcgaagaacggcgacgccaagaaggacccggctcccgcagcagaggaagccgctggcggcttcaccaaacaggagcgcgccataatccggcaggtagagtactacttcggcgatgccaatctgaatcgggacaagtttctgcgcgagcagatcggcaagaacgaggacggctgggtgcccctgtcggtgctcgttaccttcaagagattggcctccctgtccacggacttatctgagatcgtggctgccctgaacaaatccgaggagggcctcgtggagattagcgaagacaaacttagcctgcgtcgccatccggagcgtcctattccagagcacaacgaagagcggcgcaaggagatccaggagcggaccgcatacgccaagggcttccccctagattcgcagattagcgaactgctcgactttgctgccaactacgacaaagtggtcaacctgaccatgcgcaagcactatgacaagcccaccaagtcgtacaagttcaagggcagcatcttccttactttcgagaccaaggaccaggcaaaggccttcctcgaacaggagaagatcgtttataaggagcgcgagctgctgcgtaaatggcaggtggactaccttaaggagaagcaggaggaatacgcccagaagaacgagaagcgcaaaaacaaaaaggaggccaagcctgagcctgccttcgagctgcccaagaacgccattgttgtcttcgagggcgctccggagacatctagccgcgaggaaattcgcgaagccttcgagaagatcaaggacttcgaggtggcctacattgagttcgccaagggcgaaaccaagggctctgtgcggctgacggaggccgatgcggccgaaaagtacattgccaaggtggaggaaggcaagctcaagttcaaagatgaggtctctctgtcgctgcgaaaggccaccgaggaggaggagaaggagttcatcgacaaggccatagaattcatgaagaagcgacgcgatttcaccaggaacaagggcaagcgcttcaatcgcaagcgccacggcggaaacgaccacaaacatggcggtggtaagaaggcgcgtggggattaactcatccacctatattccgccacccgagtcttttgatcgcagtagaccaagcttaattgttactcggtagatctagttgacctagctttaaggccttacatatataatacttgctttctcttagttttcaaaataatcgttgcaggtacagaatattcttcaaatatgcatgtatagtctgttacctaaataacgaggtgggctctaatttattttacatagaagactatgaatccaattgtttccctcagcagaaagctacaaataaagaccagtgtgtaaaacctg

SEQ ID NO: 22740 - protein, 390 aa, DROSOPHILA
MAEVAETPSVEAQEEVAQPAEAQVLEAKNGDAKKDPAPAAEEAAGGFTKQERAIIRQVEYYFGDANLNRDKFLREQIGKNEDGWVPLSVLVTFKRLASLSTDLSEIVAALNKSEEGLVEISEDKLSLRRHPERPIPEHNEERRKEIQERTAYAKGFPLDSQISELLDFAANYDKVVNLTMRKHYDKPTKSYKFKGSIFLTFETKDQAKAFLEQEKIVYKERELLRKWQVDYLKEKQEEYAQKNEKRKNKKEAKPEPAFELPKNAIVVFEGAPETSSREEIREAFEKIKDFEVAYIEFAKGETKGSVRLTEADAAEKYIAKVEEGKLKFKDEVSLSLRKATEEEEKEFIDKAIEFMKKRRDFTRNKGKRFNRKRHGGNDHKHGGGKKARGD

SEQ ID NO: 22741 - DNA, 6295 bp, DROSOPHILA
aaatcaaggttatccgtctgtttgtttatcattggcttatacagttcaagcgcatttggtttgttgtttaaatcatttttggacgcgacgcttggctgcttcttcttgccgttagcatttattttccctttgcctttttgcgcagcaaatttttctgccaacgccgcgtcatttttgctcgctgacaaaaaatcaaacaagtacacacactttgcgctgatattgcaatttgtttggcgtcatcttgctacttttttctcttttttttttttgcattgtttgaagtgtcggtggttttttttcgttgtttttggatcgcttttcaccttgcatagttgctggccggaggagagctcctcgtacagatggcgcgagaaacacttggagcaggcgaataaaacttttccactcattctgtttggcgttcggcggttttgttgtcgtgacgagttttctctgttttgtgctggattcttaaaaaaaacttgttgtttctgctgctttaaataaaatggttctttttgctagcgatggcagggtaagcgataggcactgcgacagacacaccatcgatagcggcgatgtgatatcgatatctgcgatgcaattaaataaatatgttcgctttttcagatattttatacagtttaattgaaattatcgtacttcaaatgagaatatgagagaatactaagggaacgaacatttgcaacacatatcgatatattttcatattattaatactatttgttaaaatgcttgttaaaatagcttgtttactttttaaatttttaacaataatatttttgcttaaaactaagctcggataagcaaaatacctgtaaaattcttattataaaactaaaatgtaaccctgccgatactatcgatagccgccaaagcaaccctttgaaaacagttcaaaatttaaggacaagcgcgcatagcaaattggataaagatgcccacaaagcgcaaccgccgatagcaccgattcaaacaacaacgatcacttcaggctgtacgagaaaattatatgtgcgaggatttcgaaactggatcaagcaaaaaggacgaaaaccaaacaagagcaaaatattctaggctaatcaaaagcacagtgaggggcaaggagcattctatcgaaaatgccttcggaacagcatacgaatataaaagtggcggttcgcgtacggccgtataatgtccgtgaattggagcaaaaacagcggagtattatcaaggtcatggatcgttcggcactgctgttcgatcccgacgaggaggacgatgagttcttctttcagggcgccaagcaaccgtaccgcgacatcaccaagcggatgaacaaaaagttgaccatggaattcgacagggtattcgatatagacaattccaaccaggatctgttcgaggagtgcacggcgccgctggtcgacgcggtgttaaatgggtaagctatgccttatagctagctatctaaagccacttgaatccttacacgctcataccacccacagatacaactgctcggtatttgtatatggagccactggcgccggaaaaacattcacaatgctgggcagcgaggctcatccgggtctgacctatcttaccatgcaagatctcttcgataagatccaagcgcagagcgacgtgcgcaagttcgatgtgggggtatcctatctagaggtgtacaacgaacatgtgatgaatctgctaactaaatcgggccctttaaaacttcgcgaggacaacaatggcgtggtggtcagtggtctttgtctcacgcccatctacagtgccgaggagctgctaagaatgctgatgctgggcaactctcatcgcactcagcaccccacagatgccaatgcagagagttccaggtcacatgccatcttccaggtgcacattaggatcacggagcgcaagaccgacaccaaaagaacggtcaaactatccatgatcgatctggcgggcagtgagagggcggccagtacgaaaggcattggagtgcgattcaaggaaggcgccagcatcaacaaaagtctcttagctttgggaaattgcataaacaagctagccgacggcttaaagcacatcccgtaccgcgactcgaacctgacacgcatcctgaaggactcgttgggcggaaattgtcgcacattgatggtggccaatgtctcgatgagctcactgacctatgaagatacctacaacacccttaagtacgctagccgagctaagaagatacgcacgactctgaaacagaatgtcctcaagtccaagatgccaaccgagttctatgtgaagaagatcgacgaggtggtagccgagaacgagcgactcaaagagcgcaacaaggcgctggaggccaaggccactcagttggagcgcgccggcaatagtggattcgatccgctggagcttaagacgtggtacagcaagatagacgctgtatatgcggccgcccggcagcttcaggagcacgtccttggtatgcgtagcaagatcaagaacatcaactaccggcagacactgaaaaaagaactggaggagttcaggaagctgatgtgtgtcgaccagcgagtgtgccaggaggtgagttcgatttttcgatttcaaatggtactaagagtccaaatttgtgctcatctagtgtttttctatttctggaagttcatctcaagagtttttaagtttaaacatttacatttattaaggcttttggagcggaatcagtcttggtcttaggcctaatcgcccagcagctccttctgcttgctggccagcaacttgtccgcctccgagatgaagcgatccgcgatggcagtgacctgagcctgtgcggcgaaggcatcatccttgccaagttccggttgttttttcagcttgcgaatgtgttcgttctgaacgcctcgtatggcatcgcgatatttgacgaacagagctttggcattcttggatagattttccctgtgctccttggtgacctttgggatgggtatgaacagtgtagtgccatcctgttggggattaaggttcatgccactcttttcgatggctttgaggacatcgggaatcgtttgcgggaagccaatcatgttgactatgatggtcttgggattcttgcgagagatttgggccagttcctgcagctcgtgctcctggccatcgactttgatgcgcagtgtgtcgatggcaccgctggtggatcgcagcgacaggtgcttcacaaaatcctccttcatctgcatcacggacttctgcatctggctattcaggccatcgaaattgaggatctcgcgcagctgctgctcattgatttccaccttgcccggctttcccttgccgcctttttccttctttttgtccttgccctttgcataatcgcgcgccacttgtagatatttcgtgttttctagattattttgcaggattagaggtaatttcggtgaggagctcgacactcgcgtctggcgcactcctagggcagctaaatgcagtgcacttcgcagcattttatttaaatttaatctattttgtttggattaaatgcggaactgattttcaattgggcagcatcagctgtttctttccgattcgtcgtaacaaacctcaaacgtaaggcatgttaacgtaacgtaacgcttacgttggcgggtttatttgaaaaaaaaaaactcattacttaattttaaaatgtattattaccataaatacccttttcttataaacttttcaggacttccgtcgctttgcgaactacatgagcacactgaccagccagatggagaagtacaaggaggagttgcccagctggctgagtaaaatggagattgcctaccaggatctagaaagtctaaagcgagaggttaacaaatcaaaggcctaccagatactcattgtatacgttaagtacaaggatctcgagctgcagctgaccaagcagaatatctttaacaatcacgtgaacgcaattaaccaggagctggttgagaacttggatctgatgcgaaagtccttccgaacagcctgcgaagtgctcaaccagacgtacgatcgcctcgaggatggtcaaaagctgacgccggaaattgaggcggtcttcgaaaggttgctgcgaaagatgcggttcgccgattccgaggccaataccaaaatggccgagatgaatccgttggcggtgcctgtggctctgcgcagcagcgcccaggaggaagaagagcccacatgcagcctcacggccagcgccaaaaagcgacaaaggcaagcggctcagagcgacgacgatctgcatttgagcatggaggactttgatagccaggacaccgaatcagattccgaggagctgcacaggacgtttaagaggccacgaaatctaaacgaaacgcaggtcctgggtccctgcagcagtagttctagcagcagtacttctagcagcagtagcgcaaggaaggcactcacggcgacggtgaccaagccgcgaaccgtccaacagcgactggtcagcgatctgatatccgatcagaatgtgcgcggtggcaatgaaaagatcaagaagggtaaggttttgctttctaaatgttatgcattatgtataaactatttcatcgcagcgaaatttttttgttaatatgtggacatggctcataatcatttatgcatgacggaaatactttatgctcattactttggtgtttaattgcagctctactcaagtcgaatcactttacggcgcaaggacttcagagaacgttggcggctgcttctctggccaaggaaaacgtaaaatacaacgccaactatgtgcgcaagagtccacgagcgctaatggccaaaggtgagttcggcaaactgtgcctattcaatcagagattttaatgcaattctttactgacagcccttgcaggcacctcgacgcttgcgagaaaaccgctgggatcggccagtaaggagccgcctttggtcaaattcaatcgtgctgcttcgttccgcctgaagaagtagaaaacatgaactcattcagttagtttcaacttgtgtttgccttgaagtaacaactattccgccaggaccgagacagattcatgttcaaattaaccatagctataaccatatatatagatagaacactaactcctccaaaccctaagctcgttcgttttttcgttcttttgacccattacttaaccttgaatttatttatgtactttttttatatttgttttgataaattgaaagaaagctttgcgttacgcgctctaactaaaaatatacagccgtttccttgccctcatccaaattgtgtctgtcgtctcggtggtagaagctttgatcgcacggccagaattgggagttggtttccggatgcgaggctaaccgactggcgctgccactgcgataaggagccaagcccaggagtcccagcagcatgtacagcagggctcccaaattcacacccaaaagaagcaatcccggtgcaagcagaggattcaggatggacagtatggcagctggtggagatggagcagcccaggcagcagtcggcactccatcgtatccgtactgcactcgtcgccagggtttcttatcgcctgcagcaggtctcttttgctgctcgatgcctacgtcagcgggtaaatccagatcctgtcgcttgctctcggccaccggagtgtagcggggcacaaatccctgctccaccgggatcttctcgtcgccactgcttgcgccggctagacaggcaataaagataagcgacagccacatatctacgggtttgttttttcccgactggccggctgcaatcttatatagccacttgttgctcgccccaagggcaaaaagcgaatcgtgtggatcttgctagatgtcaacaagttgtcactcttcagttttacaatggtcatatatttctatttgtatagttaatagttataataatgcatataaaaaattcaacttaaaggtatcaaagcttgtccgaataatgagcatataggtatatatttgatctctgccttttatcaattatatatggtacttaacttgtcactctgttaatcatcatatatcgttataacaatgcctacaaatgctgatcttaaggtatcaaaaggttattgtccgtgaacaagcacaacgagcatacatgtatagaaaatattgtaaagataatcgtttccctttttagtttgaacaagtttccgcggtctagttaagtcgctgcgctttgaggagcacctggggctgttcaatttccgtcttggactgcaccagctttagttcccgt

SEQ ID NO: 22742 - DNA, 2878 bp, DROSOPHILA
caacaacgatcacttcaggctgtacgagaaaattatatgtgcgaggatttcgaaactggatcaagcaaaaaggacgaaaaccaaacaagagcaaaatattctaggctaatcaaaagcacagtgaggggcaaggagcattctatcgaaaatgccttcggaacagcatacgaatataaaagtggcggttcgcgtacggccgtataatgtccgtgaattggagcaaaaacagcggagtattatcaaggtcatggatcgttcggcactgctgttcgatcccgacgaggaggacgatgagttcttctttcagggcgccaagcaaccgtaccgcgacatcaccaagcggatgaacaaaaagttgaccatggaattcgacagggtattcgatatagacaattccaaccaggatctgttcgaggagtgcacggcgccgctggtcgacgcggtgttaaatggatacaactgctcggtatttgtatatggagccactggcgccggaaaaacattcacaatgctgggcagcgaggctcatccgggtctgacctatcttaccatgcaagatctcttcgataagatccaagcgcagagcgacgtgcgcaagttcgatgtgggggtatcctatctagaggtgtacaacgaacatgtgatgaatctgctaactaaatcgggccctttaaaacttcgcgaggacaacaatggcgtggtggtcagtggtctttgtctcacgcccatctacagtgccgaggagctgctaagaatgctgatgctgggcaactctcatcgcactcagcaccccacagatgccaatgcagagagttccaggtcacatgccatcttccaggtgcacattaggatcacggagcgcaagaccgacaccaaaagaacggtcaaactatccatgatcgatctggcgggcagtgagagggcggccagtacgaaaggcattggagtgcgattcaaggaaggcgccagcatcaacaaaagtctcttagctttgggaaattgcataaacaagctagccgacggcttaaagcacatcccgtaccgcgactcgaacctgacacgcatcctgaaggactcgttgggcggaaattgtcgcacattgatggtggccaatgtctcgatgagctcactgacctatgaagatacctacaacacccttaagtacgctagccgagctaagaagatacgcacgactctgaaacagaatgtcctcaagtccaagatgccaaccgagttctatgtgaagaagatcgacgaggtggtagccgagaacgagcgactcaaagagcgcaacaaggcgctggaggccaaggccactcagttggagcgcgccggcaatagtggattcgatccgctggagcttaagacgtggtacagcaagatagacgctgtatatgcggccgcccggcagcttcaggagcacgtccttggtatgcgtagcaagatcaagaacatcaactaccggcagacactgaaaaaagaactggaggagttcaggaagctgatgtgtgtcgaccagcgagtgtgccaggaggacttccgtcgctttgcgaactacatgagcacactgaccagccagatggagaagtacaaggaggagttgcccagctggctgagtaaaatggagattgcctaccaggatctagaaagtctaaagcgagaggttaacaaatcaaaggcctaccagatactcattgtatacgttaagtacaaggatctcgagctgcagctgaccaagcagaatatctttaacaatcacgtgaacgcaattaaccaggagctggttgagaacttggatctgatgcgaaagtccttccgaacagcctgcgaagtgctcaaccagacgtacgatcgcctcgaggatggtcaaaagctgacgccggaaattgaggcggtcttcgaaaggttgctgcgaaagatgcggttcgccgattccgaggccaataccaaaatggccgagatgaatccgttggcggtgcctgtggctctgcgcagcagcgcccaggaggaagaagagcccacatgcagcctcacggccagcgccaaaaagcgacaaaggcaagcggctcagagcgacgacgatctgcatttgagcatggaggactttgatagccaggacaccgaatcagattccgaggagctgcacaggacgtttaagaggccacgaaatctaaacgaaacgcaggtcctgggtccctgcagcagtagttctagcagcagtacttctagcagcagtagcgcaaggaaggcactcacggcgacggtgaccaagccgcgaaccgtccaacagcgactggtcagcgatctgatatccgatcagaatgtgcgcggtggcaatgaaaagatcaagaaggctctactcaagtcgaatcactttacggcgcaaggacttcagagaacgttggcggctgcttctctggccaaggaaaacgtaaaatacaacgccaactatgtgcgcaagagtccacgagcgctaatggccaaagcccttgcaggcacctcgacgcttgcgagaaaaccgctgggatcggccagtaaggagccgcctttggtcaaattcaatcgtgctgcttcgttccgcctgaagaagtagaaaacatgaactcattcagttagtttcaacttgtgtttgccttgaagtaacaactattccgccaggaccgagacagattcatgttcaaattaaccatagctataaccatatatatagatagaacactaactcctccaaaccctaagctcgttcgttttttcgttcttttgacccattacttaaccttgaatttatttatgtactttttttatatttgttttgataaattgaaagaaagctttgcgttacgcgctctaactaaaaatatacagccgtttccttgcc

SEQ ID NO: 22743 - protein, 814 aa, DROSOPHILA
MPSEQHTNIKVAVRVRPYNVRELEQKQRSIIKVMDRSALLFDPDEEDDEFFFQGAKQPYRDITKRMNKKLTMEFDRVFDIDNSNQDLFEECTAPLVDAVLNGYNCSVFVYGATGAGKTFTMLGSEAHPGLTYLTMQDLFDKIQAQSDVRKFDVGVSYLEVYNEHVMNLLTKSGPLKLREDNNGVVVSGLCLTPIYSAEELLRMLMLGNSHRTQHPTDANAESSRSHAIFQVHIRITERKTDTKRTVKLSMIDLAGSERAASTKGIGVRFKEGASINKSLLALGNCINKLADGLKHIPYRDSNLTRILKDSLGGNCRTLMVANVSMSSLTYEDTYNTLKYASRAKKIRTTLKQNVLKSKMPTEFYVKKIDEVVAENERLKERNKALEAKATQLERAGNSGFDPLELKTWYSKIDAVYAAARQLQEHVLGMRSKIKNINYRQTLKKELEEFRKLMCVDQRVCQEDFRRFANYMSTLTSQMEKYKEELPSWLSKMEIAYQDLESLKREVNKSKAYQILIVYVKYKDLELQLTKQNIFNNHVNAINQELVENLDLMRKSFRTACEVLNQTYDRLEDGQKLTPEIEAVFERLLRKMRFADSEANTKMAEMNPLAVPVALRSSAQEEEEPTCSLTASAKKRQRQAAQSDDDLHLSMEDFDSQDTESDSEELHRTFKRPRNLNETQVLGPCSSSSSSSTSSSSSARKALTATVTKPRTVQQRLVSDLISDQNVRGGNEKIKKALLKSNHFTAQGLQRTLAAASLAKENVKYNANYVRKSPRALMAKALAGTSTLARKPLGSASKEPPLVKFNRAASFRLKK

SEQ ID NO: 22744 - DNA, 4645 bp, DROSOPHILA
aagtgagagcagcgcataaatcaacatgtcaaatcgcagcttacaaagtgccgtacaaacacacacacacacacacagatcccgcgctcatttaaacacacccactaagacagagggaaactcacttttactccgcgtgccgcattacagtttaatgtttaccattttcatcaaatttgtcggataattcggtctgttatagcaacttggctaattgttcaacaccaacaatgccaccgcgacaaacatcagcacaccgatactggtacaccatcaccatcacattcactagcacaaacaccaccacaaatagcacaacacacaccgacgagcaacagtttgcacggccagccgctcggggctttctgcacttccgtttccgctggcgactgccgctctcacgaacttccgcccggtcgaagctgcggcggcggctgctcgagctgaactgtggtgcccaccgattcttggctgcctttttcctggctcccgattcctgtgaatccgaagtgctggaaaagctccgactgttgagcttttcgcggccttccattgggctggaaaatggagccgaggaaagctagcgaatgcagtggatagccgttgcaggagatgattgggaaatcatctagcggtttcatcttatataaggcaagtgggaaaaatttaacttaatttatttctataatcttggcaaattaacaccataaattaggattttgaaaaatattaaaagtcttagttatgaaacaagagcaagactagttacaagtgtcacattttataattataacatttgaaatttatttagcaatcatttaaaaatcctaaaacgtattaaaacttgtttatctatttaactgattgtttgaagcgttaataaataaatcatgcagctataaagcatttattagtatattaactattgtatatatactgtttagaatgttcacaacattcaaaaatccaagtttgtgataaataaatactcatataggatgtaggttataaaatcgtgttgttttattttttttttaattttctctgtttgtatggcctacttgctaatcttatggctgcttatataataaatagtttggaagtcttcggcttaagaactagagaaacgactaaataaggtattggggacaggtatttaggacaggttaacaaattgggttggtgatggggtcagtacgggatagcacagtgggtgagcaggtgtgtgggcaggtaaagatgctgtagatgggactctcctcattgatccttcttacaggttgtctacgcgggaagatagctcgtccagctgctggtaaatgctggccggaagatcggcgcccacctgtgactcgaagtaggtgcgaatatccttgacctcctgcgaccagaactccttgggcagcgagaagatctccttcacgtccaccttatccttcatgccatcgaggtttagggcaccctcggcgggaatgtgtccaatggccgagtccacgtagcaggattcgccattgaccctgcgcaggatccattccagcacacgggagttctctccgtatccgggccacatgaacttgccctcggcactcttgcggaaccagttgacgtggaagatctttggcacctgaccacgcttctccatgctcagccagtgggccacgtagtcgccaaagttgtagccaaagaagggcctcatggcgaacggatcgtgcatgatcaccttgcccttgtgctcggccgcagcagtggcctcactcctcatggctgctccaatgaagactccgtgggtccagtcccgagcctcatagattaggggcactccggcgggacgacgtcctccgaagagcatggcggagatgggcactcccgccggatcttcccaggcttcatcgataatcgggcactgggcggctggagtgcagaagcgggagttgggatgcgcagcgggcttgccggaatccttggtccagggtttgcccaaccagtcagtgatttggacattgggagccagactgctttccatgccctcccagaacacaccgccatcagaggtggaggccacgttcgtgaagatggtgttcttgaaaacagtgttcatggcaatgggattggtctccattgaggttcctggagccacaccaaagaatccattctctgggttgatggcacgcagcactccctgcgagtcaaacttcatccacgcaatgtcgtcgcccacgcattccaccttgtagttggccaacgagggattcagcatggccagattggtcttgccacaggccgagggaaaggcggcagtgatgtacttcttctcgcccttgggatcggtgatgcccagaatcaacatgtgctcggccagccagccctcctgcttggcaatggtgctgccaatcctcagggcgaagcacttcttgcccagcagcgagttgccgccgtagcccgatccgtaagacacaataaggttctcggcgggcttgtgcaggatgatggtgcgttcgggatcacaaggccaggatggctgctccacctgtccgttggcaggggcgcccacagagtgtagggcgcggacgaattcctccttcttggccagctggcgcaagacagcggctcccatgcgtgtcatgatcctcatggaggccaccacgtaagcagagtccgtcagttcgattccgatcttagagagcggggagcccacaggacccatgctgaagggcaccacgtacatggtgcgacccttcatgcagccggggaatcgctgctgcactgcagcatccatgtcgctgggcgagatccagttgcccagggttcccttgacaccctccactggagtgggaatcgtctcctcccgccgctcggtgcagatgaaagtgcgcgactcgacgcgggccacatccgccggattggtgcgggccagccagcaattgtcgtacttgggcagcggcacaatggtgccagcctccaagaggctcttgatgagcaccttgttctcctgctcgctgccatcgcagatgtgcacctggtcgggctggcagagggcgatgccctcctccacgaaggcacggacaccggtggtcagcaaatccacatttccataggagatgggaatgccacggatgtggctgtacagaccgcaattgtcctggcgcagcttgtgcaactggggcagaccgcagacattgccggagctaaagagaaagagagagataaaagggaagtgggttattaaaattgcaatttaattaactgacttcgatagtgggaccccaaataatggactgcattaaaaattaattgccattaaaatcccccattgaatgcgtttcgagtgacctctttaatgtatacttacataattttgctttgttcaatgagctcaggcattttgtttgtgttgttttttatgaatttttctcgaaaaaaagtttggaatatttttattagatttttctgcgcgtgaaagggtttttggcactttgcttaattcgcttatcacaatttgagtaattatcacaattagtgttctactgtcgaggactttgcgttcatatgttcttccacagttttttgtcaaacatcaacttgattttcagaccactgaaagtaggcttttcacttgatctttccatttactctggccacgagtaactgatgccaactgctccgatccggggccttttatacccagccggcgacgcctggccatcgaggcgactagaacaagtcggccgatcgccacgcaaatcgggttttacgatcgcctcgccgagtgagagggtcaaactccggacgagctgattggctgccggcggaggctcggcgattgttttggtttttcacaggcggcgcagctacgatgagttggttgtgggtggggggggggggtctacggaatggggggcatgggcatacagatacgtatatggggtatgtccccacatggcaacagcagagtgttgttttcatgtggcgctgagagcgttttctagtgcgtttgcattgataagcgtttgttgttattttgaacaccctgatatttgccactttcgcgctgttaatttaattattctatttatgattttatgcgatacaaatgtggccgctgcgaatatagaaaccagttcacggacagctgaggcaacagcagttgttgtcccctgcagctgggtaaattctggatgtgtctatagctgcattggccacaaatatagctacattggtgcaacatcgaatggtgggccacatcacacgcgcccgcccacttacgcctgtttgaccacatgtgttggcctctcgtttttggacatttgccaaatcgaaaaaaactttcgcttatttgtagaatcggtgacggaaaatttgtatgctaatccgcccccctcgcggcatccagatgagccgggggcctccccaattggccatggccgccttggaggccagtattcacattcatgtgactctgggggcgcaccaagaatagcatggcccggatggttgtcatgtggccactcttgtttttgtctttggggaaggagaaatgaaggtgctgccggtggtgtgactttgtaccccgaatccagtttaccagaagacccagaatcctctgggtactcgaagaaaaagttcaacagaagcagtcgggaaagtt

SEQ ID NO: 22745 - DNA, 2481 bp, DROSOPHILA
ttactcgtggccagagtaaatggaaagatcaagtgaaaagcctactttcagtggtctgaaaatcaagttgatgtttgacaaaaaactgtggaagaacatatgaacgcaaagtcctcgacagtagaacactaattgtgataattactcaaattgtgataagcgaattaagcaaagtgccaaaaaccctttcacgcgcagaaaaatctaataaaaatattccaaactttttttcgagaaaaattcataaaaaacaacacaaacaaaatgcctgagctcattgaacaaagcaaaattatctccggcaatgtctgcggtctgccccagttgcacaagctgcgccaggacaattgcggtctgtacagccacatccgtggcattcccatctcctatggaaatgtggatttgctgaccaccggtgtccgtgccttcgtggaggagggcatcgccctctgccagcccgaccaggtgcacatctgcgatggcagcgagcaggagaacaaggtgctcatcaagagcctcttggaggctggcaccattgtgccgctgcccaagtacgacaattgctggctggcccgcaccaatccggcggatgtggcccgcgtcgagtcgcgcactttcatctgcaccgagcggcgggaggagacgattcccactccagtggagggtgtcaagggaaccctgggcaactggatctcgcccagcgacatggatgctgcagtgcagcagcgattccccggctgcatgaagggtcgcaccatgtacgtggtgcccttcagcatgggtcctgtgggctccccgctctctaagatcggaatcgaactgacggactctgcttacgtggtggcctccatgaggatcatgacacgcatgggagccgctgtcttgcgccagctggccaagaaggaggaattcgtccgcgccctacactctgtgggcgcccctgccaacggacaggtggagcagccatcctggccttgtgatcccgaacgcaccatcatcctgcacaagcccgccgagaaccttattgtgtcttacggatcgggctacggcggcaactcgctgctgggcaagaagtgcttcgccctgaggattggcagcaccattgccaagcaggagggctggctggccgagcacatgttgattctgggcatcaccgatcccaagggcgagaagaagtacatcactgccgcctttccctcggcctgtggcaagaccaatctggccatgctgaatccctcgttggccaactacaaggtggaatgcgtgggcgacgacattgcgtggatgaagtttgactcgcagggagtgctgcgtgccatcaacccagagaatggattctttggtgtggctccaggaacctcaatggagaccaatcccattgccatgaacactgttttcaagaacaccatcttcacgaacgtggcctccacctctgatggcggtgtgttctgggagggcatggaaagcagtctggctcccaatgtccaaatcactgactggttgggcaaaccctggaccaaggattccggcaagcccgctgcgcatcccaactcccgcttctgcactccagccgcccagtgcccgattatcgatgaagcctgggaagatccggcgggagtgcccatctccgccatgctcttcggaggacgtcgtcccgccggagtgcccctaatctatgaggctcgggactggacccacggagtcttcattggagcagccatgaggagtgaggccactgctgcggccgagcacaagggcaaggtgatcatgcacgatccgttcgccatgaggcccttctttggctacaactttggcgactacgtggcccactggctgagcatggagaagcgtggtcaggtgccaaagatcttccacgtcaactggttccgcaagagtgccgagggcaagttcatgtggcccggatacggagagaactcccgtgtgctggaatggatcctgcgcagggtcaatggcgaatcctgctacgtggactcggccattggacacattcccgccgagggtgccctaaacctcgatggcatgaaggataaggtggacgtgaaggagatcttctcgctgcccaaggagttctggtcgcaggaggtcaaggatattcgcacctacttcgagtcacaggtgggcgccgatcttccggccagcatttaccagcagctggacgagctatcttcccgcgtagacaacctgtaagaaggatcaatgaggagagtcccatctacagcatctttacctgcccacacacctgctcacccactgtgctatcccgtactgaccccatcaccaacccaatttgttaacctgtcctaaatacctgtccccaataccttatttagtcgtttctctagttcttaagccgaagacttccaaactatttattatataagcagccataagattagcaagtaggccatacaaacagagaaaattaaaaaaaaaataaaacaacacgattttataacctac

SEQ ID NO: 22746 - protein, 647 aa, DROSOPHILA
MPELIEQSKIISGNVCGLPQLHKLRQDNCGLYSHIRGIPISYGNVDLLTTGVRAFVEEGIALCQPDQVHICDGSEQENKVLIKSLLEAGTIVPLPKYDNCWLARTNPADVARVESRTFICTERREETIPTPVEGVKGTLGNWISPSDMDAAVQQRFPGCMKGRTMYVVPFSMGPVGSPLSKIGIELTDSAYVVASMRIMTRMGAAVLRQLAKKEEFVRALHSVGAPANGQVEQPSWPCDPERTIILHKPAENLIVSYGSGYGGNSLLGKKCFALRIGSTIAKQEGWLAEHMLILGITDPKGEKKYITAAFPSACGKTNLAMLNPSLANYKVECVGDDIAWMKFDSQGVLRAINPENGFFGVAPGTSMETNPIAMNTVFKNTIFTNVASTSDGGVFWEGMESSLAPNVQITDWLGKPWTKDSGKPAAHPNSRFCTPAAQCPIIDEAWEDPAGVPISAMLFGGRRPAGVPLIYEARDWTHGVFIGAAMRSEATAAAEHKGKVIMHDPFAMRPFFGYNFGDYVAHWLSMEKRGQVPKIFHVNWFRKSAEGKFMWPGYGENSRVLEWILRRVNGESCYVDSAIGHIPAEGALNLDGMKDKVDVKEIFSLPKEFWSQEVKDIRTYFESQVGADLPASIYQQLDELSSRVDNL

SEQ ID NO: 22747 - DNA, 3312 bp, DROSOPHILA
ccccgacatgggttaagggactaacgagcgttatacggagcgttggagcattcattggagctaagcaggatgcgaggcgaggggcgggcaggccaggattcggaatggattcgaagaggatgggatgggatgggttggaatggtactgcttgggatgggatgactacgcttcgatgccgacaggcaaaggaaaacaacttttgcgaaagttgtactcgatttgtgttctattttagtgctcctgctcgtcctcttctgcttccatttacatcactacttatggcaagctgcatcgcatgaaatgcaaatgtttatctgcaaggactcaaagtcgctggggatgaacatacaaatttcatggtaaactctctgatcgctcctgcaattgggataaaaggaagcaaggattcatagttcgagatacaaaaattatctaatcaattcaatttggaaaggttcttaaaaatgacgtaaacgtttaataccctttgttagtaagccgattttattttacagaaaagataacaagagcaaattgacggcatattagtttggcatgtttatgttgatgaataaaccaataataatcatttcaacgtaaaccaaaaattacatacaatcagatttttcaaaaaaaaaaaaaaacagatagaaacatattcatgtaaaaaaaacatatagccaataaaaaagccgaacaaaacgaagttcgtcaccattcctaattaagaaaacaaaaactttatgctgagcaacttaatcatcaaatgttaatgtcatcttgaactaaaaaaatgccagttttggcttttatcaaaattatgaaagtgtaaacaatcactgctttaactatcatctataacatttatttagaccttaaccaaaaaatatattcacaaattccacagaagtattcaaaataataactcatacacgtaatacccggcacttcaatacaacatccaaaatggaagccgccagtgaaagaaaaacccagattatggaaaagaggaagctcatgggcgacaagaggatgagcatgggaatgaagtccttctatgcctcggtaatgggaagcatttttcgtatgagcgatgagcagcggaacgcgtttgcagccatgtataggcgccacaaggctgacgcacaatatgttaacaataactacgttgatgatcccgtggaggagtacgtgcctatttatcaaaccgtattcgatgacgaccgggatcccgtgcacgagcccacattctctaaacaccgcatacccctgtaagatttccagccaaacttgttacggtcaaaatacttcttatttcattagtcagatacgttgtctggaacgttaccacaattccaagcgggagtacgccgatcagttcaagcgggaaatcaaacttctgatcgacaaccagtccacggcgcaggaggcttggcaattcgtaaggtaagctgaaaatctagatttagttacgcttaataataggtaataggtttgaaaagtaacaatccaatactcatttgattaaagcacgccttaggcaaacccttaattgatcagccactattcgtattagttctcttttaatttagtcctcactatcatttttatttcgctatttttagttataaataaagataaaaggattagaacctgcttccaatagaaatcggttcattgttcgactcccaagtaatgttctcagttcaagcttttcttcatgggtcacttcaatagattttatttgcttgtatttctatattgtttttgacaatgctgtcaagaaagtgttggaatttatccctagctctcccactagctgagtaacaagtatctgttagtcggggaaatcgagtataccgttctctattttgttattgttgttaatagaaaagaagacgttcattgtgcgtttcgtcacaattttttcgtcaaagtttttaatgtattgtgtttagctaaaatagttttgaaaagaatagatcaaaaacatattctttagcctcagtcactaataattgataaaactaaagattttgaattcaaaatactaaaaagtttttcaaagtttttcatttcttttgagccatatcatcttcaattgacaatcattagaaaccgtaaataccaacttttcaaattactttacttatttcccttttgattttcttacagaaccatggcctataccacactttggccgccgctgcacacaagaaaagagctcaagattttcgaattggacttttgcaagcttaaccctcaagagcagaagcgctataacaaaataatggcgaccaacttttcttagtctttaagttttaatatataaaattttataatttaaaaaaaaaatatataaaataataaaagcaacaaaagtgttgatgaaaacaatatcgttctgggaatataataattatcggaagccctcacagtatttcagtattttttatatatactttaaagtcatttagtacggcaacgttactaaaaatggcgtgattaacaaaaacgtgataagcaataaaaaaaatatatcaaacgaagttttttcagattccagattaatacacgcttccttaactttgtaaaggttgtaaaatatgatcaagttttggtaggtatgagtgcaaaaataaaatgctgtctgatcttaaccaaaagccttttgaataaaaaacatgaagactgtgcaaaaatgttaaattttgatgccacttgtaaacatgtgcgcattaaggagggtgttgaaataggaactcaaaatcacgaaggcacttaacaacgcaaatagtgaagctatttagtgaacacagactattatatgtgacataacaaccggaaattgcaggatgatatgaaaaaggtaaaatgcaacaacaaatacagataatcagtagcaagaaatcatcgaagtgtagcacggcaaaataggagttgacatgtatcttttaagaagacctaccgaaatttcaaacatcttgatccagccggccaaaaccgcatctctgtgcaataattcatcgatcgtgtcaacaaactagttagtgcctaccaatgggtcgagaagtctctactacttgcaatctgttcacgacacgaatccagcaaagatgtagctcgattcgtctcctgtgaagcgttgcagaagtacatttcaatatgggtaacgcctgttgtgacttgaggtatctcgcccttccatgaccaaaggagaaaaagaatccatgttgtgagaaatttcagaagccaaatagagtttgcaaagctacaaatctaagtggatgagtatttaggaattttacata

SEQ ID NO: 22748 - DNA, 531 bp, DROSOPHILA
atggaaaagaggaagctcatgggcgacaagaggatgagcatgggaatgaagtccttctatgcctcggtaatgggaagcatttttcgtatgagcgatgagcagcggaacgcgtttgcagccatgtataggcgccacaaggctgacgcacaatatgttaacaataactacgttgatgatcccgtggaggagtacgtgcctatttatcaaaccgtattcgatgacgaccgggatcccgtgcacgagcccacattctctaaacaccgcataccccttcagatacgttgtctggaacgttaccacaattccaagcgggagtacgccgatcagttcaagcgggaaatcaaacttctgatcgacaaccagtccacggcgcaggaggcttggcaattcgtaagaaccatggcctataccacactttggccgccgctgcacacaagaaaagagctcaagattttcgaattggacttttgcaagcttaaccctcaagagcagaagcgctataacaaaataatggcgaccaacttttcttag

SEQ ID NO: 22749 - protein, 176 aa, DROSOPHILA
MEKRKLMGDKRMSMGMKSFYASVMGSIFRMSDEQRNAFAAMYRRHKADAQYVNNNYVDDPVEEYVPIYQTVFDDDRDPVHEPTFSKHRIPLQIRCLERYHNSKREYADQFKREIKLLIDNQSTAQEAWQFVRTMAYTTLWPPLHTRKELKIFELDFCKLNPQEQKRYNKIMATNFS

SEQ ID NO: 22750 - DNA, 3194 bp, DROSOPHILA
tgtctgagccatcgccaccgcccccttatcgcaccccttgccgcacgccactggccactgaaatcctgttggcacatttcgttgtagatttttgatattttcattacgtgcatctgccagttacgcctcattgtgtgggtgtgcactcactgtatgtgcaccgtatatgtacatatgtatgtatgtgcacacatacgcatgcacatatatgggtcgggggttaaggagtacatagaatgtcgtacatgtgtcctggccttggttagttccattctgcccggatttcagtcgcttaatctctgctgacatttggtgaaacagcagcagcagcagcaggagcagcaacagcagccccagtgaaaagatacagataaagagcggtcctgtagctttacaagcttatgaatgcgaaaacaacaagaggatgtgcaaatctacaactcaactgggggtcttttcttttgccaagcagcctcgtcatccatctgagcccttttcatggaccaaatagtaagtaagtaagtgtttgttgaatgtttccttaataatatgccaaattccaaacattattttttttattattattatttccaaatattatgaacagtaactatattcaaaagttatcaacattattatttctcgcacagatcagtaaacgatgattgcctttggttgttctgctattcacatatccgcaaactatcagttctgtgtttcttctgtagtcctcgtatcaaatgtttttcacactataatcttttgaatatccatggtcttatcactccaccgacttgtttgtaaatttaactaactcctaattttcttcacgatccaaaatgtacgctccaggaaatattctcttgccttttttcatttcgtttgtagtttgttccaaatacgttttctccatatctcattctattttccgtgcttgccatcgattgattctttcccacttctgaactcttcatcctccactgatataccccatattcttttaaatcgatcttacagtgtaattatccttgctgcgcagcaactggatcttgggcaccgtgcgccagaagagaatggcaccacggttttggccaccgcgggcatagagatccgtaaggcagtcgacccagtgattgtagagcggcatgctcggtggctcacatgcggttaatggtgctccggttccggccatgcaggtggatgtcacctccagtggataggccactaggcttgccatcatctgaattaccgcggtgttatactgatgctggagttcgctcattggcaggagacgacggcaaaggtgactcagagcgctcgtaatgaaaaggacgctccactcgcccaaaaggcgtggcaccatgcccgcaaacagtcctgcacatccctcctgttgtgcaagagtcatcaggctgccaacgagaccctcataaacgtgttcaccacccacaaactgggctatctggcgcaccataaccacgtaaaagggatgtgttataaccactacggtggtaatgcgcaagctgttccttgtcagattccaccagaactccttgaggctcagtccctccttggggcctctcttatagggtgcaaagtgcaaggtagccagcagaagatcgccaagcaaatagtctactatgctggcggccaggcgagcggtcaacccacgatacattcccgtatagccatctatatgctgaatgtgctgcacataccgatggacactgggcaaaaagaggcgtggccgccgttgaatcagtcgcataacaaagggcttcgcctgaagcggttcatgtcccagttggataagaaccttggccatttcgtacggatacagcagggtgttgtagcccaatcgtaggcaaaagcgcaccagctgatttggtcggcgatgttcttgaatttttttggatagatgtgatgatgcgacaaccaactcggatccctgacagctttcctccgtgctgatcctcaactgatcccgatcaattggctgctgctggttggtcgacctcatcgctcgggaagggtccactgccagttccacaaccatcgccccagatcttgcatgctgcaccgccagcggtggtggggtggggtgtcgcatacgcacactgttgtctgcatcgccaccacctagacccaatccctctgcctggccatcacgacgattgtactccctgtgggccattatatcaaatcgttttcttgatatatcaatttcaattcgccaaaagcaaaaaactcgaatttagttgaaataactgatgatcgaaccgaatgccgtttcagttcgaatatactgatttttcataggcgaccttctgccttagagaatttgacaattgacattgtatccaaggctggctagatttaaaatattatttaaagaattccattgaaataaattgttattcattggattaatctttgcaatggcagctgccccaagttgtgcatttcttctccacttgataacaaatcgcgaaaaatggcagctcacacttgcctccattgatttcctcccctgccgacggctctcacttacttttgcaacatgaaatttcaattaggctcaccccgcagcccttttgctgtttttctggtcaattaaatgcaaccatattggctgctcctgcactctgcagcttcatcgctgccatgccctttgcacttcccgtcagattgcattttgttcattgaaagccgttaaaacctagtgccaatttcgaataaaatgcacagaatgcttaaaactcagtaacgaaaatatgacatgacctgcctagccataaatatagacgaaaaaaaaaaaccattactcattcgaaacaaaaaagcttagcagcaatttcgataatgaagggctaatattttactaaacctatataacaaagtaatacattcgattgttccccaaaacgaccttcaactcggtcaagaataattaattcccaatgcatatgattatcggattgccccacaacagcaaatttccactcacttagatgcccggctctgttgagtcagttgggttcggcctctctggagcatggaaaccaatcacacaacccagtgcccaatttaacccttttttcccccgccttaacccaccaaaacggcaatcgcatgcaatccattccgaccaagcgaccgaaagcaaatgcaacttatacgacacgcacagttga

SEQ ID NO: 22751 - DNA, 1194 bp, DROSOPHILA
atggcccacagggagtacaatcgtcgtgatggccaggcagagggattgggtctaggtggtggcgatgcagacaacagtgtgcgtatgcgacaccccaccccaccaccgctggcggtgcagcatgcaagatctggggcgatggttgtggaactggcagtggacccttcccgagcgatgaggtcgaccaaccagcagcagccaattgatcgggatcagttgaggatcagcacggaggaaagctgtcagggatccgagttggttgtcgcatcatcacatctatccaaaaaaattcaagaacatcgccgaccaaatcagctggtgcgcttttgcctacgattgggctacaacaccctgctgtatccgtacgaaatggccaaggttcttatccaactgggacatgaaccgcttcaggcgaagccctttgttatgcgactgattcaacggcggccacgcctctttttgcccagtgtccatcggtatgtgcagcacattcagcatatagatggctatacgggaatgtatcgtgggttgaccgctcgcctggccgccagcatagtagactatttgcttggcgatcttctgctggctaccttgcactttgcaccctataagagaggccccaaggagggactgagcctcaaggagttctggtggaatctgacaaggaacagcttgcgcattaccaccgtagtggttataacacatcccttttacgtggttatggtgcgccagatagcccagtttgtgggtggtgaacacgtttatgagggtctcgttggcagcctgatgactcttgcacaacaggagggatgtgcaggactgtttgcgggcatggtgccacgccttttgggcgagtggagcgtccttttcattacgagcgctctgagtcacctttgccgtcgtctcctgccaatgagcgaactccagcatcagtataacaccgcggtaattcagatgatggcaagcctagtggcctatccactggaggtgacatccacctgcatggccggaaccggagcaccattaaccgcatgtgagccaccgagcatgccgctctacaatcactgggtcgactgccttacggatctctatgcccgcggtggccaaaaccgtggtgccattctcttctggcgcacggtgcccaagatccagttgctgcgcagcaaggataattacactgtaagatcgatttaa

SEQ ID NO: 22752 - protein, 369 aa, DROSOPHILA
MRHPTPPPLAVQHARSGAMVVELAVDPSRAMRSTNQQQPIDRDQLRISTEESCQGSELVVASSHLSKKIQEHRRPNQLVRFCLRLGYNTLLYPYEMAKVLIQLGHEPLQAKPFVMRLIQRRPRLFLPSVHRYVQHIQHIDGYTGMYRGLTARLAASIVDYLLGDLLLATLHFAPYKRGPKEGLSLKEFWWNLTRNSLRITTVVVITHPFYVVMVRQIAQFVGGEHVYEGLVGSLMTLAQQEGCAGLFAGMVPRLLGEWSVLFITSALSHLCRRLLPMSELQHQYNTAVIQMMASLVAYPLEVTSTCMAGTGAPLTACEPPSMPLYNHWVDCLTDLYARGGQNRGAILFWRTVPKIQLLRSKDNYTVRSI

SEQ ID NO: 22753 - DNA, 2582 bp, DROSOPHILA
acttaattcatttttttccagaacaaatataagatgtttagactttgaaccctattaccgtcatggaagaacactgatttgatatacatataataattattgactgtttcataattttattatgcaaatcacaatagttcgttaaatgcggccacgcgcaatcaagacacttaacaatttaaaaaaaaacatagagctttccacaataatctcgatggatcagtagtaaatgcatttctggttgagagcaggtccgccaggtgacctttacagcttctcgatgagaatggaggaggctccaccgccgccattgcaaatggaggcgcatcccagctcgcccttcttcaggctgtgcgaaagatgggccaccagacgggctccggacatgccgattggatggccaattgacacggcacctccatgaacattaaccttggctggatccacatccagtttcttgatattggccaaaacgaccagggagaaggcctcattgacctcccacatggccacgtcttccttgcgaacgccggcacgcttcagtaatttgggaatggccagagctggggcaatggggaagtcaatgggatcggtctccgcatcctggaaggccacaatcctggccagcggcttaatgcccgccttctgggctgcctcggcactcatcaaaaccacggcggcaccgccatcattcaaggtggatgcatttccggctgtcacagtgccattttccctttggaaaacggtggccaactgtccaaacttgtcaaaattcacccgcttgtactcctcatcctctgagatgacgatctccggcttcctcttctgctgaatcttcaccggggcaatctcgtcctggaacaccttgttggcccacgcggcagccgatctcttgtatgattcaatggcaaagtcatcctgctgctgacgtgtgatctccagttttttggccgtattttcggcacagttgcccatgtggaacttgttgtacacatcccagaggccatcgaaaacaatgccgtcggtgagattgacgccgccatagggcgtggctcccctcttcagatagtagggaacattcgacatggactccataccgccggcaacgaccacatcagcatagccgagcatcagggattgggcgcccagcataacggccttcatgcccgacgagcacaccttgttcaccgtggtgcagcatacattggtgggcagtccggcgaagatggcagcctgacgggcgggggcctgtcccagaccagcagataccacattgcccataatcacctcctggacatcggtcttcgcaattccggccttttcgatggccgcctcgatggcacgggctcccaattgggtagccgtcagtggggccaattgactttggaagctgccaattggtgtgcgggctgccgaaaccaccacaacttcggcgattttggagctgtagttgcgatgggcgctccagcgacgcgtggcctgcagcagtcgggcggacatcttggaatttaattaatttgtattaactagcacagcaatcacacaggtaaatggcaagaatccaatcagaaatcacgccagacctgttgcttgcgtaacaaaccggtaatcggtctatcgataggcaacagctggcgcggtaaaagtgttggcaactgttaaataagattaaagcgactggtaattttctattagttagcattctttaaatgtaatttttaatttttgctgttttaagtatattgcttgaaaactacgctgtaaagatgcaatgctaagtttatatattctttttacaatacccagcactgaaaatgcgtaaattgaacttaacggttacaagcgaacaacaataaataaaaacacgaaaattgaaattttaaacacaaatgtatctcatttcatcaatatttattttaagactaatgcaaattgcacaatgaatggcagctgaaaaaactggaatcttaatgctaataatacgtgtttaaaatatggcattcaaaaaaatttttgcataaaaaaaatgtaaatatttcggaacttattccacatcacaacgctcatagtctccatggttgccatggctcctggactgcacatctttcctgatcaatttgatcagatcaccatctggtcgcgcgttgttagcttctgatggccagtggccaccaccaaagacctccgcatgcggttccgctgcagcgtggaattccgttccctcaccgattgccgcagatgctggcgacgtgctcctccgggtccagaaccaacgactccacctccgcttgcctccctctcggctgcattcatggccgccagcagctcgaaggcttgtttcttctgctcctttgtccagagattggccactggtggaacttctgccggctgttcctgcgtgatcggtggcttgacggccaaaggaggtcgctgcacgcgagttgcagctgcttgggctacctggttgaccgatggcaaggatttggatgtcgccttggatccgcgactcaacccgaaaagcgagagtatagatttcctgcgggtggaggaggcctggctgtcaccggaatcattgctggata

SEQ ID NO: 22754 - DNA, 1315 bp, DROSOPHILA
tctggcgtgatttctgattggattcttgccatttacctgtgtgattgctgtgctagttaatacaaattaattaaattccaagatgtccgcccgactgctgcaggccacgcgtcgctggagcgcccatcgcaactacagctccaaaatcgccgaagttgtggtggtttcggcagcccgcacaccaattggcagcttccaaagtcaattggccccactgacggctacccaattgggagcccgtgccatcgaggcggccatcgaaaaggccggaattgcgaagaccgatgtccaggaggtgattatgggcaatgtggtatctgctggtctgggacaggcccccgcccgtcaggctgccatcttcgccggactgcccaccaatgtatgctgcaccacggtgaacaaggtgtgctcgtcgggcatgaaggccgttatgctgggcgcccaatccctgatgctcggctatgctgatgtggtcgttgccggcggtatggagtccatgtcgaatgttccctactatctgaagaggggagccacgccctatggcggcgtcaatctcaccgacggcattgttttcgatggcctctgggatgtgtacaacaagttccacatgggcaactgtgccgaaaatacggccaaaaaactggagatcacacgtcagcagcaggatgactttgccattgaatcatacaagagatcggctgccgcgtgggccaacaaggtgttccaggacgagattgccccggtgaagattcagcagaagaggaagccggagatcgtcatctcagaggatgaggagtacaagcgggtgaattttgacaagtttggacagttggccaccgttttccaaagggaaaatggcactgtgacagccggaaatgcatccaccttgaatgatggcggtgccgccgtggttttgatgagtgccgaggcagcccagaaggcgggcattaagccgctggccaggattgtggccttccaggatgcggagaccgatcccattgacttccccattgccccagctctggccattcccaaattactgaagcgtgccggcgttcgcaaggaagacgtggccatgtgggaggtcaatgaggccttctccctggtcgttttggccaatatcaagaaactggatgtggatccagccaaggttaatgttcatggaggtgccgtgtcaattggccatccaatcggcatgtccggagcccgtctggtggcccatctttcgcacagcctgaagaagggcgagctgggatgcgcctccatttgcaatggcggcggtggagcctcctccattctcatcgagaagctgtaa

SEQ ID NO: 22755 - protein, 410 aa, DROSOPHILA
MSARLLQATRRWSAHRNYSSKIAEVVVVSAARTPIGSFQSQLAPLTATQLGARAIEAAIEKAGIAKTDVQEVIMGNVVSAGLGQAPARQAAIFAGLPTNVCCTTVNKVCSSGMKAVMLGAQSLMLGYADVVVAGGMESMSNVPYYLKRGATPYGGVNLTDGIVFDGLWDVYNKFHMGNCAENTAKKLEITRQQQDDFAIESYKRSAAAWANKVFQDEIAPVKIQQKRKPEIVISEDEEYKRVNFDKFGQLATVFQRENGTVTAGNASTLNDGGAAVVLMSAEAAQKAGIKPLARIVAFQDAETDPIDFPIAPALAIPKLLKRAGVRKEDVAMWEVNEAFSLVVLANIKKLDVDPAKVNVHGGAVSIGHPIGMSGARLVAHLSHSLKKGELGCASICNGGGGASSILIEKL

SEQ ID NO: 22756 - DNA, 9096 bp, DROSOPHILA
aacgtccttggagaaacctgatcagatggttgtccttggtccttggctcccccctcttacagtccccgtccccatttttgactccctttacgaaaagtccagttgcgaattaaatcgaattcgtctacacgcgttgccgtgattttcgattggtttatttataactatggacttgtttttctagttgggcctgataatcttcatcatcggcattaattgctggacccagacttggacttggactcagactctaactgcttcgctcctgttctcacctaaccgccacttggcgcatttcgatgattcgggcttatttggaatttacgtcaatagacgatcgattcgctaaatatatgcataatcaataatgcgattggttgagaagaaggcaatggggaggagggagccgggcgggttatcagtggacgagcctctgagttcgtctaaatatagatcagacccggatttgtgctgtcgaccaggaaaactttccgagggaaaacatcactatgaggatctttacattgcccatgaactattttaagggattcgatttcttagctattttgccttttggtttcttggcttattggctttttatcgctgttcaccccatagtgtacatcacaccacacgctttgaatttagtaatcagtccttggaaacccaccgaaaattgcaaaggttcacccataaactttactttctttttggctttttctggcatttatttgcttgtttttcatcgcgtggatctgttgataagttaggttaaacggcattatggatttatacgcttgtttacgccaattgcggacgggcctccgccgaggcgaccactgataagccccgtctaggccacgccccaaacccaatttcgatcccaattccattctcgaatgggcacaagtcaaatttcactataaaaatctcgttcgtttcgttttattttaggcaataaggggtcttagattaggaagtaacctatggaacacacacatcacatgtcagcaacacgcgccttcagctccctcagctcctcggccacggcacctggcagatggtggcccacctgctcctcgaagtacctctctatggcagccacctcctgctcccagaaatcttttggcagatcgaaaagctggtcgagatcaatgttttccaaactatccaagttcaatgaattcttgctgggcaggcggccaatgggagagtcctcgaagcactgctcgccctccacccgccggaagatccagtccaggactcgtgagttctccccgaatccgggccaaaggaacttgccctcactgctctttcggaaccaatttacgtgaaagatcttgggcacctggccacgctgctccatgcttagccagtgacccagatagtcgccgaagttgtagccgaaaaagggtctcatggcgaagggatcgtgcatgatgaccttgcccttgaactcagcggctgccgtggcctcgctcctcatagcagctccaataaatacgccgtgcttccagtctcgagcctcgtaaaccaagggaactccactgggacgacgacctccgaaaagaattgcggagatgggcactccttcgctatcctcccaggcgggatcaataatgggacactgagaggcgggtgtacagaacctggagttgggatgggcagctggctttccggattcctgggaccagagtttacccaaccagtccgtgacagtcacccccttcagctgatccttttccattccctcccagtagacacctccatcggatgtagaggccacgttcgtaaagacagagtttcggaagatcgtatccatggctatgggattggtggccctcgacgttccgggcgccacgccaaagaatccattctccggattaatcgctcgcagcacacccttgttatcgaacttcatccaggcgatgtcatcgcccacgcactccactttgtagccaggcagggtaggagtcatcatcgccaggttggtcttaccgcaagctgatggaaaggcggcagctatgtagatcttcttaccttgcggattggtgatgcccagtatcaacatgtgctcggccagccagccctctcgtttggcaatggtgctgccaatcctcagagcgaggcacttcttgcccagcagggagttaccaccatacccagatccataagatacaatctcattttctgctggcttgtgcagcacaatagtgcgttcgggatcgcagggccaggatggcattgcctggacaccacttttgggcgtacccacggaatgcaggcacttgacaaactgaccatccccagattgcagataattaagcactggattgcccgccctagtcatgatcttcatggactcgacgacgtatggtgagtctgtgatctcgattccgattttggagagaggtgagcccactggacccatgctaaaaggaatgacatacatggtgcgacctttcatgcagccggggaatctttccttgatcgccgcctgcatgtccttttcggctatccagttacccagcattcccggtgtggccttctccgtaaccggtactgtctgctccttcgaatccgttgagatgaacgtttttccctccactctagccacatccgccggattggttcttgccagccagcaattctcgtacttcggcagaggaatgatggttcccttcttcagcatgatgccctggagcaacttgctctcgacctcagtaccatcacagatgtgcaccctttccggttggcagagctccacgcacttttccacgtactgtttgacggcaggggtgaggatctttgcatctccatactgaatggagaggaagcgacaggtcaggcggaagttcgagttccggtgtggtgagaccaatctgaaagaagagccgtaaggttttatttataggggtatgcggaaaagatataagaaatggtatattaatatactttttgtatagtgtataaatatgtattctttcgaagaaatgttcaagattagcctggataaagatacggttgggtaaaagggtaaatacaattgtctacctatttattcagctaatgataacgaccttttcagatactctacctacatctaccgccagtcgtgtagccgactaaccgaaacgagcacaactgtaccccttggcggacctcgtaacgtgaatttcaaattctaagcggtaaggcacagccggtggaaaagagtcagcgccgcgaaagaaacgaatacaaataaaatccaaatacaaacagaaaagatacagccaaactggctgatcagctgttcgccgtctggtcgttcaggttttgtttggctccaccaatccaccactccaaactcgagaaacttgctcgccgcaattcgcacagagctctgcgatccagggaacgaagtcggatgggggttaccataaaggggtccccaagtcgatgcaaccttcgtgtagcggccagtccacgtcactttcattagaagcaggttcggacggagctcccccgacagcatgatgcaatctttcatcatctttttgcggcatgagcaactgctctttgggctctctgtttcggttctgcagataagcgaagagcaggtagtctggtcgtggtatcgtatctacatggtaacccttgtttccaggggaaatcgttgagatacatgtatacatatggctgtgggtcagaaacagttcgaacagttttcggtgtcactatcatatgccagacggctgtcggttacatggggtccaaagtccaatgatcccccgcctccgagtcaccagcggaataatcgcttacacgcgctcagggttgccccacttgtgacgtcagtcgattgtctggcgaaccgtagaaataccccccaaattaatgcatgttttatattttgaaactgcgcagttttctccatcacacgctctacatttgtattatagatgtctacatatatattgtagataggtatatcaatgtggcctggtctatattagcataagtcgtctgcatggtcggggcgtgtgtggtgaatgataaacgccagtgatgtctctccatgtctacggaattgccaattctgggtcccaagtagtagagaatgggcagttaggcagcttaattgaatgaaaatcaaaatttaattcaatcatattaactggcttttgttttgcggctttatggccagcgtctggcttttattgtggcttatgcgtgtgagaacttcagttaccagcctcggaggccgtgaaaccctagttaaagagctcaacgatatttatgacggcacttatactgataagtgggcatattggcaaaccgcttgaatccaaatcgtaccgctccagtatcgctgttgacaccagcagctaattatttggtcagcactcgagttgtcgctttggatttgattagggacacgcgtcttagttggatgctgagaatccgctgcgtatttgattctattttgggagataacagagagcgctcctctttcgaggaatttcttctggccttttgaaatggcaactacagaccatcctcccacctccctgttccctaatgacgccaccactgatgaccctcctattttggccataccaaatagcctgccaagtggcttcacagaatgtttcactactttggtacaacatgaatgagtaagcacttcaagtgtatttcccacttcatggactttctcttgttatttacgcattcatttgcgctttttattgcaaaaaatacgcattaaatacattcgtcgaattttcagccagcgcgtgtttcactgatgtacatgtgtgtgtgggtttttttttatacggaaaaagaacatatcagtctaagaatagtacggttagtgctatacgaaaatgtccacccaaaacacttggcaacagtcatgggggtgtcagctgattcaacagattttccacaaccaaaaactgtacttgcagtctgatgaaataaacgaaactggtttcatctgagggttcattagtcttgcccctttgcctcatattcaatgaaagaaccaacccagcgcccagtatctgaaattgaaggcgaagggcggccacaatctgcggcttatcagctggaggacccagtagaccatcgagaggtggggaataccattttatggatacttaaactagagatgggatacttttcataaaaccaaaacatgagatagatattgttaaattatatgtgagctacttaaagaggctgtgacgcgagatttgtttagaggaaagtctcctatcagtttcgcaaatgcaaagttttccgctgtgaaagattattatccgcgtcataatagctaaacacactttggttgcacattcccagcgaaactttgtttattattaaactgtttgattataacaaagaacaaaactcagtatgagtaattacactggtttccttgttctttaaaatacctttgttcccagaaatgccttttcccagtaaaatacgcagaaaatgcggtgggaaattcagtctgaactggattatacggcacacagtctggaggatgttttataagtactaatagaatgctcattaccgcatatcaaagtccacagagtggaagcaactaatttcgtattttgtttaccgactgataagcgattccagactgcccacgctttcatatacgagtatacatatgcacttgtagattaaagtgttccgcgagtcaaatactgtgtataaggtaatggttgaatgcgggtctggggtctggtctggtttattccatcggttacatggagtaaaatctgcttgggaaagcattgcgtgcaattggaattggtggcaagcggcttattcgatgaatgaaatgattcatatttgtagaggaaatgcaaacaaatcgtcattatattgggtaatcttatctagaagtttctgggaattctgggaaattgtggtaaacaaaccattaactgataggtaatcattagcagactatgagcctagtttccttcatattttcagcaaagcattcgctgatcgatggggccttccagaaaggcgcgtgggcctttcaactgataagcggtattaaccttttaccttaagaaattgtttttattcctcgcgtgcataaataatgctatttgctatggcaaattcgcaaacggaggctcggcctgaaaaatagattcagtggctcgcgtcgtcaacaataatattattcatttggtgttgtcacttcaccgacgccgctgtatctaaaggttatcatcaatggcagttccatggaacaaagaagtatctctcggatacctccggcccatacgcaaatgttatagtttagtgttacttgctgcacttggcctgtaagtgggtgggtttattgccaaaaagaggctacaaaaacacgccaccccatcaaaacagaagccaaaagtaaaaacagtcaacaggcggcgataacttcgagacattgttgctaggcggcctcaaaaacccatacatgcagcgctttgtttttattttgcccgcctaatggcgtcacacatacacaaaagagaggcagagccagttggacaacttgccagcgatcgcacacacacaaacacaagccctctcacactgagaaaatgagtcaaaacaaaactgcaaaaataataaaccgcctgtgggtgggagggtggcggtggagacgggaagcactgataaagaccgaaacaaaggaaacggcggcaatcgccaagcttttcattgaaaaaatcttttaaggagaaaagtgttgcataaacaagagcgcccacaaagaacttatgtggctttggtcaatcacctgtcgcctgaaagtaggcagtaaaaacgcttctgtgccccgaggaactgaaatatgtatttaacgaactatgcttaagctccaatgcacttaaagaaattaggcactttatataaacttataaatacaaatggtatttaaaagattaattctaattccatcatcgtcaaaaatattgcgacgaccaatgtatgttagcttcaaaatgatagtactttgcataagacataagcttttgccgagagcgcatctcttacccatgcagaccacaggcactgagagattaagaatatatagcgacgagtgcaatgatcttgggagctttatagatgacattaacattgatggcggtggtgttgttggggttgattttgccacttgtttacatgaatgaaagtgtaacggacgctctgcgactggcagagtgtggaattttcccgccacgcgataagaacgattcaatactattagcatgacattttagttgaggcaggtaagttactaggcaatagcatctactaagttgggttaaccttagggcgtgtaatccaagtagacgactcaatgctattaggcgatttgggatacccctctatttagaaaaggtgggtatattggttcggtgttttgcggtgtgagcatttcccttagataagtgttgtgtttatgaagtgccttaaaaatgattagattaattactgtcaaatattgtaaacaaaatatctaaagttgataagctgttgaaagaaacagctcataataggaatatcttcttgtttattttctataggctacacggtattagcctgttttaagcactcaagttaatggatttaccactcgactgcaagctgttaaagtatcccctttggggtttcgccatcctggaatcccgccaatccgacggtatccgaatccgaatcgcattagacttacccgcatcgcagcagctgtgcgcctttgagcagcattctgtcacctgttcgtgttggctttcactttctaatttcgcccgctaatactcttggcagctaatgcagttgcaattttatctccgtcttaattaatttattgcgctttgttgggccacagggttccgctgttaatttgatgaaattgcggacctaatttaaatttatctcagcctcgtctgcaatgcactggcttctggatgtcactggcgcacttgttgcgcttcgtattcagctacagccgcggcaacagattatgtttcggatttggattcaaattcagattgagatatagcggagcacttgttgctgctctggcacaacgagccaaactgactttatgcggcactcgctgcgctcaagtaacatgtgtgcgcagaccaccgagcattttgcttgggtctcagctccgttccctcgctctcatatgagaacgatcccatcccatccgatccgattcgattcgattcttgccgctgaagcatatggactatatgttttgctttcgctctgataagataagagcccacactcggcggccgttgcatttcgggctcgtgctacgtgccgcccactgcatatgcagcaggtgattgggaaaagctctgggaaactcggaaaacacgcccaccctttggcagcacaccggtctggcgggtcctattttgcaatgtctgcgctgttatcacaccaactgcgattattccatcgctgatcaaccgctatacacattaaaaagtaaaatgatatacagattatataagaataatgaacaattttaggaaacaaatattcaactggaaatattattatgttatattttgtaatttttggttctctttgcaaattattttctcttaccctgcacttttcttatcattttagccgtatcgtgcggcttccagttgggtacgagtaatatcgttttactaggtctatcaagcttatagaccagcacaatttacgatgctgctttccaataaaaccactaaccgaaaaaccaagttttgaaggtcatacaatgcaattccttcttcgacgcccttcgaagtctgattttggcaaggggccggactttttgaatcagatggttccaaagcaaaacaaaacaaatcgaaactttcccctgggcgataagcctaatcgggaattgttagctctcggtccaaggtgctttgaccagtggccagcaaaccaaatacaaaatattcgcctctctcagaaacccataaaaatcggaagattcgtctgccggggattaaacgtgccagctgtggtacagtggaactcccaaaaccagaaataaga

SEQ ID NO: 22757 - DNA, 2225 bp, DROSOPHILA
aacaagtgctccgctatatctcaatctgaatttgaatccaaatccgaaacataatctgttgccgcggctgtagctgaatacgaagcgcaacaagtgcgccagtgacatccagaagccagtgcattgcagacgaggctgagataaatttaaattaggtccgcaatttcatcaaattaacagcggaaccctgtggcccaacaaagcgcaataaattaattaagacggagataaaattgcaactgcattagctgccaagagtattagcgggcgaaattagaaagtgaaagccaacacgaacaggtgacagaatgctgctcaaaggcgcacagctgctgcgatgcggattggtctcaccacaccggaactcgaacttccgcctgacctgtcgcttcctctccattcagtatggagatgcaaagatcctcacccctgccgtcaaacagtacgtggaaaagtgcgtggagctctgccaaccggaaagggtgcacatctgtgatggtactgaggtcgagagcaagttgctccagggcatcatgctgaagaagggaaccatcattcctctgccgaagtacgagaattgctggctggcaagaaccaatccggcggatgtggctagagtggagggaaaaacgttcatctcaacggattcgaaggagcagacagtaccggttacggagaaggccacaccgggaatgctgggtaactggatagccgaaaaggacatgcaggcggcgatcaaggaaagattccccggctgcatgaaaggtcgcaccatgtatgtcattccttttagcatgggtccagtgggctcacctctctccaaaatcggaatcgagatcacagactcaccatacgtcgtcgagtccatgaagatcatgactagggcgggcaatccagtgcttaattatctgcaatctggggatggtcagtttgtcaagtgcctgcattccgtgggtacgcccaaaagtggtgtccaggcaatgccatcctggccctgcgatcccgaacgcactattgtgctgcacaagccagcagaaaatgagattgtatcttatggatctgggtatggtggtaactccctgctgggcaagaagtgcctcgctctgaggattggcagcaccattgccaaacgagagggctggctggccgagcacatgttgatactgggcatcaccaatccgcaaggtaagaagatctacatagctgccgcctttccatcagcttgcggtaagaccaacctggcgatgatgactcctaccctgcctggctacaaagtggagtgcgtgggcgatgacatcgcctggatgaagttcgataacaagggtgtgctgcgagcgattaatccggagaatggattctttggcgtggcgcccggaacgtcgagggccaccaatcccatagccatggatacgatcttccgaaactctgtctttacgaacgtggcctctacatccgatggaggtgtctactgggagggaatggaaaaggatcagctgaagggggtgactgtcacggactggttgggtaaactctggtcccaggaatccggaaagccagctgcccatcccaactccaggttctgtacacccgcctctcagtgtcccattattgatcccgcctgggaggatagcgaaggagtgcccatctccgcaattcttttcggaggtcgtcgtcccagtggagttcccttggtttacgaggctcgagactggaagcacggcgtatttattggagctgctatgaggagcgaggccacggcagccgctgagttcaagggcaaggtcatcatgcacgatcccttcgccatgagaccctttttcggctacaacttcggcgactatctgggtcactggctaagcatggagcagcgtggccaggtgcccaagatctttcacgtaaattggttccgaaagagcagtgagggcaagttcctttggcccggattcggggagaactcacgagtcctggactggatcttccggcgggtggagggcgagcagtgcttcgaggactctcccattggccgcctgcccagcaagaattcattgaacttggatagtttggaaaacattgatctcgaccagcttttcgatctgccaaaagatttctgggagcaggaggtggctgccatagagaggtacttcgaggagcaggtgggccaccatctgccaggtgccgtggccgaggagctgagggagctgaaggcgcgtgttgctgacatgtga

SEQ ID NO: 22758 - protein, 638 aa, DROSOPHILA
MLLKGAQLLRCGLVSPHRNSNFRLTCRFLSIQYGDAKILTPAVKQYVEKCVELCQPERVHICDGTEVESKLLQGIMLKKGTIIPLPKYENCWLARTNPADVARVEGKTFISTDSKEQTVPVTEKATPGMLGNWIAEKDMQAAIKERFPGCMKGRTMYVIPFSMGPVGSPLSKIGIEITDSPYVVESMKIMTRAGNPVLNYLQSGDGQFVKCLHSVGTPKSGVQAMPSWPCDPERTIVLHKPAENEIVSYGSGYGGNSLLGKKCLALRIGSTIAKREGWLAEHMLILGITNPQGKKIYIAAAFPSACGKTNLAMMTPTLPGYKVECVGDDIAWMKFDNKGVLRAINPENGFFGVAPGTSRATNPIAMDTIFRNSVFTNVASTSDGGVYWEGMEKDQLKGVTVTDWLGKLWSQESGKPAAHPNSRFCTPASQCPIIDPAWEDSEGVPISAILFGGRRPSGVPLVYEARDWKHGVFIGAAMRSEATAAAEFKGKVIMHDPFAMRPFFGYNFGDYLGHWLSMEQRGQVPKIFHVNWFRKSSEGKFLWPGFGENSRVLDWIFRRVEGEQCFEDSPIGRLPSKNSLNLDSLENIDLDQLFDLPKDFWEQEVAAIERYFEEQVGHHLPGAVAEELRELKARVADM

SEQ ID NO: 22759 - DNA, 12822 bp, DROSOPHILA; identical to SEQ ID NO: 1066

SEQ ID NO: 22760 - DNA, 3752 bp, DROSOPHILA
cgcgtgctcacgctctctgttgcagcagcaaaaaccaaaaaccctcgaaaagaacaacattgactcgaaaaaaccgaaaaataattataattgtacttgtacttgtgtgtcttttgtgaggtgagcaaatgcgctgacagaaacgggaacttttctacttttctcgcaggctgctgtgagaagtttgtcaaacaaacacgagtttttccgaaaaactatatttggcaattctacaaattctacaaaattgtattgtttacccttattattgtttttgggtcgttgctggttatgtatcgtagtttgttttttttgaagtgacaaaacaaccgttaaagcaaaatttatatcgagcaaatagaggaaacccacaaacccaagcgaaattttgcagtgtacatcaacaaccgagattggagtgcgtttcaataaccgtctcaaaagccgaagagcagaaagcgtaaataaaccgcagaatcccttgtaatggctctactccgttcgctgagcgcccaacgaacagccatcagtttggtctacggccgtaatagcagcaagtcgagcaattccgtggccgtcgccgcctgccggagtttccatcagcgcggcagcgggagcaccagcatcgccggagaaggagcagcatcggagtccacgagaggagtcaatggagcgcgcttcctgcacagcggcgaccggccgctgcaggcctccactctggtccaaccggaggtggtctccagcgagacggtgaagcgatcgatgaagcaggagtcgtcccaggaaaagaacccctcgcccgctggctcgccgcagagggatcccctggacgtgagctttaatgatccgattgctgctttcaagagcaagaccactggagagctaatacgcgcctatctcgtctacatgatatgttccagcgagaagctggtcgagcacaacatgacgcttatgaaatggtcaaagaacgtattgggtcaacggttatttacattattgatgaaggcgaccttctatggccactttgtcgccggcgaggatcagatcaagatcatacccacactggaaaggctaagatcctttggcgttaagccgattctcgattattccgttgaggaggatatcacccaggaggaggccgagaaacgtgaagttgaatcttccgtctccagtgcaggcgacaaaaaggaggagggcagcatgccgcagtaccatgtggacaagtcctttgcggatcggcgctacaaggtcagcagtgctcgcacctacttctacttgaacgaggccacctgcgagcggaacatggagatcttcatcaagtgtctggaggctgtttcgggcgccacctttggaactggcatcaccgccattaaactcaccgccctgggccgtccacaattgctgctgcaactgtccgaggtaatcatgcgcacacgcaagtacatggaggatatggtgggcggtcagggcaatgtgctgactcaccacaagaccatcaaggatctcgaaaagtattacgccacgctgggcgacaataaggacgtcaaggagttcctgaacaatgtaacgtccgataaggagggaattttgcatttgttcccctggtcgggcattgttgacgaggactcgcagctgagcgacacgttccgcgttcccgatccccaaaccggacagatgcgtcgactgatctcacaaataccgcccaaggaggaggagatgttcaggaacatgatccgtcgtctcaacacgattgtaaaggctgctgcggacttggatgtgcgtatcatggtggatgcggagcagacttacttccagccggccatctcccgtatcaccctggaaatgatgcgcaagtacaacaaggacaaggccattgtctttaatacgtaccagtgctatctgcgcgagacgttccgcgaggtgaacaccgatctggagcaggccaagcgccagaacttctacttcggcgccaagctggtgcgcggtgcctatatggaccaggagcgggaccgtgccaagtcgctgggctacccggatccggtaaatcccacgttcgaggccaccacggacatgtatcacaggacgttgtcggagtgcttgcgacgcattaagctgatgaaggactgtgatgacgatgccaggaagattggtattatggtggcctcgcacaacgaagacaccgtacgatttgccatccagcagatgaaggagatcggcatctcaccggaggacaaggtgatctgcttcggccaactgctgggcatgtgcgactacattacctttccactgggtcaagcgggatactcggcgtacaagtacataccatatggcccagtcgaagaggtgctgccctacttgtctcgtcgtgcccaggagaacaagggtgtgctcaagaagatcaagaaggaaaaacgcctgctgctctccgagattcggcgccgtctgatgcgtggccagttgttctacaagcccaagggcaattacgtgcccatctaagctggcctagatggatggaatcactctcacccacacacatccctgaggcggcaaatcggttgccaattatatccggctgaggatatcgccaggaaatcgatcgcttcggacctattttaatgtttttttttgtcgttcttattactctaacgaaatttccgtatattcaaagtatatacatatataaaaacttgtgtatataccaagatcctataaaagagcggcaatgtgttgtcctgcgaatccgcaggaccttcttcgcccacaaacaacttcaattagagacggtagcactgagcggtggtaatttttgatgaaaatatgtatatttttacgtcatgttgcaacaataatctaaacaagttctgtatgtgtgttacaaagaaaaaaaaaatagaaaaaaaccaactgaaaaacgtcaaaaaagtaagaaagcgaatgtgggacttccacaacgaggattttgaaaaaggggattgaattgaagcgaacattttttagcatcgtaacaaataaagcataaaacgtatggtatatacatattatatacaatataatgagagcaaacgtttatagagatatgtctacatagatacatgtatgtgtatggctgcattttagtctagattcattaacttcgtgattgtgcctgttcctcagtatcagtttatcagttgttagttgtccattcttcatttgcaatgtgatttcatgttcgttttccctaagttataccataaactatatatttatatagagcaatggcagcgagttatggagtgtgcagagcatttgttcctccatctcgtggccatccgatctaaaatagtcaaataatactgttcataggagcctgggatagccaaccgcgcatacctatacctaaacctagcgagttttattacgattatgctaaattaacttaaatgtttacgtttaatttagcacttaacggagcgatattataaaagtcattactatgatagtcgatggattagagcccgctacaaaaactctccccctattttcaatacgtttcaatatccatatctgatttcgcgtttcgatttctcagacaacaacagatatagacagtcagacttggccatatactaagccgcgcagatcgaaccgactagtttttcattattaccctcatgattattattgtattgcataaacgctataaataaatgaataaataattgtatgaatgttaactatttcaatgacaataataaaatgttaaaaacgaa

SEQ ID NO: 22761 - protein, 669 aa, DROSOPHILA; identical to SEQ ID NO: 1068

SEQ ID NO: 22762 - DNA, 3124 bp, DROSOPHILA
tcatctccgttaccgcggcctcgattttctggcgctgttgctggatcattttgcttgtttaattgttaattacctacgtcttacaaccgatttcgtaatatcaaaataaatgccggcagcgtgttttttgtaatattcgattagtgatgagccgacgcagctgctaataatcgattagcagtctatcggtgccgctcttcttctttggttttccacttggttttggttttcttgtggatatttttgagcaatattaaattaaaaccatgtcgctcttgcaaaaactaagcagatctggtgtaccgatggcttcattaacctgtcgttcccgaatgccaatggtcattcgacttatcagcggtaacacagaaaaaccggcggaggaatctactcccgcagtgaatacggaaacggcggagattggcagcagcaagggaggattcgcccgtgccttcgacaagtacacggcaccagccacgcctccacagctgccggaagacaaccagaccttcgcctccctgctgcgcaactccaaattaattgatgtgggtacattatttaagtaatcccattgtttatgtaataacttgttgatttctggagcagctggacaacgccgagggcaaggtggtcagtggcaagatctttcatgtggtgggcgatgatctctacatagactttggttggaagtttcactgcgtctgcagtcgtccaacacgcaatgccaggtgagttcaatataatttcctgtctctttatccaataaaccgcctttcctacttcagcgactatgtgcgaggagcccgtgttcgactgcgcatcaaggacttggagttgtccaccaagtttctgggttcgtccaaggatattaccattctagaggcagattgccatttgctgggtctcctgtccacgcccacccgccagtcgacggccaaaacaacgccgaaaatcgaagatatcctataaatcctttattaaaaccaaggtttgttaaacgttacgtcaagtcttcatcctccttggttgtgaactggaacacttcgtagtgatggttgagttcccgcaccgaatgcagttggaatctcgtggctagagctccgttttcagagttcttaacgaaaaatactcttttcgccctgctatgtaccagggccatggagcacataaggcagggttcctgcagcagatagatatcgtagccggtgcacagatagggtccgaatttggccaggttatctgctccttgaactgcgtccacttctttgcattctctcgacttttccgctccgaatgtcaggtctttgtagtcttcattgttcatcaggtaatcgtagtaggctttaggaataccccgcagagtggtatccttcttgaaatcttcggtgaatgtaacctccgtttttgtggcgcctccttcttgactgcgagccacaaaatcgacgagcatcatgcagcagtgctcgtgcggcctacaaacttcaccagttccagcaatggacacaatgctgggttgtcgcggatccacgcagatgcccaccggacgattggcattgacatcccgcgagagcctcacaagcaattgcccgatccttttgtgaaatgtgcgttgtgcggagctaaagttgctgccattcctcagtgactccgagtagtgattagggtgaaacttgcagggccagtgcttaagggtcttctcgtactgcacccgcagtcggggcatccgttccggcacctccaccacccggactccctggcacaaagcacggagcacgtgctccgaaaaggcaaactgttcaaggtgttgttccaggctttgagacactccgatctctgagctgggacatatgagcacgctgcgatcctggacgcgctttaggtgttgaaagtggggcaatttctgtgagagctcctggatgaccgcctggagctgctgtttcgtctccaactcgcaactgtgcgccttgatgagcgcaatatcctcgtcgaactcatcggagaggatggcccggatcccagttatgtcttcatccagattgggtgattttcgagcacgtttgtttggtggcgcggatatatccattatttacttaattcttcaattagaagaatgccaattggaatcgattgaaataggttatcgataagtgccaagcgctggcgttgaaacagctgtttggatattaagcgccaactttgaaaaatgtcttctatttaaaatatgcatttaaaaataatttagtgaaagattatacgtttaaaagtctttaaagctatttagcttgggagctgtttcaaatatttcctacttttgatatacattccctaatacttaatctaatcagctcaataatctgatcaattgtctaatttgcattataattccttacaaccaatatcttttttgatgtctacatgtaagcagtgcccagtctgatacccaaagtttaaattcaaaattccagtgaaatatgtgcttgtgatttctagtcaaaacttagaggaaacatcgaaatgtgtctgcgcttgttttgcggctatttgtcgctttacattggctgcatcttcatcggcttcacggggatgcttctagctttaatggtcttttctgtgggtctattcgagatgatcaagggcaatccggaaacagtgcttgtggtcatggcaatggtctttggcattgtccaagccctagctaaaattcttcttctcctcggaacgatgtgggtaagtgaatacttttatccttaaatttgtaaagatatccaatcgctgttctacaggacatgtgctgggccatgctcttgtccttttttataggtattgcggccctggggctcctcatcgcacttgtggtgctcttctacatcctcttgtgggaccctctgcacctccttctgggcggttttcttagcatacgtaagttggtgaaaaaattttgaatttcttttggatctgaaaacaaaagaagatagagaagtagattaatacattaactatcgagaacttctttctataacacacacacaacatataacacaaacaagcaacaaaacgtagtggacttaaaaagtacataaattctattcacgttcgatttttaattaaaataatatttttctct

SEQ ID NO: 22763 - DNA, 1124 bp, DROSOPHILA
attccaattggcattcttctaattgaagaattaagtaaataatggatatatccgcgccaccaaacaaacgtgctcgaaaatcacccaatctggatgaagacataactgggatccgggccatcctctccgatgagttcgacgaggatattgcgctcatcaaggcgcacagttgcgagttggagacgaaacagcagctccaggcggtcatccaggagctctcacagaaattgccccactttcaacacctaaagcgcgtccaggatcgcagcgtgctcatatgtcccagctcagagatcggagtgtctcaaagcctggaacaacaccttgaacagtttgccttttcggagcacgtgctccgtgctttgtgccagggagtccgggtggtggaggtgccggaacggatgccccgactgcgggtgcagtacgagaagacccttaagcactggccctgcaagtttcaccctaatcactactcggagtcactgaggaatggcagcaactttagctccgcacaacgcacatttcacaaaaggatcgggcaattgcttgtgaggctctcgcgggatgtcaatgccaatcgtccggtgggcatctgcgtggatccgcgacaacccagcattgtgtccattgctggaactggtgaagtttgtaggccgcacgagcactgctgcatgatgctcgtcgattttgtggctcgcagtcaagaaggaggcgccacaaaaacggaggttacattcaccgaagatttcaagaaggataccactctgcggggtattcctaaagcctactacgattacctgatgaacaatgaagactacaaagacctgacattcggagcggaaaagtcgagagaatgcaaagaagtggacgcagttcaaggagcagataacctggccaaattcggaccctatctgtgcaccggctacgatatctatctgctgcaggaaccctgccttatgtgctccatggccctggtacatagcagggcgaaaagagtatttttcgttaagaactctgaaaacggagctctagccacgagattccaactgcattcggtgcgggaactcaaccatcactacgaagtgttccagttcacaaccaaggaggatgaagacttgacgtaa

SEQ ID NO: 22764 - protein, 360 aa, DROSOPHILA
MDISAPPNKRARKSPNLDEDITGIRAILSDEFDEDIALIKAHSCELETKQQLQAVIQELSQKLPHFQHLKRVQDRSVLICPSSEIGVSQSLEQHLEQFAFSEHVLRALCQGVRVVEVPERMPRLRVQYEKTLKHWPCKFHPNHYSESLRNGSNFSSAQRTFHKRIGQLLVRLSRDVNANRPVGICVDPRQPSIVSIAGTGEVCRPHEHCCMMLVDFVARSQEGGATKTEVTFTEDFKKDTTLRGIPKAYYDYLMNNEDYKDLTFGAEKSRECKEVDAVQGADNLAKFGPYLCTGYDIYLLQEPCLMCSMALVHSRAKRVFFVKNSENGALATRFQLHSVRELNHHYEVFQFTTKEDEDLT

SEQ ID NO: 22765 - DNA, 3097 bp, DROSOPHILA
tttatttttattgttttcggagctttcggcgacaatttatgggccagcggaatacaaagatatttatgttggttggtcttgagcgaataaaatggcgaaacttatgtatatggccagtcggaactttattttatttattttatatttttatattttccttttcaatgaaaagtgcaggggcgaaagcaatgcgaaaatggtgggagcaagagaaaagcggagaaaatctacgtagtacgtacacggcattcaatgagagtgaagaacgaataatttactttccttttccccggctaagcatccagcattctatcttattttgcactaaattttaacaggatttagccccgtcactctttgctgtcaactgctaacaagcggcaaagacgtcggaggttttgaccagccgagcgattcaagccaagccaaacttgttggcccaaaggggggtccattcaagggtgcggaggtgggctgagttcgttggttggactgagggagcaggtggactgagcggtgtgggcgtggcatcgtgtccatggcgaatgagttttgtcgcaaatccgcttacgtccacaccgccgctacgaaaattgtgatggcgcttctgatggagatgacgatgacgacaaccaagatgatgctgatgacgatgacgatgatgatgatgacggccttcactacaccccattcacgcccaaccccaccaccacccacccttggagccattttaactggcacataaataaattccataaatcttttgcactttaacgcttctgctttaagcccagtcaagtctgggctaaagtcggatgtggattttgtggaaagtgcggagctggaagattatcctcacatatataaaaaaaatagtcttaagcgctaaatatgtttaatttcactaatactattacaaacaaaaaacacttcctttctaaaaaatgtcacagtatattataaaaatttttcgttgtatgtttagtacaaataaaatcgaatacgatggccgtcttaactactcacgaaatagattgcattataaaggagctcacatccctgaatggaagtgagtgcacattaaaggaggaactaatcgagagactcattcaacagactcgtgaagtgatcaaatggcaaccgatgctgctcgaacttcaggctccggtcaatatatgcggcgatattcatggccagtttacagatctcttgaggattttcaaggcatgcggctttccacccaaagccaactatttatttctcggtgactatgtggaccggggcaagcaatcgctggaaacaatttgcctgctatttgcttacaaagttaaatatccgctaaatttctttttgcttcgcggcaatcacgagagcgccagtataaataaaatttacggattttatgacgagatcaaacgtagacacactgttcgtctgtggcacagtttcaccgattgcttcaactggcttccggtggccgcattggtgggcgagcgcatcttctgctgccacggaggactgagtccatcgctccggaatttgcaacagatcaatcatattcagcgacccactgatattccggatgagggtatcatgtgcgatctcctttgggcggatctaaatcacaccaccaaaggctggggtcacaacgatcgcggtgtgagcttcaccttcgataaggtcatagttcgggattttcttaaagccttcgacttgcaacttatggttcgcgcccatgaggttgtggaggatggatacgagttctttgccaaccgacagctggtcaccgtattctcggcccccaactattgcggtatgatgaacaatgccggcggagtgatgagtgttagcacagacttgatctgctccttcgtcattattctaccgtgtcacaaatacaaaatgattgcgactgatgccaaccaaatgccgactaacgaagaggagtgattttgtttttcatacatgtatatatcacttcgtgcaattaaattcgtacaataacaattctttttatgtagctgatatatcaaatatatatactatatatacgttcacatttaaatatttaaccagaaaataaaagacattagttactagtattccattgcatttctaagtctttcaaattaagcaaacaaaacagtagcaatataaattactcggaaatttgagcttccctatgaatacttgaaaataaagtgacttcaaattaaattttatcatatttgaatatttgcccgaagtcaactccttgttgacttgcacaacttcatagcaattgaaggtcaatgtgaggtagatttcccatccgaatctccgactgacccacttcctgtgtcacctggcaggactggacggactggactggactgacaggtggcttcaacacgcttgtttcgccatttcatttgcagctcgttgctgtgctgctcggccaaatgaattttatatggctcttaagttggcccagacttgctgccagattgagatgctgattctgatgcttatgctgatgctgaagctgatttcctgatgaggaggcattctgcagcttagcctcctgtccaaggttcgctggtttggtcctcgtgcatgagacaacatttatttgatctggcaaaagtcgcatggcaaacaggcgagtgtgtgtatgtggacttggacttggacggactgctcagtgttgcatacgaaagtatctccgtctggttgctgcacgctcgaataatttaatacatcctcgccctccctcgtcctgcagcaggatgttctggatccttggcatttggaatgcacacagcgtgccatttgactgcaatttaatgctctctcccgaacagtttactcgtcctgttccaactgctgccatttcatgttttgcaaaatgacaaatcacatttatttattttgtgtaagccaactgagcttaaatatgctgtcctgtgacagttggattcagctgcaagccggttgtgcaccgagtttttggatgtcaatcctaagggttaaggctcagacataatcgaatctggagacagtagttttggcattccagaaggagaccccactgagtaattggctgagaggacagagt

SEQ ID NO: 22766 - DNA, 1097 bp, DROSOPHILA
atacgatggccgtcttaactactcacgaaatagattgcattataaaggagctcacatccctgaatggaagtgagtgcacattaaaggaggaactaatcgagagactcattcaacagactcgtgaagtgatcaaatggcaaccgatgctgctcgaacttcaggctccggtcaatatatgcggcgatattcatggccagtttacagatctcttgaggattttcaaggcatgcggctttccacccaaagccaactatttatttctcggtgactatgtggaccggggcaagcaatcgctggaaacaatttgcctgctatttgcttacaaagttaaatatccgctaaatttctttttgcttcgcggcaatcacgagagcgccagtataaataaaatttacggattttatgacgagatcaaacgtagacacactgttcgtctgtggcacagtttcaccgattgcttcaactggcttccggtggccgcattggtgggcgagcgcatcttctgctgccacggaggactgagtccatcgctccggaatttgcaacagatcaatcatattcagcgacccactgatattccggatgagggtatcatgtgcgatctcctttgggcggatctaaatcacaccaccaaaggctggggtcacaacgatcgcggtgtgagcttcaccttcgataaggtcatagttcgggattttcttaaagccttcgacttgcaacttatggttcgcgcccatgaggttgtggaggatggatacgagttctttgccaaccgacagctggtcaccgtattctcggcccccaactattgcggtatgatgaacaatgccggcggagtgatgagtgttagcacagacttgatctgctccttcgtcattattctaccgtgtcacaaatacaaaatgattgcgactgatgccaaccaaatgccgactaacgaagaggagtgattttgtttttcatacatgtatatatcacttcgtgcaattaaattcgtacaataacaattctttttatgtagctgatatatcaaatatatatactatatatacgttcacatttaaatatttaaccagaaaataaaagacattagttac

SEQ ID NO: 22767 - protein, 314 aa, DROSOPHILA
MAVLTTHEIDCIIKELTSLNGSECTLKEELIERLIQQTREVIKWQPMLLELQAPVNICGDIHGQFTDLLRIFKACGFPPKANYLFLGDYVDRGKQSLETICLLFAYKVKYPLNFFLLRGNHESASINKIYGFYDEIKRRHTVRLWHSFTDCFNWLPVAALVGERIFCCHGGLSPSLRNLQQINHIQRPTDIPDEGIMCDLLWADLNHTTKGWGHNDRGVSFTFDKVIVRDFLKAFDLQLMVRAHEVVEDGYEFFANRQLVTVFSAPNYCGMMNNAGGVMSVSTDLICSFVIILPCHKYKMIATDANQMPTNEEE

SEQ ID NO: 22768 - DNA, 2922 bp, DROSOPHILA
ccaccgtgaatcccgcaataaagtcctgcatgatgtactccaatcggtaacgaggtagccacttcaggatcgggaacttgttggtcacggtggacggacggcacagcttacgaccgccatccctaataagcgtgctcacattgggcagttgctcccggtacagattatctgcgaattcaaaacaagccttggataaggagtatttaagtgtgccaagataacccctccccgtgcggggctaatcttgcctggcagcaacttgttcgcacatctgtcgatcagtgttttatattgactttgggctggtcatcttatcgccagacaacctgggctaccccacgcagataaggtgcattcagatactcttttatgaattggcacgtattttatacgattacagcccccacaatcgctggaaacgcatcaaatcaattgaccctgatcgccgcgatcgctgcttccggaaaaacccctggagcagttactcaccctcatcggctctcatcgcgggtggctctccagctttaaaccgggctgtagttccgagaacgatagggaaaccggctgcgatgcaaaggcaatggctgtaatcaaaaccggggagctaacgcgtccgctcagtgtgctgctccaaacgcgactgccgctccgatcgccgtcgtccaacggctttagagaccgaaagcaatcgcgttcgcacattctggccatataagatttacaagcgcaggtaccggtgccgccatatcatgttcgctctgttagtccgttgataaacaattacaaagacaaccttaatatttggctaatgacatggccggcttatttatataaagaaaataattacaagctaatgagtggaggaattttgttgattgttggaactacttctcgctgctcttccagattttaatggcatatgaattttgtagggcgccgctagcaatcacatttgccgtgggatggcaatgtgtgctcaaaatctggtcgccctccgtgcttatcttttgcaccagctccctcgtctgcagattccagatgcaaagcgtattatcctcgctgccggagacaatccaaatgccgccggtggtggaaaaattggagttggagcaatagaactcattcaaatgcccgcgataggtcctcatgcacttgggcttcttgtagttccatagcctaagggtgttgttcaatgtggacgacaggatgtagcgtccgttcggtgagaacttcacatatccgaccgggatgttgtcaacgtcaacgagagtcttcagcacatgcccggtgctagagtcccacaagcggaccagcccatcatagctgctggtgacaaaaatattgccatcgcggtggaagtccaccgatgttatgggatcctggtgggcgtggacgattttgagcgttttgccagtgcggacatcccaaaggcgcactgtttcgtcaaagctagtggaggccagcagattggcctgcggattaaagcagcaggagaaactgtacctggaatgcccctccaaaactttgacgcagagcttgctgcgggcatcccagagacgcacggtcatgtcatcgctacaactggcaattaatccagccgccgaccaggcgacatcgttgactccgtctccgtgcccggccagcgattgaatgcatcgggttgcgctcaagtcccagagcttaagcagcctatcgccggagctgctgaccaagttctcgccattcgaactaaactttagaccagtaacgcaaccactgtgaccgaggagcgagtgcttaatggcgtagcccggagacatggagttctccaaatggaactgacttggtagcataggcatcttaaaggaatcgaaagcggcctccgggatggcgatttcagtttcggaatctccaggagtcgaagctgtttcaatcaattccataattttatttttttcgcccaattttaatttcttacgaatcctgcgaaaagttcgaaaacttggcgatgatggtgacagttcctgagttgacaaaagcttgctgatattttgtaaaaagggttttcatttcatcatttacccgattatttttggcgcccagttttaagtttttattatttttttaaattaattacctacaaatgttgagtctgtttttaattatcgcgagaaaaagtacacacgtactgataattcattaaacacttttttacaatatttgtctagtacatacaattgttaattgtttctacaactacttataactcatttagtcaatatttgtttgaattcccagacagggggcgtaaaaaatcagactggaaaaagtaaacaagcccaattaatttgcgttttaagggagtacttatttggcgacagggtgctctatttgcgcagcctgttattgttatgctgtccagacttgttaaccaaacattaaacaaatggccggtgctgtgccgtgccggcaatttgtcacctaattatttgtcgacgctgctaatcttacatatgggcaaaattggagaatgcgcgataatcaagtcagtgaacttaatatttgcatggtaatttaacagacttaaagtgaatttttaacttaaattttagtaacatttggattttaactgcacatatatgcctttattattttataaagtttgaatcaatgaatttttatactaaaaatgtgtgctagtactagaatgaattgaaattatttataataactggaacgtgttgctatcgatttttttttgtcaaaatttatcttttttattaaaaattgaatttctacattaaatgttattgatggtattttgtaacggctaattcaaatgatcaacggtcacactagccagtggagctgccagctatcatttgaaattcaagtaaagttggcagccccctggcgtctgaaaaatagcgcgaagtgaagtaa

SEQ ID NO: 22769 - DNA, 922 bp, DROSOPHILA
atggaattgattgaaacagcttcgactcctggagattccgaaactgaaatcgccatcccggaggccgctttcgattcctttaagatgcctatgctaccaagtcagttccatttggagaactccatgtctccgggctacgccattaagcactcgctcctcggtcacagtggttgcgttactggtctaaagtttagttcgaatggcgagaacttggtcagcagctccggcgataggctgcttaagctctgggacttgagcgcaacccgatgcattcaatcgctggccgggcacggagacggagtcaacgatgtcgcctggtcggcggctggattaattgccagttgtagcgatgacatgaccgtgcgtctctgggatgcccgcagcaagctctgcgtcaaagttttggaggggcattccaggtacagtttctcctgctgctttaatccgcaggccaatctgctggcctccactagctttgacgaaacagtgcgcctttgggatgtccgcactggcaaaacgctcaaaatcgtccacgcccaccaggatcccataacatcggtggacttccaccgcgatggcaatatttttgtcaccagcagctatgatgggctggtccgcttgtgggactctagcaccgggcatgtgctgaagactctcgttgacgttgacaacatcccggtcggatatgtgaagttctcaccgaacggacgctacatcctgtcgtccacattgaacaacacccttaggctatggaactacaagaagcccaagtgcatgaggacctatcgcgggcatttgaatgagttctattgctccaactccaatttttccaccaccggcggcatttggattgtctccggcagcgaggataatacgctttgcatctggaatctgcagacgagggagctggtgcaaaagataa

SEQ ID NO: 22770 - protein, 307 aa, DROSOPHILA
MELIETASTPGDSETEIAIPEAAFDSFKMPMLPSQFHLENSMSPGYAIKHSLLGHSGCVTGLKFSSNGENLVSSSGDRLLKLWDLSATRCIQSLAGHGDGVNDVAWSAAGLIASCSDDMTVRLWDARSKLCVKVLEGHSRYSFSCCFNPQANLLASTSFDETVRLWDVRTGKTLKIVHAHQDPITSVDFHRDGNIFVTSSYDGLVRLWDSSTGHVLKTLVDVDNIPVGYVKFSPNGRYILSSTLNNTLRLWNYKKPKCMRTYRGHLNEFYCSNSNFSTTGGIWIVSGSEDNTLCIWNLQTRELVQKI

SEQ ID NO: 22771 - DNA, 3390 bp, DROSOPHILA
tcaatgccgtctttctcgacaatcgggtgcaaggtctgcagatcttcgtcaactcagtgatggccaaggaggagctgcgaaagtgcaaactggttcgggagttcttctgcctggacgagccgccttcgtactctgaatccatggaggagtgtcgtgtaggatgatttctttttcatgtatttatcaaatctatataagatttcatttacttctaggcaattttcgaagctcaggaggagacaattgagcatctgaagctgcagattcgaaataaaaacgatctcattctcagtttgcagcagaaactgcgcgaggagatgaacgagaaggagcagctgagagaagctatgaagtaggataacaatttcttttacaaatgcaaaaatctcattagccaatctctctctacagaaatatggagcttaattgctcgcactgctcctcagctagcgacagtttgggaataaagtagaccttcgccaatcggaggtgataaccaaaatccagttggacgtgcgtgtgcgtacaacattatgctgagcataactctacgcaactgcgccgcttggatgcaaatccaatacaataatacaaaccaagtgcatatcgaggggttggcccctacagtgctttagtattcatatctagacctagatgctagcaaagtgctgcccacgctggtactatatggaatacgatagtagatatttttgatattcgtttacgaggcacttacagttaagaatgaaatcactagactaagtgtatacgatatgttatgcaaactcacatacaaaataaatctaaggcacaatttattactcaatgaaaatggcatttatgagttgaaaattaatttagtgttcaagataaaaatatccaagccacaaagaaacgcttttcgaaatgcaattcgactgtgtttggaagacttacgaatattacgctttagtgttagtcgaagtgataattaaaacgattatggtattgaatctatttcttaaaggctggtcatcgcgggtggtcgggcataggctttcgggatgaatccatatttgcgggttttcggagcataagcccaaagccagccatcaacagtctgattggttaagtctgcgtaaatccaatctcctctccgcacagaaaggtacagatcgtctggagcttgcgctttgtaatcatacagcatcaccagctccgtgccatggtagcgtagatcatctgttcccaagcccaattgaggctgctgctgttgctggctctgctgaccttgttgaccctgctgcaaaatggtctccatggcatttaaagtggctttctgttgctgcaaaactcgtacactgtctgcaggataaataaagctggctggcacaaatccttcctggccatcactgcgcattatccaaaaccaatcgggatcctcgcgatttagcacggtaacaaattcaccccgttccacagacaaatcattctcgtccctggctataaaggtgtacaagacgatacagcgcccggagggttccttcacgaaaggagtacactctggctccaccagcagggtgttctctatgctgttggcggagccaggattcaaggtttcatcgcaaagaacatccagcttgttatccgtgcccaaaagtggtatattctcttcgatcggctgctctggacactgttcccttggcagtttcttcttaacagccaaatccgccagttgcgtgttgcagggagcacaataagagaagggtatgaaaccctcctgcctagagtcctgaccaatcacgtagacccaatcgttctctctgtacaagatattaaccagctgtccacgcttcacctctagttcatcatccacgcaaggagtaaagtcgtgcagcacaaccatcttggaatcaggactaaaatagaattaatattgtacagactatttaaactgataatggatgggatcgacttaccttagaccgtgttccttttcaatgcccactcttacaagtgtttcaatgctggaggaaccagttatgcggcccatgcccaatacacccacagctggtaagtccctctcaatgctggcatttgtagctgaaaagggagtattttgaaaatgcttatttaggtacaatatatgtcgtatttaattaaatttaaaataaaatgtatatcttatgcattcaatcataatatagtttcaagaaaaaaaacttgaatacaaatatttaattcaaaaagaattcttgtacattgatatacaaaataaatgcaccaataaacagatttaaacaatttcaatttttttaagttcctacaacaagttcgtgattgaagtcttttgtttccgtgctgcttcttccgctttctatgaacacacctttcttcttgtcgcgcctcatgcgcacggggcaaagaaatgccatctcttccccccactcggaattaaacccccttcaaccgaaaaacaacaaaatttcggctaattgcttaatttctttattgtttagatccgacacaacgctcttcttcttctcaatattctctggtgttagaggtggaattcatacgattggctgatcttgatgatgttgtccgttaatcgattgtcgcgaggcgccaaaatttgaaaataagttggttttgtgtgtacgtgttggctctgctctttcaagcatgcaaatttctagtaaagcgtaaactgctcttgagcagcaccttcgatttgggtgcaatgcacccgggccgccgtttaccttgataatttattacgcgtgttttgtgggctaattcaatgatcgaaagcatagaaaaactgtgtttagattgggcgatttgattgatccagtttctgcgacagcttctattttttgcgaccacgcacggtgctcttcttgggtgttgatcgctggttgctctttcgggtaggacgccgcggaccatcgcctaagttctcatctgtctcatagtatctgtacgtccggcgatttggtagggcgtagtccagggcatgagtgaccattatcgccttgtaggtgcacgccacggacatgataagctgccccaaatagtagacatcttggcgcaaaaacataaagacttttggataggcttcaaaaaggtacatgccggtacgagtattaactgcattgtcccgcagtttattcatatggctgagcaactggagccacacaagcaccacgacctgggtgcacatatagaagaccaacagttccagcagcaaaagccaaagcttctgcagcggtgcgcaattcattaccctcagatgatggagaaaaagcacggcggtcaggacgaacagcgccgacggaagatcgggaatatgctccatgggcagcacattgcatccggcgatgtatagacacacgcatcccacgctgc

SEQ ID NO: 22772 - DNA, 1044 bp, DROSOPHILA
atgaggcgcgacaagaagaaagctacaaatgccagcattgagagggacttaccagctgtgggtgtattgggcatgggccgcataactggttcctccagcattgaaacacttgtaagagtgggcattgaaaaggaacacggtctaagtcctgattccaagatggttgtgctgcacgactttactccttgcgtggatgatgaactagaggtgaagcgtggacagctggttaatatcttgtacagagagaacgattgggtctacgtgattggtcaggactctaggcaggagggtttcatacccttctcttattgtgctccctgcaacacgcaactggcggatttggctgttaagaagaaactgccaagggaacagtgtccagagcagccgatcgaagagaatataccacttttgggcacggataacaagctggatgttctttgcgatgaaaccttgaatcctggctccgccaacagcatagagaacaccctgctggtggagccagagtgtactcctttcgtgaaggaaccctccgggcgctgtatcgtcttgtacacctttatagccagggacgagaatgatttgtctgtggaacggggtgaatttgttaccgtgctaaatcgcgaggatcccgattggttttggataatgcgcagtgatggccaggaaggatttgtgccagccagctttatttatcctgcagacagtgtacgagttttgcagcaacagaaagccactttaaatgccatggagaccattttgcagcagggtcaacaaggtcagcagagccagcaacagcagcagcctcaattgggcttgggaacagatgatctacgctaccatggcacggagctggtgatgctgtatgattacaaagcgcaagctccagacgatctgtacctttctgtgcggagaggagattggatttacgcagacttaaccaatcagactgttgatggctggctttgggcttatgctccgaaaacccgcaaatatggattcatcccgaaagcctatgcccgaccacccgcgatgaccagcctttaa

SEQ ID NO: 22773 - protein, 347 aa, DROSOPHILA
MRRDKKKATNASIERDLPAVGVLGMGRITGSSSIETLVRVGIEKEHGLSPDSKMVVLHDFTPCVDDELEVKRGQLVNILYRENDWVYVIGQDSRQEGFIPFSYCAPCNTQLADLAVKKKLPREQCPEQPIEENIPLLGTDNKLDVLCDETLNPGSANSIENTLLVEPECTPFVKEPSGRCIVLYTFIARDENDLSVERGEFVTVLNREDPDWFWIMRSDGQEGFVPASFIYPADSVRVLQQQKATLNAMETILQQGQQGQQSQQQQQPQLGLGTDDLRYHGTELVMLYDYKAQAPDDLYLSVRRGDWIYADLTNQTVDGWLWAYAPKTRKYGFIPKAYARPPAMTSL

SEQ ID NO: 22774 - DNA, 2738 bp, DROSOPHILA
aatcacgtagacccaatcgttctctctgtacaagatattaaccagctgtccacgcttcacctctagttcatcatccacgcaaggagtaaagtcgtgcagcacaaccatcttggaatcaggactaaaatagaattaatattgtacagactatttaaactgataatggatgggatcgacttaccttagaccgtgttccttttcaatgcccactcttacaagtgtttcaatgctggaggaaccagttatgcggcccatgcccaatacacccacagctggtaagtccctctcaatgctggcatttgtagctgaaaagggagtattttgaaaatgcttatttaggtacaatatatgtcgtatttaattaaatttaaaataaaatgtatatcttatgcattcaatcataatatagtttcaagaaaaaaaacttgaatacaaatatttaattcaaaaagaattcttgtacattgatatacaaaataaatgcaccaataaacagatttaaacaatttcaatttttttaagttcctacaacaagttcgtgattgaagtcttttgtttccgtgctgcttcttccgctttctatgaacacacctttcttcttgtcgcgcctcatgcgcacggggcaaagaaatgccatctcttccccccactcggaattaaacccccttcaaccgaaaaacaacaaaatttcggctaattgcttaatttctttattgtttagatccgacacaacgctcttcttcttctcaatattctctggtgttagaggtggaattcatacgattggctgatcttgatgatgttgtccgttaatcgattgtcgcgaggcgccaaaatttgaaaataagttggttttgtgtgtacgtgttggctctgctctttcaagcatgcaaatttctagtaaagcgtaaactgctcttgagcagcaccttcgatttgggtgcaatgcacccgggccgccgtttaccttgataatttattacgcgtgttttgtgggctaattcaatgatcgaaagcatagaaaaactgtgtttagattgggcgatttgattgatccagtttctgcgacagcttctattttttgcgaccacgcacggtgctcttcttgggtgttgatcgctggttgctctttcgggtaggacgccgcggaccatcgcctaagttctcatctgtctcatagtatctgtacgtccggcgatttggtagggcgtagtccagggcatgagtgaccattatcgccttgtaggtgcacgccacggacatgataagctgccccaaatagtagacatcttggcgcaaaaacataaagacttttggataggcttcaaaaaggtacatgccggtacgagtattaactgcattgtcccgcagtttattcatatggctgagcaactggagccacacaagcaccacgacctgggtgcacatatagaagaccaacagttccagcagcaaaagccaaagcttctgcagcggtgcgcaattcattaccctcagatgatggagaaaaagcacggcggtcaggacgaacagcgccgacggaagatcgggaatatgctccatgggcagcacattgcatccggcgatgtatagacacacgcatcccacgctgccagccaccagctccgtgacttcgtacattccctgtacaaccaccattttagtcgtatacaaaatgtgaacgaatgatagatttgagttagctccaggcgctatgaattgtgtttggaaggtgttactttactagatagtaatggctgtatatccaaagtctactgagctctatttaaaactttatattgtattatagtgatgtaactaaaagtccaaatatatgtgaattttgtaatgtaatagaacataataggttagagatatctggattttttaagcaatacttttagtagtataaacataatatatacatttaattcagagtgcatttaaaaccctctgccccactgagacctcgtcattcttagcgagcgtcacttgcgctattggacagcattgaaaaaagaggggccaatgcactattttggtgccaaggataaaactttcgcatgcaattttcgattataattcagcgagagaatttcgatggaaagggcaaggaaacaaagagtctcagcaagagaggatgggtccaaagagagaaagtgtccaaactgacctacacttcgtcgtatccccatgtgcacataccccaaactaaattgcgcattaagcatctcgaacattatcccaccagcagcagtggcgtggcagcatcagcagcaggtgccacacccccaaaagacccccttcaacttgacttttgactactacgcagttgattccacatccgcatcacatcatccatcccacagcccacatcgcacatcccagaaacccatccccatgccctatcccaagttttattagagagagctgtctgcgttgggctttaatcgatagagaggattctgcgcagtcctccactcctcggatgccattcacaaaaaggggcggccagtgggcggggcaggaggtggttgggtgggcgaatcgagtgggtgctcctcgcccagcacactcatcatggctgttgtgtctgcgggtaattgttgctcggacctctgatggccaaaaaatgagactagacagcgggccaaattaagaggaatgaggcggaaaatggggtagaatgccagctccggggcggaaaaagtggctcactggctttgtgggtcagctat

SEQ ID NO: 22775 - DNA, 738 bp, DROSOPHILA
taacaccttccaaacacaattcatagcgcctggagctaactcaaatctatcattcgttcacattttgtatacgactaaaatggtggttgtacagggaatgtacgaagtcacggagctggtggctggcagcgtgggatgcgtgtgtctatacatcgccggatgcaatgtgctgcccatggagcatattcccgatcttccgtcggcgctgttcgtcctgaccgccgtgctttttctccatcatctgagggtaatgaattgcgcaccgctgcagaagctttggcttttgctgctggaactgttggtcttctatatgtgcacccaggtcgtggtgcttgtgtggctccagttgctcagccatatgaataaactgcgggacaatgcagttaatactcgtaccggcatgtacctttttgaagcctatccaaaagtctttatgtttttgcgccaagatgtctactatttggggcagcttatcatgtccgtggcgtgcacctacaaggcgataatggtcactcatgccctggactacgccctaccaaatcgccggacgtacagatactatgagacagatgagaacttaggcgatggtccgcggcgtcctacccgaaagagcaaccagcgatcaacacccaagaagagcaccgtgcgtggtcgcaaaaaatagaagctgtcgcagaaactggatcaatcaaatcgcccaatctaaacacagtttttctatgctttcgatcattgaat

SEQ ID NO: 22776 - protein, 194 aa, DROSOPHILA
MVVVQGMYEVTELVAGSVGCVCLYIAGCNVLPMEHIPDLPSALFVLTAVLFLHHLRVMNCAPLQKLWLLLLELLVFYMCTQVVVLVWLQLLSHMNKLRDNAVNTRTGMYLFEAYPKVFMFLRQDVYYLGQLIMSVACTYKAIMVTHALDYALPNRRTYRYYETDENLGDGPRRPTRKSNQRSTPKKSTVRGRKK

SEQ ID NO: 22777 - DNA, 9149 bp, DROSOPHILA
gtgtgttggtccaaggggaaagtgcgtcataatgacgagtgttggcggtgcaataaccctcttccgcagctaaactgctttccagcgacgtgagcgaagctttcatagtttcattatgctatccatattgacaaatgccttagaaacgtttgtttttaatttccccaccgacgatcgctttctttgccgccacacaccgactaacacacacaactgttgacaatggccagtgaaattttgacatgagagcatatccagagcatataagcccacttcaaactggaaaaaaatgtgttgcaatcagctctattgaagtacccataagatgaaagccatatgcattctaaaagcagggaaagcttaccaaagcttaacgcataaatcttagaaattaaggttatatttggttcaatatctgttacaacagcagtaaagataaagttactactagtaactataattttctttgctgtgtaaaagcgaaatggtgttgccattagtagagccgcccattaaatgactgctaatcagagtaagtccatggacccaagaccgcatttccagcgggcgtggaaatctggagcccactagattgaaaaagttcggtgatggttggggggcaaacgtggattttctgatgcgtaaaccgatccgccaagaagcggaaaaataaatgcattgaaatgcgctcttttagcaacaaaactcgcgttttgtatgcaatttgcttaacagagcaaaacttttgaagccaatgcagtcgaaaaaggtacgactacactttcaaaagccgaaacaataccaatcataatggataaacaagaagtacttggattcgaggcgaaactggcggcaatttggaagtttgaatgttggattttggccagcgactgaataattagtgagtcgctggatatcgcctccaacgaccttgatacacttcaatcaaacattttcaatcgatttccattgtctgctgcagctttcgatgtcgatttccatggcaatccgtctagagccccatggcattgtctgcaacacgtcgaaggtgcttgagaagggtctggccgatctttgcgaagcatttgagtacctcaaccccacctgtggttgccctgattacggactttgtcatctgaagacccggcttatgatagttctgtcacttaagccgacttttgggttatcaatttaaggccgagctcaatgtcggcttttgtcagcttagaaaatcgttatataagataggatacaagtttggtcttttcttcttgattgaatatcttttgtataagtaagattgcagatgatttgcacataatgtggactaaaccagttggtaaataccgacctttaaccacgaaaatgattctgattcacaatgattcacttagtaattcagggcctttttcaattttggtgcttgcccagattacaactgaaaattcccacaatcaggttgttaccttttgaatgatttagtcaaattacgcatttctgatcattttttgattcacttatcctaatatattctttaaaatacactatgactaaatagacaagtcaattaactgacgttttggacatttgaccaatatagctaataacttacatactttcttaattaaaagtttaagatccagaagcaaagactgttcaacggaaagattaatagacaaccctcttaatgatgggcaaatgatcagttcaataacccaaatgctgaaaatccttcagaagaacgatgatggatattcccatgtacacttaattataggcccattctgcttccagctttaatacattatttatcagaccatttatatcgtttgacaaaaagcgcagcaaaacaaaatgtaaaactaattaacctgcattgccgtaacaccattaaaaaaaacctgcctctctgttccatagaaacccaatcgccagacggactattacgatatctcgccacgcccctttggagtgccctcgggggcgggaccagcggcatcggcgggattaggagcggcagcgtccactggtgccacgtccgcgtcggtgaccaatggcttcacacgctccaaggcgatacggaatggatcgggcaacagccttggtggtggattccagccgcagacgcagcgcatcaatgtgccccaccagcagacgcagtttttggcccactttagcgaatctggggtaaggaaatcgaacactcaaagaaaattttagatacaaatgtacaaaaatgaaagtggaagctgggcattcaacaatctaaggttttttatttcactgacgctgatgccaacattaattaactttacgaaactataaaataaatattattgttttctttttggccagctagtctgcgaattaaacaacccgattgtttactgtgtatatcgagttgtagagtgcagatcgaaagaaagtaagagcgacagaaaaccaatctcaattggcataacaagaagcaatcgagctcaggcaaaacaatttcgcttcgccattgcataacaagttaacaaaacaattggctctgctctgattttggccaatatcagttttttgttttgtttcgatttcggggagtccgggagtcttacgtgacttccaaacagtaaatgctttgcggcgtttatatctcttttttttttgtcttttaccaactctcaagtagccaaacttcagaaccagttccaagccacgcgaactctagttttggctgtttaattttttaaacaaaaaacgtagataaaaaaaaagcattaccccacacaagaccgcagccaaatgggcaaatcgaattgtggcaaaaatattttacctttcaccctattgcacttcatgctccacatttttgattgttatttgcttaacgttttggccaaccaacgaagtttgttcataaatcatgttcgcattaccagcccctctttccaagtcgctgtttacttttgaatccgcggagcgaggagcacacatatgtgtatatattttgtgtattttcaagtagtcaatatttacatatgtacttctacttcgaactcttataattgaattgtcagagcggaagcgtttctcgctctgatttccctttccgttttctcgttttgcgcacataaatttctcaagttaattgcagcaatttgtttgcccattcgggcgaaagtgctgccttgatcgatggccagcttaaatatcaaatcagctcacgattaatcggccataatgacaattgctagtgggcgctcaaaacccattagttggcattacttttgagtccatgccattgccgctaattctccacctgctccaatccgctgccaatctctcatctcatggctctgactaaaaagtaccaaactagatagagcgagcacagtgttaactaccaattggtgtttcaagcgaatatccatacataaatagtttctttattgcaaaatggtagtgtgatcgggtgcaaaacgatcttatagttttttttactgtgcaattgtatggatttggcaacctgctgaggggaatcttccaactttgacagtcccgaggttgccttcacataaaaattaaataaatacgagcgcataaattatagatgaacgaatggagctgtggggtggcggttggcatctggaaatttgcacaaaacgctttagacaaatttgagaatcacttgaatggcaccgtggttgtgaatagttcgcacgcaagacaattgacagcagacgaaccgcagagattgcggttccatgtcgaaactgtaacagtttcccatgacgatagtcgaggctgtgaacggagatctgcagctgtggcttcttggcaatggtatattggattggttataccattatcaaaagcccgtaatccaaacaatgctcgtgttagtaaaacttcaaactcttctttttgcagaacgaaaagcgaccggtgaccagcagccgtccatttggcaatggaggattctcacctacccgaactcgaacccaggcgccggtttcggcacttgtagaaaatccagccactcccgcagcaacggctttcagaccacgtaatcgctatcaacccggcagctccactgcatctaccacaaccacaacaacgagtagtgcggaggtgagcagcaagcggtacaaccgatttggtagcaatcgggccaaagccaccagcaccaccacctcaaccactcagaacacaccctcggaacgcccgagtttcggcaggaagtcaccaaatcccaggcgacccgttttcatcagtcgcgaagtcaacgaaccggtgagtgtggtcagcaagcgaccattcaactacagtggagccaggctaaagctgccagccagacccaccgctcgcaccaccagcactaccgaaagcgtcgaggaggaggagcccctggatgacgaggaggaagaggaggagcacgagggcagtgatgaacagtatgaagaggaatccgacgagggaaccgaagaacactcggaatcctcgagcttggagaagttaccactgcaggaggaggccgtcaccccggtgacagtgaccaagaacgaggcattcgcacatgtagagccttccgaacccaccaccagttccgaaatagataatgaaagcagcacgagcagcactgaagaaagccacactgatgtatctgaagtaaccaacggcgatgcagaggttagcaacgatgaaaatgatgtcaccaccctacacccagctcatgaggaggaaatcgtagacgaacccaccactattattccacaggagaatcaatccacggaggatgctcatgtggatgaacaaaccgtaaccactgaacagcctttggatagcacctccaaaacggaagaaaccgagaacgtatccaaaccagaggagaccaagacatcgaagcaagaggaacagagcgcatcaaaatcagagaaccaaagccttaacaagcaggaggagcaatccgagtcccagtacgatgatgaaggggagggtgaggactatgaatacgatgatgaggagggtagtgaagactcaaccagcgaagtggagaatcaagactccaagccatccacgcccagtgcggagcataaggatgatcgcgaaatcatttcggtggtaaccaccaagagtgtggtcaatggatccacaattctaccagtgccagttactccaagcaccaactttataactgaggaggaagttgagtcttcccacgctgatctcaaattggaaactacaacatccatgaccttggacgaagagaaaggcccgaatgctactgagaactatgtggttgtggcctctatccaacccagtcgtagcatcaatggagcccggttcttacctttccccgccattgagcaggaagagacgaaacagacactatctgaactggagcggaaagtgcattccaaacagcagcagaccccagctcaaaagcaatcggagggcagcgaggaggtgcaggccagctcctccatccaacctccggtagtttcctccacggagagtatcattgacaaactggatcgtgtgcagtcagagctgtccagtggcttgttatctggcaagtaccccatcatcagccagatggactcctccacaccagcaactagcactactgtgggtacaggtcccggaaaatttgtgccccacatcaggaagtaccaaccaagaaccacatcatctgctccgcgaacaaccagcagcaaggtgaaagtgcagcatttcgatgacggagaaatggacgagctggccacccttctccctgtgggcttcaagcccagaccgagctataagaatcgcaagattacgacaacgacctctaccacagaggcgccgccagctgagatatccaaacagaagccgggacgcaactccaccatcagtcgatcgtttaagagcggtcacgtaaccgtgcaggatgtggcacaggctggactactgcccaagggctataagccaccaaagactacaactacaacgacgacaaccgaaaaagcggaggagagcaatccaaattcttcctctggactcgaaagtctcttcagtgaaatccaattcgacgaaaacttggcctccctgctgcccaaggactacaaactgaacagtagtcccaagctgcaagtgaacaccaccactgccactccgtcaaccactcaaaggaatttgccagttgcagtgcctttcgatgatcttagcacgttccagttgcctcctggatataaggctcccgagcccaaggatgaacctaagctgccaccaggtgtgactcccattaaaatagattcgttgaaagacctgctacctcctggatttaaattgaatgtaacagagagcgatgctagtgacgagattcctgcctccctgcttccacctggctacaaagccaagaaacagcatccggcctcaaccaccaccacctctacaacaacgagtaagcccactgtgtcggcttctagcaccactgaagcagctgtcacggaagcttccggaggaagtggctttaaggtggtattcccaaagggtaaccacaaaagattgggtgcccaccgcctgacaacacctcatccttccggcgaggagggaactactgcgtcctcgagctcaaacctgcaagtgatgatcaaaaagggcccaccaaccagggccaccaccgagttcaccggctggccgactccgccgaccactccgctgtccattgacaaactgaacgcacagaccataaactttgaggatctgttgacggctagtggaacgagtagcacgacaagcactaccacaactacgacaactacaaccacaacgactactccacgacccacaaaaccgggtcattgtaccgccgactgcgacttggctgctaccattaagatcatcgatggtgtggcatggaaaccagagctacttgatcacaacaccgtggagtggaagaatctggcccacgagctggaggcacaggtaagtgattactccaattagggatttgaataagggttgttttactattttcacatttactttttaccagctcaacgaagtttattccggagctcctcagctcaacaagtggtataaaaaggtgcgtatagatagcttcagcaagggcagcgtcctagtcgactactatgtggagctcgccaacataaccgaggatgtggataccctggaaatccgtcaattgttccacgatgccctgtccaagccagctactccagttctacccgataaggatgcgcaggagaatgagacggatagcgtctcgggaccgcaggaggagcagctggtaacggccagctatcagatgggcaaatacattattgatccggtggcgacagattttagtggttagttaaaaataacctttctgttgctcttgaaactatatatattttttttcttgtagtcatagccaagaatgctcatactaatgtggagttcgcagaggaggatctgcttattccacaatgggccattgtggtcatagtgattggagtaggctccctggtgtttgtagtcatttttggggtcacagtggtaagttagaagatcagttgaacatttggatcctaggttattaactaactatccctctttagttgctcaaccgtcagaagagggccaagaagacccccattccactgaccaatgacatgctaaacgagctaaaggtcaaccacatgggtggtgcggacaactatggcgtggatgatttctataacatcgacgatccttggaacgataccaagcaacctattaagccgaaggtaggccacatgacttctgcagctccttgcatccatatttataatacggcccttttcagcgcttcaccaactcaatgcacggtagcaacagttccaacatctacgacagttggcgatccaccaggcatccgcacaccagcggggattacttctatgaccagcagccaacctattcccagaaaggagactcactgaagaggccgcagctccaccatggtaaccacagcagtcacagagagtaccccgcccaccaccaccaggcgtcacagcagcaccagcaggcgtacggtcaccagtatccagatgccttcgccgatgcccaccagatgtacagctacaacaaccatgcgagtcggacgcgctattcccgcgactatgatcccgatttttgagcgggctctctcgactggactggagtggagcatccatccatccgtgtactagctttagtaacttgcaaacgattttgaattgtaactaaatagcgtaaaggatcgtagttgtaatgctgctataatttatcgtactgcctgctggcttggctcaaaagtcgtccacttttcagtacccacagccggccgtagcaaaactaagttaagctatatacttttgaatacttaatggagctgctatatctggatgccttacacttcggcttaatatacgtatgaaggaaatgtttcttaatagaacgttaggggcgtgccccggaaaataaatagtcatgcactcttagttaatcctaggtcatatgtaaaactagatacactaaaatatattctttgtattatttgaagtactggcggcttgctatactactaatggatgtctagttttagacacaaaataaaaaaacaatttatacgatttacatttgcatgaatttttataaaaaataatttgccgaaacccgggattgaaccggggacctttagatcttcagtctaacgctctcccaactgagctatttcggcagttgcaattccggcgccaatagccgatttttacaccagtaaaggtttgagtctaggtgcattcagtgttgtaaaattcaaaatccatctagcaatgacgagtaccaaaacttttgaaatccacgctagcactaatccgatattctgtactatcgccacatctgccgaaatagctcagttgggagagcgttagactgaagatctaaaggtccccggttcaatcccgggtttcggcaagctactttttctttttaaaaatttccaaccattttaactccgaataaaatgaggcttaaaaaaacaacaattatttaaggctcatttattttaaatcccttttggttaatggagcagagtccttgtcaatgtgcgcagaatttctgccttagaatccttagtaatttgatttctagacctc

SEQ ID NO: 22778 - DNA, 4407 bp, DROSOPHILA
atggcaatccgtctagagccccatggcattgtctgcaacacgtcgaaggtgcttgagaagggtctggccgatctttgcgaagcatttgagtacctcaaccccacctgtggttgccctgattacggactttgtcatctgaagacccggcttatgataaaacccaatcgccagacggactattacgatatctcgccacgcccctttggagtgccctcgggggcgggaccagcggcatcggcgggattaggagcggcagcgtccactggtgccacgtccgcgtcggtgaccaatggcttcacacgctccaaggcgatacggaatggatcgggcaacagccttggtggtggattccagccgcagacgcagcgcatcaatgtgccccaccagcagacgcagtttttggcccactttagcgaatctgggaacgaaaagcgaccggtgaccagcagccgtccatttggcaatggaggattctcacctacccgaactcgaacccaggcgccggtttcggcacttgtagaaaatccagccactcccgcagcaacggctttcagaccacgtaatcgctatcaacccggcagctccactgcatctaccacaaccacaacaacgagtagtgcggaggtgagcagcaagcggtacaaccgatttggtagcaatcgggccaaagccaccagcaccaccacctcaaccactcagaacacaccctcggaacgcccgagtttcggcaggaagtcaccaaatcccaggcgacccgttttcatcagtcgcgaagtcaacgaaccggtgagtgtggtcagcaagcgaccattcaactacagtggagccaggctaaagctgccagccagacccaccgctcgcaccaccagcactaccgaaagcgtcgaggaggaggagcccctggatgacgaggaggaagaggaggagcacgagggcagtgatgaacagtatgaagaggaatccgacgagggaaccgaagaacactcggaatcctcgagcttggagaagttaccactgcaggaggaggccgtcaccccggtgacagtgaccaagaacgaggcattcgcacatgtagagccttccgaacccaccaccagttccgaaatagataatgaaagcagcacgagcagcactgaagaaagccacactgatgtatctgaagtaaccaacggcgatgcagaggttagcaacgatgaaaatgatgtcaccaccctacacccagctcatgaggaggaaatcgtagacgaacccaccactattattccacaggagaatcaatccacggaggatgctcatgtggatgaacaaaccgtaaccactgaacagcctttggatagcacctccaaaacggaagaaaccgagaacgtatccaaaccagaggagaccaagacatcgaagcaagaggaacagagcgcatcaaaatcagagaaccaaagccttaacaagcaggaggagcaatccgagtcccagtacgatgatgaaggggagggtgaggactatgaatacgatgatgaggagggtagtgaagactcaaccagcgaagtggagaatcaagactccaagccatccacgcccagtgcggagcataaggatgatcgcgaaatcatttcggtggtaaccaccaagagtgtggtcaatggatccacaattctaccagtgccagttactccaagcaccaactttataactgaggaggaagttgagtcttcccacgctgatctcaaattggaaactacaacatccatgaccttggacgaagagaaaggcccgaatgctactgagaactatgtggttgtggcctctatccaacccagtcgtagcatcaatggagcccggttcttacctttccccgccattgagcaggaagagacgaaacagacactatctgaactggagcggaaagtgcattccaaacagcagcagaccccagctcaaaagcaatcggagggcagcgaggaggtgcaggccagctcctccatccaacctccggtagtttcctccacggagagtatcattgacaaactggatcgtgtgcagtcagagctgtccagtggcttgttatctggcaagtaccccatcatcagccagatggactcctccacaccagcaactagcactactgtgggtacaggtcccggaaaatttgtgccccacatcaggaagtaccaaccaagaaccacatcatctgctccgcgaacaaccagcagcaaggtgaaagtgcagcatttcgatgacggagaaatggacgagctggccacccttctccctgtgggcttcaagcccagaccgagctataagaatcgcaagattacgacaacgacctctaccacagaggcgccgccagctgagatatccaaacagaagccgggacgcaactccaccatcagtcgatcgtttaagagcggtcacgtaaccgtgcaggatgtggcacaggctggactactgcccaagggctataagccaccaaagactacaactacaacgacgacaaccgaaaaagcggaggagagcaatccaaattcttcctctggactcgaaagtctcttcagtgaaatccaattcgacgaaaacttggcctccctgctgcccaaggactacaaactgaacagtagtcccaagctgcaagtgaacaccaccactgccactccgtcaaccactcaaaggaatttgccagttgcagtgcctttcgatgatcttagcacgttccagttgcctcctggatataaggctcccgagcccaaggatgaacctaagctgccaccaggtgtgactcccattaaaatagattcgttgaaagacctgctacctcctggatttaaattgaatgtaacagagagcgatgctagtgacgagattcctgcctccctgcttccacctggctacaaagccaagaaacagcatccggcctcaaccaccaccacctctacaacaacgagtaagcccactgtgtcggcttctagcaccactgaagcagctgtcacggaagcttccggaggaagtggctttaaggtggtattcccaaagggtaaccacaaaagattgggtgcccaccgcctgacaacacctcatccttccggcgaggagggaactactgcgtcctcgagctcaaacctgcaagtgatgatcaaaaagggcccaccaaccagggccaccaccgagttcaccggctggccgactccgccgaccactccgctgtccattgacaaactgaacgcacagaccataaactttgaggatctgttgacggctagtggaacgagtagcacgacaagcactaccacaactacgacaactacaaccacaacgactactccacgacccacaaaaccgggtcattgtaccgccgactgcgacttggctgctaccattaagatcatcgatggtgtggcatggaaaccagagctacttgatcacaacaccgtggagtggaagaatctggcccacgagctggaggcacagctcaacgaagtttattccggagctcctcagctcaacaagtggtataaaaaggtgcgtatagatagcttcagcaagggcagcgtcctagtcgactactatgtggagctcgccaacataaccgaggatgtggataccctggaaatccgtcaattgttccacgatgccctgtccaagccagctactccagttctacccgataaggatgcgcaggagaatgagacggatagcgtctcgggaccgcaggaggagcagctggtaacggccagctatcagatgggcaaatacattattgatccggtggcgacagattttagtgtcatagccaagaatgctcatactaatgtggagttcgcagaggaggatctgcttattccacaatgggccattgtggtcatagtgattggagtaggctccctggtgtttgtagtcatttttggggtcacagtgttgctcaaccgtcagaagagggccaagaagacccccattccactgaccaatgacatgctaaacgagctaaaggtcaaccacatgggtggtgcggacaactatggcgtggatgatttctataacatcgacgatccttggaacgataccaagcaacctattaagccgaagcgcttcaccaactcaatgcacggtagcaacagttccaacatctacgacagttggcgatccaccaggcatccgcacaccagcggggattacttctatgaccagcagccaacctattcccagaaaggagactcactgaagaggccgcagctccaccatggtaaccacagcagtcacagagagtaccccgcccaccaccaccaggcgtcacagcagcaccagcaggcgtacggtcaccagtatccagatgccttcgccgatgcccaccagatgtacagctacaacaaccatgcgagtcggacgcgctattcccgcgactatgatcccgatttttga

SEQ ID NO: 22779 - protein, 1468 aa, DROSOPHILA
MAIRLEPHGIVCNTSKVLEKGLADLCEAFEYLNPTCGCPDYGLCHLKTRLMIKPNRQTDYYDISPRPFGVPSGAGPAASAGLGAAASTGATSASVTNGFTRSKAIRNGSGNSLGGGFQPQTQRINVPHQQTQFLAHFSESGNEKRPVTSSRPFGNGGFSPTRTRTQAPVSALVENPATPAATAFRPRNRYQPGSSTASTTTTTTSSAEVSSKRYNRFGSNRAKATSTTTSTTQNTPSERPSFGRKSPNPRRPVFISREVNEPVSVVSKRPFNYSGARLKLPARPTARTTSTTESVEEEEPLDDEEEEEEHEGSDEQYEEESDEGTEEHSESSSLEKLPLQEEAVTPVTVTKNEAFAHVEPSEPTTSSEIDNESSTSSTEESHTDVSEVTNGDAEVSNDENDVTTLHPAHEEEIVDEPTTIIPQENQSTEDAHVDEQTVTTEQPLDSTSKTEETENVSKPEETKTSKQEEQSASKSENQSLNKQEEQSESQYDDEGEGEDYEYDDEEGSEDSTSEVENQDSKPSTPSAEHKDDREIISVVTTKSVVNGSTILPVPVTPSTNFITEEEVESSHADLKLETTTSMTLDEEKGPNATENYVVVASIQPSRSINGARFLPFPAIEQEETKQTLSELERKVHSKQQQTPAQKQSEGSEEVQASSSIQPPVVSSTESIIDKLDRVQSELSSGLLSGKYPIISQMDSSTPATSTTVGTGPGKFVPHIRKYQPRTTSSAPRTTSSKVKVQHFDDGEMDELATLLPVGFKPRPSYKNRKITTTTSTTEAPPAEISKQKPGRNSTISRSFKSGHVTVQDVAQAGLLPKGYKPPKTTTTTTTTEKAEESNPNSSSGLESLFSEIQFDENLASLLPKDYKLNSSPKLQVNTTTATPSTTQRNLPVAVPFDDLSTFQLPPGYKAPEPKDEPKLPPGVTPIKIDSLKDLLPPGFKLNVTESDASDEIPASLLPPGYKAKKQHPASTTTTSTTTSKPTVSASSTTEAAVTEASGGSGFKVVFPKGNHKRLGAHRLTTPHPSGEEGTTASSSSNLQVMIKKGPPTRATTEFTGWPTPPTTPLSIDKLNAQTINFEDLLTASGTSSTTSTTTTTTTTTTTTTPRPTKPGHCTADCDLAATIKIIDGVAWKPELLDHNTVEWKNLAHELEAQLNEVYSGAPQLNKWYKKVRIDSFSKGSVLVDYYVELANITEDVDTLEIRQLFHDALSKPATPVLPDKDAQENETDSVSGPQEEQLVTASYQMGKYIIDPVATDFSVIAKNAHTNVEFAEEDLLIPQWAIVVIVIGVGSLVFVVIFGVTVLLNRQKRAKKTPIPLTNDMLNELKVNHMGGADNYGVDDFYNIDDPWNDTKQPIKPKRFTNSMHGSNSSNIYDSWRSTRHPHTSGDYFYDQQPTYSQKGDSLKRPQLHHGNHSSHREYPAHHHQASQQHQQAYGHQYPDAFADAHQMYSYNNHASRTRYSRDYDPDF

SEQ ID NO: 22780 - DNA, 11042 bp, DROSOPHILA
gagaaactaaaggcatttttcgaggagaacaaacgcgatctgcaagcgcttcggcacgacaagcctctgcgcgccatcaaggtacagagtcatctctctgacatgcccgagtacatagtgccaaaggccctgaagcgagtggttggaacgtcctcttcccctgtcggagcctcggaagccaaacagccacgacagtcggccgccaaggctgccttcgagcggcaggtcaatgatcctctgatggctagccaggtggacttcgggaaacggcgtcctgcccaccggagaaaaaagaaggcgttgtagggtagcaaatggtatctatagtcgcattagtcaataaggaaataaagttaatattgttaatgtaagccaaacataaaagcggccgttgaagatgtttggaattttaaaaatgttattttaccctaaattagaaatgagtaaaattaaacgaaaaatatacctatgttggagatagctgcagattgacaaacccaggttattttctttatatatatgaaaattctgttaatttagaattttgtaatagggctgtaaaaataaccaattgcacatgcacattaacaatgtagtttgttaactctatcgatgatatatatatatttatttgcatgcccgccaaatgtgtatgtttgtacttatccagccgataagcaagtaagtgaatgtctttttaaactcagaaacttgacaagtatatgcttaaaacggccgctgttcgggtggcggtaagtggtaaccacttacccaaatagaggcagaaggcactatatcatttgctcaacttttctgacagcggacggaaaatgaaaataaaaaatatctacgagtcagtcacattacccaaagtgccagtagttccgtaggtcacagcgacgattatgcagcagctggataccatttaaagtccattacaccgagagtcccaggaaaaatagatcaccattaggggcgaaatataagcgatgcatgcgtattcgtttttaacattttattattgtcattgaaatagttaacattcatacaattatttattcatttatttatagcgtttatgcaatacaataataatcatgagggtaataatgaaaaactagtcggttcgatctgcgcggcttagtatatggccaagtctgactgtctatatctgttgttgtctgagaaatcgaaacgcgaaatcagatatggatattgaaacgtattgaaaatagggggagagtttttgtagcgggctctaatccatcgactatcatagtaatgacttttataatatcgctccgttaagtgctaaattaaacgtaaacatttaagttaatttagcataatcgtaataaaactcgctaggtttaggtataggtatgcgcggttggctatcccaggctcctatgaacagtattatttgactattttagatcggatggccacgagatggaggaacaaatgctctgcacactccataactcgctgccattgctctatataaatatatagtttatggtataacttagggaaaacgaacatgaaatcacattgcaaatgaagaatggacaactaacaactgataaactgatactgaggaacaggcacaatcacgaagttaatgaatctagactaaaatgcagccatacacatacatgtatctatgtagacatatctctataaacgtttgctctcattatattgtatataatatgtatataccatacgttttatgctttatttgttacgatgctaaaaaatgttcgcttcaattcaatcccctttttcaaaatcctcgttgtggaagtcccacattcgctttcttacttttttgacgtttttcagttggtttttttctattttttttttctttgtaacacacatacagaacttgtttagattattgttgcaacatgacgtaaaaatatacatattttcatcaaaaattaccaccgctcagtgctaccgtctctaattgaagttgtttgtgggcgaagaaggtcctgcggattcgcaggacaacacattgccgctcttttataggatcttggtatatacacaagtttttatatatgtatatactttgaatatacggaaatttcgttagagtaataagaacgacaaaaaaaaacattaaaataggtccgaagcgatcgatttcctggcgatatcctcagccggatataattggcaaccgatttgccgcctcagggatgtgtgtgggtgagagtgattccatccatctaggccagcttagatgggcacgtaattgcccttgggcttgtagaacaactggccacgcatcagacggcgccgaatctcggagagcagcaggcgtttttccttcttgatcttcttgagcacacccttgttctcctgggcacgacgagacaagtagggcagcacctcttcgactgggccatatggtatgtacttgtacgccgagtatcccgcttgacctgttggtttgaaagaacacatattataaacacatggaagacaagtgaaaggggtaggctatggaaacagacccagtggaaaggtaatgtagtcgcacatgcccagcagttggccgaagcagatcaccttgtcctccggtgagatgccgatctccttcatctgctggatggcaaatcgtacggtgtcttcgttgtgcgaggccaccataataccaatcttcctggcatcgtcatcacagtccttcatcagctgaggttattaataaatacttggtttatttataatcacttataaccaaagtccacaaattcccaccttaatgcgtcgcaagcactccgacaacgtcctgtgatacatgtccgtggtggcctcgaacgtgggatttaccggatccgggtagcccagcgacttggcacggtcccgctcctggtccatataggcaccgcgcaccagcttggcgccgaagtagaagttctggcgcttggcctgctccagatcggtgttcacctcgcggaacgtctcgcgcagatagcactggtacgtattaaagacaatggccttgtccttgttgtacttgcgcatcatttccagggtgatacgggagatggccggctggaagtaagtctgctccgcatccaccatgatacgcacatccaagtccgcagcagcctgaggtttggaaataccatatcagtacgatttcacagctagagtgaaaaaaaccatttacctttacaatcgtgttgagacgacggatcatgttcctgaacatctcctcctccttgggcggtatttgtgagatcagtcgacgcatctgtccggtttggggatcgggaacgcggaacgtgtcgctcagctgcgagtcctcgtcaacaatgcccgaccaggggaacaaatgcaaaattctagatgagatagacgagcatataaagtcagatcggtaagagattagataatataaacggactaacccctccttatcggacgttacattgttcaggaactccttgacgtccttattgtcgcccagcgtggcgtaatacttttcgagatccttgatggtcttgtggtgagtcagcacattgccctgaccgcccaccatatcctccatgtacttgcgtgtgcgcatgattacctcggacagttgcagctgcaaaggaggatcgaggtcatcagagttcatcagttgataaacaaaagcatatgtatgatttagatttacaatgcttctctatagtatggtaacattttaagagttttgattttacaattttaaccgcagcaaaaagtgaaacgtttacgaatcagtggcctttactatgtatctattagcgtcaattaactgtgttcatttcccatttattaacacctattaacccctgtgtttcccccacaaataaagctaagctactcaattatgtggttctcaaggggattactttgtgcgaacttaccagcaattgtggacggcccagggcggtgagtttaatggcggtgatgccagttccaaaggtggcgcctgcaggtcgatattcggatcaatcgatggttggttgttggaaatgaaaagcgtttggaaaaagagcagagcaattggtgaatgcaatgcgatggcagaggcgaaagttggaaagcggactctacagtcatatagcacatatgtctaactacggcacataaaagcgtaaaaagctacggatacgagacgagtacgaattgagctgaagacacagagatacgaagcaacgacaaaacctacgacattgcattacagcaaccaactgaaaaagcatacgaaatggctagaaagtcaaactagtttgctttgctcgctcgaaatacggatttggccatcaatggttactcttccgggtatttcggttacttgttggcattttgggatgtgtcttcgttaatttctcggcttacccgtggccactgcccggggcgccttgcgatcatcatctgttcatattagcattcgcaacgaattcaaattgattatgagtttttgagttatgtgggggttattcgataatcgatgggttggtgccattttcgggatatttgcggggcagaaaagagaatttattaatcatcagttttaatttatttcagggatcgagatcgagtatgtgaaaagatagagaataggagaaagcctagcaggaaacagcctgaaaccccaaaagcattgaatgcaggacggggcaactacacagatctgtggcatgttctcacctagagcggtcatattggtcatatgtagggacatacataagtgagcaagttgttttatacaacattctagttctgatgtcattttgtaggaagtaatattctgattaaagttaagcataaagatttgacttgattaaagtccatctgattggataaagaaaagctcagagctcgatatgtatgtatgtctgacatttgttcagtacacaaaaaacaaaaaaaaataaaaataaaatgcatgcttaacgtttagcaaggaatgcgtttgcttttgcacgttctaaattaaaacatttgtacagaggatgtcggggatggtgagatggaactcaaggaacttgcatgccggagtcagctatcgggaaccagcgagtaaaactggccaagaacatacccgaaacagcctccagacacttgatgaagatctccatgttccgctcgcaggtggcctcgttcaagtagaagtaggtgcgagcactgctgaccttgtagcgccgatccgcaaaggacttgtccacatggtactgcggcatgctgccctcctcctttttgtcgcctgcactggagacggaagatctgaaaggaagtgagtgaatcagtatgcaattaagagtaactaaacaactatgattatgaatatcaggcattgattatacactattatagagtgttttcccactacttagcagaaggcatagcctcagcatatcaggaacttactcaacttcacgtttctcggcctcctcctgggtgatatcctcctcaacggaataatcgagaatcggcttaacgccaaaggatcttagcctgcaagtgcacaaaatacataagtttccgttttcaaaaagccaagaaaaattacacgatattagtaaaataaaagaattttgagtatggcttggttagcggttcgttgagaaaatttaaagttcttttgttaagggggatcaaattcggattggcgattcggatctgaatgttcgagtagatctttcatgcttggtacatgcccaggacttgtgctttctattagtgagagctttatgctcgcttagcttggacatagttttagaacattagtgggaaaatgtgtgtcatatatctacatacatgtgtggcatatacatggatggtaaaaataatagcaaactttctaaattatccactcaaattggtcattaactactcaatctgttgctcagttagcattgaattaagccagtatttgaagagcacgccatcgtgtttttgagtgctattacttcgtctgaaaccatttatatgcacatgtagtatcggatatacatatatatatatatattgggatgcatgggatgctcttgggtagggggagggggttaacctctctagggcgggcacgatcgtgtgacgattctcgccggccacaaagtgtccgtagaagctggacttcatcagcaggacgaagagcttctggccgagcaggttgcgcgccagtttcatcagctgtttatcggcgttatcgaagttcgttcgattattatcggtaaatgtgtttgtcagggattccattgcaatacaagtgtgggcatttaagcgggtttcgcataaccgtttcacagcccgtttcgcggccaaaataataacatgaagtaaacacaaaaccatagggcggcagaaagcgatatggaaacgggaaaaaaaaacaagaaaagaaaagaaaaagaaaaaggcgataagtgagtgggagtgtcgtggtgggcaattacctttccagtgtgggtatgatcttgatctgatcctcgccggcgacaaagtggccatagaaggtcgccttcatcaataatgtaaataaccgttgacccaatacgttctttgaccatttcataagctgcgaaattttcgtttgttttgatcggttttatgcggcatacatagtaagtttgtaagtttttgtaagtaggtttttttggtgtttttcgatattttgtcatgttgtttgcggcgtcaaaaattgaattcgatatagttttaattttccgttttaggcaatacaaagttgatatatgtaacaaggacaaagagtttttgcaatatacaactaatatccatcgattctagctgagatccctcatccgcccaggttctttcaatttttcagcgcctgaatcgcacataaatcatttggaacttggccaagtggtaaaataaaaaacgtgaacggagtcaaggccaaaatctttgccaaagtccaacaaaacagcgtggaaaaatgcgacaaaaagtgcggaggcggcaatgtgtattactcttcagaggctgcacgtcatttaaacgagtgtcaggctaaatacgcatataaacatcacctttccaaaatgagcctagtgctcaaggaaagacgatccgccgcggaaccatcaacttaaacagatatccgctgaacatatgtacatatataagtgatgcgaatattgaaattttagtgtaagaaaaacaaacaaacacttcctgaaaagccgaaaaataacgcaagagattgtacagactcttatccaaacctattaatgcaagatttatgcgactagagacaatactatcccttcggaaatattaatttatttaaataaactcgcaatgcactatccagctttgtgaaaacgagaaaatgttaaactgcacttaataaaactcggcaataaggacaggaagagatcgcctaacttgggaatcaccaagtttccggtttccgggcaacccatgttccttacaaggtggaaaacacaagagcattggcctctgattaatgattcccttgcacgtgtgcgctttgcttgatgcgggatccatcagatgaatgagattctgagaaaggacaggtggggaaagaaaagagcattctccgtctggggaaaccggtttcgtcgagaacactaaagtaattaattgaatacaaagttgtcgaaagagcacactgccgacaatataaatacaccatcaccaaaactggttacataaaacaaattttcgtttcgcattatattttttttgggtatggcatgttttgctttgctagtcttttaacttttctttggcagacaattcgaaaccgaggacaggtgtttgccgttgagctctggccccaaaaaacaaaaaaaacaaaaaaagctgccccagcagagccaacaccacccccggtcacctagcacctggcacctgccacagtaccccatcctcaaccatgttttttacccatcaatacccaacccattctcacatatcacgagacccacaccgctcctcagtccccaaaagcaatcgacgcgctactgtaaatagaaatggcgaaaaaataagtacactctgatacaaattcaaacgaatatgagaccccaattgtgttattgaactgtgtgcaacagttcttgagaatgttctcactatatttagtaccaaaagtataactaattgaatgctagaacgctcaaaatcgattgtgcaaacgatgttttcaaatagattgcgccgagtctggtaaaggaatggcttaccaatttttttctagtgcagagatgtgggcaaagtcgatgtctgactaatgccacatgtgatgtgatgtctacggtcccagggagctgtgcggacattctctgtgacgtccatttagccacccatatatgcaaattgcatcgagcggggcgaaaaaatgataaataagtaacagtcttggcgacgcatgcactttgagtaatcgataagcaatcaaacgatcgccgacgctattaaatagaagcacgctagcgagaatggggtaaatgcgaggggttttccaacgattccgattggcgctcattcgggggcctgactatataacgacctatatatactatgcagtcctacacagttcacacaatccatacgtctcgctgagtaaatacgcacgagttaagagcaaatagcggaccgggcaaggtcgccatcgcagcggcaatttgcatgccaaagtttccctttttcctgccgtcaatcaggcactcattcaatcttctgtgcgactgcagcacctgccagaaagtggcaacaaatgcaacaagcaattagccaggaattcatcaacacgaggggagcaaacgaaaactcgctgcgggtcgggtgaattgaaaagcggaagcagggcggaaaatcggaaggaaagcagccagccacctgacacgggcttcggttgcccggaaaatcggaatcaagcgaatggaagcttggcaggatcgaaaaaattcatgaataagacaaaaaaattcatgaatagaaaaaaggaagcaaacaaaaaaattaaatattcttctacgttcagtttcagacaactttaacattatacatacatggaattcaatagccctagctgttcataacttttgtttactcttcaagtgtccaagaatccatgtacatgaatatatttaaataaagcattttaaaggaagtatttataaaataaatgaatgaattataataagttgaaagcagcagaagaggacagaagaggcgaagagtcagcacacacttcgagagttgaaacaaatggtttcgaaatcggtcactatctaaaacgatacttacttaattgtaatattaagaaagcattaagcaggggttatgtactaacagagccccagatttctcagcaaacagaaccagaaacagagagctagagagagagagagagatctcagctagtcgatggattggaccaattcaagggtcaaaggtcgcaggactcggcagaggaggagtgggggacaccgattaactcaccgtcatgttgtgctcgaccagcttctcgctggaacatatcatgtagacgagataggcgcgtattagctctccagtggtcttgctcttgaaagcagcaatcggatcattaaagctcacgtccaggggatccctctgcggcgagccagcgggcgaggggttcttttcctgggacgactcctgcttcatcgatcgcttcaccgtctcgctggagaccacctccggttggaccagagtggaggcctgcagcggccggtcgccgctgtgcaggaagcgcgctccattgactcctctcgtggactccgatgctgctccttctccggcgatgctggtgctcccgctgccgcgctgatggaaactccggcaggcggcgacggccacggaattgctcgacttgctgctattacggccgtagaccaaactgatggctgttcgttgggcgctcagcgaacggagtagagccattacaagggattctgcggtttatttacgctttctgctcttcggcttttgagacggttattgaaacgcactccaatctcggttgttgctgcaaaaagaaaacaatggaaagcagaggtaatttcactattatctctacaaatcactacgaatctgagggaagacagtggcgtaacgaagagattactaaaggtggttatctcgttttcaactcgattacaataacgttttaaaaagtggaaatgtggtacatatataacaaaattattacgactgtttcaaaatatgcattgattttcaataagatcatatagaattgatttaattgtaattggatgatatctaattaatataaaaataataaacaaatgtataataaaattcaatttataaaaatattaaaatcagtgtacatattattattgcaactttttgcctaattgtgttttttgcccccccacaaaccccacgccaacgccaatgatcacagctgattttgtcggagagcttttcgctctccctctttcgctcgctccgaatgttatacaacaaatgcgaaaaacgtgaggcggcgagggagagcgaagccgaaaaaaacagcacaacacaatcacacgtacgcaagtacaccttcgaaatgttcaattaaaaaagtcaatttctgggcagaaatctatctttcgctattatgtgtcttttgggttttcttcttacttcgttcttattatttattctattacgctttgagcgttgtatacgccgcaaaagcacgaaaccaaatgcgacgaagacgcgtgaaaatggggcgagttgttaagcgacggcaaattcaacgaagcgaaacgaggaaggacccgagggcgagaaaatccttttcgccgcttcgctcccgtttatgtaactgtaaatgtaaccgagattgtaccgtaattgtaactacgactgtgtgacgtcacaggcatgccagccccgtttgcttctgattttgattttgatttggaatttgttttgatttaattgaaatgcgccgaaagcacacactaattggtgttaattgcggctctccttgattctccccaattttcgtt

SEQ ID NO: 22781 - DNA, 3357 bp, DROSOPHILA
caacaaccgagattggagtgcgtttcaataaccgtctcaaaagccgaagagcagaaagcgtaaataaaccgcagaatcccttgtaatggctctactccgttcgctgagcgcccaacgaacagccatcagtttggtctacggccgtaatagcagcaagtcgagcaattccgtggccgtcgccgcctgccggagtttccatcagcgcggcagcgggagcaccagcatcgccggagaaggagcagcatcggagtccacgagaggagtcaatggagcgcgcttcctgcacagcggcgaccggccgctgcaggcctccactctggtccaaccggaggtggtctccagcgagacggtgaagcgatcgatgaagcaggagtcgtcccaggaaaagaacccctcgcccgctggctcgccgcagagggatcccctggacgtgagctttaatgatccgattgctgctttcaagagcaagaccactggagagctaatacgcgcctatctcgtctacatgatatgttccagcgagaagctggtcgagcacaacatgacgaaacagctgatgaaactggcgcgcaacctgctcggccagaagctcttcgtcctgctgatgaagtccagcttctacggacactttgtggccggcgagaatcgtcacacgatcgtgcccgccctagagaggctaagatcctttggcgttaagccgattctcgattattccgttgaggaggatatcacccaggaggaggccgagaaacgtgaagttgaatcttccgtctccagtgcaggcgacaaaaaggaggagggcagcatgccgcagtaccatgtggacaagtcctttgcggatcggcgctacaaggtcagcagtgctcgcacctacttctacttgaacgaggccacctgcgagcggaacatggagatcttcatcaagtgtctggaggctgtttcgggcgccacctttggaactggcatcaccgccattaaactcaccgccctgggccgtccacaattgctgctgcaactgtccgaggtaatcatgcgcacacgcaagtacatggaggatatggtgggcggtcagggcaatgtgctgactcaccacaagaccatcaaggatctcgaaaagtattacgccacgctgggcgacaataaggacgtcaaggagttcctgaacaatgtaacgtccgataaggagggaattttgcatttgttcccctggtcgggcattgttgacgaggactcgcagctgagcgacacgttccgcgttcccgatccccaaaccggacagatgcgtcgactgatctcacaaataccgcccaaggaggaggagatgttcaggaacatgatccgtcgtctcaacacgattgtaaaggctgctgcggacttggatgtgcgtatcatggtggatgcggagcagacttacttccagccggccatctcccgtatcaccctggaaatgatgcgcaagtacaacaaggacaaggccattgtctttaatacgtaccagtgctatctgcgcgagacgttccgcgaggtgaacaccgatctggagcaggccaagcgccagaacttctacttcggcgccaagctggtgcgcggtgcctatatggaccaggagcgggaccgtgccaagtcgctgggctacccggatccggtaaatcccacgttcgaggccaccacggacatgtatcacaggacgttgtcggagtgcttgcgacgcattaagctgatgaaggactgtgatgacgatgccaggaagattggtattatggtggcctcgcacaacgaagacaccgtacgatttgccatccagcagatgaaggagatcggcatctcaccggaggacaaggtgatctgcttcggccaactgctgggcatgtgcgactacattacctttccactgggtcaagcgggatactcggcgtacaagtacataccatatggcccagtcgaagaggtgctgccctacttgtctcgtcgtgcccaggagaacaagggtgtgctcaagaagatcaagaaggaaaaacgcctgctgctctccgagattcggcgccgtctgatgcgtggccagttgttctacaagcccaagggcaattacgtgcccatctaagctggcctagatggatggaatcactctcacccacacacatccctgaggcggcaaatcggttgccaattatatccggctgaggatatcgccaggaaatcgatcgcttcggacctattttaatgtttttttttgtcgttcttattactctaacgaaatttccgtatattcaaagtatatacatatataaaaacttgtgtatataccaagatcctataaaagagcggcaatgtgttgtcctgcgaatccgcaggaccttcttcgcccacaaacaacttcaattagagacggtagcactgagcggtggtaatttttgatgaaaatatgtatatttttacgtcatgttgcaacaataatctaaacaagttctgtatgtgtgttacaaagaaaaaaaaaatagaaaaaaaccaactgaaaaacgtcaaaaaagtaagaaagcgaatgtgggacttccacaacgaggattttgaaaaaggggattgaattgaagcgaacattttttagcatcgtaacaaataaagcataaaacgtatggtatatacatattatatacaatataatgagagcaaacgtttatagagatatgtctacatagatacatgtatgtgtatggctgcattttagtctagattcattaacttcgtgattgtgcctgttcctcagtatcagtttatcagttgttagttgtccattcttcatttgcaatgtgatttcatgttcgttttccctaagttataccataaactatatatttatatagagcaatggcagcgagttatggagtgtgcagagcatttgttcctccatctcgtggccatccgatctaaaatagtcaaataatactgttcataggagcctgggatagccaaccgcgcatacctatacctaaacctagcgagttttattacgattatgctaaattaacttaaatgtttacgtttaatttagcacttaacggagcgatattataaaagtcattactatgatagtcgatggattagagcccgctacaaaaactctccccctattttcaatacgtttcaatatccatatctgatttcgcgtttcgatttctcagacaacaacagatatagacagtcagacttggccatatactaagccgcgcagatcgaaccgactagtttttcattattaccctcatgattattattgtattgcataaacgctataaataaatgaataaataattgtatgaatgttaactatttcaatgacaataataaaatgttaaaaacgaa

SEQ ID NO: 22782 - protein, 671 aa, DROSOPHILA
MALLRSLSAQRTAISLVYGRNSSKSSNSVAVAACRSFHQRGSGSTSIAGEGAASESTRGVNGARFLHSGDRPLQASTLVQPEVVSSETVKRSMKQESSQEKNPSPAGSPQRDPLDVSFNDPIAAFKSKTTGELIRAYLVYMICSSEKLVEHNMTKQLMKLARNLLGQKLFVLLMKSSFYGHFVAGENRHTIVPALERLRSFGVKPILDYSVEEDITQEEAEKREVESSVSSAGDKKEEGSMPQYHVDKSFADRRYKVSSARTYFYLNEATCERNMEIFIKCLEAVSGATFGTGITAIKLTALGRPQLLLQLSEVIMRTRKYMEDMVGGQGNVLTHHKTIKDLEKYYATLGDNKDVKEFLNNVTSDKEGILHLFPWSGIVDEDSQLSDTFRVPDPQTGQMRRLISQIPPKEEEMFRNMIRRLNTIVKAAADLDVRIMVDAEQTYFQPAISRITLEMMRKYNKDKAIVFNTYQCYLRETFREVNTDLEQAKRQNFYFGAKLVRGAYMDQERDRAKSLGYPDPVNPTFEATTDMYHRTLSECLRRIKLMKDCDDDARKIGIMVASHNEDTVRFAIQQMKEIGISPEDKVICFGQLLGMCDYITFPLGQAGYSAYKYIPYGPVEEVLPYLSRRAQENKGVLKKIKKEKRLLLSEIRRRLMRGQLFYKPKGNYVPI

SEQ ID NO: 22783 - DNA, 2999 bp, DROSOPHILA
tggagtgtccgcctgtctttgagccggaaatctactcgctcagcgataccagcttgtcccgcatcgtgatgcggacgcccagcagcagtggtgccaccagtgccaccgccagcaccaccaccaccaacaacaacaacaacaataataacaccaataacaacaccaacaccaacagcagtcccagtggcggcgaacaccatcagacctagatgtgtgatgaaaactattgtgaatgctcgcggggattagcccccgtttacttatgtatttatacacacgcatatagatatatatatatatattatatatagcgatattctcgtacgatttaggtatacaacttgttcattttgatcgtcttccctgtctgtccaccagaaacaaacacacgcatacctgcaatcccttcgattcgaaacccacttagatgtaaatgtttaatctgccttatttgcattgtatttcggttctaggcaaaatgttttacacatgtagtcacgcaagcaaaacaatgaattatagcgaaaatggagaataactttagaagtctgtgcatcgaacaaagacggttctttatgatttgcctttgtacgcgattaaccaagttaatccgagctgtttgatttgctcaacagtttgtgtctagattgcgtgtaatatacatatattattatgcgaaatgagatattattgtaatggcatccagcgacgccaatggagccagaaatgttgtagcggaatgcaagaaatatatatatacacaattacacgaaatatacatgcatacgaataaagtcaactgtacataatagaataacgatctttttattttgggatttttcaagaaacaggttgtttcattagaggaggattgaaaatctttttatgcacgcaacttattcaaagacctaagaaatgagaatctctggacagaagtgctgaaccctgcttctttttactaatgtaaccaaatcaacttgatcaaaacgagtattaccttctattattagttcgatttagaatccctttctttattcacattacatttgaaattagatcaatttaaaaccactgccgcttacgcaatgttcttaatgtgctgctccacctcctccttggtgaacatgtagaactctctttctttcgtcatggtcatcacctccacattggtggagtttagtttctcctccataacctgtttaagtgtgttgagcgaaatgtcgatagcctcatcgagagtcaaatcgggtctaaataagtcctgcagattctgctgagcaccttcgctgcccgagccaatggccttggctccgtggcgcacgaatgtgccggagggatccatgtgccacaactggggttgtcccgcctcgatgccggcaaatagaatggccacaccaaagggacgactcatggcggcggcaccatcgctgtcgccactatcaccgaactggatggccaaagtggacacagcctgggcgcaggactcgatggacatgcgctcgttgtagacgaaccagtggttctggcactccacgcgtgccctctcgatcagagtcctggcatcggccatcaagccggaggtggcgcaaccaatgtgcttgtccacctccacaatcttctccacagtactgggtaccattagcggcgaagtgatgcgcttctccaccgccaaaaccactcctggaatgcaattttaccattagatctccgcgtgtacttatggcagcaaagaacataccttctggcgtgcaaattccaattgctgtggagcccaatttgatggcctcaatggcatattccacttggaagaggcggccctccggcgagaaggtgttcacgcctctgtcgtactcggaacgcgtgagaaacatggtgggctgtaatttagttaagtgttatgcacgctggttgacaaataacacttcgaaaagggcttacttttctataatttccttaacaaaatcgcaaacaaatgccggatgacttgacgctgaaatgacttgcggataaagtgccgtctctgattatatcgataactagtgctgccacattattcgattgataatattactgtactaaacatgggttggcagctctgcatcaaaattggttgatctggcaagtttgtcgctgttaatttttacacatatttaaataaaaaattaaattgatattttaagttttcatttacaattacgatcacaaagaatattttgaagaagtaaaagatttttaaggtattttcaatatagtttttagaaatcttaatcttataggtttttgactgaattaactgaaaatagctctgctgcaatgccaatcaagtttcttgcatttcccgctttaatgcccaaattgacatgattgccattaagcctttaaatggttatataagtcaaacaaccagttaagtgttggactacttcaaggacccggtttaattaccaatttccagatacgtttattacttgatactggctactatcatctaaatatctatttttaatttccgatatattttcattagcttcacatacgaatcagtgtaatgtggactaaaggaagcagttgcataacaatcgaattaagagatttactttcacattggcggctcgtcggtttgcccgactgtccaattatggcaatttcaaatctaatcacaccccacacgcacagtctccaatggtcagaaaatccccgcgttacaagagaagccatgattgaatggaaatggaataacgattgggtcaaggttgccatcttgttttacccttctttcaaagataaagcgaacgtgcgccacaagatgcgaagatttctgaagatttgggagtggcgcgaagagaagagcaggggagaagtattgccaccatttaaccaaaaaaaaaaaaaatacaactgaaggtcgttgaccaattgcagtgcgcgggacagggagagcatccggcgtgtgcgagcgagagagacagacactgcaaacccgttaatcagaccgaaag

SEQ ID NO: 22784 - DNA, 880 bp, DROSOPHILA
tcatttcagcgtcaagtcatccggcatttgtttgcgattttgttaaggaaattatagaaaacccaccatgtttctcacgcgttccgagtacgacagaggcgtgaacaccttctcgccggagggccgcctcttccaagtggaatatgccattgaggccatcaaattgggctccacagcaattggaatttgcacgccagaaggagtggttttggcggtggagaagcgcatcacttcgccgctaatggtacccagtactgtggagaagattgtggaggtggacaagcacattggttgcgccacctccggcttgatggccgatgccaggactctgatcgagagggcacgcgtggagtgccagaaccactggttcgtctacaacgagcgcatgtccatcgagtcctgcgcccaggctgtgtccactttggccatccagttcggtgatagtggcgacagcgatggtgccgccgccatgagtcgtccctttggtgtggccattctatttgccggcatcgaggcgggacaaccccagttgtggcacatggatccctccggcacattcgtgcgccacggagccaaggccattggctcgggcagcgaaggtgctcagcagaatctgcaggacttatttagacccgatttgactctcgatgaggctatcgacatttcgctcaacacacttaaacaggttatggaggagaaactaaactccaccaatgtggaggtgatgaccatgacgaaagaaagagagttctacatgttcaccaaggaggaggtggagcagcacattaagaacattgcgtaagcggcagtggttttaaattgatctaatttcaaatgtaatgtgaataaagaaagggattctaaatcgaactaataatag

SEQ ID NO: 22785 - protein, 244 aa, DROSOPHILA
MFLTRSEYDRGVNTFSPEGRLFQVEYAIEAIKLGSTAIGICTPEGVVLAVEKRITSPLMVPSTVEKIVEVDKHIGCATSGLMADARTLIERARVECQNHWFVYNERMSIESCAQAVSTLAIQFGDSGDSDGAAAMSRPFGVAILFAGIEAGQPQLWHMDPSGTFVRHGAKAIGSGSEGAQQNLQDLFRPDLTLDEAIDISLNTLKQVMEEKLNSTNVEVMTMTKEREFYMFTKEEVEQHIKNIA

SEQ ID NO: 22786 - DNA, 3641 bp, DROSOPHILA
gaccaacagtttgacgtattcggcgatagcctccttggttgcattctggcgcttcttctggtgcctgcgctgcagcttaacagggatgacctcatcatcttcctcgcacaaatagtagatcttgctgatgttgctggaacgcacgggtcccaggcgacatggggagggattcttcttgagaacgaccaaagtcagcgcggatacgttggcttccacggtgtatttacgcacagtcttgcacttgcgcactttattgcagcgtggatggaagcacgagtgtatcttcttcaggagacgcaaacggcctgttggaaaagatgattgtttttttaagtagtttcttgagaggagtccatggatggatgtgtttgcaaatacttaaggaaatttattataccaattggatgctcaactttggagcgtactccaatcacatatagttaattattagcttttagcaactggaaatattcgctttgtattgctcagaatggaagaactcaccacgaatatgcacataagaatacacagacgatttcatatttaaggtatgttctctagatatattatcacaagactgatccaggttgcttggctaatgacagaagaagacaagcaacctcatgacagaagatacccaggttgcttggcttattacagatgcttaaaagggtttccatacggaacatagaaatctacacatgggaccattattgttttggcggggactgcagcaaatcgcaagagatagctacatatatccgctcacgatttcctgtttccatctctttccgattccgatttggccatataatggcttatgttggaattccaagatagtgtttgttttccatggtttccttaccaaaaaatgccgctggctagctcataaccaaaatcacatgcaatatgaaaacatttacacccgatactttagtatatatatcctaaagcttacactcgctcaatcgatcaatataattgaacacaacacaccacattctataccatttatcgcgtttatttaacataaatggttacaaagttttatttctcctctcgtggatcatttggttgtgatcaacgttcagtttctgcttaaacgaagaatgtgggttccgtgtcgcggtgtttacttcttgtcgctggagacagagctcttggactcgcgaatggaggcagaacggcggcgcttggcctcctcgcgcttggccttggactccttcttgcgctgcaccaacagcttggcgtagtcggcggaagcctccttggaagcgatctggcgcttcttcttcagcgcaatgcgacggtgcttgcgctgcagcacaacgggggtgatcaggcgctgaattttgggggccttggaggtggccttcttgttgtccttggcgggcaaagggcgacgcacaacgaagcgacgcacatcatcttccttgctcaagttgtagagcttgcggatcttgctagcacgcttgggtcccaggcgacgtgggatggtggtgtcggtgagaccgggaatgtccttctcacccttcttcaagacgaccagagccagcacagacatgttggcgtccacgatgcatccacgcacagacttgcgcttacgctcgccagtgcggcgtggacggtagcaggagtgtcccttcttcaggagcagacgcacacggcctgttggaaaagatgattgctttttgtagtagtttcttgagagcagtccatggatatgagcagtgattggaaagttattatctggttagccattagccattcgggtgtaaggaaatgtgtttgcaaatacttaaggaaatttatcctactaattgtttgctcatctttggaacgtactccaatcacatatagtaaattactagctgctagcaacgttgcaactaaattgttggaaatattcgctttgtattactaagaatcgaaaaactcgccacgaatatgcacagaagtatacacagacgcttccatattaaggttatgttcttttagatatattatcacaagactgatccaggttgctaggctttattacaaatgcttaaaaggatttccatacgtttcttaataggaaccactctttcaaggcgtacaaaagactaaacctatgccggctagccagatacaatcattcactgctcaacaccataattgtaaatcgcattgcaaacttaccgtgggtcaagacaccctgcttcatggggaatccctgcttgtcgttgccgccggcgatgcgcagctggtagcccttccactcgtcaccgaggatatcggcctccacaacctgtcccatacgcttctcgtagaagacgcgcagcttgtgctcgtcgaccacttcgaatagcttttggcatcccgtcgcgggataggaaacgttgagctggaacacacaatgcaaaaaaaaaagtcacacacaatgcataaacatacatataaatgtatattaagtcgaattgcagcggagataatatcatccacttattttaacgcaatcactggacattttcgcttgcaatttgtttgatcaccgcgccaatgcttgcgctttagcattttcgcaatatttcacaaattgatataatttatatcagtattatcacaaatttttagcacaccttcatattgtcggtctgtttgcacgcaacgcagaaaaaaaaagaaacggcggaggtctgttggctgcgagcgcagggttgaaaaagaccgataggaggaagtagagatgacagatcgaccagctgtaccgccgcatatcgatagttcgtgctcacggcgatatttaataatttctttcgatgtaaaaacgtaccaaaatatgaagtggatttatatatccaaccttcactataacattaaaactgagacataacaaatattaaaaagtaaatgagtttattaaaactatgaagatcactaaattgtttgtattaattaaaattataagaattatgccaaataagtacgaaaataacactcgttattaataatacacgagaatggagataattgcactgattcatcaaacatgctatattgtgcgttctaaatatttatttatgcgactttttaaatacatcttgaaacgaattatatcggtacaatcgatttcataataaacttcaaaaacaatatatatagattttattgaattactgcattcaatatcgtttgcgccaccatccctggtctcacaagcctatcgaaaagccagccctgcgacgttgccacacgtgcgaaaatgtgttttgtttttcgattctttcaaaatatccggtaacgccactgctttgttgcagcacgtgtagtgattacaatttttgttgcccttattattacacttgatttttgacaatatccgagcaaaatgggtaagccgaagaaggccaacgtggcaacgattaaaaatgtgaatctggagaagcagatcaccgagggcagggtggcgaaaaacaagaacaaggataaagtcaaactgcgggccgaggaatcggcggtaagaatccgggtttgaactgcgttttgtgtttttaaacaaattctttcctatttgaacacagaacatcgatgccagaagtagtcaaaagatcctggccgcggccaagctgcagcagttggagctggacgaagagaacttt

SEQ ID NO: 22787 - DNA, 1128 bp, DROSOPHILA
aacagaccgacaatatgaaggtgtgctaaaaatttgtgataatactgatataaattatatcaatttgtgaaatattgcgaaaatgctaaagcgcaagcattggcgcggtgatcaaacaaattgcaagcgaaaatgtccagtgattgcgttaaaataagtggatgatattatctccgctgcaattcgacttaatatacatttatatgtatgtttatgcattgtgtgtgacttttttttttgcattgtgtgttccagctcaacgtttcctatcccgcgacgggatgccaaaagctattcgaagtggtcgacgagcacaagctgcgcgtcttctacgagaagcgtatgggacaggttgtggaggccgatatcctcggtgacgagtggaagggctaccagctgcgcatcgccggcggcaacgacaagcagggattccccatgaagcagggtgtcttgacccacggccgtgtgcgtctgctcctgaagaagggacactcctgctaccgtccacgccgcactggcgagcgtaagcgcaagtctgtgcgtggatgcatcgtggacgccaacatgtctgtgctggctctggtcgtcttgaagaagggtgagaaggacattcccggtctcaccgacaccaccatcccacgtcgcctgggacccaagcgtgctagcaagatccgcaagctctacaacttgagcaaggaagatgatgtgcgtcgcttcgttgtgcgtcgccctttgcccgccaaggacaacaagaaggccacctccaaggcccccaaaattcagcgcctgatcacccccgttgtgctgcagcgcaagcaccgtcgcattgcgctgaagaagaagcgccagatcgcttccaaggaggcttccgccgactacgccaagctgttggtgcagcgcaagaaggagtccaaggccaagcgcgaggaggccaagcgccgccgttctgcctccattcgcgagtccaagagctctgtctccagcgacaagaagtaaacaccgcgacacggaacccacattcttcgtttaagcagaaactgaacgttgatcacaaccaaatgatccacgagaggagaaataaaactttgtaaccatttatgttaaataaacgcgataaatggtatagaa

SEQ ID NO: 22788 - protein, 217 aa, DROSOPHILA
MGQVVEADILGDEWKGYQLRIAGGNDKQGFPMKQGVLTHGRVRLLLKKGHSCYRPRRTGERKRKSVRGCIVDANMSVLALVVLKKGEKDIPGLTDTTIPRRLGPKRASKIRKLYNLSKEDDVRRFVVRRPLPAKDNKKATSKAPKIQRLITPVVLQRKHRRIALKKKRQIASKEASADYAKLLVQRKKESKAKREEAKRRRSASIRESKSSVSSDKK

SEQ ID NO: 22789 - DNA, 12559 bp, DROSOPHILA
aacataccccactgaactaccgagccaacctgttgcatgtacgctcgttgatcgagtgtgtggaaacggacgtgccgatagatctgggattgggcagcggcagctataagttcatattgtgcatcaatacaaatggtagtttttagcgtaaacagcgtactttcattaacacttccctcgcttttcaggcatcatcagctatgtgtctagcgcctttcctggtagttgcgatgatcttcaattgtttgaggccagcagatttcgggatgtcattcccaattacctaacactatgcgcggaaccaggcaaagcagtacgccgtgctcgcaggtcgggcttcggagatcctcacgactcagcggatgaggatgaggcggcggcggaaccaaagcgatcacttaccaaattcgaggcacagcgtttgagtggccagctagcaagccagcaatccctatccgttgtagacggagcactgacttccaagcgggctccagcgattcaactacccacattcaacgcacaagaacccgcctgtagagcccaaatgagagatatgatagattatttaagggaattccgcatgctggataattcggctattaagcaaaagtcattgctgggttatcttgatgaaatgatcgtggtggctgcgggtctatgcaaccttaagcgccaagagttggaatcttaaataagaagtgccatccgcgaaggtctgtttaaaggccaaccagatgttattgtcctagttattttaagaatttaatttaatgtattgttaatgcaatgtagaaactgactattaacaagtacgattaaaagggtatattttaaagtatttcaaagaataaacactacgtggtcattcaagaggtttttgcttttatctggaaacatactcaagtgccttattttcgaaaacattattagtttctcgatttccacagtcgtacttgtcctcttgtttgttcagcttccccatagttaaacacttgcagttgtatttcttttatatttttgctttatttactttacaaaaatacaagcaaaactaagtacatattcaatgaaagttgttcaatgaaccagggcaacattgccaatcggagtttgcaatatttgaatttgaagaatacgcgtatgtcgtacaatgtatagatattccaagggtaggtgctccatcatatccgtttactctaccatcgttggtcgctctttctcttagggggtaataattaaaaacttgcttagttaataagtgactcttcgtactaatagctaaacatattgtatattgtgtggtgtggtgtatgcctgacaaaaccagctctagctcctcatcctgacattataacaagtagttggttgggctacccttttcgtctcagagcttctgaatgatgtcgaacttcttcttgaggtccacactctcgttcttgggatcgtacttcttcttggatgccaatttggcgcgcatttcggcggccgtcattggtaaatgcaaggtgcccgccttatagccactggtcggtgggggtggtgtagtgggtgtggtcatgccatttgtaccatttccattggtgttataaacactgccattgttgttgatgccagccttagtagcggacggcggtggcggtgtgctcatcaaagtgttattattaatcggcgatgagggtttacttccattttgaacgggaggcggggtgatagccaccggagcagcgactgccggtattcccctatcgaccacatccaaatcggaggcattcatggtactgccgctctgaatgctgctggcatttgaggatcgcttggtgctcaccatactgatgctactgatattggcacttgctccgggcatctcctgtttggtgccctcgtatccattctgactggcactaccgtttccattgcacgcagcggctggcggagatgccggtttcacctccaaggccttgccatccacatcgatgagcagcaagcggacttcattcgcaatggccttgatcctggcaaccacctgcttgtgggtctcgctgccaatggacaccccgttgacctccaggatgcgatcgccctccttcaggccggctgcctctgccggagaatccgcatctactttgccaataaactgtcctggtttcaccttctccgaatgcaaattgaaaccatagccatcgaaatcgggccttttcacaatgtgacatgttttggtcacgcccggtggcaaagtgggcggtgtgggcgtcttcggggaagtgggcgtggacatcttgacttctggaaaaaaaaaaaaatatttaagtattacactatttatagtttcttatttactggtttcaaaaatcatactatatactactatatttgcaaaaataccaaaatatgtttgtttgggagcagaaaatgctttgcaagatcaattccatttggttcaccaatcagtctgtggaactcaagtgccgcagaaacatttgctgataaaatgcaagatttcataatgagctattgttctttggcaaccgatacatgagtctggaatggaaatgtcacaatatcgtactaagttcttctctttttttttataggggtagagcaatgcccagtagatacacatatatgtacatatgtaagtatgtgcgtatgtttatggcaagcaccgactaccgcgatagataagaaaccttccagttcattcagttttttggccagcttatcgcgtattcccttaatggccgacattggacaatatgctgacccacattacctgaccccaaaaatcgaccctggctgaaaggtccatacaaaggccgatcggccaaaaggtacgtgttgttagtgcgcctccatttcggggtactagtttcgatgggcatatctggcaagtacttgccataagggtaattgctcgacaaatagcatttatagccgtgcttaagattcggtcttgtttttgttgctgttccactttggttttgggaaactggcaaacgggtaaatagaaattccacatgcatgtgctcatgggtcaaaaatgatttagcactccgcgcttatcgcaaaccaacccaaccacccacacgaacacacacacacagccacactttccggaaaggaacgtgattttcctgaaaacttgcaaaaatgtttcgttaaatatcatccataatattaaacgtgaataactttagctcgcaaatgggtttcgcgtatgcgaaggaatatattgaaaaatacgtgtacatttcattttaaatagttatcgtaataaatttcttatgattttcgggaagatgtttcaaaaaacaattttatagagattctataagtataaatagagttttgagtttcatttcaaaaacaagaagagttgtaggatttcagtaatagatatacttgtttgttgtatatttaatagcttatctccatcgtgtatcttcatgtttcgcgaaaacaaaaaagggttttcgaaactcccgacgacttgttgcactcgatttgctaacgtgctaattactgatgggacacacatcgcttcacgtcattgcggcattagcacttgaaatcaccgctccggtattaattgcccgtaatttttagcccgtgaatgcagcagcccacttcgaagccctgaactttgaatacctgaatacctgtataaactgaataaactccagtcgcattcgcaggcattgcaaattacaaaagcatttttgtgttccgcctcagcttaaatttcgtttgccttctatttatatacttatttatgtttttgttttttttttttacggtttgttgtggattttttttttagcccgaaagttgaatcatcgttggccataagatttatgaatgttggcattagctccgctctcccctccgcactcccctttggagcccaatttattggtacaagatgagctcgtgtttgtgggctgtgggcgcgcagggcggtggggggatgggctgaccttgactttcccaccgccaattgttgccagcttccattgtaagcgatttttaattcaattcaaaggtaaacaatgaggcgcaaaaaaaattcaattcagaacccacaataagacaatttgccagtttcgtgatagggggcagggggaaggggtatgggtgcgtgtgtgttcgttgcacgggatgagatcgaaataataataaaaataataataattgcctatactcgcatgtatgtaggtttatggctctcaaccagccgattaatatttgaattaggaagcggaactgacggctggaaaaacgtcacaaaacatcagaggcaacaaacaaagaaatcgttgaattgatgggacggaaattaaacgaaacaaataaatagtacaaatctacatgtggctaataagcaacacaacaattattaaaataacgattaaatgtaattgaagatggtgctataaaattattgaaattaatcaggggttttgcgctaattacaagacgatttgtgtggcaattggttaatttcgattgttaaagaaaatacctatagaaatattacgtcgtctaatggcaaagggaaaaccttcgactgacaaggtacatactttgttgaatttcgtaagttcataaatcgttttttacccattttttttttgcttgctctgctaagcgatttcccgttgtcagtctttggtccccccccccctccaactcccccggccaacaacactccagtttctctgcctctattctccgcttctcgagcttagagaactgcgcaaactttaattgaatttgcaatcaagcatgaagtacacacatatactagctggttttatcattcacaatgcttggggaacagccgctggacaaagccccccatgcccccatatccccccgaccaccccatcagcaccgcccacagccccgccccgcgtgacaacccgcatggcaggcgccattgttgttggctgtttgtttacttaagcggtttctcatcattaaagcaaattagccgttaggcacttacaggtagttgatttcgattcggttagggattctctagatcgagccatagctccccttttttgtcccaatatccgttataacccctttaccatggagccatagagaacttttcggaatttttccgaacggaaacattttcctctgggcggctttcttgcaagtgaattctaattaggctcagtgtattgttagattttcgcacattcgcagcgaatttaattatatcttgagtaaatatgcaaactcaagatctgataagccaggaaatagaaagaataacagccgaatagctaagataatataaaattaccaagtgccccattcgggggatttattttgggattatcgcccccaacaatgaaatgcaaatcatcatctgtgcttaggtgaggaattcatacagccagtgctaaataaatgagtcattcgagatgtctggaattgtggggagtgggtcattcgagatatcaattcatgggaacggatttgtaatcagatattataaggtttgtcgattcactcgacagcaacttgccttcgctgttttgcgaataatttaaggtgcttcaaaatgtcagctcaatagatatacagctctattttcgaagatctatttctaaggggtgttccaaatgtccacctcctggcgttaaaacgcagtaataaggtaattgtttctaacaccctaatattcccctaaatctcaattagtcaagtcataaataaacaactattccaagctggcggtttatatatataactattatgtaaacccttcacattgcttaaataaaatgctgaaaatatcaacatataacattatttcactgtcaggcaacaaacaaacgcagaaacgatgataatttcatcgtttgccataaaagtgactaaaagttaaaggctacgtaataaattaaacaaaggctgacgacattcgcctatttactttggagtgctcaaacacagatttttacgtaagtaataaaacatataaaaaagtgaaacgcaagagctggtagaactttcactatcttcggatcgtgatcgacgatttatgagatatatcaaatccatttcaatgttgagccattcaaacttcagggcgggacacctataattgattttcattcggtttttatactgcacacccattatcttaacaatttaagacacattttaattttcgtgtttgacgttatcaaatattgttcctcttctatggattcgagacgactatcttatcgcaacctgattttaattaaagaatttctggcccattgcccttgtccactgctgctgctgatatgaatggctaattatgtgaggactttttggtaagatgacgccaaagtgattagagtccacttgttttcggtcgcgtttagcacctagcaattgttcgattgtggtgacactgccactgccaccatccatgaatcactttcacagatattcataaaaattcattagcagcctctggctaaagattcaagatctcagattccagatgcgagaagattgaagaagatgcgccttccaactgactgactgaatggttagcaaatacctcgagtacagctgggaaactctgcaaaactggttatgattatttactctttgcatacctctgactagagtccaagttattgagggtgtattagacaaaatcggagggttgtcacgcgatgggtgaaaactggttaggtaaatacccgtggagcacactgcggcagttcttgggaatctcaactagtggaatttacacgttttgtaaagctctttggctaaatacttgaaaatattagttatatctttattaagttaaaatatgtttaatgctagcccaatgtactcaatgctctcaagctgtctttacctctacaaactgcgcttttctatattattcaatgacactggcaaatgctgtaatgtgaatgtaaatctggctccgactctaactgaatgtgacctgcggggccagcctcgcttagaaactcgaaccttaagtcgagattcagacgccaactttgcgattgaaacacctgcacacggggacaggtgagaaaaaaagaagacactttgctgtacacacttgtcttgctaatcaaaccgcgcccatgacaagtaaagtgcattaaaatatttatttgctcaaggtaaatcctgtgtcacatgcaaaatggggtcagcaaaggaacaggttttatactaagcaaccataactaataactagtaatactccttaactctactctgcccttttccgtataacaataaccctgctctgtaataaattaaaactcgttggcaaaaaaagtgaatcttgcaataacacttcgcacatttcattagccagaaaaaaaatgcgatgggaaaagagaaaaccccaagaggagaccaacccaaggcgtatatatgtacatatatcattttcttagcgtttcaagttaacgtacaacggatctctctgggcgtactcagcaatcaatcaaaactttaataagcaatttgcggagtcgccaaaaacaaaataaactacgcaaaacagccggctggggaaattacgtgtaaaattatagaattcgaaacgacaagaggaaatgtcaataaaaaaaaaaagagaattaaaacgctgccccagcagtcttgcagatgcaacaaattgtttttggttgttagccgcgtgtagtgtagtaaccgacttgttttcgtcgctgctgcctcgcgaaagcaaaaacgctcataaaacttggctgaaaaattctaggcgcaatgtatctcacagaacgtgtgcatgtggcaccgcacaccagcgaactcgccagatgctcgcggatatacagatacaaaatatacaacggctgacgggctgacgacactgcggcccgcgtacagaaactttttagcaaccagaaaaaaaaacgaaataataaaaaataaggtttaagatcgccctgagtgagggggatgctttgtggaaaggggcaacggagggagggagagccacttagatgctgtatctctgtatctgtagaaacctggtcctaaccaaattcattttgatgctgcggctgcctcaaatatttttcgtgcgttcagccggcgaatattttcgagatactctttcagaagagctacatgtagtagatagtgaaactaaattttctatcaattgcttgtatttaaagaaaatccttttatttcaatagttcagttctacatacaggaaaattgagtagtcactcttattattttatttaagtaaagtaatcaggagtaattgacttaaaagatataagctttccctaatgatagtacttgattacttggtaatcgttattaaatggtttgaattccttaaataaaacattgccctttactcccttttagagcattaaaatttcggttaatcgaattctcaacttcctttcctgttgcgacttgaattttcgttttattctgtttctgtagttattttttggttgagcttgagaaaataaaaattgattctagaacctgttttttgggtttgctcggggtctggtcttctctctgctggctgctttgtgctggccttttgaaatatctttggctttgtacttgtttcgttgctgctgctgctgctgctgttttaggcgtttcttcggctgttgaatctcgtttgggtcttttgtccgagcagccaaacaaaataaaaaaaaaagggagtaggaaagcaaagcatttctgtcggagatcccagactcggagccaaactccgaccgggattggggctttcgttttcgtttgttcgccccatccatttaataaggcacatattttgtataatttataccattatttttcgtatcttcttcttcattcgaaagtttatcaaaagcgaaaagtaaaatttctaagctttgatttgatatattaacttgcagctttgtctttttatataataatcttgaatctcaactgcgacgaatgtgtttttttttcaaagaccttgggaatattataaattaacgtttagaaaaaatgatgatcggcagcttaagtagaaacaataataatgcacaaacaatgcgcaaattgttgcttgctaacacaatcacttaaaggtataagatatgtttgcaaaagctgaaaactgtatattcaggtactagattcagttactatactcaggtaacatccattgtggaaagacgctgcaattgtgaagattttcgcatgccattcaaaatgcaaatgaatggatgtgggaaccgcatgaatcactactacattttcgcccaaatatgataaataggtttaggatttgcaaattctatggaagctcaacggttatcattgtttatttttgcttcgaatttcatttagaattcaaggctacgaattcgaaaatgcgatcatagcaatcacgatcacttttggccttcacaatcagctgtttgctgtgagaaatacaaatgatttattgaactcgagctctttgggaaagcgcatagttagctttggctaattaataacattttttatagggaaattctggataaaagtgttctgttttaattgtcacgatcagtcttattcgcaccaaagtttgggggttcaatacgttccaggaattgctgaaacaattgcctacttattcatttcgtggaaatctcccgtagaatagatttaaataacaatttgaaactaaatattcttattatgccgaattccacaatctctaggccaattctcaataactggttgtatttctgacatactcattgatcttgcacagatctttctatccgcgaaatgtgtcaaaaatcgtcgggctgtggccgcgataaatgcaaaacccgatcgctaaataccgatttaatcgaattagcatagctagtgacaagcgcagaacgccgaagattggatcttaatcgtggcaagtgccatagaaaaacccacaaaagaggagggggaaaaaaactatgaaaaaaccagaaatacacgcgacaaaaatgcacaaccagcaaatcagaagaagtaaaccggtgaattagtgcaacaacaaccagcgactcgaaactaaaataaaagcaaagtctaaacaaaaacagagaaaaagactagaaaaaataaccattaaagaaacctgctttgaggcattgctggaataccagagttgtcacttggggattggggatttcggggctttttcaggtgaattgcaggtggggagtgtctgctgtcgtaaataagaagaagaagtgggagtaaaacctgccaaacttaacagcgatttatgaatagcgttagaaagagaggccgccaagtgataggcgacaagaaagagacaaaatcgcatgcatgtcgcatttgcaaacgcaacggccttatgcaatgcgcccaaaagagatggtgcgagagcgtgcgagtgagagggggcaatataaatcaaaacaattattatgtaaggcggtgcgacggttagtgcagccaaaagcagttaacagggcaacacatttagcggtacgcaataaaagcccattttaatttggcttatttagtttattgattcagctttaatgcagagagcaaaaagttattgttagcgggtgtactatttcaaatgcaaataatccccttatcagtatctttaagatatacttgtacatatagctatggacttaattgggattcagtttaaaaaatattgacttgttccatcaaatccttgttgtttcatcaattgaaatttaaactgaaaatccgattataacaattttctaagtgtaatcgttaaggccgattgcagcttctcttccctctcgctcccgcagccaaatcgtcctctctttcccaccccaaagcgctttgcgtgtgtaaattgtttatttaatttcagttattgaaaatacagtttttatggctttcaattgcgatgaccagcaaatgaaatggacttttattaacttggttaaatcatggcaagtgattcaatgcgattttataattatttttgcacatttatgtttagcacgttgttttgttacgtttgtccgtagtaattccaatggatcaattgatattctgctcgcatttcgctcaagttcagtggctctaaaactgtctcaaggctgcaaatttcatttttcgacttaccgcttaaacaaacaagtagaaacgattccctttcaaatgttgctgttgattttcagttttctgtttttgttgcagttattattgttgcactctctactcttttccgtatgcaaacgctgtcacatacacacacataaacacgtcgtcgttcttgttgttgttgttacaaggccttactatttttaatgaaatgaaggagttgccgaacagctaaacgaaacgaaagcgaacagcacacgaaaaagtcacacaaaacaatcggctaaaataactgttgacaggcgaaagaggcgcagagagagggctactcgcgttgtttttgctgctgttgctgctgccttcctgatattatttctacgtatgtaatattatctcacacgctgaagatccgttgaaacgttgttaacgctttcgcgggcaaatcgtaactgatttcggttgctgaagcgtccgcggcaggtgagagccgaagtaagccccgatcgttatgtgtgttgtgttgcatacttttgggccagcgtggtggaaaagagagtagaaaagtccgcagatcactgtggtgagtttcacgggagttcgagggcgagagatttttcggcttcaatggtaaatctgaaaactaaaagaaactactttttgaatgttctgaaatgtttatgttttaagcagtgcaaccaatacgcttaacgcaatttattagctattatttatttaactccacgaaattacaccactttatggcctatcgtatgatgactttgtttcaaagctctttatttccgtaaaacccatcactttgttgtcttcacttttgggcccttttaatcccattgtgtcctcttatcagcagtgtccaacgatgtttccaagccactgcattacctgtatggaaatcaatcagagggatgaacgagaaggcactgggtgcaattccaattggttttgtcgtccgttgcaagaaagaagccagttctaaacgaaatgtatgaagtgtaatggaacattggtaaataccatgcaatgagaatcgctgttattgagtgatattaggtccttgagctgacgcttatggatatgtggtcaactgtacttctggccctgctttgacagctgacaactgtcattttcggcctggcgcacctgacgtgtgctcatagaatttatttaatttccgcctgggcattcaagtaaattgactttcatcgccccttggcacactcttttcactccacgtgtgggagacaaacaaaagccgtgtgctaatgcaaatttgggcagatctttggataaacatcgcaatggaatagtcaaagttccagcggcacattccactacaaacaaaattggggatgattgatggtggtatttttaacatttaacattttagaacatttatgaaaaaaatttacgtata

SEQ ID NO: 22790 - DNA, 1697 bp, DROSOPHILA
cgaaagcgttaacaacgtttcaacggatcttcagcgtgtgagataatattacatacgtagaaataatatcaggaaggcagcagcaacagcagcaaaaacaacgcgagtagccctctctctgcgcctctttcgcctgtcaacagttattttagccgattgttttgtgtgactttttcgtgtgctgttcgctttcgtttcgtttagctgttcggcaactccttcatttcattaaaaatagtaaggccttgtaacaacaacaacaagaacgacgacgtgtttatgtgtgtgtatgtgacagcgtttgcatacggaaaagagtagagagtgcaacaataataactgcaacaaaaacagaaaactgaaaatcaacagcaacatttgaaagggaatcgtttctacttgtttgtttaagcgaagtcaagatgtccacgcccacttccccgaagacgcccacaccgcccactttgccaccgggcgtgaccaaaacatgtcacattgtgaaaaggcccgatttcgatggctatggtttcaatttgcattcggagaaggtgaaaccaggacagtttattggcaaagtagatgcggattctccggcagaggcagccggcctgaaggagggcgatcgcatcctggaggtcaacggggtgtccattggcagcgagacccacaagcaggtggttgccaggatcaaggccattgcgaatgaagtccgcttgctgctcatcgatgtggatggcaaggccttggaggtgaaaccggcatctccgccagccgctgcgtgcaatggaaacggtagtgccagtcagaatggatacgagggcaccaaacaggagatgcccggagcaagtgccaatatcagtagcatcagtatggtgagcaccaagcgatcctcaaatgccagcagcattcagagcggcagtaccatgaatgcctccgatttggatgtggtcgataggggaataccggcagtcgctgctccggtggctatcaccccgcctcccgttcaaaatggaagtaaaccctcatcgccgattaataataacactttgatgagcacaccgccaccgccgtccgctactaaggctggcatcaacaacaatggcagtgtttataacaccaatggaaatggtacaaatggcatgaccacacccactacaccacccccaccgaccagtggctataaggcgggcaccttgcatttaccaatgacggccgccgaaatgcgcgccaaattggcatccaagaagaagtacgatcccaagaacgagagtgtggacctcaagaagaagttcgacatcattcagaagctctgagacgaaaagggtagcccaaccaactacttgttataatgtcaggatgaggagctagagctggttttgtcaggcatacaccacaccacacaatatacaatatgtttagctattagtacgaagagtcacttattaactaagcaagtttttaattattaccccctaagagaaagagcgaccaacgatggtagagtaaacggatatgatggagcacctacccttggaatatctatacattgtacgacatacgcgtattcttcaaattcaaatattgcaaactccgattggcaatgttgccctggttcattgaacaactttcattgaatatgtacttagttttgcttgtatttttgtaaagtaaataaagcaaaaatataaaagaaatac

SEQ ID NO: 22791 - protein, 296 aa, DROSOPHILA
MSTPTSPKTPTPPTLPPGVTKTCHIVKRPDFDGYGFNLHSEKVKPGQFIGKVDADSPAEAAGLKEGDRILEVNGVSIGSETHKQVVARIKAIANEVRLLLIDVDGKALEVKPASPPAAACNGNGSASQNGYEGTKQEMPGASANISSISMVSTKRSSNASSIQSGSTMNASDLDVVDRGIPAVAAPVAITPPPVQNGSKPSSPINNNTLMSTPPPPSATKAGINNNGSVYNTNGNGTNGMTTPTTPPPPTSGYKAGTLHLPMTAAEMRAKLASKKKYDPKNESVDLKKKFDIIQKL

SEQ ID NO: 22792 - DNA, 2825 bp, DROSOPHILA
aacttaattttttcctgcctcttgttcgccattgtcctgtttaaaaacatccttttgttcaacccttttgtttcgccccctgctaatttgccacgttgcctttttcgggcagtaaaaaaattgagtaaaagtgggaaactctttggctttgattgtatctgcccttcggcaggttgtttgtgtcaggttacaaaacgccagatatttacgataagatcaatggaatcgggggcttgttcttaaagctaaaatcttaactaaattattgaattttaagagctttaccttgaagttgtccatgtctatgagttgcgtggcctaaaatcactcggatggtgacagacgattgtagttattcagatgagtttaagagaacgttttattttcattacagtttacacagagaaaatcccaaatttgttgttcatatttttgaacaaattaacgctcaattaataaccgattttctctatgtttatttttttttaaggtttcgatgggtggtggaactctcttatttgtaagccaaaagctaaagccttctactcgggacccaagactcaagcctcaagcacactcacgcacacattctcaattctcaagctcagcccggcgctgcatttagctgcatttagtttatattttatttggtaggcacttagagagacagccactaaatatatagtgtgtatttaagatatatgtatatatagaagcacagagataccaaaaacgaaaatggagtttataaaagcacagaagcacaaacaacaaaagcgagacaagatcagttttcgctgaggcccttaattggggattcggtattggtttgaaatatgtatattatttcttgtttattttattttttctttttttttgtgggatgagaaatcaagacttaaagcttacggtctacgagtcacacgaagcaatagaggggagttggtggttgagggtaggtgtttctagttcggtttaacaagggtatgggagtactgaccttgatgctgtcgtagcaggcggtgaccttgccgttctggacctccacgttggccgggggatgggcgaacttgcattcggtgtcctggcgcgagcatttgttgcgctggaactcgcgacagacctccaattgcagccagcgcgaatccttgccgttgagcaggctgttcatattgacaacgttggccatcgtattttggggttatagatatataactatttgctgtttacggatctggatctgggatagctggagtttgtatagttatagcctagcgactagagatagttttttgttttactatacgtttttttttttttttttggttttgagtgctcctctcgcgacacgcacacacaaaaaacactaaattcaagagcacagatcagcacctatatatgtttatagcatagatctatggcagatggtatgatttcatttgctatctggtctttatcgattttgctcgttagcgtttttgtggagtacaaagcttgtgggggtagctgatagcttgggctataattttgattcaaatcgaacgcttattcaaatatatagatgtgtatatatatatctatagataaacgcagctgttaatttttgtattttatattttactgcttttttgtgtgtaagctgagtttacattatcacggctggcacttggcccgatatgaccggttggccgggcgcgatgcccatctgttgcatcagtgcattcttgagggccaaatgattgcgtccatttatcaataactgatccttcagatgctgtggtggatgaaagtatttgcacggcggtttatcacgattacagcggccctgcaagtaaattcaagcgaaatgtttagcaaatttttccactaactagtcagcattttatgtacacatataaataaatatataactagatatatatatatataagagagagcttcataaatttcccccgactgacagccagttgggggttaaatccttgggccatccacatcggcagtcggccataattcagtttcgattgctggcagtggcaatttagtaagcgtgttggtcaggaagtgcttttgtcgcactaaataaattactagaaacaaatttatgttaatgccatttactcctgtttgcgggtcctgtgttgattaacacaaattgttgtgcttaaccttaatgcccaagtccctttccgcttcgttttgcaaggatgagcatagctttattcgatttgattacactgcttagttatttaactgcttaaatacaaataaagggcttaaatctgattaaaagtattatttatatctattagatggatagatcttaaagtagccaagtaaaagaactgacgtaatgtgttattaacaatatcgcgaacttgtgcaatgcaatcgcctaatcccatggtagttgttataatagcgagccatttgaaggaaattacactgcctgttgtaaacttcctgctatgtaatttgcgttatccttggcatgactcagagtcctgaataactttatgttcgtgctgtcaacacattttgcccagccccaaaaagaaagccaaaccaattaactgcatgcaaaagccgttgcaattctgcttcagggaaaatcgggagaccgaaatgttcacgagacatggcatcacagttttccaaacatattttcgggctatatgcgcgatcgaaattcgtttttaattgcgaaaaagtaaaatttcacttcattagcacgtataattgtggcgccgaattaacgcggctcactctccattttaagccgaaatgtcaacaataattataatgaccaagggatcgaaaagaat

SEQ ID NO: 22793 - DNA, 3842 bp, DROSOPHILA
gtcagcggaaaagtgaattataccagagcctgcctgaaaaactcaagaaaaccccatcaaagaaatagcagctctcagctaaataataacaaacacaatactttctgctcagtcaccgcaaacagaaataatcacaattctgcaaaacgccgtcatcaaaaaagttttagcctacaactctagaaacgcggaaaaatttgtcaaaaatacaactaaaaaaacaacaacgcgagtgcacgtgtatgtgaggtgctcagtaagagtgtttgcgtgtgttcgtttctgtgtgtgacagataataaaaggagaaaaaaagaagttgtcgaaagtcgttcgtgaaaattcaagaaaaatagtgcaagcgctgcagggaaattgtccggaaaaatcgcaaaatccattgtttttagccggcatcttaaaaaccaacgataacaacagcttctgcaacaacgcgcgtgtttagttcacacacacaccacggagcgtcgagaaaaaaaggttaaaaatacattttcaattcaccatcggcgtaaaagtaaaacaataaacaaatacaagaaaataaaacagcagccgctttttcacccaacaacaacaatttcaacaacttcaacttcgccagcagcaacaacaacaagtcagctggacaaccgaagataatgtaaactcagcttacacacaaaaaagcagtaaaatataaaatacaaaaattaacagctgcgtttatctatagatatatatatacacatctatatatttgaataagcgttcgatttgaatcaaaattatagcccaagctatcagctacccccacaagctttgtactccacaaaaacgctaacgagcaaaatcgataaagaccagatagcaaatgaaatcataccatctgccatagatctatgctataaacatatataggtgctgatctgtgctcttgaatttagtgttttttgtgtgtgcgtgtcgcgagaggagcactcaaaaccaaaaaaaaaaaaaaaaacgtatagtaaaacaaaaaactatctctagtcgctaggctataactatacaaactccagctatcccagatccagatccgtaaacagcaaatagttatatatctataaccccaaaatacgatggccaacgttgtcaatatgaacagcctgctcaacggcaaggattcgcgctggctgcaattggaggtctgtcgcgagttccagcgcaacaaatgctcgcgccaggacaccgaatgcaagttcgcccatcccccggccaacgtggaggtccagaacggcaaggtcaccgcctgctacgacagcatcaagggccgctgtaatcgtgataaaccgccgtgcaaatactttcatccaccacagcatctgaaggatcagttattgataaatggacgcaatcatttggccctcaagaatgcactgatgcaacagatgggcatcgcgcccggccaaccggtcatatcgggccaagtgccagccgtggcaacaaacccctatctgaccggcattccggccaactcgtacagtccgtactacacaacgggacacctggtgcccgccttgctgggtccggatcccgtgacctcccaactgggacccgtggtgccccaaacagtgcaggtggcacagcagaaaataccacgttccgacagattagagacctcacctcttgcggcacaccatcaccagcaacaacaacaattgcaacaccagctgaacaacatcaacaacaacaacaaccacagcaccgctggcgcagcagccacctcgacaacagcaacaacaaccacaaacaacgccgctgccgccgccgccgctgctgccgccgccgctgccgccgctgtcatgggccatcacacactggaagtgggcaagaagcgggcggcggacacgaccgacatgtttccactggtatttttctgttcttttccttcaccatgtgtttttgcgtttttgaattgttccatatttggattcttgcgtttatggttttctttattcaatttacgacattagtttgttatcctcattcctttgaaattctaactgagtttgccttttttgttgcatgcttttaggcgtacgaagagatcccacgaaggatctgcgctataagaaaatagttttaagtagaacttgttaaatacagttgaaaagctgctttggtgtgcaggaaaataggaaaagcagcaacaatgcatttattaacatactgtaatttaatcttaatactaaaaagttttctgaaagcttaaattaaattttaaaaagtatttttgtgaacatcatgttgcacatttaagtgcttcaccaaagcgcgtgtgactgcaaactggtcaagattaaccacttagtatatgaaccctccgtttaaaaccccagtaacgtacatctgaccctcgaagcgaaatgctctcggctttcacctaaccacccaaccttagttattccaccactcaatcactcacgtgcccaccacccactcagttagtcagtcagatgcacatcaaagtgccatcaattaacgtttatcatcagcatggccaggtcggctggggatgcaacccccgacatttaatttacaaaatgaagtcattatccgatatatcaaaagcgcaaacactcgccaagacacacaaacacacacacacactggcacacagccacacactaatcaatacagacacacctgcgcacacacaaacacactttttgcaatggcaagagcgagtttaaccaattacacgtggcatatgataaatcacaatcacagcacgagcacatttgcgctgccaagtgttaattaaaatgatttaaccgataattgccaaggctgtagctatgtagctgtatctgtaactgtaactgtagctgtatctgtatctgtagctttaccttcagcggtaactgtaagtttctttcttttgctttcgcctctgacgctgccactgattgcattcgcgagcttaattgtttaagtgcttttcctggttaattagctgaacatgcagcacctgcagcctgcagactttgtttgtcccgcccccttttccgttcacattacgcccattacggccatcacgcccatcacgcccacacatcacatcacattgccacttattaggactaagtatctgtgtacccgtttatgtatatatgtatctgattaatgccataacgccactgtactgtgcccaggatatatccactaatttcatttgtgttcttctctcctcttcatttgctcttcttcgattccataaactcttgcgttcgtttcaaaacaccacctatctcacctatgtctctcgatatcgaacataataaatgcgaaatgtgtgtgctaaccccgaacgaatccgatccaaaccgatctgatcatcaatcaaacaatgataacccaacaatcaactacaaatcatacactaaccgcataatcaacaacaatcgataaatgccaataaagatggatgttaaaacggttggttcattttactatgacaacttcgtaagtactccaaactgaatgacaatcgccacctaaagtagtccgccttgaaaccgatcttcaaactatctatacactatatagactaccgcctgaatagcaatatcaagcgataaatatatacacacatccagatatgctacttaccagataaactttcgatgaacgccgcatgcattcaaaatcaatcgaaatcgctcaatgaatcgaggacattggtctgcttcttaaaaaacagtataatttcataaataatcaaccattaatggagacctcttaatcttaacaaagatatcaaagcttatatgcacacaaaaattataaaaccgatc

SEQ ID NO: 22794 - protein, 297 aa, DROSOPHILA
MANVVNMNSLLNGKDSRWLQLEVCREFQRNKCSRQDTECKFAHPPANVEVQNGKVTACYDSIKGRCNRDKPPCKYFHPPQHLKDQLLINGRNHLALKNALMQQMGIAPGQPVISGQVPAVATNPYLTGIPANSYSPYYTTGHLVPALLGPDPVTSQLGPVVPQTVQVAQQKIPRSDRLETSPLAAHHHQQQQQLQHQLNNINNNNNHSTAGAAATSTTATTTTNNAAAAAAAAAAAAAAAVMGHHTLEVGKKRAADTTDMFPLVFFCSFPSPCVFAFLNCSIFGFLRLWFSLFNLRH

SEQ ID NO: 22795 - DNA, 4135 bp, DROSOPHILA
gggaccgttttcaatcaaagaatcaagtatttacccattggtccgagttgtgttgtgttttcgacttgaaaaagatacaaatatacaattaattggttttgcctcaaatggtcattggttccgcaaccgaattaacaacaattaaacgatatgtatccattttgaatggcacagttttgttaacgttaaacatttcctaagtgtttctcatttacatttctagatcgtggataaactgaggaaaacccaactactgatcaagctcacgcacatataatgtttcgaattatttaataatttaacaacctctctagctctcctccagttatcgatgcacttaagtattcaaaaaatctgagacaaggacatggacaaggacgaaaaaaaaatcaaggactgaaaattagggataaatgaagtacgattttgttcggtattgattattattgattacgattagaatgatcccaactgatatgctgtttgatttcaagaagctacaaccatattttcattaacaaggccttggatcggaggtgtatactatacgttaatcgggatatagaatacacacgagcgttgtggaaatattaatatttcggtgatgcgcgacctttggaaggcgatccgtccgagtgagaaaaaattatgctttaaactttggaccttacaaatctaggtatgcatgcatgtacatatatccataatgacgtggaggtaacaaagagctaaatggatacgttagatgcaataatgtgcatgtttgtatataagatcaatatgttagccaacataaacacggccgtttggtagtacaattcgattcgattatgatactaataatgttatgttctagcgctaaaaatcaatatctcatctatatttcgcgtacgcccttactagtacgagtttttcatttcactttcatttccgttttcttttttttggtttgtttggttttgctttcgagctttcgatttccgcctttttttttctttttaaatacacttgaccttaagcttaatattcggtttatgctatgtatcgtatgttaaacaacccatgattagagtaaaagtcgaaaatgcaatcctggacaagactcttttggtatatgcatttcccgcgacacaatctaggatctacgatccccggattaggctgcgtcgtcatcgtcttaattcccatccccatccccacacttgtcccaagcccaatccccgattcattccggctacggaaatcgaaccggagatgcaaacgtacactagaaataacacaaccattgtggaggcgttggccttttggcggcttccgttcgcatgctgcatggcggctggctcctcacctggaattccggattctatatgaatagccaaggggagtttgcacacttaccgttcagcacatgcaccaccaccgtctccgtaatctcattgcccagcatgcaggtgtagttgcccgtgtcctggcgattggcattggcgatatacaggcgactcagagctcgtcctggcagcatgtccgtcttgacactgcaaatgatatcaaatgcatggtaattaacttacgattattaagaccatatacgacaaatcctacctgattcctccgcgactagtatcgtagttgagcaggcgcggtccgtgccgccaggtgatataggaggagggatgcggaatcttcgaaatgacgcactgcagctcgatggtgctgccagccttgtagtacttctccggcgtggccgagccccgctcgtcgagtatctccacgtgaggaactgcggatggacaacgaatgagatcagcatggatcagcaggttttgcttggcaagccgacagcagttgctcaccaattatagtaaggtaaacgagcaggacgagcggcggatgcgaggacacctggcactcgtagggaccctcgtcccgctcgttggcgaactggatgagcagcttccaatcgttgggctcctcgaactccagcgaataccgcgagtcgccgctatatgtgtgctggccaaaggttatcagggtgagatcatcgccacggcgacgcatccaggacaccgtcttgccctgcagatcgttcacccggcagtgcagataaacgctggacgagagctgggtgctgatgttcagcgtggtgtacggatcggcgaagaacgggaacggctcgtgggtggtcgtctcggtgacctccagctcctcatcctcgggcgtgtcggtgaacggcgatgagaactcctgccagaagttcttcggaaacgtgtcgaatggatcgccagctcgcggtcgtttcactagttcgaaaaaaaacaatttcaatagatatagttaaaatatatatgaaaatcatataatatataaaaataaaatgcactcagctaaaatcacgtataaaagaaaaactcaaataaaacaataatttcgtttcgaataatgcttgcacactaagtagtaaaataattgttttacataaaaaaaaataatcatttttcacttgggtaatccgcaaagtaaacaaaagaacttaatcttcagcttaaaagtgccaaagtttgagttgggtaaaagtttgcaatgtgattaaggcatgaggtggagactcacatgtggtcgacgtggaacccgagccgatgtgatggagtgaggagtatataatcgccagtatccaaaacagcctcgatctcatcactgcagcggagtgtcttcatatgccgacttacgggatacggtaacaggatgcgggatgatgcatcgactggcgccactcgccgcaggatatgcacatatgaacgaacgcccctctaaactgttctatatcgatccaagtccaactgcatcagcgtcccactgcatcgccagcgatgattccacggacttcacttcgcttcgcttatcgattgccctgcggcaaaatattgctggacatattgcactcaagtatcttctttttcagagtgtccttttcgattatatatgtatatttactttttctttttctcttttttgttgatttctttgcacacttttcagcgcgcggatggaggctggagggataggaatgtcggacaattggaaaatcggaaaagcgcttattaaccagctcgtgttgcgtgtgtatttatccttttgcaactgctgctcggatggccaataaacgggaatgtaggtcagggcatgctctgcgcatggccagcatccgcatccctattatttcatccgaaggaatccctctacccgagcaacaacaacaaatagcagacgccactcacctctcaagctcaaaataatgcaatcttcaagattgttttaaaaagaaaaagacttttcttttcttcttttgtttgcatttgtccaggaaaaaagctcttttcggcggatggttctgataaatatttaacaatataaaagttgcttttgccggtccttcggcgttgttgttccctcacccacacttgcttcggcactgaatccgctccgaaaggccagcatctctctcggcattcttgcaatccagggatttctacccaccaaacaaggtcctttgaatccgtatagctcggcatgcaaataaatcgggcgattgagctcagaaatacctgtattttactaattgttaagagcctagagtaaaaatacagataaactaccattcttttactgtcaaattaagcttcaaattcgaaattcgataagtaaccgatatttatcgataggcaaaggattaccctcgcacatacgcgatccgctatagccatctcgctccatcaataatttaccgttaatatagcgggctttactcagaaacatcaaaaatatttaacgactttaattgtagcattcgctgcgttaaattgtttatcgcactttctgcttcctgcgcatgtgcaggaaattagtcagactatttcggtgattgccccattctggcgtgtattggtgagagcatagaacttacactgccctcctatgatatacatatgcatgcttttttcgcttttaaataaactaattaatagactagtaaaagaaggatatacggtaatgaacctgtgaacccttaggcggaaaactattgctgaatttacatttcatccctcttttaaaatcagctagtgcaacataacggttc

SEQ ID NO: 22796 - DNA, 1533 bp, DROSOPHILA
caaaaggataaatacacacgcaacacgagctggttaataagcgcttttccgattttccaattgtccgacattcctatccctccagcctccatccgcgcgctgaaaagtgtgcaaagaaatcaacaaaaaagagaaaaagaaaaagtaaatatacatatataatcgaaaaggacactctgaaaaagaagatacttgagtgcaatatgtccagcaatattttgccgcagggcaatcgataagcgaagcgaagtgaagtccgtggaatcatcgctggcgatgcagtgggacgctgatgcagttggacttggatcgatatagaacagtttagaggggcgttcgttcatatgtgcatatcctgcggcgagtggcgccagtcgatgcatcatcccgcatcctgttaccgtatcccgtaagtcggcatatgaagacactccgctgcagtgatgagatcgaggctgttttggatactggcgattatatactcctcactccatcacatcggctcgggttccacgtcgaccacattgaaacgaccgcgagctggcgatccattcgacacgtttccgaagaacttctggcaggagttctcatcgccgttcaccgacacgcccgaggatgaggagctggaggtcaccgagacgaccacccacgagccgttcccgttcttcgccgatccgtacaccacgctgaacatcagcacccagctctcgtccagcgtttatctgcactgccgggtgaacgatctgcagggcaagacggtgtcctggatgcgtcgccgtggcgatgatctcaccctgataacctttggccagcacacatatagcggcgactcgcggtattcgctggagttcgaggagcccaacgattggaagctgctcatccagttcgccaacgagcgggacgagggtccctacgagtgccaggtgtcctcgcatccgccgctcgtcctgctctgcgtcatttcgaagattccgcatccctcctcctatatcacctggcggcacggaccgcgcctgctcaactacgatactagtcgcggaggaatcagtgtcaagacggacatgctgccaggacgagctctgagtcgcctgtatatcgccaatgccaatcgccaggacacgggcaactacacctgcatgctgggcaatgagattacggagacggtggtggtgcatgtgctgaacggtgaggagccagccgccatgcagcatgcgaacggaagccgccaaaaggccaacgcctccacaatggttgtgttatttctagtgtacgtttgcatctccggttcgatttccgtagccggaatgaatcggggattgggcttgggacaagtgtggggatggggatgggaattaagacgatgacgacgcagcctaatccggggatcgtagatcctagattgtgtcgcgggaaatgcatataccaaaagagtcttgtccaggattgcattttcgacttttactctaatcatgggttgtttaacatacgatacatagcataaaccgaatattaagcttaaggtcaagtgtattt

SEQ ID NO: 22797 - protein, 306 aa, DROSOPHILA
MRSRLFWILAIIYSSLHHIGSGSTSTTLKRPRAGDPFDTFPKNFWQEFSSPFTDTPEDEELEVTETTTHEPFPFFADPYTTLNISTQLSSSVYLHCRVNDLQGKTVSWMRRRGDDLTLITFGQHTYSGDSRYSLEFEEPNDWKLLIQFANERDEGPYECQVSSHPPLVLLCVISKIPHPSSYITWRHGPRLLNYDTSRGGISVKTDMLPGRALSRLYIANANRQDTGNYTCMLGNEITETVVVHVLNGEEPAAMQHANGSRQKANASTMVVLFLVYVCISGSISVAGMNRGLGLGQVWGWGWELRR

SEQ ID NO: 22798 - DNA, 2966 bp, DROSOPHILA
gaggcctaaatatatgtatataggcaaggagtgcaaacttcagccaatcgataaaagtagctgcatatgcaatcgagagggcccgaaaacagggccaagcatttccgctatctatgtaaagcaacggattcgaagagtgagtggaagaggaagtgggcggggccattgaggggctgcgtatcctggtgcagcaaagtttgcctatcgtttccgcttcgtcctgaaacgaaagtgttgtctacgatttccagcacttgcttaagaaacttaaaaacgaaacgggaaggagaaataaaataaatttaattgcctaccttgttgatgttgttgttgttgttgttgaacctgcttgtcctctcgacttaacctgttttcctgccattttctgacgccagcgaaatggaaaatgattttacaacggccaactgccgaaaagaacatggaaaagaataaattaattcgtatttggccgaagcaatcgcccccgttttcccagactttatcttttggttttcatttccaagcggatgccgtctaattgattcaatttgtattcattttacatgttacccacgatctggattcgtaattaatgaaaatccaaaattcttataaaaaatcatttacatttatatgataaaattgggaaagtggaaaagctgtgagattgcagggcaaaaaaaataatactcaatcaattccgaggttttgaggctataccttatcaagtgtgcaatatttaatcaaactcctgattagattattgtaaagcaatgagtaacaccaggagatattcgattattatagaaaaaaaacctaaatgaacctttcagttcgctttttcctaccaaccaatgcggtctacatattttctatcgctatgaattcaagaagtaaaagcgctatattgcatttaagttcagatgacacagaatcattttcgaaggtataaatagtatttctttttgaagaacattaattttagcatttatctttttaggcgaattattgtgactgcaacgatttcgatgaaccgaaaatgaacttaaaaatggtacttgaaaataagctaagagacatggaatttaaattggcaattgccaacgaaaagttggccatatttgacgataaaattaaggacaaaaacgagataattgaggccttaaaaatgtctaacaacctttataaatcagattataaggatagatttgatgctcaggcaagcataattgaaaaactagaggaggaattgtcaaccttaagaaaagcgaagttaaactctagccaagatcttgagacaaccaaaaataaatcaaagttaagatcaacaatttttttttttaaagaaagcgaaaaggaaaaaaagttacttatttcttccctcgaagcgcagattaaagagaaggctaaaacggaaatagaaaactcacaacttattaagtccttaaagtctcagataggcgacaatgatgtaaagctaaaggacaaacaagatcttatagcaacactcgaagctcgtttgaaagaaagcgatagtaaaaatattgaaaacgaacatatgatccaatctctaagcgttaaaatgtgtaggataatttctgaagagaaagaatataaatctcttatagcaaccctcaaaaatcagataggccaaaaaagcgaaacactggaaaaaaataaagggataataacttcactcaaggctcaaataaaggagaaagataaaataaatggtgaaaactcaaaagttatagcaaatcataaggcacagattaaagaaaaagatgaccaaatcacatatttggaattgggtctaaatttggaaacttgtaaaacgcgggaaaaggatgagctattaaacgatcaagctgctaccataatgaaactgcaatctaatcaggagagagtgaaagaaacccataaacttataccatcagagggtcaacaaatttccaacgctttgtaaacaaatttatttaataaaacatatatacttttatatcgcaaagaagaatgttgtacatttcagctttatgtcagcaaggggacgccatcatgcgggaatttcaatgacgacggtgctgccaccctcgtgaaaaaaggtcctttaaaccgctattcccaaatacgtttaaatatttccccattattcaatttactataaaaaattcaacggtcgttgattttttcgggaagtcccctatttttatattgctaatctgtagtgcaaatacttcatcaataaatggttatcttacaattagataatggtaatagtaacaataaaaaaatgtgagctgtattatctagcctttgatacaaaagacaaggtgttccagagaatttgctttttattacatttgacagcttatcattcaagataaccgaataaccaaaataaaccttttttcgtttgcggttagtcagtgagaattagctgttcgagggaatggctagcgccaaatttgaaacgatgatggaatattttggtttagaagaaaaaacaacgatttttaacttaaatccttactgtttatatgaaatatttcgtcaaattcacaaaaactgcgcattcaagcaaaccaatgatatatttttaaagtacagtgatcttataaactttgctatttgctgtgatcatctcaacagaacgttcaaaaaatggagtctcaatctttataaggagctgtgtattgaaaacacattcctcaatacgtacatatgcgtagagattaatttctcaaatcttcattcgcacatttatggattgtcgaacagtgaaaagaaaatgttctggatgaatttcaaaaatcacattatggataacgaacaactggagtcattaaaggtaatttacgaaccaacacgttactggagtgattacttggaaagatttgaggacctcataaaatcgcttcatgtcaagccaaaactgagggagctctctgtttacataaatggtagat

SEQ ID NO: 22799 - DNA, 966 bp, DROSOPHILA
gcgaattattgtgactgcaacgatttcgatgaaccgaaaatgaacttaaaaatggtacttgaaaataagctaagagacatggaatttaaattggcaattgccaacgaaaagttggccatatttgacgataaaattaaggacaaaaacgagataattgaggccttaaaaatgtctaacaacctttataaatcagattataaggatagatttgatgctcaggcaagcataattgaaaaactagaggaggaattgtcaaccttaagaaaagcgaagttaaactctagccaagatcttgagacaaccaaaaataaatcaaagttaagatcaacaatttttttttttaaagaaagcgaaaaggaaaaaaagttacttatttcttccctcgaagcgcagattaaagagaaggctaaaacggaaatagaaaactcacaacttattaagtccttaaagtctcagataggcgacaatgatgtaaagctaaaggacaaacaagatcttatagcaacactcgaagctcgtttgaaagaaagcgatagtaaaaatattgaaaacgaacatatgatccaatctctaagcgttaaaatgtgtaggataatttctgaagagaaagaatataaatctcttatagcaaccctcaaaaatcagataggccaaaaaagcgaaacactggaaaaaaataaagggataataacttcactcaaggctcaaataaaggagaaagataaaataaatggtgaaaactcaaaagttatagcaaatcataaggcacagattaaagaaaaagatgaccaaatcacatatttggaattgggtctaaatttggaaacttgtaaaacgcgggaaaaggatgagctattaaacgatcaagctgctaccataatgaaactgcaatctaatcaggagagagtgaaagaaacccataaacttataccatcagagggtcaacaaatttccaacgctttgtaa

SEQ ID NO: 22800 - protein, 308 aa, DROSOPHILA
MNLKMVLENKLRDMEFKLAIANEKLAIFDDKIKDKNEIIEALKMSNNLYKSDYKDRFDAQASIIEKLEEELSTLRKAKLNSSQDLETTKNKSKLRSTIFFFKESEKEKKLLISSLEAQIKEKAKTEIENSQLIKSLKSQIGDNDVKLKDKQDLIATLEARLKESDSKNIENEHMIQSLSVKMCRIISEEKEYKSLIATLKNQIGQKSETLEKNKGIITSLKAQIKEKDKINGENSKVIANHKAQIKEKDDQITYLELGLNLETCKTREKDELLNDQAATIMKLQSNQERVKETHKLIPSEGQQISNAL

SEQ ID NO: 22801 - DNA, 12413 bp, DROSOPHILA
gagaaactaaaggcatttttcgaggagaacaaacgcgatctgcaagcgcttcggcacgacaagcctctgcgcgccatcaaggtacagagtcatctctctgacatgcccgagtacatagtgccaaaggccctgaagcgagtggttggaacgtcctcttcccctgtcggagcctcggaagccaaacagccacgacagtcggccgccaaggctgccttcgagcggcaggtcaatgatcctctgatggctagccaggtggacttcgggaaacggcgtcctgcccaccggagaaaaaagaaggcgttgtagggtagcaaatggtatctatagtcgcattagtcaataaggaaataaagttaatattgttaatgtaagccaaacataaaagcggccgttgaagatgtttggaattttaaaaatgttattttaccctaaattagaaatgagtaaaattaaacgaaaaatatacctatgttggagatagctgcagattgacaaacccaggttattttctttatatatatgaaaattctgttaatttagaattttgtaatagggctgtaaaaataaccaattgcacatgcacattaacaatgtagtttgttaactctatcgatgatatatatatatttatttgcatgcccgccaaatgtgtatgtttgtacttatccagccgataagcaagtaagtgaatgtctttttaaactcagaaacttgacaagtatatgcttaaaacggccgctgttcgggtggcggtaagtggtaaccacttacccaaatagaggcagaaggcactatatcatttgctcaacttttctgacagcggacggaaaatgaaaataaaaaatatctacgagtcagtcacattacccaaagtgccagtagttccgtaggtcacagcgacgattatgcagcagctggataccatttaaagtccattacaccgagagtcccaggaaaaatagatcaccattaggggcgaaatataagcgatgcatgcgtattcgtttttaacattttattattgtcattgaaatagttaacattcatacaattatttattcatttatttatagcgtttatgcaatacaataataatcatgagggtaataatgaaaaactagtcggttcgatctgcgcggcttagtatatggccaagtctgactgtctatatctgttgttgtctgagaaatcgaaacgcgaaatcagatatggatattgaaacgtattgaaaatagggggagagtttttgtagcgggctctaatccatcgactatcatagtaatgacttttataatatcgctccgttaagtgctaaattaaacgtaaacatttaagttaatttagcataatcgtaataaaactcgctaggtttaggtataggtatgcgcggttggctatcccaggctcctatgaacagtattatttgactattttagatcggatggccacgagatggaggaacaaatgctctgcacactccataactcgctgccattgctctatataaatatatagtttatggtataacttagggaaaacgaacatgaaatcacattgcaaatgaagaatggacaactaacaactgataaactgatactgaggaacaggcacaatcacgaagttaatgaatctagactaaaatgcagccatacacatacatgtatctatgtagacatatctctataaacgtttgctctcattatattgtatataatatgtatataccatacgttttatgctttatttgttacgatgctaaaaaatgttcgcttcaattcaatcccctttttcaaaatcctcgttgtggaagtcccacattcgctttcttacttttttgacgtttttcagttggtttttttctattttttttttctttgtaacacacatacagaacttgtttagattattgttgcaacatgacgtaaaaatatacatattttcatcaaaaattaccaccgctcagtgctaccgtctctaattgaagttgtttgtgggcgaagaaggtcctgcggattcgcaggacaacacattgccgctcttttataggatcttggtatatacacaagtttttatatatgtatatactttgaatatacggaaatttcgttagagtaataagaacgacaaaaaaaaacattaaaataggtccgaagcgatcgatttcctggcgatatcctcagccggatataattggcaaccgatttgccgcctcagggatgtgtgtgggtgagagtgattccatccatctaggccagcttagatgggcacgtaattgcccttgggcttgtagaacaactggccacgcatcagacggcgccgaatctcggagagcagcaggcgtttttccttcttgatcttcttgagcacacccttgttctcctgggcacgacgagacaagtagggcagcacctcttcgactgggccatatggtatgtacttgtacgccgagtatcccgcttgacctgttggtttgaaagaacacatattataaacacatggaagacaagtgaaaggggtaggctatggaaacagacccagtggaaaggtaatgtagtcgcacatgcccagcagttggccgaagcagatcaccttgtcctccggtgagatgccgatctccttcatctgctggatggcaaatcgtacggtgtcttcgttgtgcgaggccaccataataccaatcttcctggcatcgtcatcacagtccttcatcagctgaggttattaataaatacttggtttatttataatcacttataaccaaagtccacaaattcccaccttaatgcgtcgcaagcactccgacaacgtcctgtgatacatgtccgtggtggcctcgaacgtgggatttaccggatccgggtagcccagcgacttggcacggtcccgctcctggtccatataggcaccgcgcaccagcttggcgccgaagtagaagttctggcgcttggcctgctccagatcggtgttcacctcgcggaacgtctcgcgcagatagcactggtacgtattaaagacaatggccttgtccttgttgtacttgcgcatcatttccagggtgatacgggagatggccggctggaagtaagtctgctccgcatccaccatgatacgcacatccaagtccgcagcagcctgaggtttggaaataccatatcagtacgatttcacagctagagtgaaaaaaaccatttacctttacaatcgtgttgagacgacggatcatgttcctgaacatctcctcctccttgggcggtatttgtgagatcagtcgacgcatctgtccggtttggggatcgggaacgcggaacgtgtcgctcagctgcgagtcctcgtcaacaatgcccgaccaggggaacaaatgcaaaattctagatgagatagacgagcatataaagtcagatcggtaagagattagataatataaacggactaacccctccttatcggacgttacattgttcaggaactccttgacgtccttattgtcgcccagcgtggcgtaatacttttcgagatccttgatggtcttgtggtgagtcagcacattgccctgaccgcccaccatatcctccatgtacttgcgtgtgcgcatgattacctcggacagttgcagctgcaaaggaggatcgaggtcatcagagttcatcagttgataaacaaaagcatatgtatgatttagatttacaatgcttctctatagtatggtaacattttaagagttttgattttacaattttaaccgcagcaaaaagtgaaacgtttacgaatcagtggcctttactatgtatctattagcgtcaattaactgtgttcatttcccatttattaacacctattaacccctgtgtttcccccacaaataaagctaagctactcaattatgtggttctcaaggggattactttgtgcgaacttaccagcaattgtggacggcccagggcggtgagtttaatggcggtgatgccagttccaaaggtggcgcctgcaggtcgatattcggatcaatcgatggttggttgttggaaatgaaaagcgtttggaaaaagagcagagcaattggtgaatgcaatgcgatggcagaggcgaaagttggaaagcggactctacagtcatatagcacatatgtctaactacggcacataaaagcgtaaaaagctacggatacgagacgagtacgaattgagctgaagacacagagatacgaagcaacgacaaaacctacgacattgcattacagcaaccaactgaaaaagcatacgaaatggctagaaagtcaaactagtttgctttgctcgctcgaaatacggatttggccatcaatggttactcttccgggtatttcggttacttgttggcattttgggatgtgtcttcgttaatttctcggcttacccgtggccactgcccggggcgccttgcgatcatcatctgttcatattagcattcgcaacgaattcaaattgattatgagtttttgagttatgtgggggttattcgataatcgatgggttggtgccattttcgggatatttgcggggcagaaaagagaatttattaatcatcagttttaatttatttcagggatcgagatcgagtatgtgaaaagatagagaataggagaaagcctagcaggaaacagcctgaaaccccaaaagcattgaatgcaggacggggcaactacacagatctgtggcatgttctcacctagagcggtcatattggtcatatgtagggacatacataagtgagcaagttgttttatacaacattctagttctgatgtcattttgtaggaagtaatattctgattaaagttaagcataaagatttgacttgattaaagtccatctgattggataaagaaaagctcagagctcgatatgtatgtatgtctgacatttgttcagtacacaaaaaacaaaaaaaaataaaaataaaatgcatgcttaacgtttagcaaggaatgcgtttgcttttgcacgttctaaattaaaacatttgtacagaggatgtcggggatggtgagatggaactcaaggaacttgcatgccggagtcagctatcgggaaccagcgagtaaaactggccaagaacatacccgaaacagcctccagacacttgatgaagatctccatgttccgctcgcaggtggcctcgttcaagtagaagtaggtgcgagcactgctgaccttgtagcgccgatccgcaaaggacttgtccacatggtactgcggcatgctgccctcctcctttttgtcgcctgcactggagacggaagatctgaaaggaagtgagtgaatcagtatgcaattaagagtaactaaacaactatgattatgaatatcaggcattgattatacactattatagagtgttttcccactacttagcagaaggcatagcctcagcatatcaggaacttactcaacttcacgtttctcggcctcctcctgggtgatatcctcctcaacggaataatcgagaatcggcttaacgccaaaggatcttagcctgcaagtgcacaaaatacataagtttccgttttcaaaaagccaagaaaaattacacgatattagtaaaataaaagaattttgagtatggcttggttagcggttcgttgagaaaatttaaagttcttttgttaagggggatcaaattcggattggcgattcggatctgaatgttcgagtagatctttcatgcttggtacatgcccaggacttgtgctttctattagtgagagctttatgctcgcttagcttggacatagttttagaacattagtgggaaaatgtgtgtcatatatctacatacatgtgtggcatatacatggatggtaaaaataatagcaaactttctaaattatccactcaaattggtcattaactactcaatctgttgctcagttagcattgaattaagccagtatttgaagagcacgccatcgtgtttttgagtgctattacttcgtctgaaaccatttatatgcacatgtagtatcggatatacatatatatatatatattgggatgcatgggatgctcttgggtagggggagggggttaacctctctagggcgggcacgatcgtgtgacgattctcgccggccacaaagtgtccgtagaagctggacttcatcagcaggacgaagagcttctggccgagcaggttgcgcgccagtttcatcagctgtttatcggcgttatcgaagttcgttcgattattatcggtaaatgtgtttgtcagggattccattgcaatacaagtgtgggcatttaagcgggtttcgcataaccgtttcacagcccgtttcgcggccaaaataataacatgaagtaaacacaaaaccatagggcggcagaaagcgatatggaaacgggaaaaaaaaacaagaaaagaaaagaaaaagaaaaaggcgataagtgagtgggagtgtcgtggtgggcaattacctttccagtgtgggtatgatcttgatctgatcctcgccggcgacaaagtggccatagaaggtcgccttcatcaataatgtaaataaccgttgacccaatacgttctttgaccatttcataagctgcgaaattttcgtttgttttgatcggttttatgcggcatacatagtaagtttgtaagtttttgtaagtaggtttttttggtgtttttcgatattttgtcatgttgtttgcggcgtcaaaaattgaattcgatatagttttaattttccgttttaggcaatacaaagttgatatatgtaacaaggacaaagagtttttgcaatatacaactaatatccatcgattctagctgagatccctcatccgcccaggttctttcaatttttcagcgcctgaatcgcacataaatcatttggaacttggccaagtggtaaaataaaaaacgtgaacggagtcaaggccaaaatctttgccaaagtccaacaaaacagcgtggaaaaatgcgacaaaaagtgcggaggcggcaatgtgtattactcttcagaggctgcacgtcatttaaacgagtgtcaggctaaatacgcatataaacatcacctttccaaaatgagcctagtgctcaaggaaagacgatccgccgcggaaccatcaacttaaacagatatccgctgaacatatgtacatatataagtgatgcgaatattgaaattttagtgtaagaaaaacaaacaaacacttcctgaaaagccgaaaaataacgcaagagattgtacagactcttatccaaacctattaatgcaagatttatgcgactagagacaatactatcccttcggaaatattaatttatttaaataaactcgcaatgcactatccagctttgtgaaaacgagaaaatgttaaactgcacttaataaaactcggcaataaggacaggaagagatcgcctaacttgggaatcaccaagtttccggtttccgggcaacccatgttccttacaaggtggaaaacacaagagcattggcctctgattaatgattcccttgcacgtgtgcgctttgcttgatgcgggatccatcagatgaatgagattctgagaaaggacaggtggggaaagaaaagagcattctccgtctggggaaaccggtttcgtcgagaacactaaagtaattaattgaatacaaagttgtcgaaagagcacactgccgacaatataaatacaccatcaccaaaactggttacataaaacaaattttcgtttcgcattatattttttttgggtatggcatgttttgctttgctagtcttttaacttttctttggcagacaattcgaaaccgaggacaggtgtttgccgttgagctctggccccaaaaaacaaaaaaaacaaaaaaagctgccccagcagagccaacaccacccccggtcacctagcacctggcacctgccacagtaccccatcctcaaccatgttttttacccatcaatacccaacccattctcacatatcacgagacccacaccgctcctcagtccccaaaagcaatcgacgcgctactgtaaatagaaatggcgaaaaaataagtacactctgatacaaattcaaacgaatatgagaccccaattgtgttattgaactgtgtgcaacagttcttgagaatgttctcactatatttagtaccaaaagtataactaattgaatgctagaacgctcaaaatcgattgtgcaaacgatgttttcaaatagattgcgccgagtctggtaaaggaatggcttaccaatttttttctagtgcagagatgtgggcaaagtcgatgtctgactaatgccacatgtgatgtgatgtctacggtcccagggagctgtgcggacattctctgtgacgtccatttagccacccatatatgcaaattgcatcgagcggggcgaaaaaatgataaataagtaacagtcttggcgacgcatgcactttgagtaatcgataagcaatcaaacgatcgccgacgctattaaatagaagcacgctagcgagaatggggtaaatgcgaggggttttccaacgattccgattggcgctcattcgggggcctgactatataacgacctatatatactatgcagtcctacacagttcacacaatccatacgtctcgctgagtaaatacgcacgagttaagagcaaatagcggaccgggcaaggtcgccatcgcagcggcaatttgcatgccaaagtttccctttttcctgccgtcaatcaggcactcattcaatcttctgtgcgactgcagcacctgccagaaagtggcaacaaatgcaacaagcaattagccaggaattcatcaacacgaggggagcaaacgaaaactcgctgcgggtcgggtgaattgaaaagcggaagcagggcggaaaatcggaaggaaagcagccagccacctgacacgggcttcggttgcccggaaaatcggaatcaagcgaatggaagcttggcaggatcgaaaaaattcatgaataagacaaaaaaattcatgaatagaaaaaaggaagcaaacaaaaaaattaaatattcttctacgttcagtttcagacaactttaacattatacatacatggaattcaatagccctagctgttcataacttttgtttactcttcaagtgtccaagaatccatgtacatgaatatatttaaataaagcattttaaaggaagtatttataaaataaatgaatgaattataataagttgaaagcagcagaagaggacagaagaggcgaagagtcagcacacacttcgagagttgaaacaaatggtttcgaaatcggtcactatctaaaacgatacttacttaattgtaatattaagaaagcattaagcaggggttatgtactaacagagccccagatttctcagcaaacagaaccagaaacagagagctagagagagagagagagatctcagctagtcgatggattggaccaattcaagggtcaaaggtcgcaggactcggcagaggaggagtgggggacaccgattaactcaccgtcatgttgtgctcgaccagcttctcgctggaacatatcatgtagacgagataggcgcgtattagctctccagtggtcttgctcttgaaagcagcaatcggatcattaaagctcacgtccaggggatccctctgcggcgagccagcgggcgaggggttcttttcctgggacgactcctgcttcatcgatcgcttcaccgtctcgctggagaccacctccggttggaccagagtggaggcctgcagcggccggtcgccgctgtgcaggaagcgcgctccattgactcctctcgtggactccgatgctgctccttctccggcgatgctggtgctcccgctgccgcgctgatggaaactccggcaggcggcgacggccacggaattgctcgacttgctgctattacggccgtagaccaaactgatggctgttcgttgggcgctcagcgaacggagtagagccattacaagggattctgcggtttatttacgctttctgctcttcggcttttgagacggttattgaaacgcactccaatctcggttgttgctgcaaaaagaaaacaatggaaagcagaggtaatttcactattatctctacaaatcactacgaatctgagggaagacagtggcgtaacgaagagattactaaaggtggttatctcgttttcaactcgattacaataacgttttaaaaagtggaaatgtggtacatatataacaaaattattacgactgtttcaaaatatgcattgattttcaataagatcatatagaattgatttaattgtaattggatgatatctaattaatataaaaataataaacaaatgtataataaaattcaatttataaaaatattaaaatcagtgtacatattattattgcaactttttgcctaattgtgttttttgcccccccacaaaccccacgccaacgccaatgatcacagctgattttgtcggagagcttttcgctctccctctttcgctcgctccgaatgttatacaacaaatgcgaaaaacgtgaggcggcgagggagagcgaagccgaaaaaaacagcacaacacaatcacacgtacgcaagtacaccttcgaaatgttcaattaaaaaagtcaatttctgggcagaaatctatctttcgctattatgtgtcttttgggttttcttcttacttcgttcttattatttattctattacgctttgagcgttgtatacgccgcaaaagcacgaaaccaaatgcgacgaagacgcgtgaaaatggggcgagttgttaagcgacggcaaattcaacgaagcgaaacgaggaaggacccgagggcgagaaaatccttttcgccgcttcgctcccgtttatgtaactgtaaatgtaaccgagattgtaccgtaattgtaactacgactgtgtgacgtcacaggcatgccagccccgtttgcttctgattttgattttgatttggaatttgttttgatttaattgaaatgcgccgaaagcacacactaattggtgttaattgcggctctccttgattctccccaattttcgttctcagttttccacccattaaccccttttccctttttcattttatttattaattagcagcccgctaaataatcgccagacgggaggctgcaatcaatcgaaaaaacttggcgggtttcattgcacagatttcattacacttcattatgggctatatcaagttctgtctcgctctggccgccttggttaaagggaaacagggagctgccgtacttaaattgcgaattcatctgaatggtttttttttttttgtttttttttcttcatttttcttatttgttgctatgcggcgaattgtacctattatataacactgcttactgctctctacctcgctttgtagagatccttttatgatacgaatacaacgcagccactcacatgtacactgcaaaatttcgcttgggtttgtgggtttcctctatttgctcgatataaattttgctttaacggttgttttgtcacttcaaaaaaaacaaactacgatacataaccagcaacgacccaaaaacaataataagggtaaacaatacaattttgtagaatttgtagaattgccaaatatagtttttcggaaaaactcgtgtttgtttgacaaacttctcacagcagcctgcgagaaaagtagaaaagttcccgtttctgtcagcgcatttgctcacctcacaaaagacacacaagtacaagtacaattataattatttttcggttttttcgagtcaatgttgttcttttcgagggtttttggtttttgctgctgcaacagagagcgtgagcacgcgcaagggtctgaattcgcgaataaactgaaacacatgaagcgaaattaaggccaacacggcgaaagctcgtccaaaaaagcttgagagaaattgttggaccagtcggtgaggggcagaaaggggatgggccacccccagcagctgtttgggctgcacgtgagcgaaaaaaagaaacccgatcgaaaattaatcgccatcttgtcaactcttattacccaataaaaatcggcacgcttatctaggcccctggcggttggccgggaatcttcggtgctcttatcttatcaatggactcccacaccagcgtccaacaaaaacgaaccattccttctattcatctctctccctgtctctttcttgacaaccggcgtcttgcaacactggcctcgcaaacaggcttgctttacacccagatcactggagaaatatatcgatacgaaatatacgctcgcaaaatttgaaatttagtttcaggtacgaaaattattcaaaatgtttctctgtgtaaagaacgcttatcgtggactcaagaaagtatcaaacagatttattttaattgcactatttacgcaaatataaggccaccaaatg

SEQ ID NO: 22802 - DNA, 3424 bp, DROSOPHILA
ctgcgttgtattcgtatcataaaaggatctctacaaagcgaggtagagagcagtaagcagtgttatataatagcaacaaccgagattggagtgcgtttcaataaccgtctcaaaagccgaagagcagaaagcgtaaataaaccgcagaatcccttgtaatggctctactccgttcgctgagcgcccaacgaacagccatcagtttggtctacggccgtaatagcagcaagtcgagcaattccgtggccgtcgccgcctgccggagtttccatcagcgcggcagcgggagcaccagcatcgccggagaaggagcagcatcggagtccacgagaggagtcaatggagcgcgcttcctgcacagcggcgaccggccgctgcaggcctccactctggtccaaccggaggtggtctccagcgagacggtgaagcgatcgatgaagcaggagtcgtcccaggaaaagaacccctcgcccgctggctcgccgcagagggatcccctggacgtgagctttaatgatccgattgctgctttcaagagcaagaccactggagagctaatacgcgcctatctcgtctacatgatatgttccagcgagaagctggtcgagcacaacatgacgcttatgaaatggtcaaagaacgtattgggtcaacggttatttacattattgatgaaggcgaccttctatggccactttgtcgccggcgaggatcagatcaagatcatacccacactggaaaggctaagatcctttggcgttaagccgattctcgattattccgttgaggaggatatcacccaggaggaggccgagaaacgtgaagttgaatcttccgtctccagtgcaggcgacaaaaaggaggagggcagcatgccgcagtaccatgtggacaagtcctttgcggatcggcgctacaaggtcagcagtgctcgcacctacttctacttgaacgaggccacctgcgagcggaacatggagatcttcatcaagtgtctggaggctgtttcgggcgccacctttggaactggcatcaccgccattaaactcaccgccctgggccgtccacaattgctgctgcaactgtccgaggtaatcatgcgcacacgcaagtacatggaggatatggtgggcggtcagggcaatgtgctgactcaccacaagaccatcaaggatctcgaaaagtattacgccacgctgggcgacaataaggacgtcaaggagttcctgaacaatgtaacgtccgataaggagggaattttgcatttgttcccctggtcgggcattgttgacgaggactcgcagctgagcgacacgttccgcgttcccgatccccaaaccggacagatgcgtcgactgatctcacaaataccgcccaaggaggaggagatgttcaggaacatgatccgtcgtctcaacacgattgtaaaggctgctgcggacttggatgtgcgtatcatggtggatgcggagcagacttacttccagccggccatctcccgtatcaccctggaaatgatgcgcaagtacaacaaggacaaggccattgtctttaatacgtaccagtgctatctgcgcgagacgttccgcgaggtgaacaccgatctggagcaggccaagcgccagaacttctacttcggcgccaagctggtgcgcggtgcctatatggaccaggagcgggaccgtgccaagtcgctgggctacccggatccggtaaatcccacgttcgaggccaccacggacatgtatcacaggacgttgtcggagtgcttgcgacgcattaagctgatgaaggactgtgatgacgatgccaggaagattggtattatggtggcctcgcacaacgaagacaccgtacgatttgccatccagcagatgaaggagatcggcatctcaccggaggacaaggtgatctgcttcggccaactgctgggcatgtgcgactacattacctttccactgggtcaagcgggatactcggcgtacaagtacataccatatggcccagtcgaagaggtgctgccctacttgtctcgtcgtgcccaggagaacaagggtgtgctcaagaagatcaagaaggaaaaacgcctgctgctctccgagattcggcgccgtctgatgcgtggccagttgttctacaagcccaagggcaattacgtgcccatctaagctggcctagatggatggaatcactctcacccacacacatccctgaggcggcaaatcggttgccaattatatccggctgaggatatcgccaggaaatcgatcgcttcggacctattttaatgtttttttttgtcgttcttattactctaacgaaatttccgtatattcaaagtatatacatatataaaaacttgtgtatataccaagatcctataaaagagcggcaatgtgttgtcctgcgaatccgcaggaccttcttcgcccacaaacaacttcaattagagacggtagcactgagcggtggtaatttttgatgaaaatatgtatatttttacgtcatgttgcaacaataatctaaacaagttctgtatgtgtgttacaaagaaaaaaaaaatagaaaaaaaccaactgaaaaacgtcaaaaaagtaagaaagcgaatgtgggacttccacaacgaggattttgaaaaaggggattgaattgaagcgaacattttttagcatcgtaacaaataaagcataaaacgtatggtatatacatattatatacaatataatgagagcaaacgtttatagagatatgtctacatagatacatgtatgtgtatggctgcattttagtctagattcattaacttcgtgattgtgcctgttcctcagtatcagtttatcagttgttagttgtccattcttcatttgcaatgtgatttcatgttcgttttccctaagttataccataaactatatatttatatagagcaatggcagcgagttatggagtgtgcagagcatttgttcctccatctcgtggccatccgatctaaaatagtcaaataatactgttcataggagcctgggatagccaaccgcgcatacctatacctaaacctagcgagttttattacgattatgctaaattaacttaaatgtttacgtttaatttagcacttaacggagcgatattataaaagtcattactatgatagtcgatggattagagcccgctacaaaaactctccccctattttcaatacgtttcaatatccatatctgatttcgcgtttcgatttctcagacaacaacagatatagacagtcagacttggccatatactaagccgcgcagatcgaaccgactagtttttcattattaccctcatgattattattgtattgcataaacgctataaataaatgaataaataattgtatgaatgttaactatttcaatgacaataataaaatgttaaaaacgaa

SEQ ID NO: 22803 - protein, 669 aa, DROSOPHILA; identical to SEQ ID NO: 1068

SEQ ID NO: 22804 - DNA, 4983 bp, DROSOPHILA
agcgtaacgactacagcagttcttctggatccaagcgtggcgctgtcgatgattatactgccgtgcccacgaagcgctccaacgattatagtgcctcctcttctagcaagcgcgacgactataagcgcgatgaagtccgtcatttgccactttcaggaactgtcggcggtggctcaagcagctcgtatttgcacaagaacaacacagccggtggcggagccggatcctacgtccacaagaacaacaccagcggcactggcgggcgctacaacgattccgatcgcagcaacacatcgagctatagacgcgacgactcccacagcctgtaaaagttttaacaatagaattaaactagttacgatggattctaactattctaattttttattatagcggtaacaagcgttatgacaactccagcggcggcggtggagcctacggcagcagttcgaacagcgttaacatctgggcgccatcatccggcggaagcagctctcacctgggcagcggtggcggcggcggcaaccaaattaagtcatacggcaacaacggcatgtcctcgaatatgcacagcaccaattcgtggcaaaagtctgctcccgttgacgacaacggttggcggcaagtgcccgcgcgcttcgatcgcggctacaacgaacgttcaaccggctatcaagggcagagtgggggcggaggagcaggcggaatgtacggcgcgagccgacccgcccaggatcgctacagcggaccggtgtcgcgctactaggaaatgtgcatttacataaaatgaggcaattcgaatttccaagcatgcatccccacatccaacacacccccctgagtgacttttccagcagcgcccaggagcgctgctcttaatataatgagctttagttgtagttctaaaacttaaaattacatttggaaaccaataaatgtattatcaaactatgttgaaaatgcgcatacatttatgttacatctgcaggatttattgaacctataggtgcgggtaatcaccttcgtatgaggatattagtggcgtggtcgtgtctaccagcaccagaacgctatgtgccaaaggataaacgtcatgcacctggacgtaatagccacggtcgcactgctccttggaagagaagagactgcaggagatgcaggtaaaaataaaatccctgttgcaaaatgaaaacatacgctaatatatccaccggttccagtatcagctccgacttgtagaccgaggccagaaagtttgtaaacgctgccgtgttatttcccaactccagctccatgttgggtgtgcagatctgcagtcccaggccacagttggtcgaaccaatccccgggaggccattacgagtaccccaaacggtgatgatgttgtcctccgaggcgacaatggtacactggtcgctacagttcgccttctacatgcgacggtttagaagggatttctcaactaacacagaataatacaaaccacaatatatcgagacttaaccgaatccaccagggtggggtgatcaaccgagttgcagtgcctgattccccgctgaccctccgcatttcgacccatggtgtaaacatagccgccctccaccaggaacaccgaatgggtggacgagaagcacgcctgggtcaccttgtgaggcagttggacttttttctgcgcatgagaactataaggtaagcataagtgggtaactcaaggttgtggacctacaaaggcagtaatcttcgccgaacgttggaaaccgagtttattgtagtcattgctaccacagacgtgtagttccccgttggcaaataagacagctgaagtatcaggaccgcagtaaatctttgatggcttggtcttcacatgcgataacagaatcttttgggggaatttcctgggattatgaattatagagatagatgacaataatgaattataatctcctagaacccactgttgctgctgataatttccaaggccaagagcaccgcacgtactggtgccccagacgtagaccgctccctctcggctcaaggccagaacgtgctggagtccagcggccacctgctccacccggacatctgccaatcgggctattagcttggggctgtggtagttgcgttgctcgtcctgtcccagtgccaaatgggcattgctgccgcagcttagcagacttcccgcctgggtaaccaggatagtgaagccatcgccggcgcaggcactcaccacatggtagttgcgcacgctctccatacgactggggtagtgcttccaagcctccagagctgtgagacccagctgcccgtgggtgccctcaccccaggcgtatgctgatccgtcctcgtttaccaccacgaagtgggaatccgacatggcaacgtccacgatgacagccttcggcggcagttggatgggcgccatgctgaagcaggtgccgaaggccttcagctggtatagcacggatctgcaggtggtcgtctggattagatcgtcggagctgacgttgactaacccattaccgtttctcaaggatctcgtgcggcgccgctgtatccgcaatcatcaattgtttggtctccgtctgggcggtgggcaattccaactccatggacacattgctgtaggcggcggctggaacaggagcagtcaattggtcgctacccggacctcccacatcatcctcataggagtacctgcgatatcgtgagaggtcaagagctgctagtggcaacagaattcaggcataccctttgttctttcccaggctacggaatatcagtggaatccagtagaccaatacctccgaggcggtaggtcgccgtggtgcctccacttgaagcagattggacattagactgcgaagtcccgatgtgtaacccgatggcactggtgtatagttccctgccataatcttggttaccaattcggatagattggaggcagcaaaggtcttcttcagacagcacatctcgcccagaatgcagcccagagcccaaatgtcactcttgttgtcgtactccttaccctcgcactggaaaccatgacagtattagggtatagtgacttacatatatcaacccattaaacctattaccatctccggactgaagtagtagggtgtgcccaaaacagtctgggcatgtatcttggtgttcattattttggatatgccaaaatctccgattttcacaatgcctcgcctgttcagaaatacattcgcggtcttcaaatccctgaatacaaaacgaatatggtaatcaaatctcttctagaatatataaaaatgacttcgttaccgatgcaggatgttctccgagtgcatgtagttgatggcactggagatctgttcgaatacggctattatatatcgttcaggaaaatgcaattttccctgccgctcggcgatgatttgggccagggtacctccatcggcgtactccatctcgataagcagagtgttgtccttgatgaagctaccgaggtagctcacaatattcggatgatgtaatttcgagaagacatcaacctcgttcatagccagatcccgaccaggcgggctcaactcactcaggttgatttgcttgaagacgatctggtgcccgtcggacttgcgtcggtagaggatggcgatgccaaaggatccctggcccaccacccgcaccttttcatagttagccaattcaggtcctgccactcccactcccgtctcccgtggaacactaagctgcaggaggctctcctgtcggttgggcatctgtgccttactgctcgacatggcctccgctaaggaggtactcgccgctccggtggtgccgtccgtaatggtaaaaaccgtgggcagcactcgagtgcaagtcgattgcttccgctgcgtattctgacccaggggtaactgcagcgaactggtggtcagcgtggtggcgtcggttatgcgaccgttgaaaatgggcagggagctcgccttggcccggaacttcttcatctccttcgagaggacacaacctacgccttaaccgtccaaaatcgaatcgtatcctgtctattgtataattaccctttggcatgttccagccatagttgtggtcacaatggttgctaggtaaagtgggtgacacgacgtctgtttgggtggacccgtgctcgcgttatcagtgggctcgctaattggacagctcggaacgaggggatacaatcagaagcaattggagcggagagaggacgaccatatttgcagggccacgattccgaataatcgatgttaatttctgagtttcaagtggtttgagaaaatcagaatgaaaaaatcgcttaagtaattgttctatacataatgcatacataatgctacatatatccctaaaattcattcccctaaatcaaaacaccacacggtatgtgctttattgttgagttttttttcatttcgagttttttaggatttcgagttactagcaaaattagcggcgttccaatcgttgctttgcttgtccttcattatcattatcctgttagccgtattaccaaggatgtccactaccccaacctaaataattaagggtacattttttgactaaattcaaagaaaacaagagagagagggatcacaacgatagcattcgtaagaaacgatagcattcgtcgtgatccctgactatcagatacccgttactcagctgggcggtttgaaaaaaaagttcgatagaaattttttttgtctacgtctctgaaatctgcgggcccaatctttctagcttatatagttcctgagatcttgaagtttatacgggcaaaaagacaaacggacataaccagattgactcgtttattgatcaataatatcaacatggtccgaatagtttctttctgcctattatatacttttcaacgaatgtagtacacccttttagtctagtagtaacgggtatgattacgcaaaacacttattcgtactggcaaaaaaaaatttttcatgtacatactgt

SEQ ID NO: 22805 - DNA, 2526 bp, DROSOPHILA
atgaagaagttccgggccaaggcgagctccctgcccattttcaacggtcgcataaccgacgccaccacgctgaccaccagttcgctgcagttacccctgggtcagaatacgcagcggaagcaatcgacttgcactcgagtgctgcccacggtttttaccattacggacggcaccaccggagcggcgagtacctccttagcggaggccatgtcgagcagtaaggcacagatgcccaaccgacaggagagcctcctgcagcttagtgttccacgggagacgggagtgggagtggcaggacctgaattggctaactatgaaaaggtgcgggtggtgggccagggatcctttggcatcgccatcctctaccgacgcaagtccgacgggcaccagatcgtcttcaagcaaatcaacctgagtgagttgagcccgcctggtcgggatctggctatgaacgaggttgatgtcttctcgaaattacatcatccgaatattgtgagctacctcggtagcttcatcaaggacaacactctgcttatcgagatggagtacgccgatggaggtaccctggcccaaatcatcgccgagcggcagggaaaattgcattttcctgaacgatatataatagccgtattcgaacagatctccagtgccatcaactacatgcactcggagaacatcctgcatcgggatttgaagaccgcgaatgtatttctgaacaggcgaggcattgtgaaaatcggagattttggcatatccaaaataatgaacaccaagatacatgcccagactgttttgggcacaccctactacttcagtccggagatgtgcgagggtaaggagtacgacaacaagagtgacatttgggctctgggctgcattctgggcgagatgtgctgtctgaagaagacctttgctgcctccaatctatccgaattggtaaccaagattatggcagggaactatacaccagtgccatcgggttacacatcgggacttcgcagtctaatgtccaatctgcttcaagtggaggcaccacggcgacctaccgcctcggaggtattggtctactggattccactgatattccgtagcctgggaaagaacaaagggtactcctatgaggatgatgtgggaggtccgggtagcgaccaattgactgctcctgttccagccgccgcctacagcaatgtgtccatggagttggaattgcccaccgcccagacggagaccaaacaattgatgattgcggatacagcggcgccgcacgagatccttgagaaacgatccgtgctataccagctgaaggccttcggcacctgcttcagcatggcgcccatccaactgccgccgaaggctgtcatcgtggacgttgccatgtcggattcccacttcgtggtggtaaacgaggacggatcagcatacgcctggggtgagggcacccacgggcagctgggtctcacagctctggaggcttggaagcactaccccagtcgtatggagagcgtgcgcaactaccatgtggtgagtgcctgcgccggcgatggcttcactatcctggttacccaggcgggaagtctgctaagctgcggcagcaatgcccatttggcactgggacaggacgagcaacgcaactaccacagccccaagctaatagcccgattggcagatgtccgggtggagcaggtggccgctggactccagcacgttctggccttgagccgagagggagcggtctacgtctggggcaccagtacgtgcggtgctcttggccttggaaattatcagcagcaacagaaattcccccaaaagattctgttatcgcatgtgaagaccaagccatcaaagatttactgcggtcctgatacttcagctgtcttatttgccaacggggaactacacgtctgtggtagcaatgactacaataaactcggtttccaacgttcggcgaagattactgcctttaaaaaagtccaactgcctcacaaggtgacccaggcgtgcttctcgtccacccattcggtgttcctggtggagggcggctatgtttacaccatgggtcgaaatgcggagggtcagcggggaatcaggcactgcaactcggttgatcaccccaccctggtggattcggttaagtctcgatatattgtgaaggcgaactgtagcgaccagtgtaccattgtcgcctcggaggacaacatcatcaccgtttggggtactcgtaatggcctcccggggattggttcgaccaactgtggcctgggactgcagatctgcacacccaacatggagctggagttgggaaataacacggcagcgtttacaaactttctggcctcggtctacaagtcggagctgatactggaaccggtggatatattagctctcttctcttccaaggagcagtgcgaccgtggctattacgtccaggtgcatgacgtttatcctttggcacatagcgttctggtgctggtagacacgaccacgccactaatatcctcatacgaaggtgattacccgcacctatag

SEQ ID NO: 22806 - protein, 841 aa, DROSOPHILA
MKKFRAKASSLPIFNGRITDATTLTTSSLQLPLGQNTQRKQSTCTRVLPTVFTITDGTTGAASTSLAEAMSSSKAQMPNRQESLLQLSVPRETGVGVAGPELANYEKVRVVGQGSFGIAILYRRKSDGHQIVFKQINLSELSPPGRDLAMNEVDVFSKLHHPNIVSYLGSFIKDNTLLIEMEYADGGTLAQIIAERQGKLHFPERYIIAVFEQISSAINYMHSENILHRDLKTANVFLNRRGIVKIGDFGISKIMNTKIHAQTVLGTPYYFSPEMCEGKEYDNKSDIWALGCILGEMCCLKKTFAASNLSELVTKIMAGNYTPVPSGYTSGLRSLMSNLLQVEAPRRPTASEVLVYWIPLIFRSLGKNKGYSYEDDVGGPGSDQLTAPVPAAAYSNVSMELELPTAQTETKQLMIADTAAPHEILEKRSVLYQLKAFGTCFSMAPIQLPPKAVIVDVAMSDSHFVVVNEDGSAYAWGEGTHGQLGLTALEAWKHYPSRMESVRNYHVVSACAGDGFTILVTQAGSLLSCGSNAHLALGQDEQRNYHSPKLIARLADVRVEQVAAGLQHVLALSREGAVYVWGTSTCGALGLGNYQQQQKFPQKILLSHVKTKPSKIYCGPDTSAVLFANGELHVCGSNDYNKLGFQRSAKITAFKKVQLPHKVTQACFSSTHSVFLVEGGYVYTMGRNAEGQRGIRHCNSVDHPTLVDSVKSRYIVKANCSDQCTIVASEDNIITVWGTRNGLPGIGSTNCGLGLQICTPNMELELGNNTAAFTNFLASVYKSELILEPVDILALFSSKEQCDRGYYVQVHDVYPLAHSVLVLVDTTTPLISSYEGDYPHL

SEQ ID NO: 22807 - DNA, 7537 bp, DROSOPHILA
gcgccgcctgccttgaaatggagcttgaacttgacctcgcccacgtagtttccatttggctgagcgcgaacctttcccttgatgtagttggccccgaaaacgggctgttcgatttccacatccgaaagagcaacaaacggggcactgaacgactgcatcgaatccgaggacttcttgctattgaagatcattcggtgggaggtgagataaatcctgccacctttggagcccttgaagatgggattgtcctgaccggagaactccatggagacactgtcgctgtggagcagtatgctgaaagtgtaaaagcagttaatttgtgtgccatatttctatcttatcgctggaacataggctaatttcctttcaaatcgccagccacacgtcagtgtttacatttatgacgtcagggatgttcagcattttcagtgttaattaaaggacttttccgttaacttactactctccagcatggatgagcacgccattgttggcgtgagccgtattaaccgacatgtctctttaattttccaactgttttgagtccacaaaaatttgcaaaaatttcatacaactacgttttgtttttctagaaaactgacgacagctgatgattcatagtgaaaagtgtggcagcgccgaaattatcggatatcgatactctttttagggtgaccagtacgagcagtcactcatctctaaatataattagtttttttttatacatacctgtcgtacaattactggggcgttaatatgcgtaagtgataagataatgattttaaaaagcccacaaaatgtgtagcaaagaaaatggaataaatagaaaggtctgggaaattaagaaacaacagtatttgcggtgaattcgacttttatcagcaggtgggacttacgccattttgggcacttgccaccccccagcttttatttcctttttttacctatcgaaaattgaggtgctcagctgattggttattttgttttgctaccggcttcgtttgggttgttatctcttttaaagcaaattacaaactgtgtacattttgcagtaccgctctttgggaccatgccgaatggcgtcagtttgccaaatcacccgaatttcctcaaccaattggcagctgcaatttccacggcggcctcgagcacatctgtcgtgggaaatccctcttcgccccccaaacagatccagaataagatggcaaaacaacaacaacaaccacagggcagtgcgcccatggatctggagaatgagaacgaacactctgcggatgtgagctcctcgacgatgcacaaggaacccaagttgcaggccacatccaactcgctcactctgcccgattcgacgcaactatacctgaatggcttggtgcacacaccacctggatatctgtattttccggccacccaagcgggtggtgctactgcacccggcaatccatcctcggctgcagggggatccacgccggcagcttcagcaaacagcaccgccaatgcgcaaatgctcatggatcctacggccatgatggcggcggcgatgcaacaaatgcaacagatgcactatgcagcggcagcagcagccggaatgaccacagaaaccggagctggactagaagcaactcttaatgcgggtaatgaaagcaataccaaattggaaccttaaataaacattctaataaaaacatacttttagatggcgttacaccagctggcctcaaggaggtgatcaagaccaagaactgcatcctgtttccacctaatccgaacgcacctcctcccacaataagggagcgaccaccaggatgccggacggtgtttgtgggtggactgccggaaaacataaccgaagaagtgatccgggagatcttcgaatcatgcggcgagatcaccacattgcgcatgtccaagaagaacttttgccatattcgctaccgccaagagggtgccatagatagggccatctacctatccggctatagattgcgtatatcagcgctaaatgaacctcccaactttggacgcctgcatgtggactacgcacaggcacgggatgatcagtatgattacgagtgtcgacagagacagcatcagagggaacagcgtcatcgtgagcgcatgtcgatggacaggatgcgatcgcagtcgccgccaccaataccgcactacacggatcacgaggctactactgttgcggagcacctacgcaccaacgagacttttgtaaaggccattcaaacgattaccgcgtggctggagcggggagattgcactaagcggaacgccaatgtcttctattcgatgatccagagcactcatgcccatgtacgaagactccatgcagacaaactgcaactggaggaggatctaaagaaggccagagacagctatcgcaaccaaatgggcaccatgtccacgcaatgtaagtatttcggcctttcagccggaagatcagctttcttagctctagtctagacgggaaactaggcgccgatcccactttgaaatcctatttttctgtttacgttgcgcccgggttagccttttagcgtctgtatatctgaacaatctaccagcgtactacacatccaaacacctacacctacactgaaaacacaccatacccatcctacacaatatttagcaaatctagtcatcgaattattaaatgccaaactccacatatgaaactaccgtctaaaatttgctcgccaatggtcgctggagcaagcccaatgaatccaagcaggatcaggtaaagactagccgaaaaagacgaagcccaaggccgccgcacagcaaaagtcagtggatgaggcgacaatcgagattgcctttgttctaacatctgaaaatgttttgtgatggtatatggagccttagcacaagcattggcatttgaaagattaatgcatttactaggaagttcagtcgttttaatacgttttactaaattattactgccaattaactaccgctaataagtattaaatcaaaaacccgcttaaattatcaattattttgataattaatattaatgtaaaactataaaactacatttcgcattcatttaacagtttgatttcctgattaaaatggaatatcatttcttattcaatcatgtttatttaaaaagttggtcgcccttttcactgattcgctccactgtgcggctgatcctcactcactttcactgtgtctcgacaccaccacaaaagtcttaagtcttatttggcccaaaaggtttgtaagccgcaaggcagagagcaaattgaaacaattggtacagtaatggattgagaggtccttgtagagcatctcagataatctcagactcggacaaacgtaaagataggtaatcacgctgttgtattctctctagattgtacctaatatatcaaccttaaataatcgtaactactctaattaaataattgctatgcgagggtttctcctgtagtttaatttcaatttttcatttctcactcattttattcgcaaagagaacaagtctagtttgacaaaggtgaagagcaaaactgaaaaccaatccagataaacaaacaatcaaaaaaaaaaaaaaataccctctgtcctcccttaatattattatatattattgcattattgttcagtcactcagattgaaaaagtgttcaatgccgctagtcacaagaaggtttgggaccatttcaccaaagcccaaagaaaaaacatcgatcaatggaagaaattagccacggtacgtactaaaatgttcaaataatcaaatacgaacaatttcaaagatgttgcaaattgtgtaaaaacaaaaaatacatttattgtccaataacttcgattcactgttgtatctcttggtttcataatgttgtatccgtttatgttgatgttgttatcatcgttgtggtgttgcagtagatttctaaccattttactaacgcaatttctgttatcattcagcatgtcgcccattcacccgtcctatataatcatatggtactattccattggtgacgcttatagctgctaattgctttttattaattgttaatttcttttatttgtcccgtgcattaagactctttttagctgtttgtgtttttgattatcgaaatttccaaatcagttgtgatgtcactaaaaaagaaacaatattaatattaatgtaatttgcaagcttaaaatgtactatcgtttaaattatgtagaattagatatatgaataagattattttaagggaaactgttaaaaaactagttaactatattactatatttctaagaattcattttacaaagtaaaagtgcgttttttaaacagtttcctgatcataaacactcattagtatctttctaaatatgaggtcttttacttttattgctttcgctcttgatctgtaatgctttggtctatcttttcttggctttcaagtatcatttgttgttgtactatctctatttttaactaagcatttgcataacatttccgatacgctttaaatacatcgaactaaaagtaaaccttagccgagtgtccacaaaccttcaagtttctatgggaaattgaattttatagaaaacgaggaaggttttgatgggcactcagtgaaatcgattggttgtggtaaatagcaaaaggaagaactaaaaacattgctgctgtgaaacataatttgtgcaacaaatacaaattaatttttaatagcaaaaagaaattaatcgaaacaaattctaaaactttttgaaaatgtggcgaggtaagtaagcggaccagaacagagtcgtaagcaaggaaacaaatttgatgcattatttaaatacacaaattttatagctaggttataatagtgtaagcaatggtactcaaaccaaacgaaacctatccaactagtagcaacggataattaattgaagttcctttcgcatgccacgcaggaacttcgaactgtccagatcacagatgatgatgaaatggaaatctccgacgatgagcgggactacgatagacgcggacacagcgccaagcgaattcgctacgacagtgatggcttaaaagtatgtttatcaaatagtttagtataagtaacttgaaataaaataaagattttaaattggatcaggacgagaacgactctctacgctgtcaactggaggccattcgtcacgagatgacgctggagcgcagtgattatgttcagcgcgaaaagcagataaaggtacttcaggaaaccattcgcaacatgcagacccagttgctgcagacgaagctacgcgaacagaaggacaacaagaccattgagcagttggaacgaaatctcaaggatgccggcattaagcaacttctgttgaagaccaaaattaaggaaacagtggacaaattaagggacaaagaggcaaatagcgctggagcctcaaatgcttcaaacgcctcaaatctcgactacagcagcggggattcgtgtagccgggaaggcacagaaattatccgcccacaggcagaaccggaaataattgatatcgataaagtggatgatgatgtccgcatcatagagcaccaaagcggtgtggtggagatacacgagatcgaggacgatgaaaagcaggagcccgctaaggattctacgaaaagcaaagcaaatgagtcaattatggaaaatgtttcaaagtcgaatcatgaggagactataaacaaaagcagcaaagagcaaatcccaacagtggccgcggaagaggttagtaatgagaattatttgtgtaactatatatatatatagatttaattacttaatttatcttagttttacatgcatctaattatttcatacattcccttgcatatttctaatcactattccttgttttaggtgactttcaagtcgctagtcttgtctgaagccaagataattgctctggcctcagcctatctggtgctgcatccctatggcgttgaaatcgccaacatagccagttacttaagcgaaatgctgcgcaataacgctgcccccagtaaccatgatgatctagccaatatactcggaaagtacacaaatctcttcaagccggaaaaggagaagtggagattctgtggcttcagcgaaccaactgaatctcagacggagtcaaagtgaggggatgaatgcggaatgtagactcgaataagatgacaattaaatgctttaattatcttacaactatatcataatgagtagcgagtaagcggaggaaagtgaaatgttaaccaaaggaaagacgcaagtttttcaatgaaatcacgacttaatgagaccagatccaggtttaagggcaagtactcgaagttaactcaatcggaagaaagacaccacaaactaactaccgtttcaattatttaaataactcaacctaaagaatatatatacacttaagctaaatgaattcaatatatacaaaatatatatacatcaatattttaaataaactgagaggcagaaggtcgcgttgcttttgttgaacggaagcgaaagaatggaaccaaataaattgtatgctaaactacaaagagttttctttaatttgaatcagataaaatatttggttaatgacacaaacacacatctttcaagagagcttaatcttgaaatcgaatacagcatcttaaatattttgagatttccatacttatttttaaaattgattttattaaaataaaattaaacttaatttatgagtttggttatcagttgtaagcttcctgattcacaagctttacatgattcgttaattgaaatcgaacacgatgtcaaataacattagcagttttatttgagctttaacaagattgatccattaaaaaggatttaatgaatgcgattattattccaaattcttttatttcttgtgatattttgactaaagttgtattatgaaaatacagtcgaaagaattttcagcttcctcctaagcaagaattcatggacttggtgaaatattttattacatacaatatgatgaagtctgttgttatcctgcagaaatacattacatatgtacatacacatatgtaactccaaaacattacgtaaggagcttacgtttgtggcgtaagccgctataaagtgcgcgaaatgaagctgcgcgtcctctgccaaggacaatgcccaacagcatcctgcctccccgtgtcctttgacccctctacctccccgttctctcccacatatttcagtgacgtgataaaattccatactctacctatgagtttacccaatatttgtgacgtcaacgaaacgtttatcgtacttaaagcgcgtttggaaatttagaataagccgtaaccgcaaaaacaaaattactgagagatgaaagtacaacaacaactacatatgcaaagggggagatgaaagagagaataagaacatgagcgtaaatttcccaaagcaaaaacaaagtactacgcagcacggaaaaaaatcacttctgtttttgaattggcctaacatattttttcaacctaataggcgttattatacctctttaattattacagagccttttg

SEQ ID NO: 22808 - DNA, 2869 bp, DROSOPHILA
tttgggttgttatctcttttaaagcaaattacaaactgtgtacattttgcagtaccgctctttgggaccatgccgaatggcgtcagtttgccaaatcacccgaatttcctcaaccaattggcagctgcaatttccacggcggcctcgagcacatctgtcgtgggaaatccctcttcgccccccaaacagatccagaataagatggcaaaacaacaacaacaaccacagggcagtgcgcccatggatctggagaatgagaacgaacactctgcggatgtgagctcctcgacgatgcacaaggaacccaagttgcaggccacatccaactcgctcactctgcccgattcgacgcaactatacctgaatggcttggtgcacacaccacctggatatctgtattttccggccacccaagcgggtggtgctactgcacccggcaatccatcctcggctgcagggggatccacgccggcagcttcagcaaacagcaccgccaatgcgcaaatgctcatggatcctacggccatgatggcggcggcgatgcaacaaatgcaacagatgcactatgcagcggcagcagcagccggaatgaccacagaaaccggagctggactagaagcaactcttaatgcggatggcgttacaccagctggcctcaaggaggtgatcaagaccaagaactgcatcctgtttccacctaatccgaacgcacctcctcccacaataagggagcgaccaccaggatgccggacggtgtttgtgggtggactgccggaaaacataaccgaagaagtgatccgggagatcttcgaatcatgcggcgagatcaccacattgcgcatgtccaagaagaacttttgccatattcgctaccgccaagagggtgccatagatagggccatctacctatccggctatagattgcgtatatcagcgctaaatgaacctcccaactttggacgcctgcatgtggactacgcacaggcacgggatgatcagtatgattacgagtgtcgacagagacagcatcagagggaacagcgtcatcgtgagcgcatgtcgatggacaggatgcgatcgcagtcgccgccaccaataccgcactacacggatcacgaggctactactgttgcggagcacctacgcaccaacgagacttttgtaaaggccattcaaacgattaccgcgtggctggagcggggagattgcactaagcggaacgccaatgtcttctattcgatgatccagagcactcatgcccatgtacgaagactccatgcagacaaactgcaactggaggaggatctaaagaaggccagagacagctatcgcaaccaaatgggcaccatgtccacgcaattcactcagattgaaaaagtgttcaatgccgctagtcacaagaaggtttgggaccatttcaccaaagcccaaagaaaaaacatcgatcaatggaagaaattagccacggaacttcgaactgtccagatcacagatgatgatgaaatggaaatctccgacgatgagcgggactacgatagacgcggacacagcgccaagcgaattcgctacgacagtgatggcttaaaagacgagaacgactctctacgctgtcaactggaggccattcgtcacgagatgacgctggagcgcagtgattatgttcagcgcgaaaagcagataaaggtacttcaggaaaccattcgcaacatgcagacccagttgctgcagacgaagctacgcgaacagaaggacaacaagaccattgagcagttggaacgaaatctcaaggatgccggcattaagcaacttctgttgaagaccaaaattaaggaaacagtggacaaattaagggacaaagaggcaaatagcgctggagcctcaaatgcttcaaacgcctcaaatctcgactacagcagcggggattcgtgtagccgggaaggcacagaaattatccgcccacaggcagaaccggaaataattgatatcgataaagtggatgatgatgtccgcatcatagagcaccaaagcggtgtggtggagatacacgagatcgaggacgatgaaaagcaggagcccgctaaggattctacgaaaagcaaagcaaatgagtcaattatggaaaatgtttcaaagtcgaatcatgaggagactataaacaaaagcagcaaagagcaaatcccaacagtggccgcggaagaggtgactttcaagtcgctagtcttgtctgaagccaagataattgctctggcctcagcctatctggtgctgcatccctatggcgttgaaatcgccaacatagccagttacttaagcgaaatgctgcgcaataacgctgcccccagtaaccatgatgatctagccaatatactcggaaagtacacaaatctcttcaagccggaaaaggagaagtggagattctgtggcttcagcgaaccaactgaatctcagacggagtcaaagtgaggggatgaatgcggaatgtagactcgaataagatgacaattaaatgctttaattatcttacaactatatcataatgagtagcgagtaagcggaggaaagtgaaatgttaaccaaaggaaagacgcaagtttttcaatgaaatcacgacttaatgagaccagatccaggtttaagggcaagtactcgaagttaactcaatcggaagaaagacaccacaaactaactaccgtttcaattatttaaataactcaacctaaagaatatatatacacttaagctaaatgaattcaatatatacaaaatatatatacatcaatattttaaataaactgagaggcagaaggtcgcgttgcttttgttgaacggaagcgaaagaatggaaccaaataaattgtatgctaaacta

SEQ ID NO: 22809 - protein, 797 aa, DROSOPHILA
MPNGVSLPNHPNFLNQLAAAISTAASSTSVVGNPSSPPKQIQNKMAKQQQQPQGSAPMDLENENEHSADVSSSTMHKEPKLQATSNSLTLPDSTQLYLNGLVHTPPGYLYFPATQAGGATAPGNPSSAAGGSTPAASANSTANAQMLMDPTAMMAAAMQQMQQMHYAAAAAAGMTTETGAGLEATLNADGVTPAGLKEVIKTKNCILFPPNPNAPPPTIRERPPGCRTVFVGGLPENITEEVIREIFESCGEITTLRMSKKNFCHIRYRQEGAIDRAIYLSGYRLRISALNEPPNFGRLHVDYAQARDDQYDYECRQRQHQREQRHRERMSMDRMRSQSPPPIPHYTDHEATTVAEHLRTNETFVKAIQTITAWLERGDCTKRNANVFYSMIQSTHAHVRRLHADKLQLEEDLKKARDSYRNQMGTMSTQFTQIEKVFNAASHKKVWDHFTKAQRKNIDQWKKLATELRTVQITDDDEMEISDDERDYDRRGHSAKRIRYDSDGLKDENDSLRCQLEAIRHEMTLERSDYVQREKQIKVLQETIRNMQTQLLQTKLREQKDNKTIEQLERNLKDAGIKQLLLKTKIKETVDKLRDKEANSAGASNASNASNLDYSSGDSCSREGTEIIRPQAEPEIIDIDKVDDDVRIIEHQSGVVEIHEIEDDEKQEPAKDSTKSKANESIMENVSKSNHEETINKSSKEQIPTVAAEEVTFKSLVLSEAKIIALASAYLVLHPYGVEIANIASYLSEMLRNNAAPSNHDDLANILGKYTNLFKPEKEKWRFCGFSEPTESQTESK

SEQ ID NO: 22810 - DNA, 3215 bp, DROSOPHILA
atctcatcatcatcatataaccattagcacatgctctaggtaattacagtacactaagtttagttaactattaattaattggtcgagcgctgctgctttgtgtgcggtttccgagaaccgaattccgttttccttttttcagttgacggtgctctctgcccttctacgaaagcagccaaaaagtatgctattcagcgtacacgtaaatttaaataatacttgtgtgtgggtgtgggtgttgggtgttgggtgtgtaacatacatagaggtaactacatatacataacgaggagtatttgtaaaaaaaaacgttacaaaacttgtggaatcagcggaaatcaaattaacatatcaaaggaattttttgttacacaacttaacagtgaactacgagctaaaggtgatcactagactggtgcttttaagcggtgaatatgtaccattatattcattaacattcactttgagtattttagatatggttgcataagtcccgagaggaatttcaaacgaacaagggattcacatacgccctcaacgagtgagttacaaacaaaacatatttcagtaattgagtaattattcatttttacgttgattaatttactttactctcgcaaatagaaattaaactctttgtttggccaaatggaaaaccaacagaatatcataacctcttcaatgtccaccaaggctaacgtgaaagctattgtgtgcattaaaccgaatacatttataatcatatagattttttcatatatttctagcaccagtctaacgagtttgacttgctacattttacttcagtgtggaaggaatttctttttgtccgtcgagcccaacaggagaatttctattcccgctgttggcctcatcattgtttaaggtgtaaactggaatttgcttgctatcaactaaaacattgactaagtttaattgcacctactgcagccaagtggcttgccattaagtcctaaccccttcgatctccttcgatctcctagctgtggctcttgcacagccgcaggagcaacgggtagtggaggtcctcgtcgtagagggcggagtccgccttcagctggagatgccgctgccagatggtctcgttatagcgagtggccaactccacgcggaagcccctggccacgcactcgtcctgaaaaacgctcaaggtgcgcccgcgacgtggagccataatcagggccgatccctcgggcgccagatagtaccagatggtgtccaccagggcggatcgggcctcgtcgaagaacaggcagtcggcgcagaggatgaagtcgaacttggcctgctctgcctgcgatcgggcagacttttcctgccatttcagaaccgagcacttggtatagcagctcagctcgttgaggcaaacggttttcctcacgttctccaccgatatctcattgccatcggtcaggtgaacggcatacggagtggcatacttggccagcatgaggccagccagggaggtgaacccgccaccgagttccaggatccacttgcctcgatatgaagccacctccgagaggaccagcgcggtcaaagcctcctccgagggccaaacgcatatgttgcccgtgttattgaagcccatcagatcacttgcggtcagctgacgctccatgtggtggatgttcaccgagtactccgactcgttctccagctgcatgcggtatttgtaccagttctccgtcttgcccaagcacttcagactcacgtgatcctcgaagctgtcctggcggagcagatcgaagctcttgaagcgccgcacggatgcagtttgctcctcggcgaactcatcgctggacgaggacaccgtctcctcggaatccttgcgcagcaccttggccaggatcttccagcgcttctgggcagtgctctgcaggttgggcgtcgccggcggagtgggcggcatgaagccgttctcgccgctcttgagtcgcagatcctcctccagttcggtctgctccggcagattgcggtttatgtccttgtcctggttgttgttgactgcggcggccacctcgccgcccaatcgagcgtccagcgtcatcttcttgtgctccttgagcgcattcagtgtgttgtcaatgtcgtactgcagtagcaacgatatagttgccaactgtgccacacccacttccggtgtctgatcgagttgagtttccgtcgccttctgtactaaagctgctgacatcttacttcaggccttatttgattcactctcgctgtcacttctcagttttccattttctgccctgcaaaaggcaaagataaaagggagacagagtaacgaaattagtccaagttttcaaaaagttttacccccgccattcgattttccactctgcttcggaccgccctctttgagaaccattattttccaattatgagtttttaatggcattaaaaatgcaaattatccgaccataaaaataaaacaaattatatctagcgcaaaaaatctttgcctacactgatgtcggcaagatgtctgtcagtatatatatgtacacttttgccggcacatatatatttcatgaacaatatttttcgtaaaaaagcaaggtttcgactttgtttcactgtgttattatggaatgatttgcagacatagtccaaaaatatttgacacgaaacaaatttgccggtaataaattctagttagttaagccagcaactctattcacttaaaataaagtttgtttgaatattgaaacagcattcaattaacctgcctttatataacaaattccaaagtttcagagaatacccagtaattttgcgtatgggctgtctcggtctttattgttttgattgctgcacattttcactctgtgtattttagaattttctgattggccttgtgtgtatgaattcacagagcttgaaaaatttaaaaattttacagcccgtagaaaaatgttaattatgctgacgttaaagtgcagaattgaccagctggtagtttttccggcaaaaatgaccagcgcatcaaccatttcccatctcccactctccacttcccacttcccactggcatatggtgtttatcggtgataagagagggcgttcggcttatattttcccgcacacctggccattgggttatgggtgggtggttctcggctgaccaatgacacctgccccggaatttctcgtaatcactggctgagcaataaaaattcaaagaatcc

SEQ ID NO: 22811 - DNA, 1215 bp, DROSOPHILA
atgtcagcagctttagtacagaaggcgacggaaactcaactcgatcagacaccggaagtgggtgtggcacagttggcaactatatcgttgctactgcagtacgacattgacaacacactgaatgcgctcaaggagcacaagaagatgacgctggacgctcgattgggcggcgaggtggccgccgcagtcaacaacaaccaggacaaggacataaaccgcaatctgccggagcagaccgaactggaggaggatctgcgactcaagagcggcgagaacggcttcatgccgcccactccgccggcgacgcccaacctgcagagcactgcccagaagcgctggaagatcctggccaaggtgctgcgcaaggattccgaggagacggtgtcctcgtccagcgatgagttcgccgaggagcaaactgcatccgtgcggcgcttcaagagcttcgatctgctccgccaggacagcttcgaggatcacgtgagtctgaagtgcttgggcaagacggagaactggtacaaataccgcatgcagctggagaacgagtcggagtactcggtgaacatccaccacatggagcgtcagctgaccgcaagtgatctgatgggcttcaataacacgggcaacatatgcgtttggccctcggaggaggctttgaccgcgctggtcctctcggaggtggcttcatatcgaggcaagtggatcctggaactcggtggcgggttcacctccctggctggcctcatgctggccaagtatgccactccgtatgccgttcacctgaccgatggcaatgagatatcggtggagaacgtgaggaaaaccgtttgcctcaacgagctgagctgctataccaagtgctcggttctgaaatggcaggaaaagtctgcccgatcgcaggcagagcaggccaagttcgacttcatcctctgcgccgactgcctgttcttcgacgaggcccgatccgccctggtggacaccatctggtactatctggcgcccgagggatcggccctgattatggctccacgtcgcgggcgcaccttgagcgtttttcaggacgagtgcgtggccaggggcttccgcgtggagttggccactcgctataacgagaccatctggcagcggcatctccagctgaaggcggactccgccctctacgacgaggacctccactacccgttgctcctgcggctgtgcaagagccacagctag

SEQ ID NO: 22812 - protein, 404 aa, DROSOPHILA
MSAALVQKATETQLDQTPEVGVAQLATISLLLQYDIDNTLNALKEHKKMTLDARLGGEVAAAVNNNQDKDINRNLPEQTELEEDLRLKSGENGFMPPTPPATPNLQSTAQKRWKILAKVLRKDSEETVSSSSDEFAEEQTASVRRFKSFDLLRQDSFEDHVSLKCLGKTENWYKYRMQLENESEYSVNIHHMERQLTASDLMGFNNTGNICVWPSEEALTALVLSEVASYRGKWILELGGGFTSLAGLMLAKYATPYAVHLTDGNEISVENVRKTVCLNELSCYTKCSVLKWQEKSARSQAEQAKFDFILCADCLFFDEARSALVDTIWYYLAPEGSALIMAPRRGRTLSVFQDECVARGFRVELATRYNETIWQRHLQLKADSALYDEDLHYPLLLRLCKSHS

SEQ ID NO: 22813 - DNA, 3576 bp, DROSOPHILA
gacttttattcggacagataaacggacaaacggactttaggttatgagacgctttcttcttcatgtatcattctttctaatgagtctagtttagcctggtaactctacgagtagatggaatagctgatcccaactgacactacttgtctggatgcacttacctgtgtgtcaacaaagaatgcatctagtgcgtctaaaagcagccaaaaggaccacctgggtgccgcctccaatgccgatgatcgagctaatggccgccaaggcatggagcgatgacatggggttcggtctaacgaggaggatggacggcaggtgtcacagcgacgggcgcactctcttcatccatccgcttgggccgcaccactcgacgcggggaatccggatcccggccagaacttcaaacgcttgccgcgcacttcgtttatttacacaagaaacaagtttatgcccgagaagaaccattcgcaggcacttagcaggcgctcgcgtttattatcttaataataatttcagagttcaggcggcgctctttgacgcacaactagggattcctgctcgcatgagaatgggatttggatcggtatctctgggtcccgaccaactgcaccgtgcgaaccggaggcggcaactaagcgaatcgagaatctgttggcactcgcgcttcccaagagccaagtgcacgccaagcgatttgtttatccatctgctgcgtacgcgcgaatttgttcgttattaattgcaataaatggtgtcggcgtgggcgcttttatttatttctgttttttgtttttggtcggtatgaaatgtttgtttctaattttcgcgtaaccgaaatatttgaataattcagcgccctctggtggcgggtagcgtttgatggcgatggttgtggttacgcatttcaatgcttttcagcactggtaatttaaacaactcaatttgaaatctacaaatattcaaacctttctttttcaatattgccttttgagccacaatatttagtaagtttatttatttacagatattttcatgcttacacttatgtaataacccttcttcgtaatacttttgcagctaatctacaacattctaatttcagttaatgacctgacaaggtgccacatcctcgatctcctcgccatcgagggctttgatttggcactggcacaggaactgcacgatcttacgctcggcacttgcccgctcagacggactcagtccgtccagcagcatctgagccttggcaagcaggctgttggcaggctgtgtacttcgctgttctcgctcctgctcctgttcgtggtgaatctgggcctgcagctcccgggattgctgaagcacggtctccatgttggcaatcacggtggtcaacagtttgtcggagatggcggcagacggtacagagtccccagggagagaggaggactcctctacgacgggatttaccctggcgattgtgtgaattatttcctcactggtggccggcgtggtggtggtcacctggagctgctgtggtggctccaagtcctgccgtgccgtcgcttcgctgaggataaaatcgtacggcgttgcttgctccgcctccgatagtatctcaatctcttcatcgtaggccaactcaagatcatcctccagatcgtcgttgtccgtactgtaggggtaatcagcgccccagatttgctcaccactggagatcaccattccctccggctgtttgctggtctttcccgaaggatttcctgctttgggtggtcgtccacgtcgcttgatgttctccaaaaccaggggcactcctttgcggaagtggcggcccagaaagagaaggtcgttaaagtacctccacgtgatgggcgtggactggttgatctgatgactgcggaactcccgcccgaaacgatcacgcagcttcttccagcggttgtagcaaagttcctctattgaaaattatcggcattaagggctgaagatcaagagggttaccccgagctcacccgacacatttaggttttcagaaatctctcgccaggcttcgtttttcgctgctaggttcttggagactctgatcttgtgacgatcatacagcacgggatgagacttgaccagctcaatgagctgctcgttcagcaggtcatcctgggagtcctcctcctcctcgtcctttctccgcctctcctgctccatgtccacttttgtgcgctttttccgctccctgggctcaaaacgcatcccgtcgagactctcgttccttgccagtccctgtttgtagtgatccttgagaaagagcagtcgcggaaacatgtcccagtaggtgggctcatccggacgctcctggaaacggcgaaactccttgccgaaacgatcgcgaatgctcttccagcgcgtaatgcacgcccgttccgaggctcctaacttctgggagatggccttccaggccgcgtccttttgcgccgcattcttcacgctcctcgcgcagtccttgtcgtacaggatcgggtgtctctctatcaatttaatcagctcatcgtcgtccattgattttcgctattatttgtttttatttattctgaacgatccggcagcctggcgggaaatattgatagtcgataggcgatgggtcatcgcacaaaaagggctgccagattattctgttaaaaaaatgtgcctcttagttttatagcaccgttattataacaatgttaaataaaatatttgtgtgtttgtcttaaaatgtcttaatacatatttataatttaaagttcgtgtgtacgaatttcgtttaaaatatattctattttatatattttaaagaaaattctctttatgtttgttaaaatctgctggtttgaatttctgtgtaacctgataacattgatggtcgatagctcgatacttcaatctttccatcggtgagtttgccccatctctattgtgctacctggcaacgctgtgagcaaggaaaatacggcagcgtgctccccgttttccatccacgttttgttataattttataagtattacggtctgagaccgattttgcactgcatcgtgcgcgctgcaagtactggcgattggaaattggaggcgcgaaaagaggataaggtggattttcttgcaactgtgtgtgtgagcattggaattcgcccgtgtgtgtggcgagagtgcgtccatgtgtgtgtgacggaccaaaaaagccgacatcagcgcccattttttgttgttgattcattaatacgcccgtcatgcaccagtattggtgagttggagcagcgcaccgtcttactcgcactcaacggagcgcagaaagagcgcagggagcggcagaagaagaagcagcgagcagcagcaccattagcggcagtcaacgtcatataatttgtcatcgaaattggcacactaaaaataacagttaacttcaaccgccatgatcctgctggaaatcaataatcggattatcgaggagacgctgctggtcaaataccgtaatgcccaggctgggtaagtcaatgccttccagtcccgtttccccaatttccattccaccattttgatttctatgctgcattccccaccgttctg

SEQ ID NO: 22814 - DNA, 1519 bp, DROSOPHILA
ccggatcgttcagaataaataaaaacaaataatagcgaaaatcaatggacgacgatgagctgattaaattgatagagagacacccgatcctgtacgacaaggactgcgcgaggagcgtgaagaatgcggcgcaaaaggacgcggcctggaaggccatctcccagaagttaggagcctcggaacgggcgtgcattacgcgctggaagagcattcgcgatcgtttcggcaaggagtttcgccgtttccaggagcgtccggatgagcccacctactgggacatgtttccgcgactgctctttctcaaggatcactacaaacagggactggcaaggaacgagagtctcgacgggatgcgttttgagcccagggagcggaaaaagcgcacaaaagtggacatggagcaggagaggcggagaaaggacgaggaggaggaggactcccaggatgacctgctgaacgagcagctcattgagctggtcaagtctcatcccgtgctgtatgatcgtcacaagatcagagtctccaagaacctagcagcgaaaaacgaagcctggcgagagatttctgaaaacctaaatgtgtcggaggaactttgctacaaccgctggaagaagctgcgtgatcgtttcgggcgggagttccgcagtcatcagatcaaccagtccacgcccatcacgtggaggtactttaacgaccttctctttctgggccgccacttccgcaaaggagtgcccctggttttggagaacatcaagcgacgtggacgaccacccaaagcaggaaatccttcgggaaagaccagcaaacagccggagggaatggtgatctccagtggtgagcaaatctggggcgctgattacccctacagtacggacaacgacgatctggaggatgatcttgagttggcctacgatgaagagattgagatactatcggaggcggagcaagcaacgccgtacgattttatcctcagcgaagcgacggcacggcaggacttggagccaccacagcagctccaggtgaccaccaccacgccggccaccagtgaggaaataattcacacaatcgccagggtaaatcccgtcgtagaggagtcctcctctctccctggggactctgtaccgtctgccgccatctccgacaaactgttgaccaccgtgattgccaacatggagaccgtgcttcagcaatcccgggagctgcaggcccagattcaccacgaacaggagcaggagcgagaacagcgaagtacacagcctgccaacagcctgcttgccaaggctcagatgctgctggacggactgagtccgtctgagcgggcaagtgccgagcgtaagatcgtgcagttcctgtgccagtgccaaatcaaagccctcgatggcgaggagatcgaggatgtggcaccttgtcaggtcattaactgaaattagaatgttgtagattagctgcaaaagtattacgaagaagggttattacataagtgtaagcatgaaaatatctgtaaataaataaacttact

SEQ ID NO: 22815 - protein, 459 aa, DROSOPHILA
MDDDELIKLIERHPILYDKDCARSVKNAAQKDAAWKAISQKLGASERACITRWKSIRDRFGKEFRRFQERPDEPTYWDMFPRLLFLKDHYKQGLARNESLDGMRFEPRERKKRTKVDMEQERRRKDEEEEDSQDDLLNEQLIELVKSHPVLYDRHKIRVSKNLAAKNEAWREISENLNVSEELCYNRWKKLRDRFGREFRSHQINQSTPITWRYFNDLLFLGRHFRKGVPLVLENIKRRGRPPKAGNPSGKTSKQPEGMVISSGEQIWGADYPYSTDNDDLEDDLELAYDEEIEILSEAEQATPYDFILSEATARQDLEPPQQLQVTTTTPATSEEIIHTIARVNPVVEESSSLPGDSVPSAAISDKLLTTVIANMETVLQQSRELQAQIHHEQEQEREQRSTQPANSLLAKAQMLLDGLSPSERASAERKIVQFLCQCQIKALDGEEIEDVAPCQVIN

SEQ ID NO: 22816 - DNA, 4875 bp, DROSOPHILA
ttatgtgtggggaaggggggcagcaggtgtggctttaatttagttttcaaaatgtgtttttgcgtggggcacaaacaagtacataacccacttaccagcgtgcagacaaatgtttgcctattacagggtacacaaagtcagcattcccgcccagccattcggtatcatcatgcaaattgaagggggctgggatagggataatggggatgccgaaatttgcatttcaattctgccgccgccggcatttccattcccctgcacctccacccacgtccccaccccaccccttatgtttaccttgctcgaacagcttcgccgtattttttcaactctgctttaagtgtgattcagtgttgcgctcgacagcgcggcaaaatgtgcacgtgctgcaccagccgcaaggtatttccccgcagtggtgggtggtaggtcctgtcgcgtcctgtccgagctcaaaaaactccaaaaggaattgggctcgagttcaaaataagcgattatttaagggtgtcacatgacatacaagggtaccaaattacttaaaaaggagagtctgatattttaaaatgaatcaatcaaagggactactattcgttttaagttgtttttttttttttaacaattttacaagcaaaatgagttcgaagatagttgtcaaggatacaaagatatacaattgtttatattcgctattattattgttactattaagttagaataacttgcttacataaaataaactgaatccaattgggtaaattcacttaagctacacgtgaatttgaaaacacgatttgttgcttatttataaaaatataaataaaagtcggagattccccttgaatcccttttgaaactgttcccactcaatgtgttccctgggatcaaatagttttcccgcgcttacagctgacagctcgattactgttgccagccctagcatatcgatagcacgtagcgaggacagacaaaatcccgataggccatatcacactcgttgccatctccaacggcacgcactaaaattttttcgttctgatttggttaaattttattattaagtaaaggccaggaaacgatcggaaatgggcaaacggcggacgcaatccctgatcgactccaactccagcgatagcgacagcgagtccgagaccaatctggaatcggtgagtggctatagaatagatcaaatgcatcatccgcgcccctttctccatattgcgatgtaacgaaaatcaatataaatactgaaaatacaccttatatgtaatccccaggacctgatgtcgctcgccaagaagcgaaagaagccccaaacggcggccaagtcaagttcccgctccgactctgattccgactgggccaacaacaaagctggagctccctcgtccaagaagaagaagcgtcagaagcccagcagagactccagctcctcggagtccaattgggatgacgacagtcaggatgagaggcagccagcgaggcagagtcctgcacagacgcaacaggagcacaagcccccggagcaggcctcccagcccgcccagctcagcgagcaggaggagggcgaggtctccgatagcgattccgacaagtccaagtccaactcctcctcatccggctccgactcctctagttcttcctccagctccgactcggaatttgacgacgggttcgatgatgacctcatgggcgatgatgaggatcgaaggcgtctcaatggtttgtccgagaaggagcgtgaaactgaaatttacaagcgcattgagcagcgcgagattatgcgaacgcgctgggaaatcgaacggaaactgaagctggcaaggcgcggcgagaaaaaccaagaaaagtccaagaacaaaggagaacgggccaagaagaagaaggaaaagcgcgagaagaaggcgaggaaagccagggaagcccaggcgcccttgccaactcaagcttccacatccacacttttagatgtcgaacccaagcccagcaacgaagtacggtcagcgagtccgttgtccacgcctgcccttaaccgagatgcggcttccacttcagcggcagtggccagtattatgcccgacgatgcagcttcctccgctggcgtctctgattactttgatcacaaggaacgttccaaggagcgcaagaagaacgtggaggccaacaagacggacgacaagaggagcaatgccatggccttattaaaagccaaaagagagggcaaggctaaaagaggtaagcatcagtcgatcataatcgtcatacgactctaatgtgttgttttttccattcaccttgcagaagaggaggaagccaaacgcatggcagaaaaagatcgtgatgacgacaaagaggaactcgatagcgtatctggttgtaaatcggccgtgaaactgaaagcctctgaaatatactctgacgactcaggcagcagcgattgggatgaggaagaaaagcccgcgggcaaacgttcacgttccaacagcagcaaggcctccagcgaatccgaggacgaagaaaaggcgcctcagcggcccgtttttataaccacacgcgaggatcttaacaaattgcgtctatctcgctacaaaatggagcgatttgtgaacttgccaatctttgagagcactgtactcaactgctttgtccggataagtatcggaaacaatggccagaaacccgtgtatcgagtggccgaaattgtgggagtggttgagacggggaagatctacagtctgggcactacacgaaccaatcgtggattgagacttaagcacggaacccaggagcgggtcttccgactcgagttcatttcgaaccaggagtttacggagaacgagttcaacaagtggaacgaggtctgccagcagtcgcacgtccagatgccaacgattgatctaatagcgatcaagcagaacgacatcaaaaaagcattgaactacgaattcaaggacgaggacgtggacaagatcgtggaggagaagaaccgcttccggaaccgacccaccaattatgcgatgaagaaaacctgcctgatgaaggagcgagatgcagccatgttgcggggtgactacgacattgcacaggatctgggacagcaaatcgacgagctggagaaccgagcctctgagctcgacaaaagaagatcccataccctcaatctgatctcctacataaacgacaggaacaggaagaagaatgtggaggacgctgagaaggcaattttagaggaggctcgggccaacaaaggcctcaagatctcggatcccttcacacgtcgcattactcagccgcgcatgggcttcaagggtgccaagaaggacgaagatgacatgcaactggcaccactgccgccgccacccccaggaaaaaagaggcccaacgaagcaggaacttcgagtgcaagcgtcaggtccacggactccaaggactacagtctctactcactgcatgactttgacattgacctagatgttccgctaccaggtatgtaactaacgtattctgcagttgagcaatgggcataaccattttcttttttagtcaatacgaattcagtgcccaagccggctagcaaaccagctgaaacagtctccaaacgttcgctgaatctagaggattacaaaaaaaagcgcggtcttatctagaaaaggatgccgctggtcatacatatactgacaaagcgtcgcatgtttacgtcctagtttagtgtagtgcccaaatgaaatgaatacagcgatcgtttgcttcaacgactcaaccaacttaaagagcaacaaaaaaaacgacgggcaatcagctcggcttatagttacagttcatatatatatataataaggttgacacagaaagttttagataggtcgggcgaattgaatatcccaatcgaggatactttctctgtttgtgtttgttttgtttcactattatgatataatttttagaaaaattatgcaagcaacacttaagaatcaacagtaatttcgaacatttggaatgcctatgcagataacgaacttatttaagtatatattgtgaaatttttaaagttttaagctaaaaatgttataacgaaaagagtaaaaccccatccagcctaatcatttccaacgatttgttccataaattaacaactaacataattaatacggaattagttttcagcgaagacttaatcgtttactcaggcaaatggcaaatttgaaggatattccatggacaaatatgaagaggattattgaaagggttatataagactcattcaagcgagtatgtatccgttggttgtaaccgttcaatgctgtattagattaaggcaaaattcatcagttgtagcaacagctttcatatacttaaatatacatatataaatattatttataataaagaaaaagacttaaataatgttattgatctagtgttgggatactgtataggatttgttatcttgtatacttggcgcctattcccacataagcaccaatgaaaagtaaacttatggtcaccattctggactgttggacagttggctcctcttaattggtttgcagtctgtttgcgcagctggctgactcctttcatgttctcaccaaattaattcaattaattcgatgaaattgtcttttaattgaacacaatcgcgtttcgtcagagggaaaaacgtttttcaagatctgcaaatatataaagagactttaacggtcaatatttgaaaggcatattcgagctaactccgctgcaatcgatcgaaatacatgctaaataggatgctaatttgaaataaacttgaattgatcgctatataatgcacttccgctcgaatattttccaagttgtttcgttctgtctttttgggaacctcgccgtgccgaacat

SEQ ID NO: 22817 - DNA, 2583 bp, DROSOPHILA
ccatctccaacggcacgcactaaaattttttcgttctgatttggttaaattttattattaagtaaaggccaggaaacgatcggaaatgggcaaacggcggacgcaatccctgatcgactccaactccagcgatagcgacagcgagtccgagaccaatctggaatcggacctgatgtcgctcgccaagaagcgaaagaagccccaaacggcggccaagtcaagttcccgctccgactctgattccgactgggccaacaacaaagctggagctccctcgtccaagaagaagaagcgtcagaagcccagcagagactccagctcctcggagtccaattgggatgacgacagtcaggatgagaggcagccagcgaggcagagtcctgcacagacgcaacaggagcacaagcccccggagcaggcctcccagcccgcccagctcagcgagcaggaggagggcgaggtctccgatagcgattccgacaagtccaagtccaactcctcctcatccggctccgactcctctagttcttcctccagctccgactcggaatttgacgacgggttcgatgatgacctcatgggcgatgatgaggatcgaaggcgtctcaatggtttgtccgagaaggagcgtgaaactgaaatttacaagcgcattgagcagcgcgagattatgcgaacgcgctgggaaatcgaacggaaactgaagctggcaaggcgcggcgagaaaaaccaagaaaagtccaagaacaaaggagaacgggccaagaagaagaaggaaaagcgcgagaagaaggcgaggaaagccagggaagcccaggcgcccttgccaactcaagcttccacatccacacttttagatgtcgaacccaagcccagcaacgaagtacggtcagcgagtccgttgtccacgcctgcccttaaccgagatgcggcttccacttcagcggcagtggccagtattatgcccgacgatgcagcttcctccgctggcgtctctgattactttgatcacaaggaacgttccaaggagcgcaagaagaacgtggaggccaacaagacggacgacaagaggagcaatgccatggccttattaaaagccaaaagagagggcaaggctaaaagagaagaggaggaagccaaacgcatggcagaaaaagatcgtgatgacgacaaagaggaactcgatagcgtatctggttgtaaatcggccgtgaaactgaaagcctctgaaatatactctgacgactcaggcagcagcgattgggatgaggaagaaaagcccgcgggcaaacgttcacgttccaacagcagcaaggcctccagcgaatccgaggacgaagaaaaggcgcctcagcggcccgtttttataaccacacgcgaggatcttaacaaattgcgtctatctcgctacaaaatggagcgatttgtgaacttgccaatctttgagagcactgtactcaactgctttgtccggataagtatcggaaacaatggccagaaacccgtgtatcgagtggccgaaattgtgggagtggttgagacggggaagatctacagtctgggcactacacgaaccaatcgtggattgagacttaagcacggaacccaggagcgggtcttccgactcgagttcatttcgaaccaggagtttacggagaacgagttcaacaagtggaacgaggtctgccagcagtcgcacgtccagatgccaacgattgatctaatagcgatcaagcagaacgacatcaaaaaagcattgaactacgaattcaaggacgaggacgtggacaagatcgtggaggagaagaaccgcttccggaaccgacccaccaattatgcgatgaagaaaacctgcctgatgaaggagcgagatgcagccatgttgcggggtgactacgacattgcacaggatctgggacagcaaatcgacgagctggagaaccgagcctctgagctcgacaaaagaagatcccataccctcaatctgatctcctacataaacgacaggaacaggaagaagaatgtggaggacgctgagaaggcaattttagaggaggctcgggccaacaaaggcctcaagatctcggatcccttcacacgtcgcattactcagccgcgcatgggcttcaagggtgccaagaaggacgaagatgacatgcaactggcaccactgccgccgccacccccaggaaaaaagaggcccaacgaagcaggaacttcgagtgcaagcgtcaggtccacggactccaaggactacagtctctactcactgcatgactttgacattgacctagatgttccgctaccagtcaatacgaattcagtgcccaagccggctagcaaaccagctgaaacagtctccaaacgttcgctgaatctagaggattacaaaaaaaagcgcggtcttatctagaaaaggatgccgctggtcatacatatactgacaaagcgtcgcatgtttacgtcctagtttagtgtagtgcccaaatgaaatgaatacagcgatcctcggcttatagttacagttcatatatatatataataaggttgacacagaaagttttagataggtcgggcgaattg

SEQ ID NO: 22818 - protein, 775 aa, DROSOPHILA
MGKRRTQSLIDSNSSDSDSESETNLESDLMSLAKKRKKPQTAAKSSSRSDSDSDWANNKAGAPSSKKKKRQKPSRDSSSSESNWDDDSQDERQPARQSPAQTQQEHKPPEQASQPAQLSEQEEGEVSDSDSDKSKSNSSSSGSDSSSSSSSSDSEFDDGFDDDLMGDDEDRRRLNGLSEKERETEIYKRIEQREIMRTRWEIERKLKLARRGEKNQEKSKNKGERAKKKKEKREKKARKAREAQAPLPTQASTSTLLDVEPKPSNEVRSASPLSTPALNRDAASTSAAVASIMPDDAASSAGVSDYFDHKERSKERKKNVEANKTDDKRSNAMALLKAKREGKAKREEEEAKRMAEKDRDDDKEELDSVSGCKSAVKLKASEIYSDDSGSSDWDEEEKPAGKRSRSNSSKASSESEDEEKAPQRPVFITTREDLNKLRLSRYKMERFVNLPIFESTVLNCFVRISIGNNGQKPVYRVAEIVGVVETGKIYSLGTTRTNRGLRLKHGTQERVFRLEFISNQEFTENEFNKWNEVCQQSHVQMPTIDLIAIKQNDIKKALNYEFKDEDVDKIVEEKNRFRNRPTNYAMKKTCLMKERDAAMLRGDYDIAQDLGQQIDELENRASELDKRRSHTLNLISYINDRNRKKNVEDAEKAILEEARANKGLKISDPFTRRITQPRMGFKGAKKDEDDMQLAPLPPPPPGKKRPNEAGTSSASVRSTDSKDYSLYSLHDFDIDLDVPLPVNTNSVPKPASKPAETVSKRSLNLEDYKKKRGLI

SEQ ID NO: 22819 - DNA, 3716 bp, DROSOPHILA
gctgcaaaaacagaaacacacttaaaatgaacacacacacacacacattgcagaacgttcaacagcaaagcaaaaacggaatatttatgaacgcaccactcgacgagggaaagcgaaaatgcgccaaacgaaattgtggatacgtgggaatgggaatggaaatggaaccaagaccaacgaaccaagtccaagtccgaagtcctgtctaccctctcctccacactacacacacacacacacacacacacatgtatatatatttttcctactgccgggcaatgtttgctggcagataaagcaaatggcaaaagtgttttccacgcgcgatcgatatacacggcgccagcaaggcgggacaaattttcatagttcaagtggcgcctaggaaaacccaagcccaaacaccgaacccaccagcaaaactcaacagcaaatgtggccaaaggcgggcggcagtaaaaatgctgctcggagagaaataaatgcgataaaaattattgcggaagtgcgcaggcgaacagagtgaagaaaaatttatagaaaggagcaacaggaatgggcgtttgactcatattccatgcctttttcggcccactctttggcacctcatcatcggccggggcctttgtgttttgggttgaatcatcgccaaggacgaaagcgagaattgatatcacgtgtcagtccgacgtcaatgtcactcagtcacttccgtccaagccaaagccaaacggaggactcttgcgcccggaatgggtgggcataaaaatgccgggctaaatgagccacggctttctcggatctgattttattttacgatttaggcgtgtgttggcccttagctgttgccaaattagttagcaaaattaacttgcctattggcgtggattgcggttttattgctcttctctagataagccatgagtcatgttgtgaattatctctttaattataagaattttgggaaaatttttaacaaaatataattaatttattaacattaaaaactattcattagcaccctgtgacgattttcctcaatatgggcaggacacttgatccaccttatattgagtattgacgtctttgcttcttggacacacgccgcaggtagttccctgatcaaagtacagatgctgcacaaaagctcacagcgctcgctctcctttaaacagaactcgtccaccatgatggccagcgtaactaggtaattccagtggggcattagaagattcaggcgacagtcgatagccgacagcattgggtccgcgcggcgcagttcgttgaccagacaatcccagatggtttcgacactcacgatttccgggattgagattagctcaaggacctgcaggcgtataaaaggctgctggcaatccttttggaaaaatgtctttaaaatgcatgagattatatcggtctgatgctccttaaagtttcctatcaggtgtcgcagaaagaaaacgctagcttccacttccatccaagggctctgctcatctaccacgatactgcacaatttctcaacggtatcatcatctatcatatgggccatatccaacaggacctcgcctatgagttctcgaaaacgctgcatgtctgccgaccctggtggcatcataaattcataattggctggcaaggcagcacgtggcaacagtagatctaggagccgcacgaagtacggttgatacacagaatacatttccggatcgtcgtggagatacacttcttctgaaatcgacgaccacatacccaaagaggcttctattacctctaatggggactcctcggctacaagtaacaatagctcgatggttactagtcgttcgttgagtcgttcaggattcgtttgagttagccggaagtgtgtttgaaaaagatttacaaatatgttgcagtagttttgcagcagtgagcgttcgcccatagatcgtttgaatgccggtttcaaacagatgaccgaattggccaaacagctattcagttcttttctgatcagggattgttcaagcaaagctacaaaaagttccgccgcctctaaatgaccgttaaccaacggggtagccagaataaattcagccattatgaacagtttgcgttgcagaacttggtcgggtgaaagcatactaaatttggtccatgacgcgcaaacagccagacatttcggcaaggcatcgtctggtaaatccggtcgctgtagaagtccttccagcacatctaagatatacggagattgctgttcaagtgtgtcgatcacagaattcaatttcttcgcttctaccggaagattcgatggacgagtctcctcaggaataacctttaggacctccaaaagtgccatcacgtattgggggttttcagatagctttctcacaaagtcttgtagctcgtagtcccactgtgaaaacattagccctagagctgatatgccaactgccaactgcacaatcaatgagttggaatccctcatcatagccgcatatttaaggtgatcgatcaaggaattctttagagacataagctggaacttttgtagcgaataaaatgatgtctttattttcttagccaagctcattgccgcaaaggtcaggatgtgcatatcgtgcggtggcctgtaggataatatttcctcagctataatccaggtgtcattcgatttctgaaaggcggccaagtattcgttggccaatgaaatgttgcccgagctcaacatattaaccgcatctatgacaagttcttttgtaaattctgcattcatttttaaacgaaacctaattaatttaagagagaaaccaaataagagccaacaaaatttctgcaaagagaataggtcgtcatttaaaatcaacagtttcggcaacaacttacctgtgaataaattagtctgtgaactatgaggtagatgtgagaaatcgtattttattgttgaaaatcgtttctaaaattgacaacaatggaaaaactaatggtttcgttagtaaattttaattttttaaataaacgattaaagcaaaccatagaatttaaaaataacacaattgctagatacattattgatttcatgactttaaaatatgaatagttatgagttcaagtaagatgagtcaatatcgtcataatgctacttttttatatttcatacttgaatagcaataagtcttatccagccaagcaaactatagactttccaagtcattctgggaaatcgcaaccttggtcctgtgcggcaatcaattttcccaataaatgcagtgcgttgagacaataaaactctatgaaaactatacaaacaagggactcgaacccattgtacatatagatatgtgtccagattgccgcaactagcgtttgcccagctcaaatgtttaccctgtcgtctcgattcgcagttccaggacgcctctcatcacgcacaaacgcacaaattacaaggggttgggtgccatttgggggcggagaggtggaaaagtgccttgaccagcgcgaacaataagcaataaaattatatgccatattatacatacatatacacacactcgcccagctcacactcgcacactcacacttgcgccaatataattttgaaatcagttaagtgttggctttgttcgatcgggcattcaaaggcagtcgtgcagttaaaacaaatggtagtgagataggcaaattaatatatataaattagtcataagctcaacctaattgtaaatata

SEQ ID NO: 22820 - DNA, 1716 bp, DROSOPHILA
atgttgagctcgggcaacatttcattggccaacgaatacttggccgcctttcagaaatcgaatgacacctggattatagctgaggaaatattatcctacaggccaccgcacgatatgcacatcctgacctttgcggcaatgagcttggctaagaaaataaagacatcattttattcgctacaaaagttccagcttatgtctctaaagaattccttgatcgatcaccttaaatatgcggctatgatgagggattccaactcattgattgtgcagttggcagttggcatatcagctctagggctaatgttttcacagtgggactacgagctacaagactttgtgagaaagctatctgaaaacccccaatacgtgatggcacttttggaggtcctaaaggttattcctgaggagactcgtccatcgaatcttccggtagaagcgaagaaattgaattctgtgatcgacacacttgaacagcaatctccgtatatcttagatgtgctggaaggacttctacagcgaccggatttaccagacgatgccttgccgaaatgtctggctgtttgcgcgtcatggaccaaatttagtatgctttcacccgaccaagttctgcaacgcaaactgttcataatggctgaatttattctggctaccccgttggttaacggtcatttagaggcggcggaactttttgtagctttgcttgaacaatccctgatcagaaaagaactgaatagctgtttggccaattcggtcatctgtttgaaaccggcattcaaacgatctatgggcgaacgctcactgctgcaaaactactgcaacatatttgtaaatctttttcaaacacacttccggctaactcaaacgaatcctgaacgactcaacgaacgactagtaaccatcgagctattgttacttgtagccgaggagtccccattagaggtaatagaagcctctttgggtatgtggtcgtcgatttcagaagaagtgtatctccacgacgatccggaaatgtattctgtgtatcaaccgtacttcgtgcggctcctagatctactgttgccacgtgctgccttgccagccaattatgaatttatgatgccaccagggtcggcagacatgcagcgttttcgagaactcataggcgaggtcctgttggatatggcccatatgatagatgatgataccgttgagaaattgtgcagtatcgtggtagatgagcagagcccttggatggaagtggaagctagcgttttctttctgcgacacctgataggaaactttaaggagcatcagaccgatataatctcatgcattttaaagacatttttccaaaaggattgccagcagccttttatacgcctgcaggtccttgagctaatctcaatcccggaaatcgtgagtgtcgaaaccatctgggattgtctggtcaacgaactgcgccgcgcggacccaatgctgtcggctatcgactgtcgcctgaatcttctaatgccccactggaattacctagttacgctggccatcatggtggacgagttctgtttaaaggagagcgagcgctgtgagcttttgtgcagcatctgtactttgatcagggaactacctgcggcgtgtgtccaagaagcaaagacgtcaatactcaatataaggtggatcaagtgtcctgcccatattgaggaaaatcgtcacagggtgctaatgaatagtttttaa

SEQ ID NO: 22821 - protein, 571 aa, DROSOPHILA
MLSSGNISLANEYLAAFQKSNDTWIIAEEILSYRPPHDMHILTFAAMSLAKKIKTSFYSLQKFQLMSLKNSLIDHLKYAAMMRDSNSLIVQLAVGISALGLMFSQWDYELQDFVRKLSENPQYVMALLEVLKVIPEETRPSNLPVEAKKLNSVIDTLEQQSPYILDVLEGLLQRPDLPDDALPKCLAVCASWTKFSMLSPDQVLQRKLFIMAEFILATPLVNGHLEAAELFVALLEQSLIRKELNSCLANSVICLKPAFKRSMGERSLLQNYCNIFVNLFQTHFRLTQTNPERLNERLVTIELLLLVAEESPLEVIEASLGMWSSISEEVYLHDDPEMYSVYQPYFVRLLDLLLPRAALPANYEFMMPPGSADMQRFRELIGEVLLDMAHMIDDDTVEKLCSIVVDEQSPWMEVEASVFFLRHLIGNFKEHQTDIISCILKTFFQKDCQQPFIRLQVLELISIPEIVSVETIWDCLVNELRRADPMLSAIDCRLNLLMPHWNYLVTLAIMVDEFCLKESERCELLCSICTLIRELPAACVQEAKTSILNIRWIKCPAHIEENRHRVLMNSF

SEQ ID NO: 22822 - DNA, 7320 bp, DROSOPHILA
gcaaagttcctctattgaaaattatcggcattaagggctgaagatcaagagggttaccccgagctcacccgacacatttaggttttcagaaatctctcgccaggcttcgtttttcgctgctaggttcttggagactctgatcttgtgacgatcatacagcacgggatgagacttgaccagctcaatgagctgctcgttcagcaggtcatcctgggagtcctcctcctcctcgtcctttctccgcctctcctgctccatgtccacttttgtgcgctttttccgctccctgggctcaaaacgcatcccgtcgagactctcgttccttgccagtccctgtttgtagtgatccttgagaaagagcagtcgcggaaacatgtcccagtaggtgggctcatccggacgctcctggaaacggcgaaactccttgccgaaacgatcgcgaatgctcttccagcgcgtaatgcacgcccgttccgaggctcctaacttctgggagatggccttccaggccgcgtccttttgcgccgcattcttcacgctcctcgcgcagtccttgtcgtacaggatcgggtgtctctctatcaatttaatcagctcatcgtcgtccattgattttcgctattatttgtttttatttattctgaacgatccggcagcctggcgggaaatattgatagtcgataggcgatgggtcatcgcacaaaaagggctgccagattattctgttaaaaaaatgtgcctcttagttttatagcaccgttattataacaatgttaaataaaatatttgtgtgtttgtcttaaaatgtcttaatacatatttataatttaaagttcgtgtgtacgaatttcgtttaaaatatattctattttatatattttaaagaaaattctctttatgtttgttaaaatctgctggtttgaatttctgtgtaacctgataacattgatggtcgatagctcgatacttcaatctttccatcggtgagtttgccccatctctattgtgctacctggcaacgctgtgagcaaggaaaatacggcagcgtgctccccgttttccatccacgttttgttataattttataagtattacggtctgagaccgattttgcactgcatcgtgcgcgctgcaagtactggcgattggaaattggaggcgcgaaaagaggataaggtggattttcttgcaactgtgtgtgtgagcattggaattcgcccgtgtgtgtggcgagagtgcgtccatgtgtgtgtgacggaccaaaaaagccgacatcagcgcccattttttgttgttgattcattaatacgcccgtcatgcaccagtattggtgagttggagcagcgcaccgtcttactcgcactcaacggagcgcagaaagagcgcagggagcggcagaagaagaagcagcgagcagcagcaccattagcggcagtcaacgtcatataatttgtcatcgaaattggcacactaaaaataacagttaacttcaaccgccatgatcctgctggaaatcaataatcggattatcgaggagacgctgctggtcaaataccgtaatgcccaggctgggtaagtcaatgccttccagtcccgtttccccaatttccattccaccattttgatttctatgctgcattccccaccgttctgttatcaccagtcggctttgttatcaatttcgttagctctctctttcctcgggaataaatttgggtgtagttccagccttggaacactcatcgctgcagctctctccctcccacacacgtacccaagtacagtgcagcccccttacgtcgacagcgtattagttaattcattacaactcgctattcgcatcatcggtgctgaaaatctgcaaaactgactcatccattgacgtgcattcaaacgcatacgcttgtgatgatcgaaaatattagtatttatttgttcctaatcccgaaaaaggatattattattgaagaaacattatcaaaggagtcgtgttacgaaagaaatatgtttaagctaaacggtttagaagaagcttagacgaagcttacagactaacaaaattattaaaattagtaaaataacttattgtactaacagcactatcagcagaaagaggtatttgtgtttggtagcgaatgattaagatctcacataaataaatgtatttaaatgctaatagttatgatgccattagtttattcccgataagattgcagtgtaatgcctgaaattaaggcaataaaagttataaattgtggaacaaaagtggcatacttggaaaaaatctcctgttgtgtctcaaatgttccaaaataaaccaaaaggacgaacggcatcctgaataatcaatcatattatagcagatgacttgtgttcgtgtacataaaaactaatagtttcaatattactcccctattatctgtattcttgggagacaaagtttacatgctaaagattctccattttccgtgtctacaacgctccgatataaattgtaacgcttaaatcatcttgagtaattctttttgtttcttaagataaatactttcgtgtacattattgcaaattttaggctttggagccaaagtggcattcttcaaaaacaatatttgatctgtgtctcaaaagctccaacattaactagaaagacgaacggcatcctgaataatcaatcatattataacagatgacttgtgttcgtgtacatttgccataaaatgttcaacttttgtaatattctggagtcaaagtggcacgtcttacgatcttcctgtaacttgtgtctcaaatgctccaatatcaaacgaaaggacgaacggcatcctgaataatcaatcatattatagcagatgacttgtgttcgactacaatagtattcgatttattagaccaataatgcctcgggagacaaagtttacatgttgaagatgatgtggcttctttttcgtgtctacaatgctccaaaataaattgttcgtttaaatcgtcttattcgatttattttattgcctaagatggttgccaactgcacaacaactaattaaatatttgggtggagttaaagtggcatattttatagctttcctttgatctgtgtctctatcgctccaatatcaattttataagcgaacggcatcctgtttaattacttatattaagacagacgacttgtgttcgtgcacaacttcaaaatgcttcaatagtcatatggagaaaaagtttacatgctaaagtatttttcttttccgtgtctacaatgctccaatattaattgaacgtctaaatcatcttggatataattatatttccatagataaatacattcgttcacaatacattcgttgttcatatgaaaatggattggagtcaaagtggcacacttaatccatttttatttgtgtctcaaatgctccaatatcaaatgcaaaggcgaacggcatcctgaataattatgcatattataacagatgacttgtgttcgcctacaatagctcctgatagctttacattcctttataagactcccgtcttcggagacaaagtttacatgctaaggataagatctttttcgtgtctacaatgctccaagagcaaatgttcgtttaaatcatccttggcattcaatatttttgctgtggatgcatttaattcgtgcacatatttatagatatgtatgtcgtggaggtaaagtggcattctcgggatatataaacctgcctgtgtctcaaacactcccaaatcaacttggttggcgaacggcatcctgagtaattaataatattacatcagatgacttgagttcgcgcacaatcgctttaagatcgcaaagtacgatttaggagccaaagtggcatgccttggaacttttatccaatttgtgtctctaatgctccgatactaattatacaaacgaacggcatcctgtttgatcctacatatcacaatagatgacttgagttcgtgtacattattcagaaatatttgtttagttcttgtaattgaattaaactaaatttagatatcggcttagcgatccagatacaaatacatacggatgttttaatttattcgaaaacgcaaaatataattttattgctgctggtttcttttggaaaaataatcgggtataaacgagtttatgtgataagatacggtggagtgtggggagcatgactaataagcaagaaaataaatgagaatttactttttaattctctttccagactgaagcctgaatcgatagacatacgaatagcagacttcgacggcgtcctttatcacatttccaatgtgaatggcgataaaacaaaagttcgggtaagtgtaccgcgtactattcatttaggataaatccaacattaacgatttctcacttttcttgggctgcgaaacagatcagcatatcgctgaagttctacaaacagctgcaagaacatggagccgacgagttgctgaagcgtgaatatggcagtctgcttacagacacggaagaaggtacgttcgtgtttaagttcggcatttaaagaagttaattactctcgtctaattgcaggctacaatgtttccgtacttatcaacctggaggagattcccgaggactgcgagcaaatcgcaaagagaatcggactgctgaagcgcaactgtttcgcatcggtttttgaaaagtattttgactatcaggagcagggcgaagagggccaaaagcgtgccgtcattaactaccgcaacgatgagactttgtaagtcagaaaaatatgtttttgactcgtccaagcgctgacaatctacaatcgatttgcagatatgtggaagccaagcctgatcgtgtcaccgtcgtctttagtaccattttccgggacgaagacgatgtcattatcggcaaagtatttatgcaggaattgagggaaggtcggcgtgcctcgcacaccgcaccacaagtgctcttttcgcaccgagaaccaccattggaattggccaacacggacgctagggtgggcgacaacattggctatgtcacattcggtatgttaaaggttgaatggtaaaccatgtgctgtggagccaaagtttacacgttaaagtgcatttgtcttttccatgtctacaaggctccatataaatagtatcgttaaaatcatcttgaacattctagtttataaatatatccaatgataaatacttccgcgcacaataatgcattaaagtcacctgtggagtcaaagtggcatgttttaaattacaatttgaattgtgtctcaaatgctccaatatcaacaagatatgcgaacggcatcctgaataatcaatcatattatagcagatgacttgtgtttgtgtacagtaacacaccaacccagaatccccaagctgaattgttcagtggagacaaagtttacattttaacagtattatcgtttttatgtctacaatgctccgaaatcaatatccgatccaattatccaaagcagtcttatatttccttggatgatttctttcgttacaaaaatgtcagtatattccatatggagttaaagtggcatatttttaatacttaccctaaatctgtgtctctaaagctccaatattaaataaatagacaatcggcatcctgaataatcaatcatattatagcagatgacttgtgtttgtgtacagtaaaagaatatcttagactgccttttttaaatggagacaaagtttacatgttaacaatattatcgttttcgtgtctacaatgctccaaaatcaatatattcgatcgaatcatccgaagcagtcttatatttccttggatgatttctttggtgcacagtgcacagctaatgtaatcccaatggagttaaagtggcatattttgtataccttccttcaatttgtgtctctaatgctccaatattaaataagtagacgaacggcatcctgaataatcaatcatattatcgcagatgacttgtgtttgtgtacagtacttcttagaattgaaccgatgttacactttgaaatatccaaaagaaacaaaatagtaacgactcatacttgttttttgcagtactcttccctcggcataccaacaaagaaacaagggacaataccattaacttaattcacatgttccgagattacttgcactaccacattaaggtaagtgttgtatgcagctatgcaaaaatatcttttatatatttgaaatatgcatttttgagcagtgttcaaaggcttacattcattcgcgcatgcgagcaaaaacctcggatttcctcaaggtgctaaatcgtgcaaggccagagcccaaaaacacggagaagaaaactataacgtgagcattggactttccataacgaattctgattactaactcgtgttctttttgcagggggagaactttcaagcgcatcgattgatgtgttcagtatatttagttgtttttatataaatacaaaaaataaattgtgtattaaaattcgatatccgaatggtgaatccaacataaactaaaccagattgcaagacaaacccaagtattccaaacagaaccgtaaggctaaatgtaagctcagcaaaataatgatcaaagaattaatagttacgcgttagtaaatgaattgtgtgtgtttgtgtcgagtcatcgtcaaatccgtgtctccgccaatttgttacagtcataggccgagtcagcgccacagctgagccgcattttaaacaaataaacgtagacttaagtgcaacatgagaactaaaactaccatgtcaaagcgagcaacacgactaagggatgccaccaacttgttatatagtcgcaatggaggattcatccccgcaattagcctgtatgtgtagaaagcgcatttaaaaacgtactgcaaatattaacaaacctttgatacagcaatcggaattaataaaaacgagaaaatcaaactgcaatgtaaaataaaaaaagggacactcttttaatctctagctagctgcagacgctcgaatacactttattttctagcttattagcttttaattgcacataatgtcttaaatgttactaatatttcgcttaggtataccatctccgctgcacaatactataacaggcacttagatcttaaacttaacattctgcttcgcgttcatgctctccatgctgacctggaagttgagatagtcgctctggatgcgggcacacactgaaagaaatgtgttgggtaaactaagttgggactgaggagcgctttgactgttactattgagatgtgctacttacttacagtggcagtgttcattgcgatagagagtttactgcttaagtacttccgatagtttgtacag

SEQ ID NO: 22823 - DNA, 1380 bp, DROSOPHILA
ctattgtgctacctggcaacgctgtgagcaaggaaaatacggcagcgtgctccccgttttccatccacgttttgttataattttataagtattacggtctgagaccgattttgcactgcatcgtgcgcgctgcaagtactggcgattggaaattggaggcgcgaaaagaggataaggtggattttcttgcaactgtgtgtgtgagcattggaattcgcccgtgtgtgtggcgagagtgcgtccatgtgtgtgtgacggaccaaaaaagccgacatcagcgcccattttttgttgttgattcattaatacgcccgtcatgcaccagtattggtgagttggagcagcgcaccgtcttactcgcactcaacggagcgcagaaagagcgcagggagcggcagaagaagaagcagcgagcagcagcaccattagcggcagtcaacgtcatataatttgtcatcgaaattggcacactaaaaataacagttaacttcaaccgccatgatcctgctggaaatcaataatcggattatcgaggagacgctgctggtcaaataccgtaatgcccaggctggactgaagcctgaatcgatagacatacgaatagcagacttcgacggcgtcctttatcacatttccaatgtgaatggcgataaaacaaaagttcggatcagcatatcgctgaagttctacaaacagctgcaagaacatggagccgacgagttgctgaagcgtgaatatggcagtctgcttacagacacggaagaaggctacaatgtttccgtacttatcaacctggaggagattcccgaggactgcgagcaaatcgcaaagagaatcggactgctgaagcgcaactgtttcgcatcggtttttgaaaagtattttgactatcaggagcagggcgaagagggccaaaagcgtgccgtcattaactaccgcaacgatgagactttatatgtggaagccaagcctgatcgtgtcaccgtcgtctttagtaccattttccgggacgaagacgatgtcattatcggcaaagtatttatgcaggaattgagggaaggtcggcgtgcctcgcacaccgcaccacaagtgctcttttcgcaccgagaaccaccattggaattggccaacacggacgctagggtgggcgacaacattggctatgtcacattcgtactcttccctcggcataccaacaaagaaacaagggacaataccattaacttaattcacatgttccgagattacttgcactaccacattaagtgttcaaaggcttacattcattcgcgcatgcgagcaaaaacctcggatttcctcaaggtgctaaatcgtgcaaggccagagcccaaaaacacggagaagaaaactataacgtga

SEQ ID NO: 22824 - protein, 293 aa, DROSOPHILA
MILLEINNRIIEETLLVKYRNAQAGLKPESIDIRIADFDGVLYHISNVNGDKTKVRISISLKFYKQLQEHGADELLKREYGSLLTDTEEGYNVSVLINLEEIPEDCEQIAKRIGLLKRNCFASVFEKYFDYQEQGEEGQKRAVINYRNDETLYVEAKPDRVTVVFSTIFRDEDDVIIGKVFMQELREGRRASHTAPQVLFSHREPPLELANTDARVGDNIGYVTFVLFPRHTNKETRDNTINLIHMFRDYLHYHIKCSKAYIHSRMRAKTSDFLKVLNRARPEPKNTEKKTIT

SEQ ID NO: 22825 - DNA, 2891 bp, DROSOPHILA
gagcattatgcgctttgaggtctaaacaattatacgaggtgtggatcatataattatgtgttatttgaatcttttcctgagaaaatttgtttgaaacgccaaaccataaatagcggaaccttgagatcgaatttataattttagactcagacgtaagctagacccatttttatgaccataatcgtgagcaactggtttgaagtaattaattggccaccaagggttcgttaggtaaccaaagtattgaactcagaaaaaagtatctttgtttttttgacaacatacagtatgtatttgcataaccgtttggattgtgggcgcctcatttcagagtctagacaaaagattccattaaggggcctgcaagaacgtcgtcaaaaccgctgaatactttcggattcctctaatccaaaacaatagcttctaacatttggcgaactagtcgtaaaacccaaccagtttctgtgtctgcattcgtttcaaacgattattgtaaatttccggctacaccagacgcttgtgccaaaaatacgacttacctaaattaaattaatccagctgcccaataaaaccaaagatgatcccataaaatatgccgttagctgtctgcatgcagataaatgtcatctaaaagtcacttttggtgttgccagctaacacggcttaagaccgaccatccatccatctatctatatatctatctatctatctatcagcatctcaatcttcattccttagatccaataaacctattaagcccggatccatcgagcgcttcttcattctgacgacccccaaaaacaaaaccagtaaaaaatctcatctgcgctgaatattcagatgagatgttgacgatgatctgcgttcggcctgaggttcagttcaagtttttgggctcggtcttgtataaatagttagccattgagcctcttcagacagaagctactcgatcgctcttggagtaacagattgcagctgtcatcatggtgagcttacccacatggatgaaggatcaaggattatatttctaaacgctttggtttgcttggcttttcagaaattcctggttgttgcctttgccgttctggcctgcgcctatggtgatgtctcccatttgggttacgactactctcctccggccccagctccggtttaccagcccgccccggctccggtctaccagcccgcccccgctccggtctaccagcctgctccagcaccagttgtgatccctgctcctgctccagctccagttgtgatccctgctcctgctcccgctccagttgtgattccggctccagctcccgtgaagacgtacgtcccacccgcacccatcagcatcccagccccagtttaccagccagctcctgctcccattaggatcccagccccagtttaccagccagctcctgctcccatcagcatcccagctccggctccaattgagatccctgccccagctccagtgaacacctacattccccccgcaccagcaccagctccggtttaccagccagcccctgctcccattcccgtgagcatcccggctccagctcccgtttaccagcctgctcccgctcccgttgtgatcccagcccctgctccagcaccagttgtgatccctgctcctgctcccgctccagttgtgatcccagccccagctcccgttaagtcctatgtgccacctgcaccaatcagcatcccagccccggctcccgtttaccagccagctcccatcagcatcccggcccctgccccagtttaccaaccagctcccgctcccgtctaccagccaaccaacactcaggttctggaggagatcgagcccgcttccaatgatggataccgctacaagaccgtgcgtcgtcgcgtctaccgtcaccgtttctaaacttaccaaagcccaacgaaaaactgtttcctaacgaatccctacggggactcgcaataaaaaatttccgccttcaatttgttaaacaaaaagaaaagtcttcaaattgttttccaatcatagcaaatcacacgggaaacaggagaatgggaaactcttaagtttgctctggccatttgagttggaaatttatgaaacccgaagagatggcgagactggtggaatcaacttgccatcggacagatagtgtcggtaaggcatggggcatggggcagcagaggataataaggagttgcaagcaagttgcggaacactcccaaaggattcgattcgatggcggactccgcagtcctcgccgctccacatttatcacgaaatttatggcctggaatgagctttgatgatgtggaaattttttctcgttagattcaaaagtttttagatgcactcagaaagcggaaaatttattttatacataattaaatatatatatatatatatatatatatatatccgaggacacaagaatgaggttaaataaattttatattagaaatttcttaaaaaaaactgttctctaattgtttttttttttttcttgatttaaaaatattaatagaattacgtgcgtctacaactaattgttgtttatacgatgatttgagtaatatttttatcggtgcacccacacgaaatcgatgatggtgaagctggagctcggaatgtagatggtgccgagtggattggcctcatcagacgaccactgaccacttgtggctgctaacaagtggcaggatgaaatcgaaggcgctccaggaagaaggacatcgacagacgatagacgctgcggaaaattaacaagaaaatgcagcgacaactgtctacgaatctttttctctcaccaatttgattagggaaatgtctggctgaatggcggagactgtgtgtccccgaatccaccactttctagtctgaattccgggacaaccgcagagccaca

SEQ ID NO: 22826 - DNA, 891 bp, DROSOPHILA
atggatgaaggatcaaggattatatttctaaacgctttggtttgcttggcttttcagaaattcctggttgttgcctttgccgttctggcctgcgcctatggtgatgtctcccatttgggttacgactactctcctccggccccagctccggtttaccagcccgccccggctccggtctaccagcccgcccccgctccggtctaccagcctgctccagcaccagttgtgatccctgctcctgctccagctccagttgtgatccctgctcctgctcccgctccagttgtgattccggctccagctcccgtgaagacgtacgtcccacccgcacccatcagcatcccagccccagtttaccagccagctcctgctcccattaggatcccagccccagtttaccagccagctcctgctcccatcagcatcccagctccggctccaattgagatccctgccccagctccagtgaacacctacattccccccgcaccagcaccagctccggtttaccagccagcccctgctcccattcccgtgagcatcccggctccagctcccgtttaccagcctgctcccgctcccgttgtgatcccagcccctgctccagcaccagttgtgatccctgctcctgctcccgctccagttgtgatcccagccccagctcccgttaagtcctatgtgccacctgcaccaatcagcatcccagccccggctcccgtttaccagccagctcccatcagcatcccggcccctgccccagtttaccaaccagctcccgctcccgtctaccagccaaccaacactcaggttctggaggagatcgagcccgcttccaatgatggataccgctacaagaccgtgcgtcgtcgcgtctaccgtcaccgtttctaa

SEQ ID NO: 22827 - protein, 296 aa, DROSOPHILA
MDEGSRIIFLNALVCLAFQKFLVVAFAVLACAYGDVSHLGYDYSPPAPAPVYQPAPAPVYQPAPAPVYQPAPAPVVIPAPAPAPVVIPAPAPAPVVIPAPAPVKTYVPPAPISIPAPVYQPAPAPIRIPAPVYQPAPAPISIPAPAPIEIPAPAPVNTYIPPAPAPAPVYQPAPAPIPVSIPAPAPVYQPAPAPVVIPAPAPAPVVIPAPAPAPVVIPAPAPVKSYVPPAPISIPAPAPVYQPAPISIPAPAPVYQPAPAPVYQPTNTQVLEEIEPASNDGYRYKTVRRRVYRHRF

SEQ ID NO: 22828 - DNA, 4491 bp, DROSOPHILA
gcgtcagatgtcagtttggtttcattttcattttcatttgcattgtccgaaaattttgtttgtgggtaatgtttaaattcctgatgccatttacacatgttcaacatgacataatcgcctcggaaattatttagaaagaaagtgggttgggtgttgcgtttcccaatctctcgccatggcctggcccccttgaaaatcggaacttggacatgtgtgtccatatccacatatatgtatattcactgtgtaagtctctgctcggggccggaaaattacatctttgggatttgataataaactaattttcgctcggcttctccagctgccagcagctttctcttttattcatgaatacgcaattagtgtgcaaatgcgagtgtttctcgtgtcgccgggctatttgtatttacatacacctatctattattgaaactaaattcatttggagttaaatattcaatttgagtcggctttcattgcattggcagctggccaattgtgagccgccagaaatgcaggcaattattgttcaattttcgactcgaaacatgctcatgttttgtaccgggccctatcataaatttttgtcaacgaattctgtttcaaaatggcaaaacaaatcggttttcggagtggaaaaactgcgattgtataatcttttatacatatgtagcttaccgttgttgtatgtcaagaattaattaatttttgacataagtacgccgtaatggcacaaactaataaattattatattattatgccatatttaaagtggctattagggaatatgcttggggtatttttttttccaaattcattggcctttccactccagcggatggaaaatcctgcctggttaaattggccgcatcatatcatgtctagtcacataacttcagatgaattcatgatgccctatcatagtggcatacacaaacatgacgagtgcgggcccgcggctataaattttgactaattggcgttacaactcaattgaaaatgcatggagcgtaggagccaacgcctcgtcgtgatggtctaataactggggctaatcatcataaagattattattaatcccgcagaaaactaattgcctttgtatctgcgcttgttgtgctttcagttcttcacacctcggcgagtttagcgctaaacgaaagctgggatccagacgtcaggtgagtgagtgaatctggcgattatgcatcctatctgaactattgtcttgcagagacgacatggagatgatgttgaataaaatagttcccgaaggtttgccctacaggcattcgtgcgagggacccgatgatatggtgagtatttcttaaccggacacagccgtactccttctgggacctcattcattagaaatcaattacaatttattgttgatcaggatcactaatcgcgtcaatctagccttgtcagtccgtttatttcgtatgcctgtccgtatatacgttgagtttttggaagctatatcggctagatagtaatctcttcgagtaaattgtgtaaattctttaattgaattcttcttgtgttgcttattgcataagatagcacctgataaacagtttaaatgcatctcggtgaaagtttctctgctgccgctatgaagtaaggcaggcgtatctgatagacgagaccttttgttttctgttgtttcgctttgagtactgtaataaccaatccaatatcctttcagcccgcgcacgtgaaggcctgcttcctgggcagctccctgacaatcccgatcaccgacggcaagctgtcgctgggaacgtggcagggcgtttggctgtgcgagcaccgcgaccaggccggatcccggaagctggtgatcacgctgaccggatgtccgcgcgaacaggcccgcagcccgctgtcacccgtctcgccgatcgccagcacgtccagttaggggcggcctcgctccacccgcgacagccggtaatcgcgggggagcgacaataatgccatcatttcgtcgaggcggctgatactgcagaagaacttggctaaggcgaacctggcgcagcagcgggcggcagcggtgattgccgccggtcgggggggcttgggcggtggtcaccaggatgccctggcgccacccaatatccccggagtggagactaagaccggccgcctgctgctccgccagcagctgcacctcaatctcaatctgaatgtgcaggaaacgttgcgcgatggcgtcgatatcgatgatgtggacgaggatgtcgacgaggacgaggacctagacctagacctagaaaccgtcacaacagtgcctcttaacaatgaacaacttaatgctaaggtcaccaccacaacatccagttcatcagcagcgagcagtgcattagctaaattcaatcgcatcatagactccactttggagcgaccaccagtggccgtagactactccggactgccccagctgagcagtgccacactgcagcagcgcttcaacctggcctatccggagttggtgaaccaacagcagcagcagcagcagcagttgcagctgcaacagcaccaccagcaacatgatgcgaccaagcagatcagcagcctccaggggaacccccgattggatcgtggaacggacgccgttgccagcactccattaacacttcaagcacccagaactccagcaacggcgacggaggagcaacttgattcggggcatccccatgacgacgcagacgtcgtcgaccacgatgatcatccccaccacgacgaggataatcaaacgaaacgaaatgatgtgcattatttgttgaaacagttgaatagttttagtgatatagaagaaatagaaattgttgatatgaagcaaagaggtcagcggccgccgatggcgtccagttcgttggccaccatgatgccgccgccctcgccagcaccgccggcatcgccatccacgcagtcacatcgactgggtccgcggttcgcctcctccggcgacagttcgctggtcctgccgcagcaccagttcgacgactatctgttcgagtcctgccactacctggagacaaactactttgccgccacataccgcactgccatggtcgagagcagctcgcacgagttccggccctcgaccaacagcagctcgaacagcttcgagctgcacgagatggagccgcccagtgtcatctgcaaggcgggcgtgccgcctccactggtttccagtcaccctggtcatcctggtcatcctgatcatccgccgccgcggtaccaattcgagtaccaggcggagacccggctgaccaccagtggggtgcagacggagctcaccgtcgaatcgctggccaagatgagcaactgcagcgggagcagctcttcctcgtcggcgacgagggctcctcccttcttccggtgctgctacacgcccatcgatcgctggcgggagaggaggcagcagcagaagagctcctccgcctcctcgtccgccgcacagccgcccaagaacgtctgacactgggcgtggcagtccacttggagacccaacatgtgcctggctaacttagatcagggatgcaagccaaggggaatcgggatgttttcggaattcacaatcatggttcgatttagtgggtcatgtgaaagttctctacttgaaagtgaagaagatatcaaaagcttgtggggattggaattcatatccacaaaacagctttccaaaatgatttcaagttccaaatacttccctcaaaacttttgtatctaaaaaataattctacattttccgaaccactagccttacgaaatatggatatgatataatcacgagcggcttgcatccctgttatattttggtcgctgttctcatttgcgatatcaacaagagattccatttcgatcgacagtcgatacacgagtcatgaatcattcatcacgaatccctatcattcggtgaaagttcataatgtacaatttatatatgctaaaacgtaaaccagaaatgttagtaaacaatttttatacacacatcacagccacacacagacagtcgcacatttttgcaatacaccaaagtaaatgatttggaagtttgtataattacctaagagttgttacatgctcagcagaaaaccaggatagccacaactaatgattcccattaaacttcactggctttccctcccagcaatccagcatcccagcatttcccccctgagctagccaggttttccgctgggcatctacctgagctgaacccaacttaggcctaatgttgtattcgaaatacgaagatattgttaaaaatgattgatggcaagagggggcgataggggaggcgagagcttgtatagtaagttgataattaaatagcattatggagaattgtagaatcacgttgaaggtggccagatcagcaggacgagggcacttttgttttaagcctatagtctacagactgtagattctaaactctagattccgattctctcggctaaccaagtccaaggcaactt

SEQ ID NO: 22829 - DNA, 1701 bp, DROSOPHILA
atgcatggagcagacgacatggagatgatgttgaataaaatagttcccgaaggtttgccctacaggcattcgtgcgagggacccgatgatatgcccgcgcacgtgaaggcctgcttcctgggcagctccctgacaatcccgatcaccgacggcaagctgtcgctgggaacgtggcagggcgtttggctgtgcgagcaccgcgaccaggccggatcccggaagctgaagaacttggctaaggcgaacctggcgcagcagcgggcggcagcggtgattgccgccggtcgggggggcttgggcggtggtcaccaggatgccctggcgccacccaatatccccggagtggagactaagaccggccgcctgctgctccgccagcagctgcacctcaatctcaatctgaatgtgcaggaaacgttgcgcgatggcgtcgatatcgatgatgtggacgaggatgtcgacgaggacgaggacctagacctagacctagaaaccgtcacaacagtgcctcttaacaatgaacaacttaatgctaaggtcaccaccacaacatccagttcatcagcagcgagcagtgcattagctaaattcaatcgcatcatagactccactttggagcgaccaccagtggccgtagactactccggactgccccagctgagcagtgccacactgcagcagcgcttcaacctggcctatccggagttggtgaaccaacagcagcagcagcagcagcagttgcagctgcaacagcaccaccagcaacatgatgcgaccaagcagatcagcagcctccaggggaacccccgattggatcgtggaacggacgccgttgccagcactccattaacacttcaagcacccagaactccagcaacggcgacggaggagcaacttgattcggggcatccccatgacgacgcagacgtcgtcgaccacgatgatcatccccaccacgacgaggataatcaaacgaaacgaaatgatgtgcattatttgttgaaacagttgaatagttttagtgatatagaagaaatagaaattgttgatatgaagcaaagaggtcagcggccgccgatggcgtccagttcgttggccaccatgatgccgccgccctcgccagcaccgccggcatcgccatccacgcagtcacatcgactgggtccgcggttcgcctcctccggcgacagttcgctggtcctgccgcagcaccagttcgacgactatctgttcgagtcctgccactacctggagacaaactactttgccgccacataccgcactgccatggtcgagagcagctcgcacgagttccggccctcgaccaacagcagctcgaacagcttcgagctgcacgagatggagccgcccagtgtcatctgcaaggcgggcgtgccgcctccactggtttccagtcaccctggtcatcctggtcatcctgatcatccgccgccgcggtaccaattcgagtaccaggcggagacccggctgaccaccagtggggtgcagacggagctcaccgtcgaatcgctggccaagatgagcaactgcagcgggagcagctcttcctcgtcggcgacgagggctcctcccttcttccggtgctgctacacgcccatcgatcgctggcgggagaggaggcagcagcagaagagctcctccgcctcctcgtccgccgcacagccgcccaagaacgtctga

SEQ ID NO: 22830 - protein, 566 aa, DROSOPHILA
MHGADDMEMMLNKIVPEGLPYRHSCEGPDDMPAHVKACFLGSSLTIPITDGKLSLGTWQGVWLCEHRDQAGSRKLKNLAKANLAQQRAAAVIAAGRGGLGGGHQDALAPPNIPGVETKTGRLLLRQQLHLNLNLNVQETLRDGVDIDDVDEDVDEDEDLDLDLETVTTVPLNNEQLNAKVTTTTSSSSAASSALAKFNRIIDSTLERPPVAVDYSGLPQLSSATLQQRFNLAYPELVNQQQQQQQQLQLQQHHQQHDATKQISSLQGNPRLDRGTDAVASTPLTLQAPRTPATATEEQLDSGHPHDDADVVDHDDHPHHDEDNQTKRNDVHYLLKQLNSFSDIEEIEIVDMKQRGQRPPMASSSLATMMPPPSPAPPASPSTQSHRLGPRFASSGDSSLVLPQHQFDDYLFESCHYLETNYFAATYRTAMVESSSHEFRPSTNSSSNSFELHEMEPPSVICKAGVPPPLVSSHPGHPGHPDHPPPRYQFEYQAETRLTTSGVQTELTVESLAKMSNCSGSSSSSSATRAPPFFRCCYTPIDRWRERRQQQKSSSASSSAAQPPKNV

SEQ ID NO: 22831 - DNA, 2977 bp, DROSOPHILA
gcgttgcagcgcttgaccatgctggcgaactgctcctcgtttccggagcgggtctccagcttgtaggagatgggttggtaacgttcccaccaggggcggctgtccttgacggcgttctcgttcacaggggagacctgaacaccggcgtagccattgggtcccaggaagttctcgcactcggcagcgatgtcgtcccacttccactcgaagaggtggaccattccactacgaccggatgcgtagttggtgtcgaattgggcattggccaccgccaggagggagaggcacactatgctcttggccagaaacatgatgattttaggtggaagctaaatttcactctgattaaaagtgtgtcgatgcagctgcttatataggatgaccaaacctattcggctttgccgggagtgatttgcggattgatcttatcgcccctaagtcgctacgttctcttgtatgtattgagttgattaaatcgcgattaaggcgtgttatcttagctcggcgcagacctattgactggtggctaattataattagttcgacataagtaaacatcaagacaatgcattcctcagatattggttgatattggagatttattggccacttgacttgcacgccactagaagcgtgatcaatctgaactttggcctacaaggagtaatttatattgttctaattttcacaatactgcaagttaatgtggtgtttataaagtatgtaaaaattaattcaatatatcgatattaccatcagtaattggctcatgtatcacctctagaattgcaatttttacgcaaagagttttcaattacacgcttgaaattgtgggcatcttagcttaacaaattaacagtagtattaagtaatattataaataatgtacgtgctactgctaatccttttaggaatctcacgctacagggctcagaaaaattcacaattgccagatgaactttacgcagccatcgtgaacagcttttcgaacaggaacattatgttctcgacggagatgatacgatccagcatgctgttcatctatgtgggcgtggaggaagatgaatccgagcaaattcgaaaggctatgcactatcgaggaacccatctatctgaatacaagccgaaaacacagaaaatctttgccatgagtgtgaagaaggcacctgtggccaagagtcttacccgattctatgtacgtcagaatatgaaaatgtccacggaatatagagtttttatgcggcatacagagggaagagctcgtaatatcgcctttgctcgtgaacagctagacgaggttaatacattttacagccatgaaatgggcgagcaaattgggcaggtggtaaaagaaagctggtggaaaccgaacagccaaggacttctcgtaaatgccattttcttcaatttgagttgggagcggacattcaatccggaggccacatatccccgggagtttcgagtaaatgccacaaagagcgttatgatacccatgatgcacgaggatagtaagtttgcatttggcatcctagggaatcttaaagccaccgccgtcctggtgcctttttcccatggagatctccgaatgctcttgataaagcccgatcagcctgatggacttgctgccttgcaaatgaagctgcaggccatgaatatcttaagcgttgccaggaacctcactatgatggatgtgtttgtgggtataccgaaatttaagatacacagtgatctagaactctctccagcttttgaaaagatgggcatcaaggatatatttaagcccagcaagtcattttcaacgttgcttcacaggaataccaactttcggattgacggagttattcatgtagtcacctttgagtttcaggagcagggcattggtacgccaagtacagatgttggtaaatttaattatctaaaaatcctgaaagacactgttctattattttttttttatttcaggcaatggtagtttgacacacacctttaatggggtgaaatattttttggctactcatccatttgctttttatatcatagacaacacatcaatatattttgccggtcatgtaacaagcttttagaaattaacaaaattattccaaattatttgtgagcaatacaggtaatttttatattctcaccgtttgtggggaaatattattgcagagctataatgtttatgaataataaagtaaatcgtttcgtgtattaaaaagataatgttcatttgtggtcgagccatattcatttcattcggctcccgaaatatcttttgattagccaaaggaatggcactggttgtgcgccataagaatccaggtcatgtagtccgcatataaatcccggcaaattcatgcatgacccataaaaaccaatacccccacttggccaacggacttgccggcactccaggaacatatttcctatttatgactgcaactttcggtcgagtcgggtggggtgtaaaaatttcaacacgctcacacaaaaattgccaattaagcgcatttatgactgcagcgcagcgtaagtatgtgcggcatgcaactagccgggtagaagtcggggtcaccacccccagaatcaccagctcccggtggaaacagtgtctggcccataaacatccttaatgcgaggacgtgtgcactccgaagacgctcgtcggattattaagaaacaatgaagacgggacgtcgctagaagccataaaagcggacacataacgcccggtttatggcgcaagttaaaaccggaaactaaatagttgacaccgcgcggacattgaccatcggatgctgtggggtgttccaagggaggggctactctcgtaaaacttgggtcaatgacgaaaacataatttgtaatttgaatttgcttcgtgttcgagcataagcaatgagcttaccagaatgtccttcgccgttgtcctttgggtataagggattcagctcgcgttttgatcattgcgcatatg

SEQ ID NO: 22832 - DNA, 912 bp, DROSOPHILA
atgttctcgacggagatgatacgatccagcatgctgttcatctatgtgggcgtggaggaagatgaatccgagcaaattcgaaaggctatgcactatcgaggaacccatctatctgaatacaagccgaaaacacagaaaatctttgccatgagtgtgaagaaggcacctgtggccaagagtcttacccgattctatgtacgtcagaatatgaaaatgtccacggaatatagagtttttatgcggcatacagagggaagagctcgtaatatcgcctttgctcgtgaacagctagacgaggttaatacattttacagccatgaaatgggcgagcaaattgggcaggtggtaaaagaaagctggtggaaaccgaacagccaaggacttctcgtaaatgccattttcttcaatttgagttgggagcggacattcaatccggaggccacatatccccgggagtttcgagtaaatgccacaaagagcgttatgatacccatgatgcacgaggatagtaagtttgcatttggcatcctagggaatcttaaagccaccgccgtcctggtgcctttttcccatggagatctccgaatgctcttgataaagcccgatcagcctgatggacttgctgccttgcaaatgaagctgcaggccatgaatatcttaagcgttgccaggaacctcactatgatggatgtgtttgtgggtataccgaaatttaagatacacagtgatctagaactctctccagcttttgaaaagatgggcatcaaggatatatttaagcccagcaagtcattttcaacgttgcttcacaggaataccaactttcggattgacggagttattcatgtagtcacctttgagtttcaggagcagggcattggtacgccaagtacagatgcaatggtagtttga

SEQ ID NO: 22833 - protein, 303 aa, DROSOPHILA
MFSTEMIRSSMLFIYVGVEEDESEQIRKAMHYRGTHLSEYKPKTQKIFAMSVKKAPVAKSLTRFYVRQNMKMSTEYRVFMRHTEGRARNIAFAREQLDEVNTFYSHEMGEQIGQVVKESWWKPNSQGLLVNAIFFNLSWERTFNPEATYPREFRVNATKSVMIPMMHEDSKFAFGILGNLKATAVLVPFSHGDLRMLLIKPDQPDGLAALQMKLQAMNILSVARNLTMMDVFVGIPKFKIHSDLELSPAFEKMGIKDIFKPSKSFSTLLHRNTNFRIDGVIHVVTFEFQEQGIGTPSTDAMVV

SEQ ID NO: 22834 - DNA, 4106 bp, DROSOPHILA
cagcagccggtgtagatacagtggtgatcccgcttcagaatgcacactttgcaggccttgcaatgccaagatctgggtggtgctagcttctggcactcgccgcactcacgccaattcaactgatccgatggtggttccacctttttcactggaaatgggatatgcattttatcggatttattataagacctgctgcgacttaccatttacacttgtgtcaatcatcatgcaggcaatcatgtttcccttgatgttaaacaccaggaacatggccataagaaaggtgaaggtgtggaagaagccacccggttcatggaaggcaggcagcaccaccacaatctcgaacataaacaccaccgggagaaagaccgcaatgatgaggaagcacaagatgtccaccatccggctgggcattgggttgctccggattctcatgatctgtgctactaaggtaaataaataggcaccgatctccgatatgtcagaaagagaactaacttgataaccggttgctgtaacatcacgtgcggttgagctttattttatcaagctttcgaggccaaagctaatgggtcgccggtaaaaagctcgctttctatgtttttgcggcgaaaagtttgcgttcagtatgattgaatgtgattcattgaacccgagttcaatataatttgataaactccaaagctaaccgaattaaagtttgatatcaagcgcggggtggtgtaaaactgcggccatgcacttatacatgttatcaagacgggccacacgtcgtatgcttgatggcgtgtgccatgaatacatacatatacatttaaacgccaacggcaagccagcattgagaatttaattaacttgaaaggattcactccttcgaatgccgccgtaatcggggtaaaaccttaattacatgcctctttaataagtgtgccgacacctgattgcttgcgatatcaagtatttatgcaggtgtcaagggtcattaagtaaacagttcgctatggaaccgtcgccgtcagccggaacggaaaggcagggatcctcgttatttctgctgaagagcttcgtcaggagtctgcggcagttcctcaaccagactagtctgcatggactcaagtttgtgggcgattccggcctgagtagctgggagaggtgggaaaggagcacatccaagtgcggattttgagctacatttgcaaaaccctttttagatcgtttttccttggctcctttgtcaccgccctcatcatcacggtgcacctcatatcgaacatctatgtgaagtgggatagcacgccggttataatcggcatcagcccacaggccacctccattttgaaggttccttttccggcaataaccatatgcaatatgaaccaggtgcagaggagtctggtagccaattacagagagtaagttcggttttcctctaaggcaatcgtccatccatcattttgaaattaaattatgttccaggggctccaatgaaagtgcccttctgaagctattatgtgaatcggatagctgggaatccagtgaggctgatgaggagttctccgcttcgaattttgtcacgaacaacctgaagatatccgaatttgtttcaaatcactcgcagtcctgcgagagaatgttgcttttttgtagattcagtgccgtggagcgaaactgttcgcaactgtttcagcagatcctgacggatgagggcctgtgttgcgtcttcaattttcaaccaccggaatatctctacaagccattgtaactagatgggttcattaaattaaaataattgatttattgttttgacagtgcaaataacaaccggaacttgacgaactctgatgggtttgaaagtgttatgtgggatccggagtcaggatatccggaacaattgccccccaagttctatccagccaccgctagtggtaaaatatcagagaatcgttaatgaatagagtatttcaaatatgtactataggcactggtatcaccttgggatttactgccgtacttgatgctgagatgggcgaatactattgctcttcgaccaatggacctggttttaaagtaagcctttaatatacatactgcctttacccatcatacccgccatttccaggtttactttcacaatcccatcgaagttcccaaggtgaaggaggcgggcctcatctcagccattggctacgaaaccaactatcgaattgagatggttcgtgccgaggcggttccggccattcgatctatatcccgcgatggccggcagtgcctgttcaagaacgagaaggagctgatcttttatcgtatctatacgcgactcaactgcgagaacgagtgcctggccgcattcctctacgacacctgctcctgcattccgttcgaccatccgctcatctacagcaacgccagcatctgctccatgggggacacgtcctgtgtgcgacgggcacagagggcgtccaatcgacctggttgggccaagtgccgccagcagtgcctgcccagttgcttcgatctcaactacttggccagtggcttctccttcccgctggcctccaacaacttccagctggccaacgcgctggtggagagcttcaacaagtcctatctcagcaagaatattgccgtgataaacgtttatttccgggagtcggtctactatggaaacaccaagaatgcatacgtgggattgacagagttcttgtgtgagtaaatactattttcaagttacaggaacatagggatctgttaaattagtcattagctcaatgggctcaatttattcaatccattagatttagtgactagttctatcatttcagcaaacgtcggtggtgtaatgggtctgttcatgggctttagtgtcatctccctggccgagatcctatacttcttgatcttaaaaccactcgctgagcttttcgtttggaagaggtcatctcatgtggactcagagaagagcctcaaacacaatgccttcggtattgaaaaaggacaatcttcagacaaccccagtttctggcactcaaaagagctgtatcccaaaggtgtttcaataagtgcctacgaaaatgctaaaagtacgaaaggattaaattaccaataaattacaacacacgagaaattatgtgtatgtaatccggagtaggaaaacaaatgtaatctgtcaatgccagtaatgaaataaaagagaaaaacattatgactggaagctagtttatggttttcaatttcattttatcagcaacaaaggccggaataattgatttaaatcggaactaaaagcgatttatatttaagtactgcatttggaacaaaacattctcaatcatttgttagcagattaatttaaagtgagaaataaacaattaatatcctgcaggatgttcaataattaccttttattgaactaaacataactttcttgaaagtaagttacagcgcggtgttaaagactcgattcaattccaaactgaactttttgactcggttaaacagtcttaaagtggaaagtttgatatgcacatgagcatgcgaactccttcactgccccatcaactttttcccaaaggaactcccgcagctggagcagatgtgcccgagtgaaggtcggtaatggaataccctagcgcctaatgcaattaaccaagtttcccggttatggggacagcccttgctttagtttttgcgttcgtttgtgttaatgccatatattttatgccaataagagcattttgggcgaaattacttttggccaaggcagccagtcagtcctagcctaaatgcgggtgcgtaagttcttatatgccagcagtacattgtacgtattccggcagtaaaacaagaatagcttcgaaccaccccaatccgcccggccttccgcatccacatcctctagagcacttgaagatggcacatttctgcgtcgtcttgcacttggtacatcgtgctccggtttctgagcgttaattgctgacctcaacctgcacataaagcgactaatttcgcacggccccggtacacagctcgtcctgcataactgtatgaattctgcggcacagttttctctgcagcatcctctgccatccatcatggtcctccatctg

SEQ ID NO: 22835 - DNA, 1642 bp, DROSOPHILA
atggaaccgtcgccgtcagccggaacggaaaggcagggatcctcgttatttctgctgaagagcttcgtcaggagtctgcggcagttcctcaaccagactagtctgcatggactcaagtttgtgggcgattccggcctgagtagctgggagagatcgtttttccttggctcctttgtcaccgccctcatcatcacggtgcacctcatatcgaacatctatgtgaagtgggatagcacgccggttataatcggcatcagcccacaggccacctccattttgaaggttccttttccggcaataaccatatgcaatatgaaccaggtgcagaggagtctggtagccaattacagagagggctccaatgaaagtgcccttctgaagctattatgtgaatcggatagctgggaatccagtgaggctgatgaggagttctccgcttcgaattttgtcacgaacaacctgaagatatccgaatttgtttcaaatcactcgcagtcctgcgagagaatgttgcttttttgtagattcagtgccgtggagcgaaactgttcgcaactgtttcagcagatcctgacggatgagggcctgtgttgcgtcttcaattttcaaccaccggaatatctctacaagccatttgcaaataacaaccggaacttgacgaactctgatgggtttgaaagtgttatgtgggatccggagtcaggatatccggaacaattgccccccaagttctatccagccaccgctagtggcactggtatcaccttgggatttactgccgtacttgatgctgagatgggcgaatactattgctcttcgaccaatggacctggttttaaagtttactttcacaatcccatcgaagttcccaaggtgaaggaggcgggcctcatctcagccattggctacgaaaccaactatcgaattgagatggttcgtgccgaggcggttccggccattcgatctatatcccgcgatggccggcagtgcctgttcaagaacgagaaggagctgatcttttatcgtatctatacgcgactcaactgcgagaacgagtgcctggccgcattcctctacgacacctgctcctgcattccgttcgaccatccgctcatctacagcaacgccagcatctgctccatgggggacacgtcctgtttgcttcgatctcaactacttggccagtggcttctccttcccgctggcctccaacaacttccagctggccaacgcgctggtggagagcttcaacaagtcctatctcagcaagaatattgccgtgataaacgtttatttccgggagtcggtctactatggaaacaccaagaatgcatacgtgggattgacagagttcttgtcaaacgtcggtggtgtaatgggtctgttcatgggctttagtgtcatctccctggccgagatcctatacttcttgatcttaaaaccactcgctgagcttttcgtttggaagaggtcatctcatgtggactcagagaagagcctcaaacacaatgccttcggtattgaaaaaggacaatcttcagacaaccccagtttctggcactcaaaagagctgtatcccaaaggtgtttcaataagtgcctacgaaaatgctaaaagtacgaaaggattaaattaccaataa

SEQ ID NO: 22836 - protein, 465 aa, DROSOPHILA
MEPSPSAGTERQGSSLFLLKSFVRSLRQFLNQTSLHGLKFVGDSGLSSWERSFFLGSFVTALIITVHLISNIYVKWDSTPVIIGISPQATSILKVPFPAITICNMNQVQRSLVANYREGSNESALLKLLCESDSWESSEADEEFSASNFVTNNLKISEFVSNHSQSCERMLLFCRFSAVERNCSQLFQQILTDEGLCCVFNFQPPEYLYKPFANNNRNLTNSDGFESVMWDPESGYPEQLPPKFYPATASGTGITLGFTAVLDAEMGEYYCSSTNGPGFKVYFHNPIEVPKVKEAGLISAIGYETNYRIEMVRAEAVPAIRSISRDGRQCLFKNEKELIFYRIYTRLNCENECLAAFLYDTCSCIPFDHPLIYSNASICSMGDTSCLLRSQLLGQWLLLPAGLQQLPAGQRAGGELQQVLSQQEYCRDKRLFPGVGLLWKHQECIRGIDRVLVKRRWCNGSVHGL

SEQ ID NO: 22837 - DNA, 4338 bp, DROSOPHILA
cgaggatgacggcctgttggttgaggacaatcaaccagaggagcagggttcgccgtccaatcgccaatatttggacgagagcgagcaacagtatgtgcagctatcggattacgatgaccagcacctgctggtggagaacgcagtggacgcagaggatggcggtgaggatttagatgagctgctaaccgaggatcagtactttaacgctgtccaacagcatcaccagcagcatcagcagcatcatggccgagggcaggactacaacgacgagctgatatatgaaatcaccttgaagactgaggataactgagtgccgcaactccgcgcaaattttgtacatatataggtcgcaattaaatactatcatgtaaagaattcattcgcttgactttgtttttgaatggcagtaccaagttttttggtcgaatgcaacccagtgtgtacaaatccgcagggctgtattttaaagggcatcaagttcggactgttgattgcaaccaaggggtcaaacatcgcgccttttggttgtaccaaggggtcattgcggttttggcaatggaattttccactcattttgcatttagcaaggccccggtgacgtcagcacgggctatacagcaggaggaagtgagaaggaaataactttagctacagcacttattgctccatttcgataacgattatttcgggtggagatgaactaatttcaaaactaaatagacttttatgtattaaatacgtattattcaatgatttattgttaattattattgacaaaatatggtaaagcagtcatgagacactttttattaaaaaaaaagatcatgtatatttgcttaagcctgcacttctcttgttttgcaacactaatggggcgggcaccactgacaacagaagtaaacaaacgtaaagacaacatttttgtttctaccggaaaagtaggcgaaatgggcaatgaccacgaaaccaagggaacccgggatccttcgatcaaacttctccagtcacacaacaaaccaccttgatttggagcagagttgccttcagaaattccgcacaacaaagcgattctcatccaaatctcgacctggcatatattttaaacaatggacgacaacgaggatgagctggaggagcaccaggagctggtcagcgacggcagtgtcgaggaggaggaggaggtggagcccgatctgggaccagtggacagttgggagtcctttaatgaccgcatcgatggcctgatctttaacgagcgatgcgacaagtcggtgaagaagttggacgaacgccggctggcgatactcaaccgggtgcgtcagcagttccgcgaggccccgaaaggcgtcgccgaacgttgccaggcccagaagtcgccgattgatcaacggctggagttgtccagtgagcgattgaacgaactggtgcgctttggcaaagaactagtgaccaatgtccgggtggccaacgagcgaagggagctgaatcgccgactcttcgagggtgcgcagaagaatcagatgcatgtgaagctgcaacgcgaaagcgttgagacaatggcccgtttcgagaacattaaggcgcgctggacggagctggaggagaccaatgagccgatgctgttgtgggaccaaatcgaagagcaaaagaaacgcattgccgagattatggcacgcaaggatgagatgatatctgcctgccaagcggaggtggaccgcatgaatgccaagtacgagttcgatcgcgagcggcaggcccaggatctttgttgtctggtggagcgcgttgatcaccaggtggagacgcttaaggaggcctacaaggagcacatccaaatgctgcggcaaaccatcgaggaggagcgtcaaatcttcgccgataatgcggtggagaagtggcgcaccttcttcgatgcgatgaatgccaactttgacgagaaggccaatttggtaagggcacgcgagcaattctatgctcgccaaacccagcagatcaacgagtcccaggaggagctgaccaagagcactcgcattcggctggagaaggagtgcgagaggctcgagctggagctacgtcgcacgcgcgacaatgtgctgatgaactccgagaagctggactacaactatcaggttctccagaagcgcaacgaggagaacgtgatcattaacaaccagcagaagcgacgggtggcccgactgcatgaggcgatcggacgcacccggcgtggcctgaagaatctttacaacacgggcaagcggaacatagcccgtctttcctcggacatctacaagctgcactccaacatcaacgatatggagtcgaaggcgcatcaggcgaggctgaacaatcgcgaaaagttcgatcgcatctgggagatcaactacaaggaactgaacctgctggtggatcgggtctaccacatcgatcgcatcatacacgagcagcagttggccatgccgtggtccagccccgtgccacccattccaaacatcaacaaggcgaagaaaaagcgcaataacattctggagaagtttgacatgcgaattggccgggttcccaagaacagggtgatgcccaactcgggcgtaaattgcaagccggatatcaaggagcttccgccggattcactacgcttgatgcgtaatcttattcgcaagctgtccgatcgcggcggtttcctcatcgaggagcgtctgctaaagattcttgaaccgtattccgaggaggaaaaatgcctggtacgcatcgacaatatatttgcggcgctgcgaattcgtcatctgcgggatgtcaaggaactgaccaaggttttcatgccgtacacctactgtccgaattgccagccgcagggattgagtccacgcaagtgtgccgaggtgttcatgaaggatcaaaagccaaatcggctgcagggcgcggcgggtggccaaccggatgaaaaggagcataggtcgacaggggatacatttctacccaagagcgaggtggcggccaagagatgtcacaatcactatctggtcatggaaccggccctctgcctgcacgccatgaatctgttcacctccaagatgcacaaaaagatgtacgaacacgaaccgggtagcattctcaatgcggtaaatctcattcagattacagatgcggagatccgtaatttctggcgccagttctcggcctgcttcccggcctccaagtgcaagctgtggaagacactggagcacggactgaatcactacgttgaggtgctcaagatgcgtgtgcagtacgatgcggaagtcgtctttctgcgtcgccaaaacgaagagttgcgccatctgctgcaaaagttcaccgtctaggtgcgatattattcaattacagcctcaaccgcaatgcacatacataatcccaagcaattattgtccgatttcactgcaaacatgataaattataattgtgcctaggtcttgctctttgacattgacatcgaaatagtttagagacgtggggtccctgcacgggcgccatctgaaaaagcttgtttcattcaagagtcgtgcaataaaagtatattttgaacatgaaaaccttgtgattttaaatatttaaaataatggaacccctcaaagttaaatattactacgtctatagctcagtttgtcccgctctaaactatgaacagctctctgatatcattattagtgcctagcatgaaaagagctctttgataacatttgtgaggggtttccccttgagtccttaaattaatcttaataccatatctttgagataaatatgacttgtatttgcttcataaacttaaagtacccatccatcccctttagaaatattcccaatgccgtccatgccgctctctggtccaccaaactgtcgatctcagatgtttgatttgcttttcatttcatttcgaactttgagtccgtgggaactagttggcgttagatgatctctacgacggggaataccttcgatcgcttacctcccacagctaccatttcactactggaagccaaacgattagaacttgttgcacttgtgtcttatgtgtcttatcagggcaaaccgataaagttgagcggtagacaagaaaatggttatactacatatatatgaaaccacatatttagggtagtccacgaaagggatcgtccaattggctcaaagtgcgcaccgccagcgtttaaagtgcagaccgggctaatcattcatttatgggcaaactttatggacgacatttcgataaaataataatacaagagcaaccgcaacagcttgttctattgaatttcatggcaagcaactacaactgcgacctgtaataatatactacataattaa

SEQ ID NO: 22838 - DNA, 2338 bp, DROSOPHILA
ccagtcacacaacaaaccaccttgatttggagcagagttgccttcagaaattccgcacaacaaagcgattctcatccaaatctcgacctggcatatattttaaacaatggacgacaacgaggatgagctggaggagcaccaggagctggtcagcgacggcagtgtcgaggaggaggaggaggtggagcccgatctgggaccagtggacagttgggagtcctttaatgaccgcatcgatggcctgatctttaacgagcgatgcgacaagtcggtgaagaagttggacgaacgccggctggcgatactcaaccgggtgcgtcagcagttccgcgaggccccgaaaggcgtcgccgaacgttgccaggcccagaagtcgccgattgatcaacggctggagttgtccagtgagcgattgaacgaactggtgcgctttggcaaagaactagtgaccaatgtccgggtggccaacgagcgaagggagctgaatcgccgactcttcgagggtgcgcagaagaatcagatgcatgtgaagctgcaacgcgaaagcgttgagacaatggcccgtttcgagaacattaaggcgcgctggacggagctggaggagaccaatgagccgatgctgttgtgggaccaaatcgaagagcaaaagaaacgcattgccgagattatggcacgcaaggatgagatgatatctgcctgccaagcggaggtggaccgcatgaatgccaagtacgagttcgatcgcgagcggcaggcccaggatctttgttgtctggtggagcgcgttgatcaccaggtggagacgcttaaggaggcctacaaggagcacatccaaatgctgcggcaaaccatcgaggaggagcgtcaaatcttcgccgataatgcggtggagaagtggcgcaccttcttcgatgcgatgaatgccaactttgacgagaaggccaatttggtaagggcacgcgagcaattctatgctcgccaaacccagcagatcaacgagtcccaggaggagctgaccaagagcactcgcattcggctggagaaggagtgcgagaggctcgagctggagctacgtcgcacgcgcgacaatgtgctgatgaactccgagaagctggactacaactatcaggttctccagaagcgcaacgaggagaacgtgatcattaacaaccagcagaagcgacgggtggcccgactgcatgaggcgatcggacgcacccggcgtggcctgaagaatctttacaacacgggcaagcggaacatagcccgtctttcctcggacatctacaagctgcactccaacatcaacgatatggagtcgaaggcgcatcaggcgaggctgaacaatcgcgaaaagttcgatcgcatctgggagatcaactacaaggaactgaacctgctggtggatcgggtctaccacatcgatcgcatcatacacgagcagcagttggccatgccgtggtccagccccgtgccacccattccaaacatcaacaaggcgaagaaaaagcgcaataacattctggagaagtttgacatgcgaattggccgggttcccaagaacagggtgatgcccaactcgggcgtaaattgcaagccggatatcaaggagcttccgccggattcactacgcttgatgcgtaatcttattcgcaagctgtccgatcgcggcggtttcctcatcgaggagcgtctgctaaagattcttgaaccgtattccgaggaggaaaaatgcctggtacgcatcgacaatatatttgcggcgctgcgaattcgtcatctgcgggatgtcaaggaactgaccaaggttttcatgccgtacacctactgtccgaattgccagccgcagggattgagtccacgcaagtgtgccgaggtgttcatgaaggatcaaaagccaaatcggctgcagggcgcggcgggtggccaaccggatgaaaaggagcataggtcgacaggggatacatttctacccaagagcgaggtggcggccaagagatgtcacaatcactatctggtcatggaaccggccctctgcctgcacgccatgaatctgttcacctccaagatgcacaaaaagatgtacgaacacgaaccgggtagcattctcaatgcggtaaatctcattcagattacagatgcggagatccgtaatttctggcgccagttctcggcctgcttcccggcctccaagtgcaagctgtggaagacactggagcacggactgaatcactacgttgaggtgctcaagatgcgtgtgcagtacgatgcggaagtcgtctttctgcgtcgccaaaacgaagagttgcgccatctgctgcaaaagttcaccgtctag

SEQ ID NO: 22839 - protein, 743 aa, DROSOPHILA
MDDNEDELEEHQELVSDGSVEEEEEVEPDLGPVDSWESFNDRIDGLIFNERCDKSVKKLDERRLAILNRVRQQFREAPKGVAERCQAQKSPIDQRLELSSERLNELVRFGKELVTNVRVANERRELNRRLFEGAQKNQMHVKLQRESVETMARFENIKARWTELEETNEPMLLWDQIEEQKKRIAEIMARKDEMISACQAEVDRMNAKYEFDRERQAQDLCCLVERVDHQVETLKEAYKEHIQMLRQTIEEERQIFADNAVEKWRTFFDAMNANFDEKANLVRAREQFYARQTQQINESQEELTKSTRIRLEKECERLELELRRTRDNVLMNSEKLDYNYQVLQKRNEENVIINNQQKRRVARLHEAIGRTRRGLKNLYNTGKRNIARLSSDIYKLHSNINDMESKAHQARLNNREKFDRIWEINYKELNLLVDRVYHIDRIIHEQQLAMPWSSPVPPIPNINKAKKKRNNILEKFDMRIGRVPKNRVMPNSGVNCKPDIKELPPDSLRLMRNLIRKLSDRGGFLIEERLLKILEPYSEEEKCLVRIDNIFAALRIRHLRDVKELTKVFMPYTYCPNCQPQGLSPRKCAEVFMKDQKPNRLQGAAGGQPDEKEHRSTGDTFLPKSEVAAKRCHNHYLVMEPALCLHAMNLFTSKMHKKMYEHEPGSILNAVNLIQITDAEIRNFWRQFSACFPASKCKLWKTLEHGLNHYVEVLKMRVQYDAEVVFLRRQNEELRHLLQKFTV

SEQ ID NO: 22840 - DNA, 9218 bp, DROSOPHILA
attgaacgtacccactcgcagctaggcaaacagtacttccctcctggccaaatggaattggaaatgataatggaaattctacaatttgaacaagcatcgagtgtgtacaaagatatatctttagatccacgtacttcccgattccgtaggtggaaggagagcgaatgcatttgttcgtctgactttgtatctacatatataatctatctgtgcatacggaagttcagtaaagataaagacacgtggccaactatatagtaaaagtgcattttaatcgtcttttaccatggttttctgttataataagcaaatgtatttttttgtctttacctgtatatatctacgctattaataaaactataataagtaatatatttgaagttatatattctgcaaaagtattaattatcactgagtttgtggatattactataaagttagttataaaatttttcaaaaagtttaatactttcacatcaaagttatcaatcaaagctaattacggaatagtccttcgacaattcgaatcaattggagatgcataaatcagcattgccttgacttaatggagaggcagatgcaaaatgtgtaaacccatgagatggagatgcgccccataagctggactgtgcatcgaaagttgcatccacatgcacatgcacacacgcacagcgacatccatgccgcgtcgttgaatgcaatttcaagcagaacgatccgaaataaaaatccaaaaatctgagcaacgtaggcgcctgcaattccagtttggattttgccgccaagagtcaatagcctcctatggatatagacttcaccccaatgtatggtcgctggagagcggcaccagaccagtttcccgaggcggcccaagaccaaaccgaaagagagccagcaagagaatccggggaactgggagagcggcaagtccacatagcagagcccggcggaggcctttttagttgtttgacgcgccatttgctagccaacattcgttgcgtgcggttaaagatacaaagatactcccggcgcacaaataagatactcgcgagtggcactgcggaaacatcgatgagccaaccgatacatatccaaaaatatccatatatcttaaacgaaactcgtgtcatatcgcccagtttactggctaattagaggggcaaagaagggccaaaataatacattttttggccagcaacatgtttgattgttgatgcgcatgcgccctaaagtattccatgctacgtgggtggccgacgtgttaaaggacaaaaaacgcaagccaaaggacatttcacagacattgacgcattgctcaacattatcacatcgccaaagctaaagtgcagttccaagtgagaaaagcgggcagaagttaacggataatcgccgaagaatattgaaatacatatcccccatcgtaactgtgcaatcctaccgaagtttacataatcccttcgatatgtccaccgcatcgtcgagcaactccagcggcgaggaggccaacaaaaagtccggctccaacaacgaggagagctcccacctgctggaatccgccgaaaatggagccaagtacggctccagacagccggtcaaaatcgtcaaagccagcgataatggacgcaccagctccacaccacatgtacgcaaagattcgcatgttttcatagataagagcactgagaaaaataagacatatataagtttgaaattttgcaaattatgattagttgaaacttatgtttaaagaaacaaactatttctactacgctcagagcctaaagacttaatcgttaattatttcttgtgctctgtatttatgtttttttctcagtgcttgcttaactttagttaattaacgctgtccagctggttagccaagttataatgcatcttttgatgttgaccttggctgagagaccacggcgaaagttcaattaacgcagtgtgaaaaacgagacaggaaataaagttgcttaagcagcaaatatacaaatgccctcaatataaaataatcaagttgtgatgcctttccaatgtaagggcattaaaaatctgcgttgtagctccaaatatttgctcaaaataggcaaacaatctttgttgttgcagaagtaaatgaggggctgaaagcagaaagatgttgccgctaaaagatacgagatataaatagtttaccaggcaattatcaggctgaaatgagtatttttccaattccaaaagctatctctatcaagcgagagcacaaacaaagaaaatagagtataatttgccttttctgaaaccgcacgagttcacataccttatccgcttaacatacatacatgtattttaagcgataaacaatgaaaacacaataatgtttttcagtggactttatcttaaatccagtacgttttgctacattctggtagctaagcgttcattgatggatcgcacagcttatcaaactaatgagttccgttccaaaaacaatgtggaaactttctatttttatttggttttatgttgaacatggtcacaataggcgaacaaatgctatgaaatacaaatcattacctatagaaaattaattttgccttgcaaagaataatgtgataagtgagcacttcaaaaataggggcgtattcccgattccccgaaagtagaaactagaaataacaatggtcacaatacggttttgttttggaataaccgaaaccatacgtacatatatgaattttatcagacaaattcaattgaaactcgttccactgaattcccaaaatgagtcgacaattttgtgggtgtttattttagtacaaagaacacacgcattaaataaatttgaatttgaatacactgaattcccaaaatgagtcaacaattttgtgggtgtttattttagtacaaagaacacacgcattaaataaatgcgacacccctttaactctaaaaagaaatgcacttatatagacactggaatgattttatgactaccatttgaatacgttttaaaatgcgacccacaaaattataaaaaactcggccagttcgataatgaagtgtggcacattttttgaatatcaatgagttgccctaaatggttcgctatgatggttataaagccatcaccgttttcactttcattgtcatcgtaatacacaccaaattaagccattataaaacaactttgaatagttttgagtataatattgaaagtagcacgatatactcaaggccttagaggaattattcaaaaaaagatgggtgcacatttattaaggtattttaaaaaccaaataatcttaataataagcactgtttccataaatacgcgtaaaatgtagtaggaatttttcgaactatttttatgcaaattttatgagcaatagcccgggattattgtgcatatattaacctagaccactcaataattatggagtatttaagcggaattggcttatgctctacagttaaccagtttagaggaatgccaaaaggcatattaaattaccattcttacttatgacgcgcactgttgcgcctgccactgacattgaaacgaacttgaacctccgcccatttggccagtatcatcaacgggtttgcgggggcggtgggacttagcacccgaaagtgggggactttaactggcagtaatactaattttagatacagaacgacaggaaggcactcagacaggcaatggattgaccacattagccgcagacggaactcaaacaaaccaaggcacagaatcgtggacagatatcgatttcagacgcgagatttgaacgcttcgcttagtcgcgactggcaatctggaggtgtgtcacccagtcgaccagagcaaagtgacagttaatatgtgggcgtatatgtacatatacgcctgtgctgttgccacatggccttctcctttttccagctgcaaatcttggcgtgcattttcacggaagtgatttgttctctgctccttcgtttcgcgtgggtcgccagattggcaatggaactttgagtgggattcgccagtgggcggcgacacatgagatgaggcaagttataggcgacgaagaaatagccataaattacccatatgcgcgaaatggcttttacgatggtctcttagacatgcaatatgcaataagcgaaaatattatgataatgagcgctattgtatctaagatctgtaaagaaatccatttgaaaatctctaaagaaatccatttaaaaatctctaaagaaatccatttagaaaaaaaaaagcatttcacctcgatttagttcaacaattattacttattttcaaatggaatttacgctatgctacagaacaacaaaatatattgtgtagatgtttccaatgtaaaaacaagctttgaatttgttgaaaacaattcgaacaggcccccttttttcgcaaaaaaaaatgtacaaatcacgtacaacacgtgccaaaagaaaagtaagaggatatgtaagatacatttaggttactttggtctattgactatattcagaatttaatttgaacaactatataatatttatgtttctataagttagtgaaaatatgtttatatgtttagaataccgtgtcataggtcaagtttacttaaaatagtatctaatcattcatgaaacacgccccttttaagcacagaaaataaagcacaaccgcatattgttctgtttataaacatgaaaatatcttaaaaaagcttttgataaataaaagctgcgctgaatgccggtcggctatattcttaaacacgtttatagatggaatttgggcaacttgctgattaggcacgcgataacctaagccaaatgtacacatatatatataggccgatttcacggtaatttatggccaatgaacggaagtcaatgagtatggttaacaatgtggtgaaaacactacatatatgagtagttaattggtgctgcttgagtgatctcaacaccttgactagtggagtaaaataaaaggggaatgtatactatcttaagaaatatctataggtagaatggatttgaagtgagtggctaaggggttattttgccatgatgtttatctttaatgcggcttaaattattacgtgtagctattggtaaatgtatgtagattagaactctatatatatccatcgtttaattaggtaatttccatttacttaatctccgccttatctacgaaactctatcagcttatgcttataagtacaagaagtttcattgatcaagtgccggtcttaaaaacattcaagtggaaacacatggacataataatagtactttgcgtttcaactttaaaacttcccatgcggcatccctaacttcaaatatacccaccgatttctcgggtgtcttatgggattttcctgtccatataagcttgctgacccggaccactcggcgtatgaatgatattcagtggcgagtgctcgcgaacctgccttactttgggggctacttctgtttatgtgactggtataatgaaataatgaagcacttgagcccaatcggaatgggaagagcatagccatggccaccggttactttttgtatatattttttggggccgagagagtgcaataaatactatcggacctccaataaatgtcctaatcactgagcgggggttctgaccttatcaagaaccatggcatgataatacttgtaggtagctaatagctggcccccagtctaagtcagttggtcagagcagaaagatctaattaaaagtgaaaagtaatgtattatgtaaaataaggatatatgtatatttaattaattttcattgtgaatcggtttgaacgaaatatgttgatcaaggacaatgatcgtgttgctcattaatcttaaatacttcttatagaagtattaaacgaatatgcaatattattaatttaggccagtatttacaatttacttatcaaatccttcaaccattgcaggatcaggagaatctactgggcaacatggtgcacacgtctacttcgaataactcccagaagtggccacaatatgtggccgcattggccgctgctggtggcgccttcgccgccggtaccgtcctgggttggacatcgccggccgaaacggagatcgtggatcgcggcgaaggatacgatttccctgtcgacaaggatcagttttcgtgggtaggatctgccatgaccctgggtgccgcctgtgtgtgcattcccattggcttcctgatcaacatgattggccgaaagtggaccatgctgtttctggtgctgcccttcattctcggttggaccatgctcatctgggcggtcaatgtcagtatgctgtatgcctcgcgcttcatcctcggtatcgccggtggagctttctgtgtgaccgctcccatgtacacgggtgagattgctcagaaggagattcgcggaacgctgggcagcttcttccagttgatgataaccattggtatcctgttcgtctatgccgtcggagctggtgtgaaaatattctggttgagcatcatttgcggcattctgcccctcatctttggcgccatcttctttttcatgccggaatcgcccacctacttggtaagttttatagatcttcagttccacaacaaattttaaagccccaatacaatattatatattatatgaacattttatattatgtatgtagtagcattataatattatatattattttcgaaaaaaaacaccctgtaaattaatatctcaaatggcgcactataaaattaatccattggtcagatataatctgccagtcaatcaagattaaatcttgggcaaacccaccgtttatatctaaaagatacgaaaccaccacgagtttgccatcaaaaccagaaattccttttcaagtgtaatgcaacatgtccaatttccaaatccccatcgacaggtttccaaagatcggtcggagaacgccatcaagtccattcaatggctgcgtggcaaggaatacgattacgagccagagctggcggagctgcgtgaaaccgaccgggaaaccaaggccaacaaggtcaacgtgtgggctgctctgaaccgacccgtcacccggaaggctttggccatcagcatgggtcttatgttcttccagcaggtctgcggaatcaatgctgttattttctacgcttcgaggatctttttggtgagtgtgaatttgattgttttagaatctcaaaaataaatcaataattattacattccctccaattcaggaagccaacactggcatcgaggctgagtgggcaacgatcctgatcggtatcatgcaagtggtggccaccttcgtctccaccctggtagtagacaagctgggccgtcgcatcctgctgttggcctcaggaatttccatggccatttccaccaccgccatcggagtgtacttcttcctccagaaacaggacgcggcacaagtggtgagtctgggctggctcccagtggccagtctgtgcctgttcatcatcatgttctcgatcggctatggaccggtgccatggctgatgatgggagagctcttcgccaccgacatcaagggatttgctggatcgctggccggaacatccaactggcttttggcattcgtggtgaccaagacgtttgtgaacttgaacgatggcctgggaattggcggaaccttctggctattcgctggtctgactgttgtgggtgtgatattcgtttatttcgccgtgccggaaaccaagggcaagagtctcaacgagattcagcaggagctggctggcaaccggtcgactccacaagctattcccgcggaaaagtaaaggggcaatgtccacctgaggagcccgaaaggcaaatcgcgattcgcaatccggaaggcgaaagacggaccggaaatcactgttaacttgctgttaatatacgttcgatttaagttcgcgtttagtgcaagtcttttggcgttttcgatggatgaatttgtttatagaatttaatatgcgcatagattttcgtttaagcatagcaagattcagatgaagatgaagaaaattgcaggaaactataactaagagcgaagactgaaggtcaactgcagaaaagccgcgataatatttttttgcagccatagaaaagacaacagcaatttaagaaaaaacatatatacctatatatatatccatataatgtatgtatgcttatttagtgttattcattcaaccaacgaaatctgttttacaaaattttaagccatacttgcatttgttcggatttttaaggtgtttgcaagcatttcttcgataattcttaatctaattgtactatattgtatgtctatatgtatatgaactttatgtatgtgtagctgtttgggtctaaatttcaagaagcattcagtcgattcacttaccatagctcggttaagttgtaagcctcgccatttgccaatatatttatttacgccaagttagcgagaggaagatgtttatattttatttaataaaaccaaaatatacgcattattttttaataattttccaaccgatatttgaatttaattttatgatcgctgaaagctacacagaaatcccgtctatcattgttaaacttgcataaagtatttatgaaaaaatttaaacaactgatgaaaataaaaatatatcaatatatttaatatgttgtaaccgattgtgttatttattgggatcattttttaaagatgacaagcgttgctccttacaagtttataaacttttaccatcgattaaataaaaaatgtcaatattctaagttgcaatctttgctggcaaagcaggtaaatatatttgctataaactacagtaactccatataaaatatataatatatatatttttacaacagctataaataaattacaattaaacaatttctgaatattatcttaattgcccctagacgagtgttaaaactaattagcttatatggtaaaacaataagttataatctcagatggtgcttgttcagaagattttctgttaccagtgtgtttccaaaaaatcctttagaagaatttatctcgatcgaagttgaggattcgcaacatgccatgttccgcacccatggccacccaagtgtgggtgggtgaattccaattgcaacgaacgcaattgaacctggtcattgccagggagtgtatgttttgcggtctacgtttggcgctcagatatgtggacttgcgtttgtgcggctcagggaccagcggattgatttgca

SEQ ID NO: 22841 - DNA, 2514 bp, DROSOPHILA
tgcggttaaagatacaaagatactcccggcgcacaaataagatactcgcgagtggcactgcggaaacatcgatgagccaaccgatacatatccaaaaatatccatatatcttaaacgaaactcgtgtcatatcgcccagtttactggctaattagaggggcaaagaagggccaaaataatacattttttggccagcaacatgtttgattgttgatgcgcatgcgccctaaagtattccatgctacgtgggtggccgacgtgttaaaggacaaaaaacgcaagccaaaggacatttcacagacattgacgcattgctcaacattatcacatcgccaaagctaaagtgcagttccaagtgagaaaagcgggcagaagttaacggataatcgccgaagaatattgaaatacatatcccccatcgtaactgtgcaatcctaccgaagtttacataatcccttcgatatgtccaccgcatcgtcgagcaactccagcggcgaggaggccaacaaaaagtccggctccaacaacgaggagagctcccacctgctggaatccgccgaaaatggagccaagtacggctccagacagccggtcaaaatcgtcaaagccagcgataatggacgcaccagctccacaccacatgatcaggagaatctactgggcaacatggtgcacacgtctacttcgaataactcccagaagtggccacaatatgtggccgcattggccgctgctggtggcgccttcgccgccggtaccgtcctgggttggacatcgccggccgaaacggagatcgtggatcgcggcgaaggatacgatttccctgtcgacaaggatcagttttcgtgggtaggatctgccatgaccctgggtgccgcctgtgtgtgcattcccattggcttcctgatcaacatgattggccgaaagtggaccatgctgtttctggtgctgcccttcattctcggttggaccatgctcatctgggcggtcaatgtcagtatgctgtatgcctcgcgcttcatcctcggtatcgccggtggagctttctgtgtgaccgctcccatgtacacgggtgagattgctcagaaggagattcgcggaacgctgggcagcttcttccagttgatgataaccattggtatcctgttcgtctatgccgtcggagctggtgtgaaaatattctggttgagcatcatttgcggcattctgcccctcatctttggcgccatcttctttttcatgccggaatcgcccacctacttggtttccaaagatcggtcggagaacgccatcaagtccattcaatggctgcgtggcaaggaatacgattacgagccagagctggcggagctgcgtgaaaccgaccgggaaaccaaggccaacaaggtcaacgtgtgggctgctctgaaccgacccgtcacccggaaggctttggccatcagcatgggtcttatgttcttccagcaggtctgcggaatcaatgctgttattttctacgcttcgaggatctttttggaagccaacactggcatcgaggctgagtgggcaacgatcctgatcggtatcatgcaagtggtggccaccttcgtctccaccctggtagtagacaagctgggccgtcgcatcctgctgttggcctcaggaatttccatggccatttccaccaccgccatcggagtgtacttcttcctccagaaacaggacgcggcacaagtggtgagtctgggctggctcccagtggccagtctgtgcctgttcatcatcatgttctcgatcggctatggaccggtgccatggctgatgatgggagagctcttcgccaccgacatcaagggatttgctggatcgctggccggaacatccaactggcttttggcattcgtggtgaccaagacgtttgtgaacttgaacgatggcctgggaattggcggaaccttctggctattcgctggtctgactgttgtgggtgtgatattcgtttatttcgccgtgccggaaaccaagggcaagagtctcaacgagattcagcaggagctggctggcaaccggtcgactccacaagctattcccgcggaaaagtaaaggggcaatgtccacctgaggagcccgaaaggcaaatcgcgattcgcaatccggaaggcgaaagacggaccggaaatcactgttaacttgctgttaatatacgttcgatttaagttcgcgtttagtgcaagtcttttggcgttttcgatggatgaatttgtttatagaatttaatatgcgcatagattttcgtttaagcatagcaagattcagatgaagatgaagaaaattgcaggaaactataactaagagcgaagactgaaggtcaactgcagaaaagccgcgataatatttttttgcagccatagaaaagacaacagcaatttaagaaaaaacatatatacctatatatatatccatataatgtatgtatgcttatttagtgttattcattcaaccaacgaaatctgttttacaaaattttaagccata

SEQ ID NO: 22842 - protein, 539 aa, DROSOPHILA
MSTASSSNSSGEEANKKSGSNNEESSHLLESAENGAKYGSRQPVKIVKASDNGRTSSTPHDQENLLGNMVHTSTSNNSQKWPQYVAALAAAGGAFAAGTVLGWTSPAETEIVDRGEGYDFPVDKDQFSWVGSAMTLGAACVCIPIGFLINMIGRKWTMLFLVLPFILGWTMLIWAVNVSMLYASRFILGIAGGAFCVTAPMYTGEIAQKEIRGTLGSFFQLMITIGILFVYAVGAGVKIFWLSIICGILPLIFGAIFFFMPESPTYLVSKDRSENAIKSIQWLRGKEYDYEPELAELRETDRETKANKVNVWAALNRPVTRKALAISMGLMFFQQVCGINAVIFYASRIFLEANTGIEAEWATILIGIMQVVATFVSTLVVDKLGRRILLLASGISMAISTTAIGVYFFLQKQDAAQVVSLGWLPVASLCLFIIMFSIGYGPVPWLMMGELFATDIKGFAGSLAGTSNWLLAFVVTKTFVNLNDGLGIGGTFWLFAGLTVVGVIFVYFAVPETKGKSLNEIQQELAGNRSTPQAIPAEK

SEQ ID NO: 22843 - DNA, 3428 bp, DROSOPHILA
gtttaaaattagccaagcgatttggtacctttgacagcaattaatcggtcgactgctgctaaagcggccaaatgccaagatggtattggatggggtgcgtctaacaatagtgccgacgattagatttggcacacgcggaccgaccatgtcggcggaacgtccagctgccagctccgataatcggcgacttatgtgcgagttctgcggctatcggacgcgcatctattggaatctgcagatccatcgtcggcgacacaccggcgaaatgcccttcagttgccagcaatgccaggcgcgtttcccggccagctatcagctgaaaagccacttggagcggcacttggacgccggcgagcgacgccagcggcacatttgcaccgactgcaacgtgggtttctccagttcgcgggccctgtaccatcaccggacgctccacgaggatgggaagcgcttcaagtgctcccagtgcgacaagtcgttcgctcaggcggcgggctacgcccaacacaagcggattcaccgccagaggaaccagcgagccaccgaaaccacggatctgaaggatctgcagatcaaaagagtggtttcaagtgtttttcatcggcgcgagtttaacactgcataaaattcagtggagtaattaacattttatttttgtgtcatattcaaatttaaaaaaaccgggtaaccgattcgttatttcaactgaagtgccttataaataaaacaggcagtatcactttctaagagtctggtaacaaattggtaacacttgagaggagcatattgcttagctatttaatatacatagatcaaatataattaattttgaacttaaaatttattttgtagtttattcggtcaaacggttagtttggtttgaaacatagctgaatggctgtgaaatcagtgctggtttgagtctgcactaaatgtctatcgaagtcgatcgaaattttgtttacatattttattttaattttggtaaataatattgcaacaattttaatgtaaataagaatcagaaaatgttgagacactgcctcgccaacgtcgactacgtccgcctgcacgcccagcagcagttgcgtcccaaatgcggcgagatcttctacgaaccggaggcgaatagattccaactggtctgcctgctctgcgacatgaagcactttggattcgaggacttcgcccgccatatccgtaatgtgcacttcgacaagcagggccgaccgctcaccaagacggtcacgggactgggcagactagcacgagaggaacaggagttccaaggggtcagcgcagaaccattggctgtggacagcttcaagaaagagtacctgcccaacgaggatgttctgtcggaggaggaggacgcggaacaggagctgggactggaacaggacgagggcaatccactacgcatcatggtgctcgggggtaaacagtccgtggacgaggagaccatcgatacgatgtggcagccggatcatgacagttcctccgcatccgtcaacgaggggtgcgctctggaggctctgttgggcgtggaaaatccgcaagactatcaaccggatgaggacggggaggagcaccagtctgtttttaaggtagaaaaactgtagtacgtgcacttgaagaaggaaatccaatatctgaatatgttttttccctgcagaagcagcgccaaccaaaggactacaactgcccacactgcgacaggaggtacacgacgcagaaatacctaaacacccacctaaagatgagccatccgtttccgcaggccttcaagtgcgtcgactgcaaagccaccttcgatgtggaccgagcattggcccagcatcgtcgcaaggagcacacggagttcgcctgccagctatgcgacaaggtgttcaaaagctcgcgatcccttcttcgccatgtgcagggtcactccggcgccaggacattcaagtgtgagcacgagaactgcggcaagtcgtttgtcaaccagcacaacctcacctcgcatcggcgggtccacagcgaggagcggaactacgtgtgcgagctgtgcggctatagatcccgctaccgggaggcgttgatcgtccaccggcgcacgcatacgggcgagaaacccttccagtgccagacctgtgcccgccgctttgcctccaagtcgctgctcaacgagcaccaggccatgcattccaccgagaagccctacaagtgcgacaaatgtgattcggccttctcccgcccgaaggcgctctatcaccacaagcatctgcatttgggcatcaagaagttcaagtgcaagatctgcggtaatgcctatgcccaggcggcaggtctatccgctcatatgcgagcgcacaagctccaggcgtccgtaaatgcgacggagggtgccgaggcggaacccatcgagatgcttttcacctactgaccgaactgagtggaaacctcctgtcgccttaagctctatttccatataactcaagatattcaagatacaccacaaacaatgttcactgttctagattttatagatagcttatcaatgtttatggacacccgactctttcgttccaacttttcacatatatatatatatctgtaaatagtattagacattttccaatctaaggccgcaaatgttcttttttaatttaagtgatgaagccttccatttctgtgtctcaaaaattagtacctacatatcagtagaagtcgtgtgtaagctgttatatctgttagtttagctagttttaagccaagaccttgcttccgactaggacaaaccacgtatgtacaataaatgttctgatacacgttactccaacatggactttcaaatgggcgcacaaagaagccagtttgtctatagctcaacatttatttcgaacaggaacttataactagtcgcatattggttacacttggatgcatatacatgtatatatttagattcaatttggtacagcagctggtagtaagcataacactgcggtaaccaagacatccatgctggcaatcccgacatgagacatatgtacacacttgggggatcaccgaatccgtaacttaactatcctagagatgcgatgcacaacacaaaaaaaaaaaaaaaaaacaaatcagaagagagggaaaacaaagcgagacggcatctgtcctggacaaatgcatcccccaacaataaggtgccacatggcttaggcccacacccgtatggtgtagtcccaactgccggtggatagagcggtgccatcgggcgagacctggacgcaggacaccttgttctcgtgcccgtacagcaggcagaccctttccgatttcagcgtgtcccacaagttgacggtgtaatcgttgtagccagcaaacagtaatcttccactgaccgaaaagtccaccgaattgacgccaaagatgatgctctccttggc

SEQ ID NO: 22844 - DNA, 1360 bp, DROSOPHILA
caattttaatgtaaataagaatcagaaaatgttgagacactgcctcgccaacgtcgactacgtccgcctgcacgcccagcagcagttgcgtcccaaatgcggcgagatcttctacgaaccggaggcgaatagattccaactggtctgcctgctctgcgacatgaagcactttggattcgaggacttcgcccgccatatccgtaatgtgcacttcgacaagcagggccgaccgctcaccaagacggtcacgggactgggcagactagcacgagaggaacaggagttccaaggggtcagcgcagaaccattggctgtggacagcttcaagaaagagtacctgcccaacgaggatgttctgtcggaggaggaggacgcggaacaggagctgggactggaacaggacgagggcaatccactacgcatcatggtgctcgggggtaaacagtccgtggacgaggagaccatcgatacgatgtggcagccggatcatgacagttcctccgcatccgtcaacgaggggtgcgctctggaggctctgttgggcgtggaaaatccgcaagactatcaaccggatgaggacggggaggagcaccagtctgtttttaagaagcagcgccaaccaaaggactacaactgcccacactgcgacaggaggtacacgacgcagaaatacctaaacacccacctaaagatgagccatccgtttccgcaggccttcaagtgcgtcgactgcaaagccaccttcgatgtggaccgagcattggcccagcatcgtcgcaaggagcacacggagttcgcctgccagctatgcgacaaggtgttcaaaagctcgcgatcccttcttcgccatgtgcagggtcactccggcgccaggacattcaagtgtgagcacgagaactgcggcaagtcgtttgtcaaccagcacaacctcacctcgcatcggcgggtccacagcgaggagcggaactacgtgtgcgagctgtgcggctatagatcccgctaccgggaggcgttgatcgtccaccggcgcacgcatacgggcgagaaacccttccagtgccagacctgtgcccgccgctttgcctccaagtcgctgctcaacgagcaccaggccatgcattccaccgagaagccctacaagtgcgacaaatgtgattcggccttctcccgcccgaaggcgctctatcaccacaagcatctgcatttgggcatcaagaagttcaagtgcaagatctgcggtaatgcctatgcccaggcggcaggtctatccgctcatatgcgagcgcacaagctccaggcgtccgtaaatgcgacggagggtgccgaggcggaacccatcgagatgcttttcacctactga

SEQ ID NO: 22845 - protein, 443 aa, DROSOPHILA
MLRHCLANVDYVRLHAQQQLRPKCGEIFYEPEANRFQLVCLLCDMKHFGFEDFARHIRNVHFDKQGRPLTKTVTGLGRLAREEQEFQGVSAEPLAVDSFKKEYLPNEDVLSEEEDAEQELGLEQDEGNPLRIMVLGGKQSVDEETIDTMWQPDHDSSSASVNEGCALEALLGVENPQDYQPDEDGEEHQSVFKKQRQPKDYNCPHCDRRYTTQKYLNTHLKMSHPFPQAFKCVDCKATFDVDRALAQHRRKEHTEFACQLCDKVFKSSRSLLRHVQGHSGARTFKCEHENCGKSFVNQHNLTSHRRVHSEERNYVCELCGYRSRYREALIVHRRTHTGEKPFQCQTCARRFASKSLLNEHQAMHSTEKPYKCDKCDSAFSRPKALYHHKHLHLGIKKFKCKICGNAYAQAAGLSAHMRAHKLQASVNATEGAEAEPIEMLFTY

SEQ ID NO: 22846 - DNA, 3040 bp, DROSOPHILA
tatgaatgctgtacatgatgccttgccacgaatttttgacttaagtcccccattcgcgagaccgcaaactcgtgaaagtttgctagccctaatgttggaaatttgttaatttttcgttagcctcgaaagcgagtgcaattacatgccccactgaggctgtggtcctaagtaccaaatcgtgtcgcgaaacgatgcgtatacgtaatgtgcgtatacgtaatactccatactccaactcgactaagcccaagtggctattcatccgtatggccgggttgctcgtctctattttcgtagagttttcgagaatttatacgcacaattgccacaaagcaaatatatttgaaaattaattccttgattatgtggctgtggcggcaagcaactttaaactatcaaacaacacattttcacttagctttgaccaatgcaacacatattaataatatatgcctctaaaaatggcattcaaaattatattttaagctaacatttatgacgcgtgtgcaaaattactggaaattactgcattattaatagtcgcaagtttacaagtgccgcccattattaagagcttccgttcgatgactctatcgttgtcattataaagaccaattgctggtggtctatataaatttttaaccagccctaggcaaatatgtgtgccactcctgtgcaatacaatcgcttcttcgcgttgcattgttagttcacaaaactgaattatttatttggcttgaggaaaggtgctgaacacatatgccatatatagatacatatatgtatatactacgtagtaactgaacacaataataaaaataaaacgaaacgaggtgagtgccaacagtttgtggcaaaccaaatgtgggggggtatgtgagtatctcgccgtgtgtcatgtgcgccatgtcggatcgggtcgttcgcctttatttgatttttactgttccactgcaagtcgattgcctaatctcgggggctgcgttgtgttgtcgggctatcagaaatattcgcccaccgccctcagcgttatctgctccacctgagtgtgcggtggcgtggatagggcgtacagtacagcctgagcgacgtcgtccgcctggaggattacctcgcccagcttggccttcgtttcgtccggaacgatctcggtggccacccagccgggattgatgctctgcaggattggaaaatttatgcaaatattattgactcaatgagttattaaaaaataattctattaaattaaattcgatttgggaaagcgtttataacgaggttatactgtaccaaagcagctgtgcttatcgaaatgctagtttatgtttgagcaggtacttattatttatggatttttacaactttttgcggagatcatagccggtaaatggttttcgttttgttattgattgctaaccaatttgatgtgcccacaaatttcttttgctcaccgtggtcttaatttttgatccttgattgattagctcctgtcggcagatctcctggacggcagtcagggcaaatttgctgggcgtgtacgcatttaggctctcatccgccggatctggcttataaccggccactccggccgtgctattcacaaagatcagatgtccagccacctggcggcgtctcatgctgctggcggccaatttggtgcagtaaatgctgcccatgagattcgtctgtagtatgttgttgatgtccttggtgggcatatcgattagctggccacccagcacaatgcccgcattattgatcagcacatcgatgccgcccagttccttttcgatccactcgaacgctgtgtccacctgcaactcctgcgatacatcgcatttgtgctgatggaagcgcatcctctgctccgccggcaaagattggcgcagctgctcgaggcgatcggtgcgtcgggccaggccaaccacctgtagaccggctgccaccaaaagccgggcacaggctgctccgattccggaactggcgccactgataacggccacgcgattctgccaacgatccatcgctcacgaatttcggcgctcaactgaggccgcagtacagccgatgatcgggttatatgcattcggtggagcttatcgcagcgtcgtgatagctctctctctctctctctttgtgcactgagagaaatgcccatgatgattatgtattaaatgtattaaatatgcagtatgaagtgtaagttaatagtatagcaacaaatctatcttttaagagtattcaaagaactactgatgagttctttttctgagtgtactttcaaagcgtgtaaacgttgttggcatgacgtgtctttcgttccttgaaacagaccatccgatcagtgggactgctgacaacagatgttgtttcggcctatcaaccccaatgaattcaatatgataaccaatcattcaaggccttaagaaatgtgcttgttcatattgcaaaaacttaaaaacattgatttaaaatatatatatataaaagtatatgataatattatatcgagattatgggaagatttcaatggcttgtgtaatggtctgttgatagcttctattttaagcactgccttgggattccttgtttttaggtgcctgcagttttcatcaggagtttttttttagcctcgtttcattttcccatgcatttaaggccgaccattaaagaggccagcacgcaatgcagttaaatggcgcctcaagttatggcccacacacacaaacacacacacacactcacacatgtgcaatactgcagcggcacgtgtgtgttagtgagtgggtatctgtgtgtgtgtgacgggtttatcgcccgcacacacgcttgacatatttttgtgcagcaccgctggcttttgtttttttttttttttttgttttttatgtccgctcgtaacattcaagagatgcttaaatggcaacaataaggcaacaaaagggatatcccctttgcttggctccatttgccgcatccagttgcaacatgttgcaagtgccaatgcccatcaaatcacaactgtggccattttgccagc

SEQ ID NO: 22847 - DNA, 766 bp, DROSOPHILA
ccgaaattcgtgagcgatggatcgttggcagaatcgcgtggccgttatcagtggcgccagttccggaatcggagcagcctgtgcccggcttttggtggcagccggtctacaggtggttggcctggcccgacgcaccgatcgcctcgagcagctgcgccaatctttgccggcggagcagaggatgcgcttccatcagcacaaatgcgatgtatcgcaggagttgcaggtggacacagcgttcgagtggatcgaaaaggaactgggcggcatcgatgtgctgatcaataatgcgggcattgtgctgggtggccagctaatcgatatgcccaccaaggacatcaacaacatactacagacgaatctcatgggcagcatttactgcaccaaattggccgccagcagcatgagacgccgccaggtggctggacatctgatctttgtgaatagcacggccggagtggccggttataagccagatccggcggatgagagcctaaatgcgtacacgcccagcaaatttgccctgactgccgtccaggagatctgccgacaggagctaatcaatcaaggatcaaaaattaagaccacgagcatcaatcccggctgggtggccaccgagatcgttccggacgaaacgaaggccaagctgggcgaggtaatcctccaggcggacgacgtcgctcaggctgtactgtacgccctatccacgccaccgcacactcaggtggagcagataacgctgagggcggtgggcgaatatttctga

SEQ ID NO: 22848 - protein, 249 aa, DROSOPHILA; identical to SEQ ID NO: 15657

SEQ ID NO: 22849 - DNA, 4776 bp, DROSOPHILA
agcctgcagagccatcgccgcctaaagcacagcgaagccaacggcggaagtctggacaaatccgccagtgaacgcaatagcaagaagcggaaaggtccgccgaaggtgtacaaatgcaacgaggaagcctgcaaccagacatttcgcaccgaacgcgatctgcgcggccatcgctggaagcacacgggaatcttctgcgacatttgcggcaaacccttcacccagtcgggcaacatgatgcgccaccgccagcgacacagtggcatcaagccgcacaagtgtccggaatgcgacgcgaccttttacacgcaaaaggagctctcctcgcacagtatctgccatactggtcgcatgccctgcatctgcgaggtgtgcggacgaccttgccgagatcgaggcgttctcacggcgcatatgcgtcgccatacgggcgaaaggccggccaaatgcgaggtgtgcggcaaggcattctatagctttcatgacctcaatgtccatgctgtatcgcataccaatttgcggcccttcgtctgcgacgtttgcggctccacgtttcaacggaagaaggcgctgcgggtgcacaagctgctccactctgagcagcgcaagtacgcgtgcaaattgtgcggcaagacgttcgcccagtccggcggtctaaatgcccacatgcgcagccatgatccggcgagagttaagggagctgtgaagccgctgccgcaatcggtcaccatcgaggtgatcgagggcaagagtccgcccaccaccaccatcaccatggccatcgacctcaatgtggaggagcagctggtaaagcaaaccgagactgcacccaccacttggcgcctggccaactgagtagctagctaggattaatataaggttagatgtagttcatctataagttccaaattgcgccataataaatgagagaaatcagaagattggaaatgaattaataatcgtaagaaaccagaaggcagatgcataaaacgattgatttgcggtacaaaagtgtcctttattggggtttcctaaacggagagggttccaagctgtcagcgatccaagtccagatgagtctgggctctaatccttgccagcgtgtgcattctacccgggattcttagctctaaacatgtagttcgtatcgctatggactaagttaagtattgggataaaataatacatacagcctttgttgtttttttttttttttttccaaacgaaattgatgatcataaacggaggcttttgcgttaaaggttaaaaaaatatattcccgccccttcgttgttttcaaaaaaggtacatattttatattctatgcgctggtcggttcactcattactagtttttcgaagcgataaactgaagaattaaaacctagcataattctagatgcaatattaagtaaactagtttaaaatagggctgacatttctgccaaatggacgtactcagttacaaatatagttaaaatcaatcaaattgacgagaatgttttgaaaactaaagattaattaagcactgaaaatgcattgataaggtatcacgggtaaacccaagaccaactaagttttccaattatagacctatgtatttacgtgatctgcattgacttttgttcactagaaccaatagtaagtaatagtatagcactagaaatacaaatagagaataagagatagttctaggatactaggctaatatcgattagtatttgaatatcatcaagattgcttaatgtgatgcttgctagacggtgactattagcggtctctcgtatactatatatatataggtctatataaaatatatatacgtgtgtgtcagctatcgggtattgcatattgttgtacgttggcgcacgagttcactaaagtggatcgatcgactaatttcacacaaatcgcggggtcgccttgttatcagtagttctaaactatattgccacggtgataacaggtcaagcattaggctagcactccttggagatgggattattgtctatctagggaacgaattcacactgctagaggaatgaattcgcttcaaaaagatgacaattatgattgctaccatgcgtacttatgtatttctaatacctggctatttttctctacttgcacggtttacctttgggtccctatgattcacgatccaccttggtgcaaacttaacgcaatcggaagacatcggtgccgccgcgtttccatttccttttccattgccaattcacacaatattgatctcgatcttgatgagcagccgatcgtcggcgcagaagcccagctgtatgatgttcgatatgttggcgtactcgaggaaaccgaatccccgtgtgctgatcgcttcgcgtggcttgtggaacgccagaatctccggcttggtcatgatggtgtcgtgctgcgacaacgtcgcatctgccggatgcaccatgcacaacttgatgcgacccttgaagggccagtccaagtggtaatcgttctccgactgcatcagatgcacatgcaagctgagcacatgcggtttccgcggctgaatgttcagccgcgcacagaacttgtagccatgcggcgaggtgtagcactcgtgcgagtacacttgattgttggcattggcccgcaggcgagccaccaaggcgcccagctgctcgatgcgccacacaatcgtgccattgctgtagcgcggatcaacgggcgcctgctggcgtgccagacgcagctgcttttgcatattctccagtcgcgtctcctgctcgcgtgtccgctgttccaaaaccacaattctctggtacatcgtttgcacaatctgctcatccacaccattggcatattgcggcggtggcggcagctgctgctggccatgaccattctccacggcggcgccacttgtgctgggcttgtgtggctgccaggtggcaatggctgtctgctggaatgcctgcagcatcagctgcatgtgatgcggcatgtcggccttgaggtgctcctccaactgattggtctctggtcggcccacaaaatcgcacttgatcttggcaaacgggcacttctcctcctgcggctcctgctgccgccgatagggacaactgggcagatggcgatgcagttcgatgggcgaggcaaccaccgaacagcccagcgaggagttggggcaatctcgcttgagttgctcgatctcgcggcgcgtgtagttgtccggaaagatgtcgtgctcggcggacagacgcttgttgtccatggggcagcattgattgttcttttgcatccaggcggtgaggcagctgcgacaaaatcgatggccgcacgacgtcaacaccggctcatttagccaatcgatgcaaatggcgcactcgtatcgcgagtccagcagctcctcctcctgttccccggatgtatccgaaccgggtgcatagtgatggttctgattgagcgccagactcttgggcggagtgggtgctccgctggccccgcctcccgctgctgcgctgggcgtggcactgctactggccgcaattcggccagtcgacgacaagttggtcgtcatctcattgctattgtgctccttctcctccgcatgctgcaaactgtgcgcgtgcgaatgcgtatgtgcatgctggtgcattctggctggcttttggtcggcctggactcgctgcatcttggctgctcctctggccgcctgctggctatcctctttgaatcaactaattcaattttaataataattttcgttcatgactccgcggaacagctgtgtatccaacgaggattgtgcaacactggcgtcgcgttagtataccagaacacacgtgttcgcactgcacaaaaaactttagctggtagcgtgttaattgtgctaaatttagttattattttacatttaacaccaaatcaatgtaaaaccatcacttgtatagtttaattggttgttagaagctgatagcgtgtaaacaacatggcctgcgcagatgcaggccagtgtgaacacgctcgttttgttttggcggcggtgggcgagcatataaaacggcagtgtttttcggattggcgagcaatcagttacgggcaccgtacgctgaaaaaaagaaaagcagaacgaaaacagacagaactcaacacgatgtggatcgcgaacgaacgcactatctgcgcactgatgccactggtgattttggcgacctggcagctgtgccttcttcccgggacggatgccaagcacttggccatcagattgcgcgaccctcaaagcgaaatcgaatcggaaacggtgcccctagcccatgtccacagccacagccacacggacgagagtggcgttcgcggtgctgctgcagtgcatcgtcgggagcggcggcaactctccgattggctaattgcgcccaacacgcggtggtgcggacgcggcaatctggccaatggaacgtacaacgatctgggcggcgcttccaaggcggacaaatgctgccggaagcatgatcactgcaaaatgtggatcgatggcatgtccaatcgctatgatctcttcaactatcgaccgtacacgctgtcacactgcagctgtgatctacggttccgcacgtgtctgaagatggccggcgacgaggatgcgaacgccatcggaaagctcttcttcaatgtcgtgcagacgcagtgtttcggcctgaaggccgagaccgtttgcgttcagcggggcggctccggaaaggagaccgatccgtgcctcaaggaggaggtgcgtcacaaggccttcctgcgcgacaacaagcggttc

SEQ ID NO: 22850 - DNA, 2776 bp, DROSOPHILA
aatcctcgttggatacacagctgttccgcggagtcatgaacgaaaattattattaaaattgaattagttgattcaaagaggatagccagcaggcggccagaggagcagccaagatgcagcgagtccaggccgaccaaaagccagccagaatgcaccagcatgcacatacgcattcgcacgcgcacagtttgcagcatgcggaggagaaggagcacaatagcaatgagatgacgaccaacttgtcgtcgactggccgaattgcggccagtagcagtgccacgcccagcgcagcagcgggaggcggggccagcggagcacccactccgcccaagagtctggcgctcaatcagaaccatcactatgcacccggttcggatacatccggggaacaggaggaggagctgctggactcgcgatacgagtgcgccatttgcatcgattggctaaatgagccggtgttgacgtcgtgcggccatcgattttgtcgcagctgcctcaccgcctggatgcaaaagaacaatcaatgctgccccatggacaacaagcgtctgtccgccgagcacgacatctttccggacaactacacgcgccgcgagatcgagcaactcaagcgagattgccccaactcctcgctgggctgttcggtggttgcctcgcccatcgaactgcatcgccatctgcccagttgtccctatcggcggcagcaggagccgcaggaggagaagtgcccgtttgccaagatcaagtgcgattttgtgggccgaccagagaccaatcagttggaggagcacctcaaggccgacatgccgcatcacatgcagctgatgctgcaggcattccagcagacagccattgccacctggcagccacacaagcccagcacaagtggcgccgccgtggagaatggtcatggccagcagcagctgccgccaccgccgcaatatgccaatggtgtggatgagcagattgtgcaaacgatgtaccagagaattgtggttttggaacagcggacacgcgagcaggagacgcgactggagaatatgcaaaagcagctgcgtctggcacgccagcaggcgcccgttgatccgcgctacagcaatggcacgattgtgtggcgcatcgagcagctgggcgccttggtggctcgcctgcgggccaatgccaacaatcaagtgtactcgcacgagtgctacacctcgccgcatggctacaagttctgtgcgcggctgaacattcagccgcggaaaccgcatgtgctcagcttgcatgtgcatctgatgcagtcggagaacgattaccacttggactggcccttcaagggtcgcatcaagttgtgcatggtgcatccggcagatgcgacgttgtcgcagcacgacaccatcatgaccaagccggagattctggcgttccacaagccacgcgaagcgatcagcacacggggattcggtttcctcgagtacgccaacatatcgaacatcatacagctgggcttctgcgccgacgatcggctgctcatcaagatcgagatcaatattgtgtgaattggcaatggaaaaggaaatggaaacgcggcggcaccgatgtcttccgattgcgttaagtttgcaccaaggtggatcgtgaatcatagggacccaaaggtaaaccgtgcaagtagagaaaaatagccaggtattagaaatacataagtacgcatggtagcaatcataattgtcatctttttgaagcgaattcattcctctagcagtgtgaattcgttccctagatagacaataatcccatctccaaggagtgctagcctaatgcttgacctgttatcaccgtggcaatatagtttagaactactgataacaaggcgaccccgcgatttgtgtgaaattagtcgatcgatccactttagtgaactcgtgcgccaacgtacaacaatatgcaatacccgatagctgacacacacgtatatatattttatatagacctatatatatatagtatacgagagaccgctaatagtcaccgtctagcaagcatcacattaagcaatcttgatgatattcaaatactaatcgatattagcctagtatcctagaactatctcttattctctatttgtatttctagtgctatactattacttactattggttctagtgaacaaaagtcaatgcagatcacgtaaatacataggtctataattggaaaacttagttggtcttgggtttacccgtgataccttatcaatgcattttcagtgcttaattaatctttagttttcaaaacattctcgtcaatttgattgattttaactatatttgtaactgagtacgtccatttggcagaaatgtcagccctattttaaactagtttacttaatattgcatctagaattatgctaggttttaattcttcagtttatcgcttcgaaaaactagtaatgagtgaaccgaccagcgcatagaatataaaatatgtaccttttttgaaaacaacgaaggggcgggaatatatttttttaacctttaacgcaaaagcctccgtttatgatcatcaatttcgtttggaaaaaaaaaaaaaaaaacaacaaaggctgtatgtattattttatcccaatacttaacttagtccatagcgatacgaactacatgtttagagctaagaatcccgggtagaatgcacacgctggcaaggattagagcccagactcatctggacttggatcgctgacagcttggaaccctctccgtttaggaaaccccaataaaggacacttttgtaccgc

SEQ ID NO: 22851 - protein, 475 aa, DROSOPHILA
MQRVQADQKPARMHQHAHTHSHAHSLQHAEEKEHNSNEMTTNLSSTGRIAASSSATPSAAAGGGASGAPTPPKSLALNQNHHYAPGSDTSGEQEEELLDSRYECAICIDWLNEPVLTSCGHRFCRSCLTAWMQKNNQCCPMDNKRLSAEHDIFPDNYTRREIEQLKRDCPNSSLGCSVVASPIELHRHLPSCPYRRQQEPQEEKCPFAKIKCDFVGRPETNQLEEHLKADMPHHMQLMLQAFQQTAIATWQPHKPSTSGAAVENGHGQQQLPPPPQYANGVDEQIVQTMYQRIVVLEQRTREQETRLENMQKQLRLARQQAPVDPRYSNGTIVWRIEQLGALVARLRANANNQVYSHECYTSPHGYKFCARLNIQPRKPHVLSLHVHLMQSENDYHLDWPFKGRIKLCMVHPADATLSQHDTIMTKPEILAFHKPREAISTRGFGFLEYANISNIIQLGFCADDRLLIKIEINIV

SEQ ID NO: 22852 - DNA, 3727 bp, DROSOPHILA
tttccgtgaaatttatttgttagtaccgatagttttcgatagactaaattgaacatatcgatgtagcacaaagcccgatacgtcaggcgaatgagtcttgtttttgttttagtgaagctaaaatcgttttgtttccgttgtcaaaatccagcagtgagaagggagcggcacaattagaataaagaagccatcatggatccaacaccgccgcttcgtgccaccaatagtattaacccacagcaggtggcaagcgttccaccgccaccgccaacggggcaaatcatagctccatcgggagcgtttcctggtgagttgattccgctttcaaatcgtgccaaggctaaacttttccatcgcacaggatccctgactcccggctggaatgacccgccacccatttcggcggattctcagagctgcaaattaaacaatagtcgtccacgcctagatcttcgcaagcgcgtggcccacccgctggacgggaagtcctctagtgtccagctggttcagccacaactatcaatacctacagcacaagattcaatctcgccgcgtcccgtggccctggtaacaccccagcgccagattccatatccggatcccaacaatccaccggccggtggagcggatgtgggcggtttcggagcgggaccaaatgccaatgccgtgcgcctgccaccgttggcccacagcatcagcatcgatccctccagggtggccaaggttccaccaagaaccaaatagcatgtagttatcgccaattcagggcctaggctaaggaacttcaaattaatgtgttctatggcgggctggaaaatcaattatttttctatgtaaaacacttaagacacctcacaaaatacaatcagaaatgcgaatgatggggggacgggacctctaaaaagtaaacccaagcgtttcttgactttaggagtccagtttattcaacaacaattaacagacagaaacaaaatgcaggtaaactaaccgctgtcatcgtttaccaggccagcggagtgccgtcgtagttgacaaaaccgccgttctgtttctcgcccagcttgctgatggtctgcacaatttgtcccgtgctggtgggcacgtccaagggggcactggagccacccatgtcggttttcacccagccaggatgcagactgacgcacatgatgcgttgcggatacagatccacgctcaacgacttggtggccgcattcaaggccgacttagaggtgcgataggcgtacattccgccgtccgtgttgccctggatggagccaaggatcgaggacatgttaataatggcggcacggcccacgcccatcggctgggattcgttcgctttggctgccttcttaaggagcggcagacacgccttggccagcatgatgggcacaaccgtgttggtctgcaaggtgtcgagcagctcctgcgatcgaacggccgttatcctggccgatttgggcgctatgccggcattgttgaagagcacattgaggccttggtccttggtcacgccctcgatgtcggcgactagcttgtcataggcatcgaaatttctcaaatctgcacggaaaatatatttatatgcgagagtgtttagcggctggtaaaacataatgcttaccaatctcaagtatgtgtatgttcgagtggttcttggctagatcctccagctcctgtgggccaaattgggaaagacaaaatgtttgaataagaagcacattattagtaaaaaagcagtttatatatgaataattttccagttaaattactgtaatttttagaggcaaatttggtatttcatgagagtttaaatagcgcgcccaacgagcgcgttagtgccataataaccgatagacgataagtgctgctggtgtgaccgaacaatagtcggcccagcaatcgacaagccaatcgacgtctccctttcgcacgctcgtacgaaagtacaaaagctattgcaaaagttggctccgcttattcgtttcgtgctttcgcgagtgccgagagccgctacaatacacgcttagcagtttttacatttccgcttcgactacaacaacattcactacccgccgttgatccttgttttctgtctgatttacgtggagcacctaccaacaagcaacaaaataatggcgcccgtgcaaggtgagtttcacagttaattcgattccaattgaaccattcaatttatgcatgcccatttggacgattaaaaagcggtttgtagaaatagtggctcttgtggattgttcgcgtagcttctgtagtttctgtagctcgacggttgtgagtcaccggttttgttggattactggattgtcttagtagagagacaacgcaaaataagaagaaaacatctctcacctttgcctgctcgcgattccggcaggtggtaaatagatgctgcggcggctggggaagattgagcagcgccttgaccaggcccagacccaatcctcgattgcagccggttatcaggatggagttcatgttttttttttccgaagatccgcgatcgagttgctcgaaatcttatcgcgtcgtacttgagataaaaccaataaagggcggcactactatacgggttccgtgtgttctgtggatttcaccagacccgcagccagatctttccgtgcttatcaatcgactttattgccgtaacacaagcgtgaaaatagtgaaatgttaggaaaaattttgacggccggctgtttcgttcggacagcagcagtgttaccaaccatccgcgagttatcgatacacttgcgcattgccaaacgtgcgtttcgcacatttccaattggcaaagggcagaacaactgttgtgatgttcaaatcccaaatggaatttcgcaatccaatggatgctcctttatggcaaatccattttatcccaaacattctcgtttttgcggtacgcgctcttgcgccctctctctttctcgctgcttctgttacgtagccgtttatcggcgcctctgcctgcccaccgctttcgcagcattcccggccgaaccagcgaacgtgtttgtgttgtgtgttccgccgtcatttttctgcacccttttcgcgaatagtttcgtttcgcctccagctggtagagtgaaacgccaaacgttgaagaaggggaaaggccaacaagatgaacttgtgcaattcgagattctccgttacgttcgtgcggcagtgctcgacgattttaacgtctccttcggctggcattatacaaaacagaggctcactgacaacaaaggttccccattggatttccagtagtctcagctgtgcccatcacacgtttcagcgaactatgaacttgacgggacagcgaggatcacgcgacagtactggagctaccggtgggaatgctccagccggatccggtgccggcgcaccaccacccttccagcatccacattgcgacagggcggccatgtacgcgcaaccggtgcgaaagatgagcaccaaaggaggtgagcatcgatatcgattgatattctgattagatctttgctgttgccgccgcagctgctgctcctgttgccgccggttggcaacgcggtcgattgtcgcggttttcttgcttgttgttttttctgggtcttcttgtgtttaaccgacgccattatgcaataaccgttagttgcctggccaaaaagtccattactctgctcttattacctggcttatcgggtttctgcggcacgtattcgccaag

SEQ ID NO: 22853 - DNA, 972 bp, DROSOPHILA
aacgaaacagccggccgtcaaaatttttcctaacatttcactattttcacgcttgtgttacggcaataaagtcgattgataagcacggaaagatctggctgcgggtctggtgaaatccacagaacacacggaacccgtatagtagtgccgccctttattggttttatctcaagtacgacgcgataagatttcgagcaactcgatcgcggatcttcggaaaaaaaaaacatgaactccatcctgataaccggctgcaatcgaggattgggtctgggcctggtcaaggcgctgctcaatcttccccagccgccgcagcatctatttaccacctgccggaatcgcgagcaggcaaaggagctggaggatctagccaagaaccactcgaacatacacatacttgagattgatttgagaaatttcgatgcctatgacaagctagtcgccgacatcgagggcgtgaccaaggaccaaggcctcaatgtgctcttcaacaatgccggcatagcgcccaaatcggccaggataacggccgttcgatcgcaggagctgctcgacaccttgcagaccaacacggttgtgcccatcatgctggccaaggcgtgtctgccgctccttaagaaggcagccaaagcgaacgaatcccagccgatgggcgtgggccgtgccgccattattaacatgtcctcgatccttggctccatccagggcaacacggacggcggaatgtacgcctatcgcacctctaagtcggccttgaatgcggccaccaagtcgttgagcgtggatctgtatccgcaacgcatcatgtgcgtcagtctgcatcctggctgggtgaaaaccgacatgggtggctccagtgcccccttggacgtgcccaccagcacgggacaaattgtgcagaccatcagcaagctgggcgagaaacagaacggcggttttgtcaactacgacggcactccgctggcctggtaa

SEQ ID NO: 22854 - protein, 247 aa, DROSOPHILA
MNSILITGCNRGLGLGLVKALLNLPQPPQHLFTTCRNREQAKELEDLAKNHSNIHILEIDLRNFDAYDKLVADIEGVTKDQGLNVLFNNAGIAPKSARITAVRSQELLDTLQTNTVVPIMLAKACLPLLKKAAKANESQPMGVGRAAIINMSSILGSIQGNTDGGMYAYRTSKSALNAATKSLSVDLYPQRIMCVSLHPGWVKTDMGGSSAPLDVPTSTGQIVQTISKLGEKQNGGFVNYDGTPLAW

SEQ ID NO: 22855 - DNA, 21748 bp, DROSOPHILA
tactttgaaatttttcttagataaacttgcctttttatgctaattggtcgcacacattaagcgcagcaaattagacttgatgatttttaccgcgccacctattaatacgagaagtttttcttgttttccgctcttcttttcacaaggctcaattaagtagtgttaccagattgaaaacaataagtaatctatgaaatactaaacgctaggtgttcagaaaaatactcggaaattacacaagtaaggaaataccaaaacaattttttatccgcttaaaccgtcattttaggatgataggtttttaagcacgaattttataaatcatattagtaatacaagtatttccaacatatcataaaattaaggaattcattcaatattttcattgatttatagatttttaactaagtaatgcaatgttaacacatattgttttgtatatatcgtcaaaactttgatttctcttcattaaaatagacaccaaagaagtttgttaaattcaacccaggaggaatgcctactcttcatagtattggggataggttacttggtgtacagccaatattagtcatttaattgatagttattgtcatttaatagattggtattgtgttttgtctccatttccatccagaaactgatgatacagcaaggctctgcaggcattggcataagtaaactctttgtcccaattttgtgactttttcttcattaaagagaagaaaagtaaagtaaagccaagtaaattggcttgttttggtacttttaaacaatggttcacgtttacaattcttcatcattagttttaacaataataataatatagcgaaataggtattagcttgacaatattcaactattatcctcgaaaatttgggcccaaaaataaaactaaaagaatataatcaaaaaattaagacccattggtattttaaagaaagtggtatttttcgcgcgggggcgtattggcggttcgccacctgcggccacactggccaacccaccacttcgcttagttgtgttttcgtcttgccttttccactagtctctctcgcgaagtagttggaaaaatcaccttttgcaaagtttttcgctgggaccaaaaagctacatttttcaaaaaccgaaaggaaattacgctgatcgtccgtgtgtgcgtgcgtgtgtatgtgagagagtgtgtgccatcgatcctgcaagtgtgtgtttgtacgcgagtgtggggccgcaaattaaaagcaataccacactgaaaaccgagataatcgcacacggaaaagaacggtttaattcaattacaagtgaaattagagtgtgtgcccgataattgtcaactggccaggtggacggaaaagacggtggtggtgttacgtgaaaatttcggagatcgtcgagggccagagaatcacatttagtggctggccaaaggggaaagaaattgattttccattttccacaattgcaattggaagcaaaagcaaagcagaagagcgaagaaaataaaaggggagagcaagcgtgcgtgcacgagcgaaagagagtgtggagcgcgagggggtgtacgactgtgagagagagagagggagagtgggagagagcagcacttccaggcgtcgcatcctcctcctttttcgcatgcaatgaatattgtcggggaatatgaatacagctccaaggatatgctgggccatggcgcctttgccgtcgtctacaaaggacgtcatcgcaaggtaagaaaataaactcttcaaaacaaataaataccttccatttacctatatatacatatatgtatatgtatgttaagcctaaacaattccgtcatgttactaacctgttttccacaacatctaattcgttgttattgttttcgttttgatgcggggcttggtcgcatttgtaaatagtacaataacaagccccaaagttattaacaatgcgccattgtcaaaggtaaacacgcagaaagcaccaagagccaaagcaccacgctaaatgtctcaaaatataacgacaaatcagctgatcacagtgcaggtcaaaaaataatgacaattaaaaaactcccagcacattttaaaaaattcataaccgcttattttttgtttttattgtagatattcgttttgtactggcatacaaaaattgtctacctgtttttaaaaacaatgtttatgatttgtttgagcaaaaatcattactttactattttacctgttgaaacttttatgacttcgtttttaagaaaacttctttaatgaggcagacatttgtccatatgaaataataaattgtttttgaatttaaatccgcctttctttagaaatttaattttgcttacttatctgtattatcccattcattttaaaatgttgtttatcaaatttgaatgagtttcgacccactgtactgagcgtaataaaattgccaagcaaaatcacagcccttttttttggcatggctccatttttgttttctttgaaataatttgcgttttgcttttgtttattttctattgttgcctttcgaacccctctgatttctaagcaaaatttgggagccacacgcacgtgcgattattttggcgatacaaataaaatacgtaaacaccactgcgtatgataaatatacatacaaacaaacatacatagaatttatatatgtacatatgtatttaagtatacttatgcgcgatagaagtgtgttgaactacttcagggtcattggagaaataatagaaatatttggcgcgtgttgggcagcaaaagggctgtgaaattcctctgacattacaaagtaaataaattaaagcgtgtgaatatgtaaacacatacttaatcacagattgcctactactttgaaccctaagctgtttaatagctttgattaatttctaaataatgagtaacacttgttgcaaatatttaaagcaatttattaataaaatattttttatccataaatcataattatttaaacgacataataggctcttttaattgttaccagctcaaccagtttgacaaataaacagctgcaggtcaagcaactttaatcaaatctaactcaataaaaaaccgacgaaactggtataaatagaaaattttagttaaagcaaaaaatcaaaatcctaaattgctggtcattagcatgagtgactatgttttgtttgattttcattcagtataaaaagcaaaacaaaccaaaacaaaacaactgaaaacacgcaaagtgaaaagctcgaagcgaaaagtttttcgaaacagctgccagttattgcatcagctgatttctgtatccattaaaaacacgcacctacacaccacaagcgtgtttatctccctaaaaccaatatatgtataacactcatatggacattatgatgatgttatgtcgatcagttgtatctcatgcatattgctcagtgtgtttttcttgaattcttcttgttttcttgtttttgttagtgcaacaaagcgaaaaaataatttaaaaaaaaaacagctcttatcaaccgagttgttttgttttcttttctaaattgctcaagttcgcctcgtcagtaaatgaaatcacattattaattgcaaatgcagtgtgacaacaactacaatgcaagtaacaataacaatgggacaatcggttcacacgtaatccagacattcgtctcgtctctttctattgttgtcagaccctctctttcggtcattttggatttgtcgttgttaatggcttctctatatttctaatttctgtttaatttatttcttcgcgctatcgatcgttaatcatttaattgatttcccaaagagatctgtaaataattggacttagcattcattttaagtttcctgtagcaaatagtatgtttcttttgataaattatactattttccatcatctctgattgctcctcttacttggatatatttatataatatcaattttacactcttttctttaaatcttttataatgtttcaatccacctgagttcaattttttcgaccacaattggaatgtgagttgagcgaagcggagttcacttcccgcacctttccttttatggccatttcaagtaactggttttgtggtccgtcagttttcgatttctttccacgactcaatgctgccgtaatcacttgggttacttaagcagctcgaaggacaaggcatcgcggagtgcctgtcgcttgggtcttcaaaagagtatcttgttttttctgcacgtgctcggaaaatacgctaaaaatagtgaagcaatgtgctgctttaaaagatacacaccaaaagatacgcgtaacttgcagacagaaaaggaaatcctactcggaggatctgcatcttctgcactcgaatccgattccaaaaataaacctcaaacaacagctgcggtgtcaagaagcaagtctgctagttctccttgcatcgccatgaatgaatccatcaatctttatctggcggatacgctggcatgtggaaagccagacgacacgtgttaccataattcaccaaagcgacggaacgctccgttttatcaccaattgcataagttgtcgacgggcggaatcatgcaaaaattacgttctaagcgtgtaatgttaattgggttttttgtgcgaaaccatccccttctaacattgcgcaatatgcattttgcatattcatacgttttgtttgtccatatagcgaaaatgcaatggcaatttgcatttgattttgtcggcgctcttccacttcattttattgcatttggctgcgaaaataaatgcgtctcgacaaagtttaaacctataaaaagtgattagggatgccgctctaatcactgagatgtcaaaatactatagttagggctgtaaaatgttgtataatatcgtctatgggcaagccccttatagaaatgataatagttttttaaaaattctagggaaaacgtgtaaattgtttctatcatatttgactgaatgtcttcaatcattcattggtatcaaagttcgaagttcaacatgttttcttcatttcaactactcgtaaatcgatttgattgtgtttttttattcacagcgtaaatacacggaagtcaaatgttagttaggcaacaaattcgaagagaaacccactctattaaatcgaaatcacctttccattttgcgatggctaaacacgtgcagaccaaaacaaatcgaaattaactccttttatattcagcaaaagccgccagacatctagccatcataacatatcatataaacttaggcgtttctcacgcgaaactagtttgtcttgttcagctccagatcgatggtattctatataaattagccggcttactacttgtcattcgatcgggcgtgaattatgcggtcttgaagttaatgttttgcgtcgcaaaaaaaagttagagaatttccgcgatttgtttgcgaagctttgcggcaatgaacggatacattttcacccgccaaaccagttgaagttgcttgtatccatcagatacttaggcctggcctccgttgatgatgtgctgctgcactcgcttcatttttcgctcgcttttgtctctggcttcactctttctcgcattttctgcgcaattattatcttattcagccagctatttttggccaaaagaaatgttttcctttcttgttgttagttgagaggccattgcacctaagcgccccccaagcaaaacagccaatttgccttgccttatcgagctgcccagttcgttgaaccatttttttttttttgttgttggttgtgcgttttttttttttttttttttggcgaaatgcttaacctaatgctgctgcaccccataacttgtggactttgaggaattgcagaaatccctgggatcggaggtctcgcctctagttttccattttccaacgaccaggtgtggggcaactttcccattcgcttttgacacagttttcgcctgcggtgcggctgattgaggtgattgggtcaagaactgctcggtgtccactgttcgaagaccccaattgttttaatgggtaatctaatctcgtttggttttattatcttgcactagaaggtaaacagaatacaaggcagtgacgtaaagagtcaaatatattcaggtaaatattggaattctggtcaataattagtcattttaggaaaatgtttcgacttctgtattaaataatactggtcaataattagtaattttatgaaaatgtttcgacttctttattaaataataaatgcatttattctgaaagaatgcgcattaagcagtttatgttgaaataatagttgttttttcaaattttaacatatcgcccttctatgcgattctcaaacattatacctaaggtactcgtcttcataaagaaagaacttaatggatcccattaatcattcttttgataacataatcttttctcactgacctgatccaattgcctttggtaatctcgcgaaatggcagaggtcgcaacccattaaacactgccagctggttggacgatagtctcaaacaaacaaaagtgcaggagccctgttatcggtcagaagctgtaagaatcgcttgattcattgcagttaactgatataaatataaatgcaaattgtataaatacatcggcgagtgcacagagaaggaataagtgcgcgtggagggaacatatcgattatcaattgccattcaaacaacgcgtgcaccgtcgacagaggtgattcgatattctaaggggaaacctatagaatgtctggttataactacacccagtagtttgtaagtttcaagggtatgccgattactaatcaaatttacagctgcaccatctgctgcgtactaaaaagaccttttatgtggcatattcgctggttaatttaatgttagtcattattagtcattaaagttatataccccacgaaaaaaaaagttcaagcaggtattttgggccgcttatattaaaaaacccaactttagagcatcataacttttacaatgatcacacttcatgataagcataggataattcccagtcgacacttcgctaccagacgaactactatctgatgtgtgcgcttccttgtagtaggtaaacttgtttgagtttacactttcgtcttttgtaacgatctttttggccagagaggacggaacggcggaaagagcaaacccagacaaagagtcattgtcacctgttaagttgaaagcaaataaggcgaccacatccaggggaactcgaaacgatggggccatcggtgggtggattcggaggtgtagttaacttatcagtggggcgtttcaaccggttaacttagcttaccagcgattcccgaccaagttcgtcactccagcggccgacaaaaaacaacaatcttattcaccgcaattagtggccggcctgctgcccccttgccttttgtccgcccgccggttgaatgcgtttttgcgtatctaataataaagtttaaccgaacgggagaccctccaatgtgttggtggggcactcgcctactgggggccctctgcgtatttgcatttgccgcatttccttgtttcgctgcctgctaattgaagcaggccaaagacatttttgctcaaggagaatgtaaacatttggtaggcaaatttatggccgcagctgtatgcaaagattatgggttttagataaagggagatgaactccatgggaatagtgtgctgttcacaaagacagaggttagtgatctgtagacctgaagaaatcttatatttttcattaatttcatatatatgagtggattgtttctgtaacaatgattgattgagctatcattaaatattaagtatacgtttcccacaaaagttatctaaggtatccaaagaaatctgaaactattgctcagagtgtattcacttatttagatttatgcaaataataaacatcattaaaggtgctaactttatatagaatgtttcaaaacttgactccagggtatttgaccgataaacagttttattattttgctaattaaaatgtttatatcatcttgagtgacattcctttgtgctggcctgcaaaacaaatgcgaaatttgaaatgttaatccttttcgcatttggttttgtcagttttgtgtcaataaaattgccgtgcgattaaattgagtcattcctccattgactttggtttgtaattgggctagccgttccaatgactttgaattaaatattaatgaagtgcatttcatacgctcttacagaaacacatgccggtggccatcaagtgcatcacgaagaagggacaactgaagacgcagaatctgctcggcaaggagatcaagatcctgaaggagctcaccgagctgcaccatgagaatgtggtggctctgctggactgcaaggagtcccaggattgcgtcagcctggtcatggaggtgagtttgggctcgaaaaagcatttaaatatccgcatagcgaagcgagaactttataaatatttaatgcttttatggctaaaacgtgtgtgattcattccacctgatatcgtaagagagggggaatcgcaaagtaaagtgcacgtcgaccagttccacgtcatgtccctcccccaaaactacccactgccccctttgaagctccttctcttggccaaaatgctacgccattaattgcggaagtttcgaaatgaattcgtaaacagaaataaaatgagaatagaatggtaaaagcgatttgcgtcgattcgctgctgctgaaaaatgcactcgactaaaatgttaatactttaattcatagcttgggggaaatagagtaaacattttagaaggaatcttaaaattgattaaattagacgaaggatgcgtatggagtccattctgaatattaaataatttcagtgatttaattaacagccagcttattccatatgcgctaaattttatctattttattacactctactgatacttttcttgcgtttttatatttcttaacgcgcaaattgtttacgttaattgaagacaaaagcaaattggatacccacgtttgacctcaagtttgttcaactcaatttgggttacaggtgtttgcatgcttttagcgcgcactgtttataaacaatctattatcttggaattaggtcaaatgcttgcggcacgagaattagcttccttttggcgagttattgtcactgataagattggatagggttgttttcttccaaataccctagttcttaaaagactagcagaaaacctggaattatttggctgttttataacaataaataagaagttaatgccatggatagtacatattaaaatattagtaatgggctagttaaatagaacgtattgcatttcaatctcattcatcatttattagtgttagaattgacttagctaagtttgcatattttctagaaaactttgtgttcaaggtagtgtgtttgcaaaatagttctaatcgaaacgaaaactttgggctttttgttttgtttaagtttgcctaaaaacgccacattgttgtggccacacgattgcatgtcatcatcataggtggagcagaatcgagctggcggggttggaaacgcgataggaagggagtgtttcgtttcatctgctgtgtattgtagtagttggtacatattcaatcgcctgactttggcctcatttgacttgtttgcttcgtataccaatgtgtttgccaccagagaggcagaggcaggggcaagagagtccgctccacggattgtaatcagttcgtattcgtgtgattggtgaatatttattggttccacggccacgtgttatggcatgccgattttcccaccatttaggctactattcgttcgtcagatttgtttatttatcttgccaaaatattacgatgtgtttatttggtgcttaatttcgttgtctgaagataggaatgtgatatgaggagagtatataggtaaataatcaagtctatcagatgtaatctttttaatcttttggtttcataattcaaaacaatggttttctttttttttactatgtacaataattacttttattgtattttggcaaaagtctaaagctaacaactagtgtatctatgggtttacattaatttaagtgttgcgatgaaaattgattttgggatctaaaactagaacagtgccaggagttttggtgcgggatcccatttaccgagtccccctaaagaacagaacgctaagcgactaggcggcttaacctactccgactaacaactagaatctaacaacggattcggttcagttgttgtgcgggaaacattgtaggagagactatatagttaggctagataccgcgtcaaagtagttaactaactagccatatacatacgtgatatacatatacctatttataatctatcaaaaatgccgtcaaaatggaatttgttctcgaaactggaggagaaggataggattctcttttcatcttcgatcgtttggtttcggtttgttttggaaagttttcttaggctagcttattcagtggtatctcctcagtgggatgaacctgatcctttggctctggtttgctagtgcggcagcatttggttttgatgccgccaatatcctggcggcaaatgagtccgatgacgatgccaatcacggccagaaccatgatgcctagtggattaaattgaacaaattagtctggttttgtaccgcaagtaaaaggtgtataactcaaactataactgtttagcaagatgcttaaaatagttgatgttataaaccttaaaccgcagtttgtactcacagatgagcagcgtgttgatggcctcctgggagatctgcacctgattggtctggctctcggcaggcggctccacgctgactccgcttgtgctggtctcggagctcaggattccggctttgaccagctccgtgctgttgtccattttgccccgattgcgattggctaaatgcgaacaatgggaggtgagcaacagacacgttagcaagatgatctacgagtcatgggaaatagctcaccacttctgggcggtgcgggtgtggcggtcactggctttgcagtgctggtgatgctggcgacgatgggcggatttgtaatccccttgagcggcggctccgtgggatagatgagactgccgttgaagggggtgcccagtacgaattcgtagcagctgatgtcgtagttgaggaagctaatcgtgtcgatggaggtcagcaggctgcacagctcctcgatgttctgttgttccagttccggcagcttcagtttaattatttttgttagcggcgagaaagctttcgtattgatttgctgtcggaatggaaaagcgtgagcgggacaactatatagacaactgcgcgatggcaaacacagctgttttggcttcagttgcgccaactatcgatagagcgataacttgtgctatcgcacttttggctcgccattcttacctgtttaaaatcgttcttgttcaagcgcaacacctccaggccactcatgttctggaacgtctgttccggcagttccgtccagctgcagttgacgcagctgaactccaccaagtcgggctggttcaagaaggatccgtccaggcgctgggttatggtgttgttgctcaaatcgagtagcgttagttccttggccgccgcaaaggtgtcgggatcgattttggttagacggttgttggccagccgcaggcgcttcaaacgctccgatccctgaaagacctacaatagataataagcacattagttacaatttatctaattagtagaattagctgggcacttacatccttgtctatgctgctgatcagattgtgattcaaattgatttccaccgccctggacagattggcaaaatcctccggcctcagttcggcaatcacattatggctcagatcgatgatggccgccgttttgggcatgtccaggggtacatgggtcaaatgggcattggcacactgaacgaacttgaagtcctccaggcagaggcagttgcgcgggcaactgggctccaggacatggttgctgcgtcgtggtatatctgcaaaacgatattcattagccttttcagttcggaatatatagatttatgttatgctcactaaatattggtcgaaatgtggtggtggtcgatgtggaggatgattgtggcatcagtctattttctgctgtctccggcgattcctcgcccgtcgctgtttcactgtagtcatcatcgccgtaattaaagtcctcgaggggatttgcctcctcactgcccgctggagcggcatttgtgtggctgatgctgtaagagtaatcattaaattattttccggtctcgactgaataaaccaacaatataccaatttggttttttccacgacttataaacgaattcacattgcttatgaagaaaaacgcagggcaattatatgtcaaacgaatgcgcatttctgatagagcaattactgtacgaattcgttaagtggttttaccaaatacccaaaattgtcaatatttggctttagattgtcggtgggttctaagcggtacgtgcttacatcactcacgtcttgaaggcgaacacacctagctaatttgtcctgaaaacgctcttgacccatatcgttatgaccacgccatagccacacagaaacattcgttttccccactatcattatacggctattgtttatgtttgctccgcgaaagaacatgaatgaatacactcacatgtgcgaacaagcctacatacaaagtatttctcgctacagtcgtggtcacagcaatagcccttaaatgaattaaaagtattcaatgatacaaggcttcttaatgcaattcattagattatgcatatattgtaaaatatattttgcctttcgttttttaagaataaagtaaaatcaaatagatatactttcaagctaaagaaaataaagaaagcacacatttcttttattgtaactcaagcacttttattgtctgtaaagttgtttatttgtttctgttaactgaccttacattttcgaaacgtactgtagctactcagtaaaaagcacagatgaaaccagtttacttcatggcaaaagagacaactcgaccggttttagtttacgatttcgtttactctcacttttttcagatttattttatttttttgctgtcatttgtgacccctcttcatttttttttttgtctgattctaaatcgttcgttatccgtgcattcggcgacttcagttctagtgggttgtatttacttttagaaaaaaaggtgtaaattggctagtagagtagttcaagtgagtcttttgactgccatgtagagttctcttcaattgcgtgacttttgagtgaagtttcaatgaatgctgctgaggagccttgtcaatccttaaaagtgccaaaatgaacagaatgaacgactttatagagtcgagtacttgaaccgcaagtgctgatatgtagctattaattggtatatagtcctaccggataataaagatatatttatcgaacgttacgaattgccttcaagcttcagctgctcgccgaagttaatgggtattacgaaagatctctaaactgttactaagcatgacgacctagtcgacgtaattcccttgactacttgaatgaagtgactaaaattggaagcgtcgcacttaaaagcactctactttgacatttgatttcgagtggctgaaaaggtttaaaaaggcccaaaaatcaatagagaaatgggcttatgtgcactgggaaaattatactagtactaacatgcaaagaacgattaaagaattttatcttaggttttaaaactcagaagtatttaaaaagattttttttagggcaagaatatagaatatttatacataatcgataatgtctaaacctcgtttcagttgtaaattaaaagaaaaatctgaaaatcgagacagttataaatttctatgtcatttgcaatattgcttgagatattggttgagaaattcaaaacgctgagcaaacaatttgataagcaataacggtataaattatcggacaaccggggaattgttattatttttatcagaaccagattatgcgatatgattaagtagagtgtaaattcgtgcaccttatatatatattaaaggcggcaattaagagcggttgccgtggactatcaataaaatgttgctgttttttttttataaccccatgcgtgagtattccatttggcattgatatctcagttgtgggcgggtcaaagtcccgttaccctggttcacctgtcgttatttcgtttttagtgaattaatcactgcgaatgttgctaaacggaaactttgccccgtgtcttccctgtttttcgtttttaggaaagggtctactgatttctataaataaatggattacttattttccagccccataagaataacaaatgtgatttctccacatatcgagatctgtaaatatttattacaacttgatttttacctcacgcttagcaaaaatatcagcagtaatccaaacttgtagtacacgtgcattattatgaattatttgtttactgatatttgtttagctttgttttcactgcgtcttcaaggcgtcgtgttgtttgtatttgtgtttatctcagggttttcatagcattttcgtcgtttttgccaaacttgatgtgaaaattttcaagctgaaaatagattttattaggtgttaggggcctatttttgcaccgctattctcgtttcactttgcacttttaatattcatctgttttgctttgaaattacagcttcaaagttgattaatgtccatttacatttgccggcttacttttggcaaaagtaaaataattatttttcactccgctcgcacaaacttttccactcgctgccgattctcgaatgagcaaaaattcgccaacaattcccattccgttcgactgactgaacaggtgtgtgtgtgagagcttcgaagagcggcaaatattatctctttttctttactctcactctctcttccaaactctctcatgttaagtttaatgtttagccgtggttatcttatcagtttttaatatttaattgctttgtctcataccctcgcgatttctgcttagcttttaaccaacttctgacttactaatcgattattatcaatagtaacaattatggaattcatgttttcaatgaaaacagaaagagcaaactcacactttaagcaccgtaaataaaggctaatcggtttgggtaatcctatcttaattaataagcattacatcacattagaaattaaaatttcaattgccatattttcaacataataacttaagcagcagatttggaagtacaaagaaatctttaggacggcttgtaatattaataaaattaattacacacttgtctgattagaattaacgccgatcgtaatgaactttgctttggacttgacttataagtcggtcggcccgccttttgatatgaaaaaagggaagctttcacagtttatttacataatttgctggaaaaatgtgaaacacttggctggctgaatcatagcgattaaattggacgtgatttgagtgaaaagtttgtttgaatatttgtttcaccgagtgctaagttaaactcttgttttaatcccgtttctaggtctttgtgttgtgattgcgatgaacaatgtatagcagcagcgttctttttatcgcctagaatatgttgacctttagtccactgcgcttacttcgaatgacacgcgtcgtcgtttttctcgataatatatgtactaaattgggtattacactagagagttttctcatcgaattctactgaatggaggagtatcgcgtttaaattatacttaatgatttgctaacttggctttttgttgtcgcgcgataacgtgcgactcatgccaccgtcgatttgagaatgagctgcgaacggaaccgcagaagttgcgagcttaaaaattgagtaagttgaaatagagcggctgaagagagtcttctcttagctttcgaatcgctctcttcacacttgattcttcaaaataatatttaaaaaagaaagaaaaaacagagaagcccattaattacgcaagtgcatttttcaataaatcgctgactcatgggcacttgttgccgggaaatggcattgcatataatttagaaattgttaaaaagccccagaggaagaaaaaccctcttcgttgcgagtattccaccatttccttcaaacttttacttttatgtttatgtttatgtactttacatgtcaatgactttttgtttaatgttcttcgctcttcgcttctcttcggcgattttagcgatttcacaaaaagcgagtgcagtgaaatcttttgtcatttcaaattggctgtttaattgcctaatgttgctttgtttgctcattaaactgtaagtggtccatatattttctcatgaaaaacaaaaaatccataaaagcggataaaaatgttcgccgcgcacattacttttgttggtttttggtggttgtgttcgtgtggaattctatagtcatgtcttcgattggcggcctcaaggtcaaaaatcgcaaatccttttaggcaacttgctcaggccaaaaatataacggcattttggagagacaggggttcgttctcttcatttacattttagcgagggctgcttacaaagttctcccatatcgggatattctattttcattttcaagtttttcaaaaacttcttcatgataactgatattcctttttgctgttttcgaatgcttagaggtttatattttatttgaacattttgttgccttttgtttagcattcactatcatatactttatcaatggcttattattataatattatattatattatatattaaaagagaaaattattaattattctcaaatgagtatggaaaaatcactgcagtgaacgggcatttttaaaaaacctaactggtgctttacttcaaagattaaagattacatggaagtgtatttaaaattccaagtgtaaattcccctagcatattcaatattctatagcttatttttaccccaactctttctccgcatctgctgacataaaccggaacagaacctttgttgggcaaacgacaaaagaaaagcagctggctgtctgggctgatccataaacatatttccctaattccagttcttgattcagaaaattgccataaatcatattcgctttgaccttgccgttttctatgattgactgggatttgcacaaaagtcgagcgagcagctggaagctaaaagatggaaagaccgactgaatcaaatctcgggactctttcattttcgcactgattggacttaattcgtttgcatgggttgcattctgcttttgaggtcttttggggtcccagaagatttatatgcgcgctgaactcttgactcgtgggggtctctcttaatttaatttcccaatcagctccactcacgctcttcatcctttctctttacagtattgcaatggcggcgacttggcggattatctgagtgtcaaggggacgctcagcgaggataccgttagactcttcctcgtgcaactaggtgagattcgaaaatcctatataaggggtagccctaactaataattgtcaaagatcaatataaattgtaacattaatattactttagaacaacgaaatgtattataattaaatatcagaagatcggaagttaaagtataccattatttccatttccccaattctagctggtgctatgaaagcactttataccaaaggaattgtgcatcgtgatctcaagccacaaaacattttgctatcgcacaattatggcaaaacattgccagctccatcgaaaataaccctgaaaattggtaagttttgtaatcttgtaaaatctaaaaaacaaaatctgttaactcttttgaaagttgttacttaaaaaagtggttattactacgaaatcttcatgtagtcaaatactttccctgctacttgttacttatactgcctgcaacttttctgtattacagcggattttgggtttgcgcgattcctgaacgagggcgccatggcagccactctgtgcggctctcccatgtatatggtaattaaaaactaccaaaattcgaaatataaagtatattatggtatatttaatttccaaaggcgcccgaggtgatcatgtcgctgcagtacgactccaaggcggatctctggtcgctgggaacgattgtctaccagtgtttgactggcaaggcgccattctatgcacaaacgcccaacgaactgaagtcctactacgagcagaatgctaacctggcaccaaagtaagataccttataattacaaaaaccgaagaaggatatttaacgctcttatttcgaagaattccaagtggcgtgtcaccggatctgagggatctgctgctgtgcctgctgcgccgcaactccaaggatcgcatctcgtacgagagcttctttgttcaccgcttccttcagggcaagaaggcggccgtgtcgccaggtgagcctagtcaagcagccaacctgcgacgacgagtctctaagagtggtgttcttccagttgacatgccaccgcttggcggaacaccacctgccaaggccaagagccccttgcagcagcagctggagcaggaactgaagctggtcaagctggccgagcaacagcagaaggagcgcgaggagcaggaggcccaggaggacgagaacacgggtaggtgtttcaagcagggtccccaatctggtatttctgagcacaaacatttgccaattaaaagctttctgaaaatctcaaaccgacatcgtttcaacaaaaactcacttaacttgaaagcaggtgataactctttgaggaatcaaagaaattagcactatagctttatttaccaacattgtgttaatttcaaaagatgtttaataaaacgaaaaagtgtgccatattaagcatttaaaacgttactcaaattagttaagctgtgctttgattaattgtttacagcaaaatcaattaatcattgaaaatgaataataggaaaccacataaatgatcgctccttattttatatttttagtgtccgtggtggccaatccggccatttgtgccaccatcaccaacgtaggtgtcctgtgcgacagtgagaacaacagcggttcttgcagctcccacgaggactccgatgactttgtgctggtgccaaagaaccttccggaggaccagcgacagggtctggcccaagtccaagcccagcccgcttccggtggccaacgtccacagcagcaacaaaatcaatccagtccgccacgtcccagcagtctgcccatctctgaacccaaaccagtaccggctcccgctcggcggcaggtggccaggcccgggccgttaacggtagccacactgggtggccagcagataccccgatcgcagccaattagcgtaaagcaaccgcgaccggatcagcgcaagagcagtgtgagcagtgacattaactcgatctcaccgccggcggtgcagtttgccattggaacgccgcctacacgtatgcgttctgcctctggtggatcgctgtcggagacaccgccgccgcatgcaccgagcacctggcaggtgtcgccaggacactcgcaatcgccgttgcgtcgaagcggcaatagctcgccagttctgccatccgctgcgcttaccaaattgcccactttgggcagtccaacaatgctggtggcgccgggatcattgggctcgattggttcggcgggcagtggatcggagaacaacaatcagcatcacatgctgggaccgcgagcttttacgctgcccgaactgggggccactggtggcctacatagtctgctggacacaggagccggcggcggtggggaaccacatgcattccaggccccagaactgtccgaagagacgctgatggatcgcgagcacaacgagacattgtccaagctgaactttgtgctggcgctcaccgattgtatccaggaagttgccgattcgcgatgcgcaccgctctccacgttcatggtggccggcagtcagtcggcggcgcaagcggcgtcagcggatgcacagcagataccgccgcacgcacctgagcactgcaaacgggccgagcgcctggtgctgctcgtccggggactgcagctcctatcgtccgggatgaatctggcttcccagcagctaagcaatggccagctaaagccgtcgtccaatgtgaagaatggtaagtctgcagattaacttattgcagccacatcctttttaatgcatttggtttacccctagctttgctcaccatgaacgccaaataccggagcatgctgttcgaatcgaaacgcctcaatggcagcggactattgcagaaggcgaatgcatttaacataacggcggacaagattctctatgactacgcactggatatggttaggaatacatattgtgcttcctaagtttacccaataactaacgatttcttaacccttttcagtgccaggccgctgctctggatgagctactgaagaacacgaagaattgcttcgaacgttacaacacggcacacattctgcttcattcgttggtgcaaaagtgcaatcatccgcaggacaaaatgatgctgaacaaatgtaagtcattacttattaactcaatggaatatttaataattaattataatccattagatcgcgatgccgttgagaagcgtttgagcatattgcagcagcatggctatatatacatgaccgatgagaatgcttagttactcgggcggatagagctatattccaaccatgaagcaccggcaatcttcacaacatcaacaacatttccttaagttattcaccgttttcgttgggagtgcaaacatgtgattgaaacaaaaactacactatccatacatagacatacctacaaataatttaacaaccattcacacctaatttctggccttcaaagtttcccaacaaaaaaaaaaagaaaaaaacagtccaatgtaaatagtttgagctatgcagatgtatgtagtttttgtttttctatataattttggcccttgcggcaaccataattgttaaagcttataacgagtgcagatgcaacatgaataagggcagacaagagtccatatagtcgtaagataaccataatattatatatatgtttacatatatgtacaacacgaaagctaaccaagcaaaccacattacataacgtaaagggcaatatgcaagccaaactcagtttaaatctatgtttaaaggaggaagcgggagaacccagatccatatatcatgtgctagaatttctccgtagttttaatgcctattttcttatttaacaatctaatattcccctattattatattataaacataccatacaatattgatggctgcactacacaaacatgtttacaatgtgctatgttcatagtttttagttaggtcttttctaaaacaactttaaagatgtatttaattttatgacaagaaatttatattttaaagaaactttttaagtttttctacaagcaaagcccacaaaactttcgaaaaaatctatatatgtatatggtatacaaaagagagaaacacataaaagagtgtataaaatgaaaaagaaacaaaataccgatttgaactaataaaaagtactaaggaaaatcgtagaaatatgcctgtttttaaattataaacaattaaaaaggaagagaaaagtgcattccaaaatgttctttattttgagataggcttgtgtga

SEQ ID NO: 22856 - DNA, 3148 bp, DROSOPHILA
ccaccacttcgcttagttgtgttttcgtcttgccttttccactagtctctctcgcgaagtagttggaaaaatcaccttttgcaaagtttttcgctgggaccaaaaagctacatttttcaaaaaccgaaaggaaattacgctgatcgtccgtgtgtgcgtgcgtgtgtatgtgagagagtgtgtgccatcgatcctgcaagtgtgtgtttgtacgcgagtgtggggccgcaaattaaaagcaataccacactgaaaaccgagataatcgcacacggaaaagaacggtttaattcaattacaagtgaaattagagtgtgtgcccgataattgtcaactggccaggtggacggaaaagacggtggtggtgttacgtgaaaatttcggagatcgtcgagggccagagaatcacatttagtggctggccaaaggggaaagaaattgattttccattttccacaattgcaattggaagcaaaagcaaagcagaagagcgaagaaaataaaaggggagagcaagcgtgcgtgcacgagcgaaagagagtgtggagcgcgagggggtgtacgactgtgagagagagagagggagagtgggagagagcagcacttccaggcgtcgcatcctcctcctttttcgcatgcaatgaatattgtcggggaatatgaatacagctccaaggatatgctgggccatggcgcctttgccgtcgtctacaaaggacgtcatcgcaagaaacacatgccggtggccatcaagtgcatcacgaagaagggacaactgaagacgcagaatctgctcggcaaggagatcaagatcctgaaggagctcaccgagctgcaccatgagaatgtggtggctctgctggactgcaaggagtcccaggattgcgtcagcctggtcatggagtattgcaatggcggcgacttggcggattatctgagtgtcaaggggacgctcagcgaggataccgttagactcttcctcgtgcaactagctggtgctatgaaagcactttataccaaaggaattgtgcatcgtgatctcaagccacaaaacattttgctatcgcacaattatggcaaaacattgccagctccatcgaaaataaccctgaaaattgcggattttgggtttgcgcgattcctgaacgagggcgccatggcagccactctgtgcggctctcccatgtatatggcgcccgaggtgatcatgtcgctgcagtacgactccaaggcggatctctggtcgctgggaacgattgtctaccagtgtttgactggcaaggcgccattctatgcacaaacgcccaacgaactgaagtcctactacgagcagaatgctaacctggcaccaaaaattccaagtggcgtgtcaccggatctgagggatctgctgctgtgcctgctgcgccgcaactccaaggatcgcatctcgtacgagagcttctttgttcaccgcttccttcagggcaagaaggcggccgtgtcgccagttgacatgccaccgcttggcggaacaccacctgccaaggccaagagccccttgcagcagcagctggagcaggaactgaagctggtcaagctggccgagcaacagcagaaggagcgcgaggagcaggaggcccaggaggacgagaacacggtgtccgtggtggccaatccggccatttgtgccaccatcaccaacgtaggtgtcctgtgcgacagtgagaacaacagcggttcttgcagctcccacgaggactccgatgactttgtgctggtgccaaagaaccttccggaggaccagcgacagggtctggcccaagtccaagcccagcccgcttccggtggccaacgtccacagcagcaacaaaatcaatccagtccgccacgtcccagcagtctgcccatctctgaacccaaaccagtaccggctcccgctcggcggcaggtggccaggcccgggccgttaacggtagccacactgggtggccagcagataccccgatcgcagccaattagcgtaaagcaaccgcgaccggatcagcgcaagagcagtgtgagcagtgacattaactcgatctcaccgccggcggtgcagtttgccattggaacgccgcctacacgtatgcgttctgcctctggtggatcgctgtcggagacaccgccgccgcatgcaccgagcacctggcaggtgtcgccaggacactcgcaatcgccgttgcgtcgaagcggcaatagctcgccagttctgccatccgctgcgcttaccaaattgcccactttgggcagtccaacaatgctggtggcgccgggatcattgggctcgattggttcggcgggcagtggatcggagaacaacaatcagcatcacatgctgggaccgcgagcttttacgctgcccgaactgggggccactggtggcctacatagtctgctggacacaggagccggcggcggtggggaaccacatgcattccaggccccagaactgtccgaagagacgctgatggatcgcgagcacaacgagacattgtccaagctgaactttgtgctggcgctcaccgattgtatccaggaagttgccgattcgcgatgcgcaccgctctccacgttcatggtggccggcagtcagtcggcggcgcaagcggcgtcagcggatgcacagcagataccgccgcacgcacctgagcactgcaaacgggccgagcgcctggtgctgctcgtccggggactgcagctcctatcgtccgggatgaatctggcttcccagcagctaagcaatggccagctaaagccgtcgtccaatgtgaagaatgctttgctcaccatgaacgccaaataccggagcatgctgttcgaatcgaaacgcctcaatggcagcggactattgcagaaggcgaatgcatttaacataacggcggacaagattctctatgactacgcactggatatgtgccaggccgctgctctggatgagctactgaagaacacgaagaattgcttcgaacgttacaacacggcacacattctgcttcattcgttggtgcaaaagtgcaatcatccgcaggacaaaatgatgctgaacaaatatcgcgatgccgttgagaagcgtttgagcatattgcagcagcatggctatatatacatgaccgatgagaatgcttag

SEQ ID NO: 22857 - protein, 835 aa, DROSOPHILA
MNIVGEYEYSSKDMLGHGAFAVVYKGRHRKKHMPVAIKCITKKGQLKTQNLLGKEIKILKELTELHHENVVALLDCKESQDCVSLVMEYCNGGDLADYLSVKGTLSEDTVRLFLVQLAGAMKALYTKGIVHRDLKPQNILLSHNYGKTLPAPSKITLKIADFGFARFLNEGAMAATLCGSPMYMAPEVIMSLQYDSKADLWSLGTIVYQCLTGKAPFYAQTPNELKSYYEQNANLAPKIPSGVSPDLRDLLLCLLRRNSKDRISYESFFVHRFLQGKKAAVSPVDMPPLGGTPPAKAKSPLQQQLEQELKLVKLAEQQQKEREEQEAQEDENTVSVVANPAICATITNVGVLCDSENNSGSCSSHEDSDDFVLVPKNLPEDQRQGLAQVQAQPASGGQRPQQQQNQSSPPRPSSLPISEPKPVPAPARRQVARPGPLTVATLGGQQIPRSQPISVKQPRPDQRKSSVSSDINSISPPAVQFAIGTPPTRMRSASGGSLSETPPPHAPSTWQVSPGHSQSPLRRSGNSSPVLPSAALTKLPTLGSPTMLVAPGSLGSIGSAGSGSENNNQHHMLGPRAFTLPELGATGGLHSLLDTGAGGGGEPHAFQAPELSEETLMDREHNETLSKLNFVLALTDCIQEVADSRCAPLSTFMVAGSQSAAQAASADAQQIPPHAPEHCKRAERLVLLVRGLQLLSSGMNLASQQLSNGQLKPSSNVKNALLTMNAKYRSMLFESKRLNGSGLLQKANAFNITADKILYDYALDMCQAAALDELLKNTKNCFERYNTAHILLHSLVQKCNHPQDKMMLNKYRDAVEKRLSILQQHGYIYMTDENA

SEQ ID NO: 22858 - DNA, 2736 bp, DROSOPHILA
agaatatccatgaccaggtcaaaaggcaacacgcatcacgaccacgaatctgattgccctcgcggcatttgcgtttaatatttcatatacctatcacattctacatatttctaaaagaaaaaaccaaatttcttagtgttatttttaattattaatcactatttttttaatttacctatttttccatttcaattatgcgtaagggaattaccttagcacaacatttttatggaaacgatgacaaaggtcgtcaatggttttggcccctgcatttttcagccatgcaactggcagcagttttcaaaaatacttcaaacaaacaattttagcaccgatggcgataaaaggatttttcaatttgcgaaaaccttcgatgcgagggcttttgtgtgcgagtgcgagtgagtgtgtgcttgtgcgtttgtttgggactcacgaaattggtcagcaaaaatttgtttggcgtgtaaattgagcttttttttttgcagccattgtttaagtttcgtgggggaaaggaaaactgcggaaaatgctttttaatcatttaactaacgtaatcaattctcccatttctctctctctctctctcttgctcttttctcggtcctttgcaaattgcaattcacagcgcgaaacttttgattaattaaaagtaaaacaaaaaaaaaaaaaacccagagagccgaccaagaactggcttctggtgtccaacaaacggccacaggaatcgacaagaaacaacaacaaccacaacgagagtcctgaactcagccgcaaaaagaaaaaaaaactttcctacaggaaactaaacaaaccggaaataaaataaaaaaggaaataggaaaaggaatttaactttaacagaaaatcaacatcgaaatggaattggccatcagaattgtcaatccgcagttagctcgctacaaaaacaactacaacagcaataccagcaacattcgcaccagcaatagcaaaaaactaatcaccgatagtagctgcaactgcaacattcagtccaacgacgacaacaacagcagcaacaacaacaacaacaacccagatatcaacagtgacaacaatataacaacgattacaacagcagcaagaacaacaagcatagacaacaatcaattgtcagcagcaacaacaacaacagaggcaaaaggagcatcaatactagcatcaaaacaggcagcagcaacttgcaaccactttgtagcaacaacaacgcgaaatgcagcagcagcaacaaccgtccatcgaccagctgcccgagcccacagcttcgaccagcaattcggccacaactaaaccgacaattgcaacagcaaccacatcgacaacaacaacgtctggcaacaacttccaccagcaactgcaagcaacaacggcagccaccatgcaacgcctgcgaacaacctttacgcgatcacgcactccaacaggtgccgaaatgaagatgcagaatagcctggaggtgcccaagcagtggacagacggcgcttcacattgccgccgagcagaatcgccgcgacatctgcgtgatgctggttgccgccggcgcccatttggataccctagactccggcggaaatacgcccatgatggtggccttcaacaagaacgccaacgagatagccacctatttggaaagtaagcaggggactcagcccgtcgacggctggctcgacgactagacgaatcgacgatcatctcacaaaatgccgcagttccccgccaagtagagcaatcgctagacaagcttactacttattcaacattcagacatttaaatgaaaaacaaaacaaacaaaaaaaaaaccccccgataatcacaatatcacaataacagtaaatctcaaacaagaacgtaattttaacattgcaaatttctcctttctatgccaatcgaacaaaacaaaacaaaaaatcgaaaccaaaatggataatgtcgtgtaaataactgaaccgaacgaaaacaatatcaaatcaaatcaacattccacgaaactcaaatgcgattccgcttaggtcaagagcgttttatgcatctggagaagcagacccggatctaagtggagccattcagcggaagcattcaccctacgagataatattaatgcataatgataatggcttttttttttgtggcaaccttttttttttgtgttagcatgtacgagagaaatctaatttaaattaagcaaagaaaatacatacacaggcaagcaaacacaacaaacacatttttagcgcgtaagtgaaagagaaccgatggtatggaataaattaatttatttgtaaagaaaagctagcaaaacgataggcaacatttgtccgaaatttcaattttaattacctttcgatagaacgaacaaaaaaatacataagagtatatatttaatgcagcgaatgcagcgaaggaaattcgaaattcatttgtttctcttaccgattgattaacgataaatgattatattgtgatatctaaattaattaacatattggactagagagcgagaacgagagcaaatataaattgatattagcaaagggcatttgctgtaatactaacaactgaagcaaaaaagttgaaaacgcaaaaaaagaagcaagcaaaaacacacacacacacacagacactaagcaaatatatagtctatatattatatatatttaattaaatgtacttcttttggaattcaaactaggctaagtgaaaacttgaatact

SEQ ID NO: 22859 - DNA, 4590 bp, DROSOPHILA
gcaactgcaacattcagtccaacgacgacaacaacagcagcaacaacaacaacaacaacccagatatcaacagtgacaacaatataacaacgattacaacagcagcaagaacaacaagcatagacaacaatcaattgtcagcagcaacaacaacaacagaggcaaaaggagcatcaatactagcatcaaaacaggcagcagcaacttgcaaccactttgtagcaacaacaacgcgaaatgcagcagcagcaacaaccgtccatcgaccagctgcccgagcccacagcttcgaccagcaattcggccacaactaaaccgacaattgcaacagcaaccacatcgacaacaacaacgtctggcaacaacttccaccagcaactgcaagcaacaacggcagccaccatgcaacgcctgcgaacaacctttacgcgatcacgcactccaacaggtgccgaaatgaagatgcagaatagcctggaggtgcccaagcaggtgcgctccgcctctttcgacgagatgcaactggagtcgcagcgtgcctcctccagtctgctcaagcagcaatcctcatcatcggcctcggcagacgaacgctcctcggaggctggcttcctgcaggttccattggcggcccatcagcaaagatcccatagcttcgattcggcaactgcctcggcgggcagcgatgactcgggcacctttttggaggtgccacgacggctgaaggctcgacgcagttcgtcaaccaagacaccgccgccttgcatccattgtcactatctggaggagtatgagcgtcgtatgaccgccgaacagcgttacttcatcgatcatcgcgagttaacggctttgagctacagcaataccagctcggaggcgagtgaggatgaggatgaagttgagggccataacgcggaggaagaggaggagggcagtgcggccatcgaggatgccgaggaggagaccacggaggcagctaccgaagaagcggatgaagatccccgcaccgaggttgagtccgagcatgatcacgatccggatgacgatgccgcattggagatggatattcgcattggcaacatgagccaaggcagcagcatcgaggagtcgcgcgcccgcctaccgcgacaaatgcggcgtcacaccatcggtagcagctcggtcacctcggcctccgaggatgagggcttggagggctcggacaatggttcgccgcattttggcaacaccttgttgccaccacagccgacaacaccatgtggcataaccttcacgctaagtccaaccaatggggattatccttcgccgccgcatctgcccttagatcccggctcgccgcccatttcgccctgctcctccaattcgggtagattgccagctctggccccgatcatttccacgccctgctcctcggcggatgccgatgatgctggtgccgctatgggtttgccagtccgagcaagacgtcgttcgatttcgcgacaggaagcgatattcgtggagcccactggtaactcactggagaacgtttcgcacgaggaggtggacaacagcaataccaagtcatcggtggacacggctgattcactggacgaggcctcgaccatggccacgtgtggctcacccggagccgccggtggcagtggtgcctcctccagtcatcataacgcctttgttgtgcgagatatttacctaatggtaccggatttgaagcgagatcgcgccgcctccgtggattcgtgcttctccaagctctcgtcgaatgccaaaacggaggagctgcaaccaagtgccgatggttgcttccttaccgtaccgaatataaatgcaactcgatcgcgatccgtggacatcgtgctaccaactgacgagcaagccagatataaggctttatccatgaccggatccactgtcacctatgcagacgggtataaaagcggccagcggatgaagtgctccgcctgccaactggttgcccaccacaactgcataccgttcgtcaacgagaagagcaccctggcctgtaagcccacctatcgggatgtgggcatacggcagtaccgtgagcagaccaccacccatcatcattgggtgcatcgcaagttggagaagggcaagtgcaagcagtgcggcaagcaggcggtgcaaagcaagctatttgggtcgaaggagattgtggcgttggcctgtgcgtggtgccacgagatttaccacaacaaggaggcctgttttaaccaggccaaaatcggcgaggaatgtcgtctgggcaactatgcgcccatcattgtgccgccatcgtggattgtgaagctgccaaccaagggcaacttcaagtcctcgatacgcgtgagcaataagaacaatgccgcatcgggatcaggaggtggtggtgctggtggcggtgccggtggcggtggtggcaagagcaagaagcaaacgcagcggcgacagaagggcaaggaggagaagaaggagccgcgagcgttcattgtgaagcccattccatcgccggaggtaatcccggtcattgtgtttattaatcccaaatcgggcggcaatcagggccacaagctgttgggaaaattccagcatctgctcaatccgcgccaggttttcgatcttacgcaaggcggtcccaaaatgggcctggacatgttccgcaaggcgcccaatctgcgggtgctggcttgcggtggcgacggcaccgtcggctgggtcctttccgtcctggatcaaatccaaccgccgctccagccagctccggcggttggtgtcctgcccctgggcactggcaacgatctcgctcgcgctctcggatggggagggggctacacggacgaaccgatcgggaagatactgcgcgagatcgggatgtcccagtgcgtgctaatggatcgctggcgggttaaggtcacgcccaacgatgacgtcaccgatgaccatgtcgatcgcagcaagcccaatgtcccattgaatgtcatcaacaactatttctccttcggcgtggacgcgcacatcgctttggaattccatgaggcacgtgaggctcatccggagcgcttcaattcgcgcctgcgcaacaagatgtactacggccagatgggcggcaaggatttgattctgcgccaataccgcaacctctcgcaatgggtgacgctcgagtgtgatggtcaggactttaccggaaaattacgcgatgccggctgccatgccgtgctcttcctaaacattcccagctatggcggtggcacccatccatggaacgactcctttggcgcctccaagccatcgattgatgacggactaatggaggttgttggcctgaccacctaccagctgcccatgctgcaggctggcatgcatggcacgtgcatttgccagtgccgcaaggccaggatcatcaccaaacgcaccattccgatgcaggtggatggtgaggcatgtcgcgtcaagccatcggtgatcgagatcgagctgctcaacaaggcactgatgctgtcgaaaaggaagcacggacgcggcgatgttcaagtgaatcccctggagaagatgcagttgcacattttgcgcgtgaccatgcaacagtacgagcagtaccactatgacaaggagatgctacgcaaattggccaataagttgggtcaaatcgaaatcgaatctcagtgcgatttggagcatgtgcgcaatatgctcaacaccaagttcgaggaatccatctcctatccaaaggtctcacaggattggtgcttcatcgactcctgcaccgctgagcactacttccggatcgatcgtgcccaggagcatctgcactatatctgcgacattgccatcgatgaactgtatatcctggaccacgaggcggccaccatgccgcagacacccgatcaggagcgctcctttgcagccttctcgcagcggcaggcacagaacgagcgacgccaaatggatcaggcccagggtcgcggcccgggcagcaccggtaggatcctgttagctggctgctggccagatgaggatttgcaaattggctccaagcccataaaagtgatgaagtggaagagccctatactggagcaaacttccgatgccatactactagcagcccagagcggcgatctcaatatgttacgtgcactacatgaacaaggatactcactgcagtcagtgaacaaaaacggacagacggcgctgcatttcgcctgcaaatacaaccacagggacattgtcaaatatatcatcgcaagcgccacacgacgcctcatcaacatggccgacaaggagcttggacagacggcgcttcacattgccgccgagcagaatcgccgcgacatctgcgtgatgctggttgccgccggcgcccatttggataccctagactccggcggaaatacgcccatgatggtggccttcaacaagaacgccaacgagatagccacctatttggaaagtaagcaggggactcagcccgtcgacggctggctcgacgactagacgaatcgacgatcatctcacaaaatgccgcagttccccgccaagtagagcaatcgctagacaagcttactacttattcaacattcagacatttaaatg

SEQ ID NO: 22860 - protein, 1417 aa, DROSOPHILA
MQQQQQPSIDQLPEPTASTSNSATTKPTIATATTSTTTTSGNNFHQQLQATTAATMQRLRTTFTRSRTPTGAEMKMQNSLEVPKQVRSASFDEMQLESQRASSSLLKQQSSSSASADERSSEAGFLQVPLAAHQQRSHSFDSATASAGSDDSGTFLEVPRRLKARRSSSTKTPPPCIHCHYLEEYERRMTAEQRYFIDHRELTALSYSNTSSEASEDEDEVEGHNAEEEEEGSAAIEDAEEETTEAATEEADEDPRTEVESEHDHDPDDDAALEMDIRIGNMSQGSSIEESRARLPRQMRRHTIGSSSVTSASEDEGLEGSDNGSPHFGNTLLPPQPTTPCGITFTLSPTNGDYPSPPHLPLDPGSPPISPCSSNSGRLPALAPIISTPCSSADADDAGAAMGLPVRARRRSISRQEAIFVEPTGNSLENVSHEEVDNSNTKSSVDTADSLDEASTMATCGSPGAAGGSGASSSHHNAFVVRDIYLMVPDLKRDRAASVDSCFSKLSSNAKTEELQPSADGCFLTVPNINATRSRSVDIVLPTDEQARYKALSMTGSTVTYADGYKSGQRMKCSACQLVAHHNCIPFVNEKSTLACKPTYRDVGIRQYREQTTTHHHWVHRKLEKGKCKQCGKQAVQSKLFGSKEIVALACAWCHEIYHNKEACFNQAKIGEECRLGNYAPIIVPPSWIVKLPTKGNFKSSIRVSNKNNAASGSGGGGAGGGAGGGGGKSKKQTQRRQKGKEEKKEPRAFIVKPIPSPEVIPVIVFINPKSGGNQGHKLLGKFQHLLNPRQVFDLTQGGPKMGLDMFRKAPNLRVLACGGDGTVGWVLSVLDQIQPPLQPAPAVGVLPLGTGNDLARALGWGGGYTDEPIGKILREIGMSQCVLMDRWRVKVTPNDDVTDDHVDRSKPNVPLNVINNYFSFGVDAHIALEFHEAREAHPERFNSRLRNKMYYGQMGGKDLILRQYRNLSQWVTLECDGQDFTGKLRDAGCHAVLFLNIPSYGGGTHPWNDSFGASKPSIDDGLMEVVGLTTYQLPMLQAGMHGTCICQCRKARIITKRTIPMQVDGEACRVKPSVIEIELLNKALMLSKRKHGRGDVQVNPLEKMQLHILRVTMQQYEQYHYDKEMLRKLANKLGQIEIESQCDLEHVRNMLNTKFEESISYPKVSQDWCFIDSCTAEHYFRIDRAQEHLHYICDIAIDELYILDHEAATMPQTPDQERSFAAFSQRQAQNERRQMDQAQGRGPGSTGRILLAGCWPDEDLQIGSKPIKVMKWKSPILEQTSDAILLAAQSGDLNMLRALHEQGYSLQSVNKNGQTALHFACKYNHRDIVKYIIASATRRLINMADKELGQTALHIAAEQNRRDICVMLVAAGAHLDTLDSGGNTPMMVAFNKNANEIATYLESKQGTQPVDGWLDD

SEQ ID NO: 22861 - DNA, 4274 bp, DROSOPHILA
ggaccaggtacaccaaagcctccatattgagtcggtggcgggataccaaaaatcattggatttcctgtcggtccgtaagttccataacacggaataatagtcggttgtcccggttggaagccaaagcctgttccgtaggctccagttctagctagatcgtcttgcgcgcaatcttcaggattcttgcatccattcttaccatcttgacatggattctcacaactctccgcacatgcatccatgtttaaacacggatccttacaattgtccccacaggctgagcaacttttcgatcgtttccttttctttgggcgctctggcgtctttagaagaaaactgggcggcaccatgtccgaaaacttttggaactccccagaaaacacgacgcgacaattcctcatattagaggaacaagatcgctcacagcaacttggtcgaggacagcacctgcggatgagtataaatgcaattgggttgagacactaactatattcttatacttaccagccattgccatggcagcttatgcacctccttaaatatcgacatggatcgcacattttcaactcctggttctgtttaaaagtccaccttcactcatggtcaattacgaagagtacacaaacataacatcggtagtcaaaatcataaaaaagtagaagtaaatggtacaatttatatttttgatgtcctaaactaagactatattgttaaaatcattgcatgatcagttgtgataaaacaacgttttgaaagtggtgctaccatcttcatatatgtgttctttacagattataatatgatatgaatataagagaaaccttgtaaacaaaaagacttccttggtttatttaacttactatttatgtcgaccaaaactctctttttagttttggtcaaaaaaatgacattacaaaattctttgtcacgccaaaaaacaaatttaaacggaagcattgtataactgagacaaaaaattgtatttgggaaaaaagaagaaatgcccaatgacggagtcaagtcaaccaggcccagtccctattggcgtcatgcgagtcctcctccgaggaggaacatagcatcggagcaatacagcaatcgagtcggacagcagctggtgcgagccctggctcagagcttaccgtctggacaggaagccgtgcgttcccgatcatcctgcccaccaacacctcgtcgtcgccggcaggcaagtgtctgcagatcgatgggaagtccagagtttgtgccattgatgtcgcacagtaagcccaaggcatcggttcgattgaaggcgggtatgccggtgaaaccagtgttgggaggagatccacccaattcaaagactcctggtcagtctatgatggcctcagccaaacgtcgcaatgaatcccccacagtgaaggcaaaaagcagggaagaagagttcaataagataccagagctggttagtgaggcatccgtcgccaaggccagagaaaaagagttcgaaaagataccttccggagttccgagtttgaccgaagaaaacaagcaaacagaagtgaaagacacaaataattcaatcccggaaacgcatgagaacttgaaaccggaaacgaaaaccaattttataatagaggaagaaaagcccacagaatgtataccagaaacggaaccgaagccatcgaactcgaagataattccctgctttcgaggagagtatcccacacgacatcgtcctggtacttgccaatggtttcaatccgacgtccccaattgcggaaatatcgtgaccatatgcgatgaggaacaccaaattatgggtgaagcggaaatagtcaccgcttgccaggttaccgaagcacatttcctcagcctcgattgtgaaaatgataacatgaacaacgaaccgccatcgatttcgaggtgcaataagtgcacgggttgtccgcagcaacagaatggtaattggtttggacagcaacgatcttgtcctcagcagcaacaaccttgctttcaacagcaacaaccgtgctttcaacagaaaccatcttgcttgcagcagaaaccatcttgcttgcagcagaaaccatcttgcttgcagcagcaaccatcttgcttccagcaacagcaacgaaattgtggacgaaatccaccctgtcccaatgtgaaaccaaaaggatgtctcaagtgtcaggagcagcagcagtctggcaaagcatttgcatacaatttgcagcagtcgatgcagcagcaagttctgccgcagatgcagaatgtgtatccttgtcagcagcttcagcaagtgaatacctgtgatcaaatggaacaacaaatgcaacagcaaggcattgaggagaacaactatggcctgaccgaaatgctggccgaggagctaagaaagcaaatgctcgaggctcaggcgcagattgcacaagtgcaactgcagttgaatagcgcgtgtggagccacaagagtgcgacagatgcatgtgctgtcccaaaatgccactgacgtcccacgttgggcgccagaaactcagtttattgatgtactggcagaggaacacgacgtgggagatgcccaaccagatgaaacaatggaaaacggcgaagaggatcagggatttaactcgcaagtggatcagcattctttgccggctagctttccatgccaaaccatcgagtccaccaggtcggagacgatttggaccatgccatcagcacctcagtcgtcacagcaacagatgccgtttggtctgtatcctgtgccactatcgatgccaaatcagaataactacttccagcagaatcctcaacaatttccttgccaaatggctccttttcagcagcagcaacaacagcagcaaatggctcattgtcagcagattcagtcttgtagagcaccaccgtgtccacccaaaaagccgcctccttgccagcagaaacatcagcagcagcgattatcctgtcaacaacagcagcaacagcccataagatctggtcaaccagcccagtccaataagtgttctcattctccacaattttgtcccagttgttgttgccagcgctatgcgcaaatgagattcatgatgccccgatgttggctgcgctaaagatttcgaaaagttctaggtttgtgggcgtaacttatcttgaacagtcaacacaaatgtttcttcaagctaagataccttacaaataccaatttgaacaggaagttgtgcaattcttccgtttaaaattgaggcgaataaatgaaatgcttcgaataaagtttggattttaaagcctaatatttgagttttttgtcaactgcttgaatttcggtcttgcacattttaaattcacagttttccaaactttagcggacgagtagtcaagaatctacgctgaacgccccattttgttcaaattacagatttttctatgaaagatatagtcagaggaagagacatcccctctgccattgttttatttcaagaatttgtaatttaaatcaaatgaacggcggttttcagaggtatcagcacacatggtgctgtcaaaaaacgcatccttgcatttatgtgcgaaataaagccatgctgggaaatggctatagattaggtggatcagttggagcagatttaaaagagggttttaggaagtccgtgaaagaagcccatggaacccctaagattggtggaacttctccatgtaaatttagcaaaccaaaaggacaagttccgtgcaaagataactatacccgaaacttaataacaggtaaattatctaataaggaattgaaaacaaaattctaaatcttcagatttctaaggaaaagcatgtttaaataaagttggatccataagtaaatccttgaccagtcaaggaattcaaaagtcaaaagcagatttggaacagaatcaaaaagcgcttgttaaagtcaatcctaaacgtagaagagaacgtaaaaagacgcctaagagatcaacagctgggaatattgaacagcccttagatgacgatggtatatggtgagtggggcttttctagcttaatccttgtttaaatgcgaatcataaataggtttgaatgcaatgtgccctttcgagtaaatattccctttcctattagcatgaagaatctatttggatcgcagttgtttgaagccaatagcaaatatcagattcttaaggccattgtaccggatagaaagttacagaaggataataagctagagtatccattaagcttctcaatgcgtccagctcttccaccttcagatcttcaatctagcaattcatccaccaa

SEQ ID NO: 22862 - DNA, 2274 bp, DROSOPHILA
atgcccaatgacggagtcaagtcaaccaggcccagtccctattggcgtcatgcgagtcctcctccgaggaggaacatagcatcggagcaatacagcaatcgagtcggacagcagctggtgcgagccctggctcagagcttaccgtctggacaggaagccgtgcgttcccgatcatcctgcccaccaacacctcgtcgtcgccggcaggcaagtgtctgcagatcgatgggaagtccagagtttgtgccattgatgtcgcacagtaagcccaaggcatcggttcgattgaaggcgggtatgccggtgaaaccagtgttgggaggagatccacccaattcaaagactcctggtcagtctatgatggcctcagccaaacgtcgcaatgaatcccccacagtgaaggcaaaaagcagggaagaagagttcaataagataccagagctggttagtgaggcatccgtcgccaaggccagagaaaaagagttcgaaaagataccttccggagttccgagtttgaccgaagaaaacaagcaaacagaagtgaaagacacaaataattcaatcccggaaacgcatgagaacttgaaaccggaaacgaaaaccaattttataatagaggaagaaaagcccacagaatgtataccagaaacggaaccgaagccatcgaactcgaagataattccctgctttcgaggagagtatcccacacgacatcgtcctggtacttgccaatggtttcaatccgacgtccccaattgcggaaatatcgtgaccatatgcgatgaggaacaccaaattatgggtgaagcggaaatagtcaccgcttgccaggttaccgaagcacatttcctcagcctcgattgtgaaaatgataacatgaacaacgaaccgccatcgatttcgaggtgcaataagtgcacgggttgtccgcagcaacagaatggtaattggtttggacagcaacgatcttgtcctcagcagcaacaaccttgctttcaacagcaacaaccgtgctttcaacagaaaccatcttgcttgcagcagaaaccatcttgcttgcagcagaaaccatcttgcttgcagcagcaaccatcttgcttccagcaacagcaacgaaattgtggacgaaatccaccctgtcccaatgtgaaaccaaaaggatgtctcaagtgtcaggagcagcagcagtctggcaaagcatttgcatacaatttgcagcagtcgatgcagcagcaagttctgccgcagatgcagaatgtgtatccttgtcagcagcttcagcaagtgaatacctgtgatcaaatggaacaacaaatgcaacagcaaggcattgaggagaacaactatggcctgaccgaaatgctggccgaggagctaagaaagcaaatgctcgaggctcaggcgcagattgcacaagtgcaactgcagttgaatagcgcgtgtggagccacaagagtgcgacagatgcatgtgctgtcccaaaatgccactgacgtcccacgttgggcgccagaaactcagtttattgatgtactggcagaggaacacgacgtgggagatgcccaaccagatgaaacaatggaaaacggcgaagaggatcagggatttaactcgcaagtggatcagcattctttgccggctagctttccatgccaaaccatcgagtccaccaggtcggagacgatttggaccatgccatcagcacctcagtcgtcacagcaacagatgccgtttggtctgtatcctgtgccactatcgatgccaaatcagaataactacttccagcagaatcctcaacaatttccttgccaaatggctccttttcagcagcagcaacaacagcagcaaatggctcattgtcagcagattcagtcttgtagagcaccaccgtgtccacccaaaaagccgcctccttgccagcagaaacatcagcagcagcgattatcctgtcaacaacagcagcaacagcccataagatctggtcaaccagcccagtccaataagtgttctcattctccacaattttgtcccagttgttgttgccagcgctatgcgcaaatgagattcatgatgccccgatgttggctgcgctaaagatttcgaaaagttctaggtttgtgggcgtaacttatcttgaacagtcaacacaaatgtttcttcaagctaagataccttacaaataccaatttgaacaggaagttgtgcaattcttccgtttaaaattgaggcgaataaatgaaatgcttcgaataaagtttggattttaaagcctaa

SEQ ID NO: 22863 - protein, 697 aa, DROSOPHILA
MPNDGVKSTRPSPYWRHASPPPRRNIASEQYSNRVGQQLVRALAQSLPSGQEAVRSRSSCPPTPRRRRQASVCRSMGSPEFVPLMSHSKPKASVRLKAGMPVKPVLGGDPPNSKTPGQSMMASAKRRNESPTVKAKSREEEFNKIPELVSEASVAKAREKEFEKIPSGVPSLTEENKQTEVKDTNNSIPETHENLKPETKTNFIIEEEKPTECIPETEPKPSNSKIIPCFRGEYPTRHRPGTCQWFQSDVPNCGNIVTICDEEHQIMGEAEIVTACQVTEAHFLSLDCENDNMNNEPPSISRCNKCTGCPQQQNGNWFGQQRSCPQQQQPCFQQQQPCFQQKPSCLQQKPSCLQQKPSCLQQQPSCFQQQQRNCGRNPPCPNVKPKGCLKCQEQQQSGKAFAYNLQQSMQQQVLPQMQNVYPCQQLQQVNTCDQMEQQMQQQGIEENNYGLTEMLAEELRKQMLEAQAQIAQVQLQLNSACGATRVRQMHVLSQNATDVPRWAPETQFIDVLAEEHDVGDAQPDETMENGEEDQGFNSQVDQHSLPASFPCQTIESTRSETIWTMPSAPQSSQQQMPFGLYPVPLSMPNQNNYFQQNPQQFPCQMAPFQQQQQQQQMAHCQQIQSCRAPPCPPKKPPPCQQKHQQQRLSCQQQQQQPIRSGQPAQSNKCSHSPQFCPSCCCQRYAQMRFMMPRCWLR

SEQ ID NO: 22864 - DNA, 6960 bp, DROSOPHILA
aaccgcagatctctgtgagtgctccacaaaatgtcactcctttcgatgaagggtaccttatagatccgcgggatcagtggatgcccactaagtcaccagcttcagcaccagccgtgcagcatcaatttcaaatgaaggaacaatgtcagccggatcatggatcctatcatcattttcaggaatctgtacatacttcagacccaagttcctctcaggccagaaaccctgactacaatcctcaactaaaagagaacattcgaatgcttccagatggattctatgaacgcaccgtgaataagtataatataacacgcatggattccaacttccagccaccggaattttcactgcagccaaattttgttcacggagaacagcatcctactttcagacaccacgcttgtccttatagcaatcaatatcatcatccgcaactgatgatgacatccgttccagatcccaatcgacgttacattccaccacaaaaccaatacccagccgagatgttttggccacagcaaaatgtacatttggattactatgatcaatcggaataccaaatttaatccaaacagttggaagaatacattaaattaaaattactttaaaaacaaattaaaattgtcgttcttttatttaaagtaaaaatatggtagcagatctataaatatcgaacaaaatctatctttttagaaaatcagtacacaaaaatttcaaaaacacattctaaagcttttttttaaaccatcgtataaaatcaaattaaattaaatttttaacttaactgaagttttattgaaagcgttcgatgttataatttaaatattggttcatttaagtgtatttcaattcaaatatccttcgatttaatggaaaaaaataaaaatttgcaaaacattttttttcgcgctcaaaatggtgatgcaagaagttgatgactatcgaaacgaatcgatagggtaaagcccgcatatcggaacaccgcccagctctattaacttttatcgataaaggaaaacaacatttgtttatatgactaatttactcttacactcattgtttcatacacgcacacgatcggaatccgaatgaatacgaacgcgaccaatacgaaaacaatggccaacattgttgataagataagataactcccgtttccaatgtctttgctgtctttgctctaatgcacatatatcgcgctgcgaatgattcgaatttgttcagcaagtacgccaagaattgtcagtaaacaatggcaactcacgccgaaaaggagttctaccacctggtacgtaagcccaaaggaaagccaagaaaaccgccaagaatacccacagcagattataggcacacggatgttgtcatatcatgtgcatagtgtaaatacctaaatgtttatgcacacaactacaggcgcgccgctcaaatatgcataaacatttcacttaagaagtcagccttgaaccagattatatggaacagctcgaaatatcatcagcttttcacacgacttgcaacaccacagagactacactacatgctaatcccaagtttctccgcttcggatgacccagaaaattagaaactgcaatgaatgctatgcggactacatccactttgatcaattgttcaatgtgcacacaaaggcctttcaaattttttgattatcaacccaaattcggcacgataagaagtgaaatccagtatttagattaccttctgttatcataaattcatatcaaacacatggtgtaggtgtttggaatcttatttttaaaagcatcgaaatgtttgcacttccaaactaaatagtcgatcagtgagtcaccccctttagatcgaattccactaaaaagtataaaactatagatatcgtccgccaaaatccgtccatatcttataagctgagtcagtcacttcttcgaaagtgtacaacaataaaaagccatttaaactataatatttacatttcatttcagaacgtcagcgtgtccaaagctttaaatggcctggaagcgccactcaaaaccaaacatgcccgctccattattattatgatacacaaggccaaagaggccaaaacattctggatgatcatctcccggcagcctttgatgcagagtagatttactgcctggaagttttcgcatctgctgcacaaggtcctgcgagagggtcatgaaagtgccatccgccactcgcagagccacaagaagatgatactggaggtgggaaaaatgtggggcctgctgcaggacgatattggatgctgcatacaggcgtatagtaagctcttggccacaaaattaaacttccacgacaaaaatcgaatgtttcccggcaccctgaacatttcgttcacggaactcttcattgctgtggatagggatttaaattattggtaagtaaaaatagatatatattactttcaaactactgagacagaaccattgattccagttttcaactgtgcgtggaaattttcgactacttggaggatataattgcgctgcaattgacgatattttcatctatggaaaagtacagaatgtcgtcgatgacaccgcagggacaatgtagattagcgccaatagtttgccttatccaggattccaatgcgttgtacgatttaagcgttcggttaatgtttaaactacacgatggtgtaccatacgacgttgtttccggacacagagatcgctttcacggtctgtttttaaagttgaagagtttttacaacaacgtgcgaccgcttcagtatttcaaggacctaataacaatcccggaattgccggactcaagtcctaacttcaagtcccaaaacgatttcaccagttatgtaccgccagtggttcacgttccccaggagcccgatccggttgttgaagaccttgtggataccaacaatcacgagctggaagccttcagtcaagcccagcagcagcttagcatgttggagggtataatcagcgagaaagaggctagcattgaggagctgtcattcaaattggacgcaatgcaaaaaaatttcgacgcactgcagcaaagctacagacacgacgttcaggagttgcaacagaacaatactgtgctgtcaaatgatctggtcttggcgagagaaatgtgtgccacctttcggatgcaaaatgacgatcttgagatgcaactgaatcagaacccaattcttttacgtaattaaatgcttattaaacataatgaagtcatataaaaataccttgtatttcagaaaaagctatggaggaagaagaaaagcacaagttgtcgtcggaaaagtttaataaacttaaaactctatacacaaagattcgagatgagcacattcagctgctgagagaggtatgcagaaacacaatattttctatttcctatactaatattcattcatatacttttatatcagcaaagtgattgcaacaagtccttaaataaagagaaacaagtaaactcacaactattgttggaaactaaggagcttaccaatgaaatttccaaaattaaagtaaacgtagaggaaaaagagaaaacaaacttgattctgcaaaagcaaatcgaagagcacaaggagaaaatagcacatcttgaagcagtcaaaaacgagatgaaggagaaattcgatgatgtggttaaacaaaaggaaattcaggaactcgatattatttccacttccgaaaacctgaggctaaattgcctcaaagtcgaagagcttaatggaaacctcaatgacaccctggaaaaactgtcgaacgccgaaagccaaataaatgcaaagaccgaggatatcgagaaaatgctaaaagcttttgaagcggaaaaggcattgctcttaactcagattgaacaacagagtgttgaaagtaaaagccatagtgaagctcaaaacgctcaattgcaagaaataatggataacttggaacaaaaggataaagagttcaatgaagttaagcttcagctgtccagcgcagaaagccaaatcagcttaaaggcattggaaattcaaaacaatttaaaggcatttgaagcggaaaaatcagtgctattaactaaaatagagcagttaggtatagagcataaaaacaacagcgaagcacaaaatgctcaattgcagctaactttaaacaacttggagcaaaatgagagtgcattacaggtaaatgaaaccaatttaaatcaagaaaattatagaaactgcttttctttcttcagcaaacccaggaaattgtgaatcaattgaggcaggaaaatgcttcagcgggtcagcgtaacgaggatttgcaaagcaaactctcgcttactgaggtaaaactaacccaagcaacacagcaaattgatgccgtgacaagttcgtaccaaatctgtagtaccgatttgagtgaactcagaaaattggtgatcaagactgtaaaggaaatatgcaattcgaagttgagcggatcggaacaacagcctttggatgcggtgccaaacataatacgcgaaatggagaccattttaaataagttcaataacgcatcggctataaactatgttgcttcaaccgaaggactgcaaaatgttatgtatctgggttatgtatttataaaactatacgatcaatgtgatgttatctacaaaacaacaactgcaattgagacaggtcagggtaagttgataacactaaaaacataaccacctacagcaaactaactttgtattacttattttgcagaaattttctcaaaaacaaatttgttatgtaccgatatctgtcaattgttccaatacttattaaataatgaaacaaaagaacccgagagacagaaaacaatcactgatatacaaacaaagctgagagatattgaaaagctgattgagaaaataaaggcatcatttgaacagaagattgatttagataagctgctcgaaatcgagcttcgcgagatggacgctgcgattgatgatgcagcctccaaaattacagatctactggcaaaggctcgagagaaggacaaccaaaccaatttagaggtaaacggaaaaatagtggatgcgtgtaccaccttgatggaatgtgtcaaagctctaatccaaaaatctcgtctcctgcaacacgaaatcgtggcttcccaaaaaggtagctaacaatattttttaattcaatgaagttactgacaagtaattactctttcaggaaatgcgagtgctaatgagttttataggcggaacagtcagtggtcagatggtttgatatccgcctcgaaaagtgtggcgaaggcagccaactatctggtggaagctgcaaacaaggctattgaaagtgaatctggcaagaactttgaactcattgtggctgcccaagaaattgctgcctgcacgacccaaatggttattgcgagcaaagtcaaggctgaacgtaatagtcaaaagctaaccgacctcacaaaagcctcgcgaagcgtaacgcaggcaacaggaactctggtcgccaccgtgaaggattgcaactcccagctggagcagcagagtgaaatagaactttctaagctaacgccatcacagattaaaacgatggaaatggaaattcatgttaaagtactcgaaatcgaacaagctctccaaatgcaacgactaaaactctcatcgtttcgtaaggagcattacaagaatgccgattattaaataccatatttattaatgttactaactttacaaacattcttttttgtattaatgcccgtcatgacaaataatatatctacacaatatttacactgcggtcattttatcctacaatgaatccgtaatatctgtttatagtattccgtgtcgatcgctttttgatccttgatttatatcacaccatagtatgtgggttcattatttcttaaatgtttattttacttactacttgaaattaaaatagcacttattgccaaagaaaataaaatgtaacatttgttgtcaaaaggtttttgtttattatcacgaaccgacctattgcattttataaaacggcatgttcacgttcatcaaagacacttttagcgtagtttatctaaaagaaaaagacaagtatggaatatatgtgataatcatttcaaaatttgtaaaagtaaataaattatatgataaacaaagtctgcgcttcaacaataatagtttattattgaaagataatttctactaatttctgctaagatgatttctacttacgcatcttgatgctgcctcagcacattcctcggaacgacaccgtatcctgggcctggtaatctttggaagattggttgatatctcgatgtagtgactggccgacgccctgctgctcgtggttggcgttgtgccggcattcgttaccactggatggcacgaaagaatctcactaacatgacattcaaacataatggttggattggcgtcgcttagtgaaaagattcgtacgtattctgtagaaaccagcaagcgcaatctagcctccttgtcgctccatagattgggttcatatgaaattatcttctccgaaaagttcttttgattgattaggtacagatattgctgccccttgctttggcgattggaatacaatggcaaaagaccaccaggagcaccagtcacacatctgggtagccttttcctttccggagcgtttctgtgactatctcggcttgtttcacgaacggcactggcagtttccgatgccaggtccaatacaccaatgatcggtttggtgacagtgcctactaagccctttcccaatccactgagaaagccaggaacgccatcggaagtggcaccatcgtaagtgtgtcttacaatactcgttactccgcccagcagtccaaatccgagacccttcagacccgctgcaaggtgaccgccggatgtattggactgcagttccagaatgcgttgcctcgtctcattgtcgtgatcatccagcacaacttttcccaggctatcgga

SEQ ID NO: 22865 - DNA, 3911 bp, DROSOPHILA
tttatcgataaaggaaaacaacatttgtttatatgactaatttactcttacactcattgtttcatacacgcacacgatcggaatccgaatgaatacgaacgcgaccaatacgaaaacaatggccaacattgttgataagataagataactcccgtttccaatgtctttgctgtctttgctctaatgcacatatatcgcgctgcgaatgattcgaatttgttcagcaagtacgccaagaattgtcagtaaacaatggcaactcacgccgaaaaggagttctaccacctgaacgtcagcgtgtccaaagctttaaatggcctggaagcgccactcaaaaccaaacatgcccgctccattattattatgatacacaaggccaaagaggccaaaacattctggatgatcatctcccggcagcctttgatgcagagtagatttactgcctggaagttttcgcatctgctgcacaaggtcctgcgagagggtcatgaaagtgccatccgccactcgcagagccacaagaagatgatactggaggtgggaaaaatgtggggcctgctgcaggacgatattggatgctgcatacaggcgtatagtaagctcttggccacaaaattaaacttccacgacaaaaatcgaatgtttcccggcaccctgaacatttcgttcacggaactcttcattgctgtggatagggatttaaattattgttttcaactgtgcgtggaaattttcgactacttggaggatataattgcgctgcaattgacgatattttcatctatggaaaagtacagaatgtcgtcgatgacaccgcagggacaatgtagattagcgccaatagtttgccttatccaggattccaatgcgttgtacgatttaagcgttcggttaatgtttaaactacacgatggtgtaccatacgacgttgtttccggacacagagatcgctttcacggtctgtttttaaagttgaagagtttttacaacaacgtgcgaccgcttcagtatttcaaggacctaataacaatcccggaattgccggactcaagtcctaacttcaagtcccaaaacgatttcaccagttatgtaccgccagtggttcacgttccccaggagcccgatccggttgttgaagaccttgtggataccaacaatcacgagctggaagccttcagtcaagcccagcagcagcttagcatgttggagggtataatcagcgagaaagaggctagcattgaggagctgtcattcaaattggacgcaatgcaaaaaaatttcgacgcactgcagcaaagctacagacacgacgttcaggagttgcaacagaacaatactgtgctgtcaaatgatctggtcttggcgagagaaatgtgtgccacctttcggatgcaaaatgacgatcttgagatgcaactgaatcagaacccaattcttttacaaaaagctatggaggaagaagaaaagcacaagttgtcgtcggaaaagtttaataaacttaaaactctatacacaaagattcgagatgagcacattcagctgctgagagagcaaagtgattgcaacaagtccttaaataaagagaaacaagtaaactcacaactattgttggaaactaaggagcttaccaatgaaatttccaaaattaaagtaaacgtagaggaaaaagagaaaacaaacttgattctgcaaaagcaaatcgaagagcacaaggagaaaatagcacatcttgaagcagtcaaaaacgagatgaaggagaaattcgatgatgtggttaaacaaaaggaaattcaggaactcgatattatttccacttccgaaaacctgaggctaaattgcctcaaagtcgaagagcttaatggaaacctcaatgacaccctggaaaaactgtcgaacgccgaaagccaaataaatgcaaagaccgaggatatcgagaaaatgctaaaagcttttgaagcggaaaaggcattgctcttaactcagattgaacaacagagtgttgaaagtaaaagccatagtgaagctcaaaacgctcaattgcaagaaataatggataacttggaacaaaaggataaagagttcaatgaagttaagcttcagctgtccagcgcagaaagccaaatcagcttaaaggcattggaaattcaaaacaatttaaaggcatttgaagcggaaaaatcagtgctattaactaaaatagagcagttaggtatagagcataaaaacaacagcgaagcacaaaatgctcaattgcagctaactttaaacaacttggagcaaaatgagagtgcattacagcaaacccaggaaattgtgaatcaattgaggcaggaaaatgcttcagcgggtcagcgtaacgaggatttgcaaagcaaactctcgcttactgaggtaaaactaacccaagcaacacagcaaattgatgccgtgacaagttcgtaccaaatctgtagtaccgatttgagtgaactcagaaaattggtgatcaagactgtaaaggaaatatgcaattcgaagttgagcggatcggaacaacagcctttggatgcggtgccaaacataatacgcgaaatggagaccattttaaataagttcaataacgcatcggctataaactatgttgcttcaaccgaaggactgcaaaatgttatgtatctgggttatgtatttataaaactatacgatcaatgtgatgttatctacaaaacaacaactgcaattgagacaggtcaggaaattttctcaaaaacaaatttgttatgtaccgatatctgtcaattgttccaatacttattaaataatgaaacaaaagaacccgagagacagaaaacaatcactgatatacaaacaaagctgagagatattgaaaagctgattgagaaaataaaggcatcatttgaacagaagattgatttagataagctgctcgaaatcgagcttcgcgagatggacgctgcgattgatgatgcagcctccaaaattacagatctactggcaaaggctcgagagaaggacaaccaaaccaatttagaggtaaacggaaaaatagtggatgcgtgtaccaccttgatggaatgtgtcaaagctctaatccaaaaatctcgtctcctgcaacacgaaatcgtggcttcccaaaaaggaaatgcgagtgctaatgagttttataggcggaacagtcagtggtcagatggtttgatatccgcctcgaaaagtgtggcgaaggcagccaactatctggtggaagctgcaaacaaggctattgaaagtgaatctggcaagaactttgaactcattgtggctgcccaagaaattgctgcctgcacgacccaaatggttattgcgagcaaagtcaaggctgaacgtaatagtcaaaagctaaccgacctcacaaaagcctcgcgaagcgtaacgcaggcaacaggaactctggtcgccaccgtgaaggattgcaactcccagctggagcagcagagtgaaatagaactttctaagctaacgccatcacagattaaaacgatggaaatggaaattcatgttaaagtactcgaaatcgaacaagctctccaaatgcaacgactaaaactctcatcgtttcgtaaggagcattacaagaatgccgattattaaataccatatttattaatgttactaactttacaaacattcttttttgtattaatgcccgtcatgacaaataatatatctacacaatatttacactgcggtcattttatcctacaatgaatccgtaatatctgtttatagtattccgtgtcgatcgctttttgatccttgatttatatcacaccatagtatgtgggttcattatttcttaaatgtttattttacttactacttgaaattaaaatagcacttattgccaaagaaaataaaatgtaacatttgttgtc

SEQ ID NO: 22866 - protein, 1087 aa, DROSOPHILA
MIHKAKEAKTFWMIISRQPLMQSRFTAWKFSHLLHKVLREGHESAIRHSQSHKKMILEVGKMWGLLQDDIGCCIQAYSKLLATKLNFHDKNRMFPGTLNISFTELFIAVDRDLNYCFQLCVEIFDYLEDIIALQLTIFSSMEKYRMSSMTPQGQCRLAPIVCLIQDSNALYDLSVRLMFKLHDGVPYDVVSGHRDRFHGLFLKLKSFYNNVRPLQYFKDLITIPELPDSSPNFKSQNDFTSYVPPVVHVPQEPDPVVEDLVDTNNHELEAFSQAQQQLSMLEGIISEKEASIEELSFKLDAMQKNFDALQQSYRHDVQELQQNNTVLSNDLVLAREMCATFRMQNDDLEMQLNQNPILLQKAMEEEEKHKLSSEKFNKLKTLYTKIRDEHIQLLREQSDCNKSLNKEKQVNSQLLLETKELTNEISKIKVNVEEKEKTNLILQKQIEEHKEKIAHLEAVKNEMKEKFDDVVKQKEIQELDIISTSENLRLNCLKVEELNGNLNDTLEKLSNAESQINAKTEDIEKMLKAFEAEKALLLTQIEQQSVESKSHSEAQNAQLQEIMDNLEQKDKEFNEVKLQLSSAESQISLKALEIQNNLKAFEAEKSVLLTKIEQLGIEHKNNSEAQNAQLQLTLNNLEQNESALQQTQEIVNQLRQENASAGQRNEDLQSKLSLTEVKLTQATQQIDAVTSSYQICSTDLSELRKLVIKTVKEICNSKLSGSEQQPLDAVPNIIREMETILNKFNNASAINYVASTEGLQNVMYLGYVFIKLYDQCDVIYKTTTAIETGQEIFSKTNLLCTDICQLFQYLLNNETKEPERQKTITDIQTKLRDIEKLIEKIKASFEQKIDLDKLLEIELREMDAAIDDAASKITDLLAKAREKDNQTNLEVNGKIVDACTTLMECVKALIQKSRLLQHEIVASQKGNASANEFYRRNSQWSDGLISASKSVAKAANYLVEAANKAIESESGKNFELIVAAQEIAACTTQMVIASKVKAERNSQKLTDLTKASRSVTQATGTLVATVKDCNSQLEQQSEIELSKLTPSQIKTMEMEIHVKVLEIEQALQMQRLKLSSFRKEHYKNADY

SEQ ID NO: 22867 - DNA, 6633 bp, DROSOPHILA
tccagccaccggaattttcactgcagccaaattttgttcacggagaacagcatcctactttcagacaccacgcttgtccttatagcaatcaatatcatcatccgcaactgatgatgacatccgttccagatcccaatcgacgttacattccaccacaaaaccaatacccagccgagatgttttggccacagcaaaatgtacatttggattactatgatcaatcggaataccaaatttaatccaaacagttggaagaatacattaaattaaaattactttaaaaacaaattaaaattgtcgttcttttatttaaagtaaaaatatggtagcagatctataaatatcgaacaaaatctatctttttagaaaatcagtacacaaaaatttcaaaaacacattctaaagcttttttttaaaccatcgtataaaatcaaattaaattaaatttttaacttaactgaagttttattgaaagcgttcgatgttataatttaaatattggttcatttaagtgtatttcaattcaaatatccttcgatttaatggaaaaaaataaaaatttgcaaaacattttttttcgcgctcaaaatggtgatgcaagaagttgatgactatcgaaacgaatcgatagggtaaagcccgcatatcggaacaccgcccagctctattaacttttatcgataaaggaaaacaacatttgtttatatgactaatttactcttacactcattgtttcatacacgcacacgatcggaatccgaatgaatacgaacgcgaccaatacgaaaacaatggccaacattgttgataagataagataactcccgtttccaatgtctttgctgtctttgctctaatgcacatatatcgcgctgcgaatgattcgaatttgttcagcaagtacgccaagaattgtcagtaaacaatggcaactcacgccgaaaaggagttctaccacctggtacgtaagcccaaaggaaagccaagaaaaccgccaagaatacccacagcagattataggcacacggatgttgtcatatcatgtgcatagtgtaaatacctaaatgtttatgcacacaactacaggcgcgccgctcaaatatgcataaacatttcacttaagaagtcagccttgaaccagattatatggaacagctcgaaatatcatcagcttttcacacgacttgcaacaccacagagactacactacatgctaatcccaagtttctccgcttcggatgacccagaaaattagaaactgcaatgaatgctatgcggactacatccactttgatcaattgttcaatgtgcacacaaaggcctttcaaattttttgattatcaacccaaattcggcacgataagaagtgaaatccagtatttagattaccttctgttatcataaattcatatcaaacacatggtgtaggtgtttggaatcttatttttaaaagcatcgaaatgtttgcacttccaaactaaatagtcgatcagtgagtcaccccctttagatcgaattccactaaaaagtataaaactatagatatcgtccgccaaaatccgtccatatcttataagctgagtcagtcacttcttcgaaagtgtacaacaataaaaagccatttaaactataatatttacatttcatttcagaacgtcagcgtgtccaaagctttaaatggcctggaagcgccactcaaaaccaaacatgcccgctccattattattatgatacacaaggccaaagaggccaaaacattctggatgatcatctcccggcagcctttgatgcagagtagatttactgcctggaagttttcgcatctgctgcacaaggtcctgcgagagggtcatgaaagtgccatccgccactcgcagagccacaagaagatgatactggaggtgggaaaaatgtggggcctgctgcaggacgatattggatgctgcatacaggcgtatagtaagctcttggccacaaaattaaacttccacgacaaaaatcgaatgtttcccggcaccctgaacatttcgttcacggaactcttcattgctgtggatagggatttaaattattggtaagtaaaaatagatatatattactttcaaactactgagacagaaccattgattccagttttcaactgtgcgtggaaattttcgactacttggaggatataattgcgctgcaattgacgatattttcatctatggaaaagtacagaatgtcgtcgatgacaccgcagggacaatgtagattagcgccaatagtttgccttatccaggattccaatgcgttgtacgatttaagcgttcggttaatgtttaaactacacgatggtgtaccatacgacgttgtttccggacacagagatcgctttcacggtctgtttttaaagttgaagagtttttacaacaacgtgcgaccgcttcagtatttcaaggacctaataacaatcccggaattgccggactcaagtcctaacttcaagtcccaaaacgatttcaccagttatgtaccgccagtggttcacgttccccaggagcccgatccggttgttgaagaccttgtggataccaacaatcacgagctggaagccttcagtcaagcccagcagcagcttagcatgttggagggtataatcagcgagaaagaggctagcattgaggagctgtcattcaaattggacgcaatgcaaaaaaatttcgacgcactgcagcaaagctacagacacgacgttcaggagttgcaacagaacaatactgtgctgtcaaatgatctggtcttggcgagagaaatgtgtgccacctttcggatgcaaaatgacgatcttgagatgcaactgaatcagaacccaattcttttacgtaattaaatgcttattaaacataatgaagtcatataaaaataccttgtatttcagaaaaagctatggaggaagaagaaaagcacaagttgtcgtcggaaaagtttaataaacttaaaactctatacacaaagattcgagatgagcacattcagctgctgagagaggtatgcagaaacacaatattttctatttcctatactaatattcattcatatacttttatatcagcaaagtgattgcaacaagtccttaaataaagagaaacaagtaaactcacaactattgttggaaactaaggagcttaccaatgaaatttccaaaattaaagtaaacgtagaggaaaaagagaaaacaaacttgattctgcaaaagcaaatcgaagagcacaaggagaaaatagcacatcttgaagcagtcaaaaacgagatgaaggagaaattcgatgatgtggttaaacaaaaggaaattcaggaactcgatattatttccacttccgaaaacctgaggctaaattgcctcaaagtcgaagagcttaatggaaacctcaatgacaccctggaaaaactgtcgaacgccgaaagccaaataaatgcaaagaccgaggatatcgagaaaatgctaaaagcttttgaagcggaaaaggcattgctcttaactcagattgaacaacagagtgttgaaagtaaaagccatagtgaagctcaaaacgctcaattgcaagaaataatggataacttggaacaaaaggataaagagttcaatgaagttaagcttcagctgtccagcgcagaaagccaaatcagcttaaaggcattggaaattcaaaacaatttaaaggcatttgaagcggaaaaatcagtgctattaactaaaatagagcagttaggtatagagcataaaaacaacagcgaagcacaaaatgctcaattgcagctaactttaaacaacttggagcaaaatgagagtgcattacaggtaaatgaaaccaatttaaatcaagaaaattatagaaactgcttttctttcttcagcaaacccaggaaattgtgaatcaattgaggcaggaaaatgcttcagcgggtcagcgtaacgaggatttgcaaagcaaactctcgcttactgaggtaaaactaacccaagcaacacagcaaattgatgccgtgacaagttcgtaccaaatctgtagtaccgatttgagtgaactcagaaaattggtgatcaagactgtaaaggaaatatgcaattcgaagttgagcggatcggaacaacagcctttggatgcggtgccaaacataatacgcgaaatggagaccattttaaataagttcaataacgcatcggctataaactatgttgcttcaaccgaaggactgcaaaatgttatgtatctgggttatgtatttataaaactatacgatcaatgtgatgttatctacaaaacaacaactgcaattgagacaggtcagggtaagttgataacactaaaaacataaccacctacagcaaactaactttgtattacttattttgcagaaattttctcaaaaacaaatttgttatgtaccgatatctgtcaattgttccaatacttattaaataatgaaacaaaagaacccgagagacagaaaacaatcactgatatacaaacaaagctgagagatattgaaaagctgattgagaaaataaaggcatcatttgaacagaagattgatttagataagctgctcgaaatcgagcttcgcgagatggacgctgcgattgatgatgcagcctccaaaattacagatctactggcaaaggctcgagagaaggacaaccaaaccaatttagaggtaaacggaaaaatagtggatgcgtgtaccaccttgatggaatgtgtcaaagctctaatccaaaaatctcgtctcctgcaacacgaaatcgtggcttcccaaaaaggtagctaacaatattttttaattcaatgaagttactgacaagtaattactctttcaggaaatgcgagtgctaatgagttttataggcggaacagtcagtggtcagatggtttgatatccgcctcgaaaagtgtggcgaaggcagccaactatctggtggaagctgcaaacaaggctattgaaagtgaatctggcaagaactttgaactcattgtggctgcccaagaaattgctgcctgcacgacccaaatggttattgcgagcaaagtcaaggctgaacgtaatagtcaaaagctaaccgacctcacaaaagcctcgcgaagcgtaacgcaggcaacaggaactctggtcgccaccgtgaaggattgcaactcccagctggagcagcagagtgaaatagaactttctaagctaacgccatcacagattaaaacgatggaaatggaaattcatgttaaagtactcgaaatcgaacaagctctccaaatgcaacgactaaaactctcatcgtttcgtaaggagcattacaagaatgccgattattaaataccatatttattaatgttactaactttacaaacattcttttttgtattaatgcccgtcatgacaaataatatatctacacaatatttacactgcggtcattttatcctacaatgaatccgtaatatctgtttatagtattccgtgtcgatcgctttttgatccttgatttatatcacaccatagtatgtgggttcattatttcttaaatgtttattttacttactacttgaaattaaaatagcacttattgccaaagaaaataaaatgtaacatttgttgtcaaaaggtttttgtttattatcacgaaccgacctattgcattttataaaacggcatgttcacgttcatcaaagacacttttagcgtagtttatctaaaagaaaaagacaagtatggaatatatgtgataatcatttcaaaatttgtaaaagtaaataaattatatgataaacaaagtctgcgcttcaacaataatagtttattattgaaagataatttctactaatttctgctaagatgatttctacttacgcatcttgatgctgcctcagcacattcctcggaacgacaccgtatcctgggcctggtaatctttggaagattggttgatatctcgatgtagtgactggccgacgccctgctgctcgtggttggcgttgtgccggcattcgttaccactggatggcacgaaagaatctcactaacatgacattcaaacataatggttggattggcgtcgcttagtgaaaagattcgtacgtattctgtagaaaccagcaagcgcaatctagcctccttgtcgctccatagattgggttcatatgaaattatcttctccgaaaagttcttttgattgattaggtacagatattgctgccccttgctttggcgattggaatacaatggcaaaagaccaccaggagcaccagtcacacatctgggtagccttttcctttccggagcgtttctgtgactatctcggcttgtttcacgaacggcactggcagtttccgatgccaggtccaatacaccaatgatcggtttggtgacagtgcctactaagccctttcccaatccactgagaaagccaggaacgccatcggaagtggcaccatcgtaagtgtgtcttacaatactcgttactccgcccagcagtccaaatccgagacccttcagacccgctgcaaggtgaccgccggatgtattggactgcagttccagaatgcgttgcctcgtctcattgtcgtgatcatccagcacaacttttcccaggctatcgga

SEQ ID NO: 22868 - DNA, 4115 bp, DROSOPHILA
atacccacagcagattataggcacacggatgttgtcatatcatgtgcatagtgtaaatacctaaatgtttatgcacacaactacaggcgcgccgctcaaatatgcataaacatttcacttaagaagtcagccttgaaccagattatatggaacagctcgaaatatcatcagcttttcacacgacttgcaacaccacagagactacactacatgctaatcccaagtttctccgcttcggatgacccagaaaattagaaactgcaatgaatgctatgcggactacatccactttgatcaattgttcaatgtgcacacaaaggcctttcaaattttttgattatcaacccaaattcggcacgataagaagtgaaatccagtatttagattaccttctgttatcataaattcatatcaaacacatggtgtaggtgtttggaatcttatttttaaaagcatcgaaatgtttgcacttccaaactaaatagtcgatcaaacgtcagcgtgtccaaagctttaaatggcctggaagcgccactcaaaaccaaacatgcccgctccattattattatgatacacaaggccaaagaggccaaaacattctggatgatcatctcccggcagcctttgatgcagagtagatttactgcctggaagttttcgcatctgctgcacaaggtcctgcgagagggtcatgaaagtgccatccgccactcgcagagccacaagaagatgatactggaggtgggaaaaatgtggggcctgctgcaggacgatattggatgctgcatacaggcgtatagtaagctcttggccacaaaattaaacttccacgacaaaaatcgaatgtttcccggcaccctgaacatttcgttcacggaactcttcattgctgtggatagggatttaaattattgttttcaactgtgcgtggaaattttcgactacttggaggatataattgcgctgcaattgacgatattttcatctatggaaaagtacagaatgtcgtcgatgacaccgcagggacaatgtagattagcgccaatagtttgccttatccaggattccaatgcgttgtacgatttaagcgttcggttaatgtttaaactacacgatggtgtaccatacgacgttgtttccggacacagagatcgctttcacggtctgtttttaaagttgaagagtttttacaacaacgtgcgaccgcttcagtatttcaaggacctaataacaatcccggaattgccggactcaagtcctaacttcaagtcccaaaacgatttcaccagttatgtaccgccagtggttcacgttccccaggagcccgatccggttgttgaagaccttgtggataccaacaatcacgagctggaagccttcagtcaagcccagcagcagcttagcatgttggagggtataatcagcgagaaagaggctagcattgaggagctgtcattcaaattggacgcaatgcaaaaaaatttcgacgcactgcagcaaagctacagacacgacgttcaggagttgcaacagaacaatactgtgctgtcaaatgatctggtcttggcgagagaaatgtgtgccacctttcggatgcaaaatgacgatcttgagatgcaactgaatcagaacccaattcttttacaaaaagctatggaggaagaagaaaagcacaagttgtcgtcggaaaagtttaataaacttaaaactctatacacaaagattcgagatgagcacattcagctgctgagagagcaaagtgattgcaacaagtccttaaataaagagaaacaagtaaactcacaactattgttggaaactaaggagcttaccaatgaaatttccaaaattaaagtaaacgtagaggaaaaagagaaaacaaacttgattctgcaaaagcaaatcgaagagcacaaggagaaaatagcacatcttgaagcagtcaaaaacgagatgaaggagaaattcgatgatgtggttaaacaaaaggaaattcaggaactcgatattatttccacttccgaaaacctgaggctaaattgcctcaaagtcgaagagcttaatggaaacctcaatgacaccctggaaaaactgtcgaacgccgaaagccaaataaatgcaaagaccgaggatatcgagaaaatgctaaaagcttttgaagcggaaaaggcattgctcttaactcagattgaacaacagagtgttgaaagtaaaagccatagtgaagctcaaaacgctcaattgcaagaaataatggataacttggaacaaaaggataaagagttcaatgaagttaagcttcagctgtccagcgcagaaagccaaatcagcttaaaggcattggaaattcaaaacaatttaaaggcatttgaagcggaaaaatcagtgctattaactaaaatagagcagttaggtatagagcataaaaacaacagcgaagcacaaaatgctcaattgcagctaactttaaacaacttggagcaaaatgagagtgcattacagcaaacccaggaaattgtgaatcaattgaggcaggaaaatgcttcagcgggtcagcgtaacgaggatttgcaaagcaaactctcgcttactgaggtaaaactaacccaagcaacacagcaaattgatgccgtgacaagttcgtaccaaatctgtagtaccgatttgagtgaactcagaaaattggtgatcaagactgtaaaggaaatatgcaattcgaagttgagcggatcggaacaacagcctttggatgcggtgccaaacataatacgcgaaatggagaccattttaaataagttcaataacgcatcggctataaactatgttgcttcaaccgaaggactgcaaaatgttatgtatctgggttatgtatttataaaactatacgatcaatgtgatgttatctacaaaacaacaactgcaattgagacaggtcaggaaattttctcaaaaacaaatttgttatgtaccgatatctgtcaattgttccaatacttattaaataatgaaacaaaagaacccgagagacagaaaacaatcactgatatacaaacaaagctgagagatattgaaaagctgattgagaaaataaaggcatcatttgaacagaagattgatttagataagctgctcgaaatcgagcttcgcgagatggacgctgcgattgatgatgcagcctccaaaattacagatctactggcaaaggctcgagagaaggacaaccaaaccaatttagaggtaaacggaaaaatagtggatgcgtgtaccaccttgatggaatgtgtcaaagctctaatccaaaaatctcgtctcctgcaacacgaaatcgtggcttcccaaaaaggaaatgcgagtgctaatgagttttataggcggaacagtcagtggtcagatggtttgatatccgcctcgaaaagtgtggcgaaggcagccaactatctggtggaagctgcaaacaaggctattgaaagtgaatctggcaagaactttgaactcattgtggctgcccaagaaattgctgcctgcacgacccaaatggttattgcgagcaaagtcaaggctgaacgtaatagtcaaaagctaaccgacctcacaaaagcctcgcgaagcgtaacgcaggcaacaggaactctggtcgccaccgtgaaggattgcaactcccagctggagcagcagagtgaaatagaactttctaagctaacgccatcacagattaaaacgatggaaatggaaattcatgttaaagtactcgaaatcgaacaagctctccaaatgcaacgactaaaactctcatcgtttcgtaaggagcattacaagaatgccgattattaaataccatatttattaatgttactaactttacaaacattcttttttgtattaatgcccgtcatgacaaataatatatctacacaatatttacactgcggtcattttatcctacaatgaatccgtaatatctgtttatagtattccgtgtcgatcgctttttgatccttgatttatatcacaccatagtatgtgggttcattatttcttaaatgtttattttacttactacttgaaattaaaatagcacttattgccaaagaaaataaaatgtaacatttgttgtc

SEQ ID NO: 22869 - protein, 1087 aa, DROSOPHILA; identical to SEQ ID NO: 22866

SEQ ID NO: 22870 - DNA, 9579 bp, DROSOPHILA
tgagctaatgtctggtagttagggttttgggtcttagaaagcgatggcttggcttgatttgcatgcccatcacgcgcggatcagttttctcttgggcgcccaaactatgggcacggcactcatttctccgtgcaccagaatgcactgccatgtgggtcacgggcggccgaagttgcttcgcgagggcggcagaggtcccgggaacaaaggaacaacgccgacgccaccggcatgttgtgaatcacttgacttctacttccacttccttctccactcccgctcagcaatgcccgctcccaccgagtggacaaagggcggtgcaggaggagtgtccgatgaactggcgcggcgagatgagcggcaaacaaatcaacaggagcgccgcattcggcatttgatgcactggcaaccaggagtggatggcacgccacgcccagttggcggcggatcgagttcgttgggggactggccgttggccattagcatttggacaagtgaacagcggctactcacgccctttgtatcggccattttaaaaaaaaacacgaaacgaacgaagaaatcaacgtaatgacgaacaaaatagcagggcaactagtgtgaccgcagcgcgcaactggcaaatcctgctgccagtgggaccagttcggcggcaaaacaaaaatgacgaccgtctgaacaagatcaagctggtatttcttttgaaaatctggttgaacgtaaccatatttaataagttatttaattattatggttttatatggtttatattatatcatgactatatttttatgatttcactttattaatcggaaatttaagcccggactatatttacgatttagttcgtagcgtttttgacagtagataacatcttatgtagataccatgtcgaatatctcctggcgccatctattgtgtatcgtaaggtatattttgattgaatcgttttccaattcgcgcgtacacatttgaaattgtttacacattggtggcttttataacttgtagtctttatttttaaaacaatacacatattaatattggatgcacttaaattcacaatacatatctatataatccacaatcatagccgctctaatcaaaacacagatcattggatctcaagcgaatcgtgccgagccttagccttaggactccggactggggcttctgggctctgccgtatccccaccggggatctgctcccactttccgatacgccttagtgcataaacacatacatatatcatatctgcacggctctatacacatatatatgaattgtttcgcatgctgattggtttcaactttgggtttttcgctgtaatgtgtgattcgttaacagaacatcgactagaagacgggtagaattgagaggagacgcatgcaaatcaggattcgaacagcgacatatcgcggggtagcatcgaaattgcgtcactgccatccatccctatccctatcccattctaggtgattagccgcggagcgtgcagtccatggacattctcgatgggcgggcagtgggtggcgccgggtggcccccagtcgtgcaggccgcgggaattcgccagacgatgggtcagccggtgggcgatgctgaagccgccactgccctctagttgggtgagaacgatgattacttgtctgaaagcgttaagcacacgttaagcaattagttgggggaatattttaggtggtcgattgggagcccacctctgcagcgggggcacagagtccactgtcttgagttcgccgcgtgtcgacaccacattgtagctctcctggcaatcacatttcacatggatccacttattctcatgtctattttccaccatcacaaccagacccgcccagccctgtaaaggaaatgcggtcgagttagtaaggccaccgaatccctagatcccttcgcaaccggatcacttgccttggtcagatagtaggcggtcatcccctcgcgcccctcgtgccgctgtcccttggttagggtcaggctaatgatagcgtcggccaggagatgcggcgagggacttatctgctccaccagcagacgcttggagctgtgtatcgctaggatgcattgaggatactggtggggatcctcgatgcccgtgtgccaatggttgaaggccagacacacaagcaggtaaatgtcccgctccagcatcttgtggcatcccacaaagcctcgcacctaaatggaacgcaattgttagaagcgtttctatttgcagggctatgggaagcacccacctgacgcttgctgtgctccactaatcgaccgatttccggcgccgccggagaccgggtgcggaatatcacaacgcacaggtccagctgcgatcgctgcgacttctccgagttgcgctgcccctcctggaatagggtaaactccgcctccgtcggctccagcacggtgagcagcacacaggagatggagcacaggggctgcaatgtcccctgcagacgcacctcgttccagccggagcgcaccttgcagatatcgatgcagtcgaagtagttaagcacatcctcgaacgagatccagaagacgccctcgctggcgccgtgcggcatcagagcatcccgaagatcgtccgtccacagcgaggagtcatccgaccaatcgccacgccacgaatagtgaccccacggattgcgtagcttgagcaggcgatgtccctggatgtccttcacgtccagcaccgagtaggcgtgtcgcgggcgcagccccttctgctggtactcctcctcgtccacctttggttgatgttgataattgagcataagcatatgaaatagaagaagactttgtaataacgcagaacccaccttcatgttgccaccgccacagctggcgcccatgaggaatcgtacgcatcgagagctcagcagctgggcccatatcaggtccttgtccagttcgtcctcgctgggcatgggcaagctactggcctgtagtggaatgctctcgcaaggcgctcctgtcagcgtggccagtccctcgatcgcccggcccgagaccagcgcctcgtagcagccgtggatcttggccacagccttctcgatcagcggcacccatagctgcttgcgcttggcctgcgaataaaccagatggccacgcttgtcgcatggcagcagatcatccaccagcaccgtcgtccacttgccgtctttgcagaggcgcacctggtatgcgccctggccacatatctccttcgtgaccagcacctccttgaccagatcttcgcgctccgccagcaccgccagcgcactgagtagccagcagttgcccaagacgccctggcagatgtccgagggcagcggggtgcggaacacagcccacggtggatacgctccgccgtcgcagttaatctcgtgcggccgtcgccactgcaccacaggatttccctcgcctgctccgctcgccggattgtagtacagactcttcggcgccggcggaaacgaatcgtccacgaaaagctcgctattgtcgcgacagtactgtatgatgttttgccacttggtcaacgcttcggtctcctccagctggcgaaggttctccatcagcttgctctcctgccgaatatctgccggtgtgagggcaactcgaacggactttctgcccaacgcctcgcccaaaactgcgctcgccaggccgcgcggactcgagcagatgtcacaaacgacggaagcggcacagttatcgtacgtgcacgcgggacactgccacttctttgtgctggtactggctccgacagctccagctccagatccagctccagaagcagacactaccgatgcggagccgactccctggccctgctgcaaattgtaattggccagaccagcgatggaaatgttccgtggcacaatggagccgccggtgctgtgacgtttaggtatagcgcccgatgagctggagttcctctgctgctggagtgatggcagcagctgcatcctgggcgagggactgcgtgagccgcgcagaccagccgctgttgacgttggaagctgcagcatgggcatgggcaacgccaccgaagttagcggtaggttcaaggctgtaggcgccttgacctcattggcgcccgattggtgggcactgcctcctccgcccccgacggctgcagcatcctgctcctcgtacgactgaccatccggtcgctcccgtaccgcctccatggccatcgagagctgcggctggcggtgggacttgcaggcactgcagaccggcgagtgcagcgagttcttgagcgtacagtggctgcaggtccagaactcgccctttcgcaacgtcatgtcctcgatggaagagatgcttttcagcttggagccgccgcacaccacgcaggccattgctgtcgagtagttaaccagggtgcacttcttgcaggtccatggctcgtcgcggggtgcttctggaatgcattaggtatttgatatagcacaagcattacattatttcctgaaaactgatgacacacctgcctgttgctgctgcaaggtggtggtggtggtggtggtgctgctgctgctgctgctgctgctgttgcagctgcaactgctgttgctgctgttcggctttggcctcgcacatctcgcaagtctggagccagagtcggttgtaggcataggaacatttgatgcatatccacatcttactgcggctgccgttgccaagctgtgtcttattgtcgtgccgcgaggcagcagctgctcctacggctgcagctatagctccagctgacgcggtccctgctgctgcggatgcggctcctgataggcggctgctgctccctggatcatgcatactgcaaatcgaaagcaagaccatcaattgtaatgcagtcaagttcaaaattgattcaacacgggagataggcgaaatcaaaatgtaattaaattgaacacttgaaccacagattgtcatagccgagatcagcacgattgcgaatgaattaattacctcaaccaagttgtgacaatcttgtggcaagccaatcattaatttaaatcatgcccataaacaatttgcttaaataatacaactgaacttatagcgggcagaataaaaataaaagctggtggacgggcgaaatacaaacagaaggccgcagtgactaagcgccacgcaaattatcagcaaaaataaaaacgtagccaactgataagcttctgcgggggataggaagttggatgggtgtggactaatctcggtcgcacgctagctgccaattacattttcgactcggtcgccttgcgcggtcccttccacactttggcgtagatggagtgctcctccacctgcgactcggattcgctggcctcgccgctgccatcggtgctagtgcctagtccggcggtaagggattcactgaccgcatccgcgatctcgccactgccagtgttgttgttcgtttgcgattcgctggcaatctgttgcttcttcttgagcttgtgctgcttgttcacctgcgcatagatgggcatggtagccgttggagctggttcggccatagccttagctgatggcgaactcgcaatggccaccgccgtcgcggctgcctgtgccgcctgcgcagcagctgctcttagttgctgctgggccagggccacgcattcgttctcatacaacttgttgctgccgctggagctgctgctgttgttgttgatgatgttgctgttaccgctgctattgctattgctgttgctgtgatggtgatgatgatggttggagctagaggagacggaggagctgctggccattggctccgaccactcgttgacggctatgaagacgccgttccgcggaatggtgaactgcgtgggattcatactcactgctgctggctcccgctgggttttccgctgcagctgctgcggattagccggtgacttctgctgcggctcctgctgtagattcagatttagattaacgacctgacgcagtggcttcatttggccatggccggcatccttggccgccgaccgagagagcgtggtgatggtaaagttgtacttccgcttggcaccgctctcgcgaaccaccttgtgattctggttcttgttattgttgttctgtttgcgcctgcaaaaagtgtcgttggcgatggcaaaacgggagttgctgcaggcggccacggggggaatccctgcgagaaacacatagggattagaattggattatcggataacaagtgcgtgcattccggttatgggaagctaacactttcatcatgatctgactaagattaagaactttacaaaaagagaatagactttaaataattcggttgtccatttaaagagtttcttctagtaaaaatttggaaacgataggctggccaataagaataccttatagttatttcctcaagtaacctttaacctttcattagttcgttagctgatgaacgcacctgtcagctgcggcgccggcttgatctgcggcagattgaagatgtccttgctctggttgttcgcatagcaaatgtggcagctgcgcccggaagcgctcttgtcgatagcggtgctcaggctctgggtgcggcgcagtccagaacccgagcccggtccggatcccgatccggatgcagatctacctttgaggtggcgcttatgcaagtgctgggaatgtaactgatgctgatgctgctcctccagttcctggtggaggtagtggtgatgatgatgtggatgtgaatggtccgccgccagcagctcgccgcgattgcccaggctgccagccagatcctggcctcggtcggcggcgatggcgtccttgtaaatgggcgccagatagctgaccgtgtcgcagatgaggcagtgccaggtgaccgagctgttgtccgtgccgcaggcgtggcacacccaccgccgattcagggccggattcgagaagtggcggtacagctcaatagagctcttgatgtacttgcgcgtgtcctcgcaatccacgcagttggcgggcagattctggctgttccgctgtggtcttttcaagcatccgcgcagcagggacttgtacacatgcttgtactcgctcctgcaaaatagggaaatggggtttttcgtttttcgtcgggtttggatgggattcggtgttcttgagctgtttgggctttccccacttcctgaccgcaaaggttatctcaatgactggccattttcctactctccgctcgtccgctcgactcggaagttgttcctacacctcttttgctcttcagatcgccgagcgagttcgcgaatcgataaacttgtaaacaatgcttctttatccaaatcgattttccccaattctcgctgctcctcggctgttttgttgttgcttctgcctctgctgtgtatacatgctctcacatacacacactcgcgcacacacacacacacacacacacacacgctcagggacaatcaccagtgccgacggcttggcttttaaagctagacttttgaactgtgtacttgtacacactgtaccttttcctagcctttcgaaacttaagttcgtaatataaaaatctttcaacttattcctatactcccattcgagttattcctatggatagttaatcaggattttcctaaccgatttcattgttttcttattctttaagtttcattatgcacaaaagggttagtgagaactataaaatttactaagatttactcggtctgctctttggatattaaagttcagcataggagcttacgttggtaagcttttggtattattattctttgaaagttaaggtttttgattgacgaattttaccgatgaaagtatgtacatatttgtgtatttgtatattttccaaagtgtgcatacaatgtgtgtgcgaaaaaagttggatttgaaaacgccaccgatttctatacacattaccatatgcgacatgattttagctagcgcttttgtcctccaattggatgccaccactggcgcccacatacacacacacacacacgcatacagacacagacacacacaggcacatcctcgcagaggaggcatacaggctgtttgtttttgtggcgaccgcttcgcttacctggcaaccgccgccctgcccttctccttgtccctctcctgccccttctccgcctgctcctgctccagtgcatcatcagctgtccaggaggcggtgatgctgctgctgcgatgctgctgctgctgttgttgggggaacaccttgcggacggtgccgcaattgaagcacttgagcgactccgtgggattgatagtgttacatttggtgcacgaccactgcagcacggatgagatggtgcccattgcgcgggggagtcgcaggagttcccagattcctttcgacttctgagttgtttctcttgctgttgttgtttttgttgttgttggctggctggcgggggagtggatgtggaactgggactgtctatggaaactatgatgtgtaggtgcgctttcgagctggtggccgggcggagatggagatcaataggaggaccagaacccgggaccaaaacgaggaccaagcagtggcttccaacagttgcacgccgcgttctccgtcgccgtttcacaccattttttaactgttgccgctagggttgtcgacgttcgcgaacacctccaacgacaaggttgcccgagtgcgtgaactctgccggacagggttgccagcgcgagaaacacggctgctaccccgcaaagccagtgttggcaagtgccgttaatgaaaaatcggtaccttcaatttttagaccaattctaatatgtttttgggaatgaatacatacatatattcataaaacgacgcaaatacatgcataaaattatttgaccttctataacaagtaatcaacattgaggagcttagtttaggaagagtttaaatttaatatttagacatggattattattttttagccgctttcaaatggaaagtcaaattgaactgaacgcattaacttgagttaaattttaaacaaatagaagcacttcattgatacttactgtatgtggaacgaaaataccagattttggtatttacacagcttgggtatactgcaacaatctggtcactctgcatcagcagcacgtgtagttcgcttttttggcaaaaacatttgctgttatttagttgtagtgtccaagaaaacgcagcaaagatggttagctcggagccgaaaggacctgctaacgtggccaacacggcctcgcccctcaaggcccatgaatcgtccggcaagcgcgccaacggacagaagtttaagcccggtggagcaggaggcgccaggaagttcgacaaattcggcggaggagcaggcaagtcgtttgtaaagccaggcgctggtggtgccaagaagttcgacaagtctgggcccggtggcttcaagaagtttgacaaatccggagccaccggcgacaagaggcttggtggcaacaagttccgcggaaaaccacaaacacagccacaggcgccggcggagggcgagaaacaggactggaacaagttcaagaaggagaagaaggacctcaagctgaagcgcaagagtgccaaggacacctacgagatcagcaaggag

SEQ ID NO: 22871 - DNA, 5317 bp, DROSOPHILA
atggtgtgaaacggcgacggagaacgcggcgtgcaactgttggaagccactgcttggtcctcgttttggtcccgggttctggtcctcctattgatctccatctccgcccggccaccagctcgaaagcgcacctacacatcatagtttccatagacagtcccagttccacatccactcccccgccagccagccaacaacaacaaaaacaacaacagcaagagaaacaactcagaagtcgaaaggaatctgggaactcctgcgactcccccgcgcaatgggcaccatctcatccgtgctgcagtggtcgtgcaccaaatgtaacactatcaatcccacggagtcgctcaagtgcttcaattgcggcaccgtccgcaaggtgttcccccaacaacagcagcagcagcatcgcagcagcagcatcaccgcctcctggacagctgatgatgcactggagcaggagcaggcggagaaggggcaggagagggacaaggagaagggcagggcggcggttgccaggagcgagtacaagcatgtgtacaagtccctgctgcgcggatgcttgaaaagaccacagcggaacagccagaatctgcccgccaactgcgtggattgcgaggacacgcgcaagtacatcaagagctctattgagctgtaccgccacttctcgaatccggccctgaatcggcggtgggtgtgccacgcctgcggcacggacaacagctcggtcacctggcactgcctcatctgcgacacggtcagctatctggcgcccatttacaaggacgccatcgccgccgaccgaggccaggatctggctggcagcctgggcaatcgcggcgagctgctggcggcggaccattcacatccacatcatcatcaccactacctccaccaggaactggaggagcagcatcagcatcaggattccccccgtggccgcctgcagcaactcccgttttgccatcgccaacgacactttttgcaggcgcaaacagaacaacaataacaagaaccagaatcacaaggtggttcgcgagagcggtgccaagcggaagtacaactttaccatcaccacgctctctcggtcggcggccaaggatgccggccatggccaaatgaagccactgcgtcaggtcgttaatctaaatctgaatctacagcaggagccgcagcagaagtcaccggctaatccgcagcagctgcagcggaaaacccagcgggagccagcagcagtgagtatgaatcccacgcagttcaccattccgcggaacggcgtcttcatagccgtcaacgagtggtcggagccaatggccagcagctcctccgtctcctctagctccaaccatcatcatcaccatcacagcaacagcaatagcaatagcagcggtaacagcaacatcatcaacaacaacagcagcagctccagcggcagcaacaagttgtatgagaacgaatgcgtggccctggcccagcagcaactaagagcagctgctgcgcaggcggcacaggcagccgcgacggcggtggccattgcgagttcgccatcagctaaggctatggccgaaccagctccaacggctaccatgcccatctatgcgcaggtgaacaagcagcacaagctcaagaagaagcaacagattgccagcgaatcgcaaacgaacaacaacactggcagtggcgagatcgcggatgcggtcagtgaatcccttaccgccggactaggcactagcaccgatggcagcggcgaggccagcgaatccgagtcgcaggtggaggagcactccatctacgccaaagtgtggaagggaccgcgcaaggcgaccgagtcgaaaattatgcatgatccagggagcagcagccgcctatcaggagccgcatccgcagcagcagggaccgcgtcagctggagctatagctgcagccgtaggagcagctgctgcctcgcggcacgacaataagacacagcttggcaacggcagccgcagtaagatgtggatatgcatcaaatgttcctatgcctacaaccgactctggctccagacttgcgagatgtgcgaggccaaagccgaacagcagcaacagcagttgcagctgcaacagcagcagcagcagcagcagcagcaccaccaccaccaccaccaccttgcagcagcaacaggcagaagcaccccgcgacgagccatggacctgcaagaagtgcaccctggttaactactcgacagcaatggcctgcgtggtgtgcggcggctccaagctgaaaagcatctcttccatcgaggacatgacgttgcgaaagggcgagttctggacctgcagccactgtacgctcaagaactcgctgcactcgccggtctgcagtgcctgcaagtcccaccgccagccgcagctctcgatggccatggaggcggtacgggagcgaccggatggtcagtcgtacgaggagcaggatgctgcagccgtcgggggcggaggaggcagtgcccaccaatcgggcgccaatgaggtcaaggcgcctacagccttgaacctaccgctaacttcggtggcgttgcccatgcccatgctgcagcttccaacgtcaacagcggctggtctgcgcggctcacgcagtccctcgcccaggatgcagctgctgccatcactccagcagcagaggaactccagctcatcgggcgctatacctaaacgtcacagcaccggcggctccattgtgccacggaacatttccatcgctggtctggccaattacaatttgcagcagggccagggagtcggctccgcatcggtagtgtctgcttctggagctggatctggagctggagctgtcggagccagtaccagcacaaagaagtggcagtgtcccgcgtgcacgtacgataactgtgccgcttccgtcgtttgtgacatctgctcgagtccgcgcggcctggcgagcgcagttttgggcgaggcgttgggcagaaagtccgttcgagttgccctcacaccggcagatattcggcaggagagcaagctgatggagaaccttcgccagctggaggagaccgaagcgttgaccaagtggcaaaacatcatacagtactgtcgcgacaatagcgagcttttcgtggacgattcgtttccgccggcgccgaagagtctgtactacaatccggcgagcggagcaggcgagggaaatcctgtggtgcagtggcgacggccgcacgagattaactgcgacggcggagcgtatccaccgtgggctgtgttccgcaccccgctgccctcggacatctgccagggcgtcttgggcaactgctggctactcagtgcgctggcggtgctggcggagcgcgaagatctggtcaaggaggtgctggtcacgaaggagatatgtggccagggcgcataccaggtgcgcctctgcaaagacggcaagtggacgacggtgctggtggatgatctgctgccatgcgacaagcgtggccatctggtttattcgcaggccaagcgcaagcagctatgggtgccgctgatcgagaaggctgtggccaagatccacggctgctacgaggcgctggtctcgggccgggcgatcgagggactggccacgctgacaggagcgccttgcgagagcattccactacaggccagtagcttgcccatgcccagcgaggacgaactggacaaggacctgatatgggcccagctgctgagctctcgatgcgtacgattcctcatgggcgccagctgtggcggtggcaacatgaaggtggacgaggaggagtaccagcagaaggggctgcgcccgcgacacgcctactcggtgctggacgtgaaggacatccagggacatcgcctgctcaagctacgcaatccgtggggtcactattcgtggcgtggcgattggtcggatgactcctcgctgtggacggacgatcttcgggatgctctgatgccgcacggcgccagcgagggcgtcttctggatctcgttcgaggatgtgcttaactacttcgactgcatcgatatctgcaaggtgcgctccggctggaacgaggtgcgtctgcaggggacattgcagcccctgtgctccatctcctgtgtgctgctcaccgtgctggagccgacggaggcggagtttaccctattccaggaggggcagcgcaactcggagaagtcgcagcgatcgcagctggacctgtgcgttgtgatattccgcacccggtctccggcggcgccggaaatcggtcgattagtggagcacagcaagcgtcaggtgcgaggctttgtgggatgccacaagatgctggagcgggacatttacctgcttgtgtgtctggccttcaaccattggcacacgggcatcgaggatccccaccagtatcctcaatgcatcctagcgatacacagctccaagcgtctgctggtggagcagataagtccctcgccgcatctcctggccgacgctatcattagcctgaccctaaccaagggacagcggcacgaggggcgcgaggggatgaccgcctactatctgaccaagggctgggcgggtctggttgtgatggtggaaaatagacatgagaataagtggatccatgtgaaatgtgattgccaggagagctacaatgtggtgtcgacacgcggcgaactcaagacagtggactctgtgcccccgctgcagagacaagtaatcatcgttctcacccaactagagggcagtggcggcttcagcatcgcccaccggctgacccatcgtctggcgaattcccgcggcctgcacgactgggggccacccggcgccacccactgcccgcccatcgagaatgtccatggactgcacgctccgcggctaatcacctagaatgggatagggatagggatggatggcagtgacgcaatttcgatgctaccccgcgatatgtcgctgttcgaatcctgatttgcatgcgtctcctctcaattctacccgtcttctagtcgatgttctgttaacgaatcacacattacagcgaaaaacccaaagttgaaaccaatcagcatgcgaaacaattcatatatatgtgtatagagccgtgcagatatgatatatgtatgtgtttatgcactaaggcgtatcggaaagtgggagcagatccccggtggggatacggcagagcccagaagccccagtccggagtcctaaggctaaggctcggcacgattcgcttgagatccaatgatctgtgttttgattagagcggctatgattgtggattatatagatatgtattgtgaatttaagtgcatccaatattaatatgtgtattgttttaaaaataaagactacaagttat

SEQ ID NO: 22872 - protein, 243 aa, DROSOPHILA
MGTISSVLQWSCTKCNTINPTESLKCFNCGTVRKVFPQQQQQQHRSSSITASWTADDALEQEQAEKGQERDKEKGRAAVARSEYKHVYKSLLRGCLKRPQRNSQNLPANCVDCEDTRKYIKSSIELYRHFSNPALNRRWVCHACGTDNSSVTWHCLICDTVSYLAPIYKDAIAADRGQDLAGSLGNRGELLAADHSHPHHHHHYLHQELEEQHQHQDSPRGRLQQLPFCHRQRHFLQAQTEQQ

SEQ ID NO: 22873 - DNA, 2989 bp, DROSOPHILA
aaaaagtaagagcctcgtccatttactcatctgttgtcctcacactatctttagtgcaaccgcaaaggccacaaaaacatgacagtacgcacaggaaaacaagcattgcaaatgacttcacaactgaaatggaaaaaaaaaaatgcaaaatacggacagtccgtatgcggtttcgttgtgccaagttaaaatatttgcatttgcggtctagtctttttgcattttcaaccaccaaataatcccttcagactctgtttgtgggctctatgtgtatataatttttttaggctgcaataaggctccgagttcattcttgcactcgttttactttaaagttttggccatagtgtatactgagataaggagtaataagtagagaagggtatagcattggaaaaacggatactagagggaggtgagggcgcagagtaaaggattatgtgggaagtggagggcgttgcgcatccggcaaaacagaaagagcaaaacttttactacaagcgcgtaaacactgcaatttctgcacgaggggtagtctaagagcattaaggggaggcaatccggaagttgcgaatggaatggaaacaggattctgcgcatatgctgtcctacgaatgcgtaaattatgaatatatcattcaaattaaaatgtaaagttagaataaacaataataacagcgaaatatgtgtggaatttatatgatattctgcgtcatgcaccacaatgcgcattatataataattgttattataacacctgcataaggcctatttttctatttcgaaagaatgattattcttatgatgaagaacgttcaaaatattacgcgccaagcttgaatccaagttctccaccccggtttgaggacgcactaaaatgtataatattcctgcgggatatttctggaactttcacaatcgatattcgctgcgtagacatcgatgctgccgccatcgagttatgttccatccctacgtgcaacggtcactcttatttcatcaaacgaaacggacgtgtttctgcagactatttacattacaaaattgtttgtaacagatagtgagccgtgtatacataacgaggtgaagcagacgatgcactaatgtaaaggcgcagtgccagagcaactttttggcgtgttccccgcgtggaactgcatttttttttgtttccttcctcagttttgtgtgtggagtgcgagcgagagagcgtgctagcgagcaggagcagaacggtaagtactggcggccagacagagacagagagagcgcaaaaaaagagcgaacggcaaaaagtcaaaacggtaaaaaaacataaaccaacgcctcgccttttcggggaaaagtattacctgaaaatctgaaaaaggttaaaaacctacaaaaagtccccttgccattagtgtcaaattacgaattggcacttggctgcccatttctcattctcaatccggggctgaggctgctcagctggacaaggagagggaataaattcgtagcaggcgctgctttggtgttcatattcatcatattgtaattttgattcctcgcaattgcaaaatttaagcatacgttttaacttcctctaacgcctttaattacagaacaaattaccgtgaaattttagcactagccgtacgttattttgtatatttgtacgcatgtacgtgtacgtgcccctcgtccgtctgcacaaatgcagatgtgcatgtgcatcacagtgaattggagtatttttatacatggaatatctgagctattgtagtattccggatagagccaacaaccacaaagacgaggagtttccacgagaaataggaaaaaggaacggaggagcaaataagcagcagcaggaggaggcgtagagcttgaccaggtgtcaagggaagccggataggcttaaaggcaggtctaccttaggaactaagaaataggataaatcgaatacccttataatcatcacatctaccaatcgaagcacaggaagcggtaagtttcgaaatctgacttacaacttactcccattctagtatttgcttgctttttcacgcaatttacattaattgtttgtttattagtttaataacacactactactactataacacactgcctccagtacgaatgcactcccaataagcgatcgcgatcccatttagagcagcacccacacactccaactggttttgtttacaaacaaacatgaaacaagtgagcctatctgccagccaggttttcgttttcctcgccatggagtgaaaagagccatgcacgtacttcgtctgctggaaaactggttttcttctggcttgaaggtgcttggccgcaaactgcagcggagttggtttttctaggccagcagagagctccaaagagaacaccacagtgaatattggccaatgtttgtcttcatattcttatcaatcagcattgaacgcttgcttagcaaaacaacaatgaaattccgtttggtagtattataactaaaagaaatcatatcgtaaacagttttaagtgatctagttcttgcggtctccactgtgccgatggaagtgctgacggaatgccaaactggttgtagccataaagacgacagcagcccatagctcacctcctacgctcgctggcagctgcttctttgtggctgcctttgttttgttccgctttaaggccagtactgactaatagcgccacttgttaccgtgtgtcacctatgtacaagtatttaggctgcgcaagtgactagtccattgataaaaccggcgcgataaggtgtcgagccatcttcgaaagcattttggatgtatacacgccccgcgagtgacatcatacaccacattccaattaaagagctcaattgattgaaatattaaagaataaagaaaagggtaaaagagggagtgcatttgtaaaatagcccttagtcataagatgtaaacacataatttgcatgatcatttttggttgcttttgcacacgtttgatttaa

SEQ ID NO: 22874 - DNA, 620 bp, DROSOPHILA
caaacgaaacggacgtgtttctgcagactatttacattacaaaattgtttgtaacagatagtgagccgtgtatacataacgaggtgaagcagacgatgcactaatgtaaaggcgcagtgccagagcaactttttggcgtgttccccgcgtggaactgcatttttttttgtttccttcctcagttttgtgtgtggagtgcgagcgagagagcgtgctagcgagcaggagcagaacgaacaaattaccgtgaaattttagcactagccgtacgttattttgtatatttgtacgcatgtacgtgtacgtgcccctcgtccgtctgcacaaatgcagatgtgcatgtgcatcacagtgaattggagtatttttatacatggaatatctgagctattgtagtattccggatagagccaacaaccacaaagacgaggagtttccacgagaaataggaaaaaggaacggaggagcaaataagcagcagcaggaggaggcgtagagcttgaccaggtgtcaagggaagccggataggcttaaaggcaggtctaccttaggaactaagaaataggataaatcgaatacccttataatcatcacatctaccaatcgaagcacaggaagcg

SEQ ID NO: 22875 - protein, 40 aa, DROSOPHILA
MEYLSYCSIPDRANNHKDEEFPREIGKRNGGANKQQQEEA

SEQ ID NO: 22876 - DNA, 2681 bp, DROSOPHILA
cttacattcatagatacacagcgagaaaattgtattacttacagataattctttaaaatatttaatagtatttgatatttaatagtatagtatttaaaatttaatagtatttaatatttggttagtttcttcactggaatatatttgaaccttaagatttctcaggaggaaggatttttataccaaggattttttaatttcctctgtgtaaaacacacttggctacctgttgcacacacacacacacacacaaattctagtaatggccgtccgcaaattgacccataaaattgtaacgttgcttgagccaagatagtttagctgtccatatatcactgcagatacacgacactggcctacaaaagaacactttgataattccccccgatgtgcagtgttgagatggtaacgttttgtgcttagccgactaagatgatcttcttaatatagaaaaactaaacttcaaatctaccacttctcactggcctgttaaccagtgctatttggttgagaagtctggaactcagtgaatcggcagttgtatccgcgaacgcataaataaccatccgtggctatatgttcgctgttgtccagtggtacaccttcatcgtgtcgatcgaggtggcgatcagattcttcgatttgcatgccaaacagccgggaacatcgctagcttactacgagtatatgcatccgaggcatgcgattcgatttgatatccgatcgccggcggcgatggccacaaggttatcccctcccacggatcatggacatcattagctcattcgtcacgatcgcaatgggtcctagaaccaacgatggagtactcgtaagtgagaatccatgggtcatttggagaattgcccagatccagcaatcgcaacaataatcattcaatccacaatgagcccatgaaaagtttggcattttcatacaggttcttctctttgggaaattgcttgttgtataaatcagctctttaggaaactcttttgaatttgtgattatataactgtgtaatttttatttggaaaataccttgttatatccatacaacaaaaatattagacaaatcataatggataaaacttttgatagccgttttaaacaaaattatgcattggaaatattttattttgtttgatcctttaatcactttaggttcaccttgatttcgaaggtcttgtaggtgtattcctggatgactttcagattcttaataatgaactccttgatggcctgcacgtaatcggcggcggccaggatgagcttcttaaaggcatcgatcaccttgccctcgccctccagacgacccttgaacttctcctccgacacctgggcaatgaatccccgcagtcccagtgcattggcctggaccagtgcaaacagctcgaaagcatccttgggcaccctgccacgcacctcaaagtcacagcacaagatctcctccttttggcctgccatctcgagtaagattgaatttgccaaaaaaaaaaaaaaaaaaaaaaacagggtgtacaatatgtagtttcgaaggtcacacaaccactcgattgacttgatggcaaagtctcggcgctctgtgaccctgactttgaacctccagatccgatcgtaattgcctccaattatcgtgtatccataatcgccacaagaaatcagcggcagcaggttacatttccagcaaaaaacaaaacaaaacaaacaaaccctcttgtaaacttagcgcaagtttttagttaaacaacaaaagaaaaaaatgtgtaaatagcaacataaaaacaaaaaaggggatagagagaaacatacaaagtataaacaaaagtaaatatataaatcacaaggcggtttcaagtctttggcgttttgtatgtgcatccgaatctttgtatcttagtatctttgtatcttagtatctttgtagctttgtatctttgtatctcagcggctccgtatctctatgctttgcatctctcttagcaggcccatcctaaaagcgatctatctcgactttatttttcctcgactcctccgccaaaacgggcacctcctgccgtctgcacatatttatgtacattttttcacagagttgtcatgcggatgataaaaataaaaaaaaaataattacaaattatataaattgcttaattatgataagcttgtggcacgacaacaacacagcagcagaacgaagaaaagttggcaacgggcaaaagcaacgaatgggggcaatactctttaatagatgcaacatatacgcgcagcactctcaattttttatatgcaaaatttgacaagtcaaagaaatatcttttaaatgcgcatgcgacatgcatataagttaagtatttatgttgtaagcttcttattgaaaacttctagttaaataaacaaagggtttatctggtgttaattgaagcgctaatccctgattcttagaagtttacaaccatggattggcaaagcgaaggagttgaccaccatttaatggtgggtcgcagttggaatttgaatttgaatgcgaattggaaacacagtccattgggatttttgcaacagttgccggcacgtgacgtcaggaccgtgagtttattcattttttcgttttcccagaaacttagccctctggcaattatggcccattatcccggcagcggaatggcaattatggtgatgtaaga

SEQ ID NO: 22877 - DNA, 681 bp, DROSOPHILA
gaaatgtaacctgctgccgctgatttcttgtggcgattatggatacacgataattggaggcaattacgatcggatctggaggttcaaagtcagggtcacagagcgccgagactttgccatcaagtcaatcgagtggttgtgtgaccttcgaaactacatattgtacaccctgtttttttttttttttttttttttggcaaattcaatcttactcgagatggcaggccaaaaggaggagatcttgtgctgtgactttgaggtgcgtggcagggtgcccaaggatgctttcgagctgtttgcactggtccaggccaatgcactgggactgcggggattcattgcccaggtgtcggaggagaagttcaagggtcgtctggagggcgagggcaaggtgatcgatgcctttaagaagctcatcctggccgccgccgattacgtgcaggccatcaaggagttcattattaagaatctgaaagtcatccaggaatacacctacaagaccttcgaaatcaaggtgaacctaaagtgattaaaggatcaaacaaaataaaatatttccaatgcataattttgtttaaaacggctatcaaaagttttatccattatgatttgtctaatatttttgttgtatggatataacaaggtattttccaaataaaaattacacagttatataatcac

SEQ ID NO: 22878 - protein, 103 aa, DROSOPHILA
MAGQKEEILCCDFEVRGRVPKDAFELFALVQANALGLRGFIAQVSEEKFKGRLEGEGKVIDAFKKLILAAADYVQAIKEFIIKNLKVIQEYTYKTFEIKVNLK

SEQ ID NO: 22879 - DNA, 3509 bp, DROSOPHILA
cccgtgcatatcttgctcttgccggtgtccacgatgtcctcgaaccgaaagtgcacatcggatatcttgagttcaatgttgtcaatgatgttggtggccatgttggtgccatacttcagccagttattgtaggatgagaagtagtaagactccatttgtttgcccttttcggaacgccagcctgcttctgcggtgtccagcacggccagcttatactccaaatcctgcaacttctccttctcgtagtcccagttgtccaggttcttcggacagatgatgcagaacaggccctcgatggagatgcaccatggcgatgtcctgaactggcggaccggaatctggagtttgattttacggatactgccggcggtgacttcgaccggcaaattgaacgagcggagggcatctttgcgtatgggtatgttctcgagctcaacttcgcctgcgggaaaatatattgtttatgcgatgcggaataaagataaacaattatatcacagtacccgagagcagtgccaccgacaattgggcggaattcaagttctccagatactttcccagatacgtgttcagcacccacgttatgaggtctcgcaacatgcttgtttattaaccactgacgctaatcctattaaatatttgtttttaattcatgccctaaaaccacaactataaacatatgattggggactatctacaccgcataaatattgccgagtcacaaatggaacaagtggaatcggaacaggttgtgggattggattgtagttgaataaacaagtggtttctttggtttatttatttcataaataatttaaatgggaagtagttaataagataatatatatcagtcctaatttcgggtgttgcttaagtttgaaatatatgtaaatgatgttttgccgatgtagctatcaatcagattggtatcggatatcggtcttgtgcgatattcttgaaattccatcactaattattgttaaaaacaaaaattttattgtgattgctacagagtctatttcccaaaatgaccgatccaaacgtgccaagaggagccctaagcttgcaggcaagtaatttgggtagagtatctagtgaacttcaataaaatgtatatttttcttagaatgttctgaaatatacggtgcaacaccacgatccaaatccagaagcagccccaaagttggaaactcccgatcctgaggtatgtaaacagctcaaattgagagaattttacaaatatttagaatagttattgtgttaggctttaaaacacctcaagtagttatactttctgaataattcacaagtgtgtcctaagcagtgagtcaatcgaatcatctagaacctatgtatttggccatgtgctcctccaaatggaacttctattgaaagccaaatttgtttggaaattacttttctggcactttgtacagtagtatgaaagctctttttgatataacaaagtataacattagttattgactagttacttggagctacaatatataaaatattttatttttcagagagctcagtttttggcaaatgccctaaatgccatgacagtggatgctgcagcggccctgaaagcagctttggtgatcttgaacagcgaagaatccagcacggacgaccaaatcgagagtctggatgtcataaggagccacatcgatgacatcgacaatgccataacgctggtgaagctaggaggaactgcaactctactccgctacataacacattcggatagcgaagtgcgagaatcggcactcaatactgtcgctgaagtggcccagaataatgtattttgtcagaacgccctcataaacgataagtttttgcctgcacttgcaaagaacttgagccattcgaatccgaataccgtgcggtgctccttgtatgcgatatcatcgctgataaggaactttcagcctggatacgacgagtttaagcgcataaaggggatcaggtccttgataccctgtctgaaatccacaaatacaaatgtctacgtgaagactgcttttctaattgcatcgttaacttcaatcgagaagtctgtcagaggtaaattgaagtagtaattataacccagtgtttgaaatcctaattatttgtattcccatcagatgattttgtgaaggaagaagtgtttcctgtgctagtggaaaaccttaagcccgttgatgactttgatatcaaacaagaaactacgctttttgcactttcatctctttcgcgggaatcggagttaaaactctctacggaaaaacgagaggaaatcctatcgaagcttcaacaaattatttccaaaaacaaacagtcggaaacgtgtgaagtaagattattttatatatctattgttatgtatcaaatttcatacctactttatttacaggacatggttaattatgcaagaaatatttttgacaacttaagtgcacattaaaaacaaatcgatttttcacgtaaatgttaagttaaataaaatgggctttgaaagtatctctagttcacaaatctttcgaagaaacacattcctgtgtttataatcttgtaaaaatttattaatttcaatgcgtcagttatgttggcaatgtgtcaaagtcgtcaccaactgaaacgatcggaacgtgctccaaattaacttcaatcgggttgtcacatagcctatttcgttttgcaaatatattccaatccatcacctgcacggcgtgcagactttccgcctcgttatgatgccgcaacaccatggactccttcaaaggtaacaacaattaagatttacaacgaaaaatattttgtttagggtcagcataccttaattttctcccacttgtcatcaacatcttgcagccagctgaggagcaaacgtccattaaagcggcaacgagcactcttttccttttcatcctgctccggtgtgatcatgttgtagacctcgtcgtccttcaaatacgtgcaaacggaatagggcgccggctgtccagatatgctcctggccgccttcgagtgaacgcgtattatctcctgctcaacgttcatgcatagtttctcccgctccacggtgtgcgcttcgatcagatctcgcctggccttctcctgatcctgatagatcctctccatggcctgcggaacagtgcgtggaatatccggaactgagatcgtcgcattgcgtcttaataagtaggatttctttgtcagcagatactcgttgtaaccttgcggaggtcttggcttcaccggatacaagctcttccacttcttttcgatctgacgacggatgctcaagaacatctggaagccattggtgaagggatggtcatgggggtgagattcttcggagttgacaccggaatccgccgcatttgagttcttcgaactgtcgtcggtgtttttcggtcgaatctttcgcttccgtggatggagttccacgttcgagggatttatgtccttggacgaggatgtcgacgacgtcgacgggcttggaacattggtgattgcct

SEQ ID NO: 22880 - DNA, 1005 bp, DROSOPHILA
tgattgctacagagtctatttcccaaaatgaccgatccaaacgtgccaagaggagccctaagcttgcagaatgttctgaaatatacggtgcaacaccacgatccaaatccagaagcagccccaaagttggaaactcccgatcctgagagagctcagtttttggcaaatgccctaaatgccatgacagtggatgctgcagcggccctgaaagcagctttggtgatcttgaacagcgaagaatccagcacggacgaccaaatcgagagtctggatgtcataaggagccacatcgatgacatcgacaatgccataacgctggtgaagctaggaggaactgcaactctactccgctacataacacattcggatagcgaagtgcgagaatcggcactcaatactgtcgctgaagtggcccagaataatgtattttgtcagaacgccctcataaacgataagtttttgcctgcacttgcaaagaacttgagccattcgaatccgaataccgtgcggtgctccttgtatgcgatatcatcgctgataaggaactttcagcctggatacgacgagtttaagcgcataaaggggatcaggtccttgataccctgtctgaaatccacaaatacaaatgtctacgtgaagactgcttttctaattgcatcgttaacttcaatcgagaagtctgtcagagatgattttgtgaaggaagaagtgtttcctgtgctagtggaaaaccttaagcccgttgatgactttgatatcaaacaagaaactacgctttttgcactttcatctctttcgcgggaatcggagttaaaactctctacggaaaaacgagaggaaatcctatcgaagcttcaacaaattatttccaaaaacaaacagtcggaaacgtgtgaagacatggttaattatgcaagaaatatttttgacaacttaagtgcacattaaaaacaaatcgatttttcacgtaaatgttaagttaaataaaatgggctttgaaagtat

SEQ ID NO: 22881 - protein, 255 aa, DROSOPHILA
MTVDAAAALKAALVILNSEESSTDDQIESLDVIRSHIDDIDNAITLVKLGGTATLLRYITHSDSEVRESALNTVAEVAQNNVFCQNALINDKFLPALAKNLSHSNPNTVRCSLYAISSLIRNFQPGYDEFKRIKGIRSLIPCLKSTNTNVYVKTAFLIASLTSIEKSVRDDFVKEEVFPVLVENLKPVDDFDIKQETTLFALSSLSRESELKLSTEKREEILSKLQQIISKNKQSETCEDMVNYARNIFDNLSAH

SEQ ID NO: 22882 - DNA, 8046 bp, DROSOPHILA
gaaatcataatagtattacgtaaagaatccgtatggggagcacttatttttcgccattctccgttttcaatgaaaaactcacttgcgcaggttttccggcttgccccatcccttttcgaagaacctcgttatcagcatgcggcgatatatgctatctagtttactcggcatcttcggaaaatggcaaatggggcttcttgttttgccaaaataataataaacaatacgtacggtagggatggtaaaacgtttattgcactatcgataactgcgtagaaacttccatggtgataagacttccaattttaaaaactgacaaaaatttcggattattaatttttgcaatgtctactaatctgaaaactagtataaaaaaaataataaaatacgaaatcggttttggtttctatgtcaggttggtatatcatatttatcgacttatcgatttgaaacaatggtatgtgaaacaattcaaatctgcttatttttattttattaaaaataaattgtagtacttataatttatcaatacacataaaggaatacggaaaaacgataaatacatttacttaattttatggattttttgtcccatatttacaaaatgaaaagtgtaatattaaatacgttcataatgaagtcatttttacaaactgataagtgaaatattcaaaactattataagaaaattcgaaaaccattaatccacacaaccaaaaagaatgtaaaccacacttatcaagctcataaaaagtacaattcttattctcagtttttattacattgtatcttataaaatatgttacttattttcctttggtagttttatcaatacgatacgtatacactacatttatatttgtatgtatattatgtgtcgggcaaacgtaattcgttaaaaaaattacgcttgctcttgtaaatactttattaaaagattttataaatatacaaataatttatcatagcacatttgatgcattgatgttccaacacgtgcattctgtactcgtataagtatatacatatctaacttaatccaatgttgactcggctatgtgatgtaagtctgaataattaattattgcgcgatgtaggaactcgtattgtgcctagaaaccatataaacatctaattaatgcattgacaataaaatataaacaaattcacttacgtatgagttgataagtcccgttcgctgagatcgtaatttccttgttgtggcacagatgtcgacacacttctccagcctcagatgctggaccaaaatacacatggcgacgaaaatggaacttcgatcggttcccaggctgcaaataatttataattgattaatccgtcaagtgcatgaatcaaagcatcgccgcatacctgcaatgaactgtgagtggagatcgacaaccagaattcttgttgttcttataatggttgtatgcttgatctacaagttctataatgccacggcagacttcaggaacttctccgtccacggtgggccaaccattgtattgaaattgtgtgactttcagcgtatcgtctattttgcaattcgtaacataaaattcgcggcgagtatagtatggacaactttcgctgtgcacgtatttcacgagtatgtgatcgtattgaacctcatcatctgcccagtatcgcgggcatttcctgggaccatctccgatctgcaatgcaattaaagcactcagttgaatgggaaaccaataaagtagagagggcactactcacttcggatatcatgacgagggtggtaacactctgttccgagatcattcgccagaagtctcctatagtgttttcaagtggatcctgggcaatgatgaaggtttcgctattatcatagccctctatgaatgatgcgttaatgtaagttgagttttcccgcatcggaagtggtgttagtataacctttaattgcacaaaaacattcacaaacattaaacacagttcgcataaaagttagccactattacttactctgttgcgatcgtagggtataatctcttgacttctgttcttcatattgttctcctcgttttcgcccacactacatgatttacttatctcatctgctgtggccagtagtttctgaaataaatagtaataagcaaaacgcctgcaagtagataacaaactatacaaacctcgaattccacttccaatttgcatttaccctcgttgggtttccgcttaagagattcaattgcagaagccattgtatcaatgcaaatatccgtgtttccaaaggttccagtatctaataaagcccggtaaagaaagatgtattgtttctgcaagcaaaaagaaagttattacagcaactacgagtggaatttccatatctacgcaccagagattggactaaaaaatttcgttggtgtcgtagatcacacactgtgttgtaaatggacaccgagtcttcttcctccagctgttggattagggaatctaaagccaccagggttccggttctacccacaccagcactgcaatgcactaaaattggacccctttgcagggagtagacggaattgatttgacgtatgaatttgatgatgccatgtggatgctctggtgccatgaagtccttccacgttaggtagtggtattgggtgatttgtctacggtcctcctcctcgccgacattggctttgttcttggaaacgttcagggtacgttcaatataatcaccagtcttacgttcttgtgcaaatttcactaaaatatctccgaactgtttcgtatcaaatactttttctggccaatatttcgcgcacttggccttgttatattcctccaaatttgtaagcatcacaattatttctagatgttgttcccaaatcattcgccaaaaatcatcgatggtactttccattggaccctgtgcacagataaacttctttctctccttgtagccaattacgaagttagcattgatgtagtccgtagtttgcaggccattgatgacagccaactttacgcgcgtctgatcgtaagcctttatatcgggatacctgttcttgcaggcgttctcctttaaatcactgtttttagttgtccgatcgctaaagcgatttggcagcatctcatattcccgcagaaatccgtagtcagtgtccttatgtcggttcttgtaggcgttttctaaatctaatctgtgaatggggccagcgtcgaatcctttgtgatttccggaagttataaaatgactgtggttgtgatttcgtcgaccgaacaatgccctgcttgatgtgaagaaacaattgaatattaattgaaatcacatcaagaagatcaaacaattactagttacctcaaagaatctcttagtgttaaagtgtcttcgccctgcagttcattcttggttttcttgtgatggaaaacccacagcacaataaatacaagtatgacaccaagtaatacggctccagccttgaccccaatgcttaggtagtagtccatattgttcaaggattggatgggttcagcttcagtcgccggagtaattatatcaaagtatttgctataagccatcagggcattgtttcgatcccgaactgaggaaaataaacatgatattaccattttgctttcaaaaaatcaatcattacgcacctattatctctaggaatccggtgtagttggagttaatatctatctcaccatcgaagacatctcgactagaatcgtggagtggcacatttgggttgacggcgcttagaattggattctcatcgctggtcaccgcgtttcttttatcccttaacttactttctaagattttcagagcatgctctgttaagtttgctcctttgatcaagttgtccttctccgacaaaatgggcagttcagaatcggaatctaaagaaaagcacattagtttcaaataaaaaaaaataaataaagtttatattaattacttgatagtgaaccttgtgggggtatgtgaatgatctcgggtttcctcagaaatggagtaccctccaagcatttccgacaaatttcgtcgttgtcgcggattatatcgttgttctcactaaatctcttttcatcgcccaagaatatttccggcctaaagtacttgctacttatcatttccgctatatatgcactacttctagtcacgttatcgctgtgaacctcctgatatgtggcgatgtttagcttctccgggtccggcaattccttgttgtcattgttaattctaactagatacaatctatagcagcatatgggcccattgcgttcgctgatcttcggtagatacaacttgagaacgtacttggagtccaggttcacctttgaccacatggtacggccaatggcatccggcgtggagacgggcattagacaacttccggtggccggttcgccgttcttcttgtgccgcgttatggcagacaccgtcaccgtgtagtttgtgttcgggctaacactttcgtagagggtcttgtgatggggttcatcgattcttcgaatctttggtccccacatctctctatccactgtgctcatgggattgcccagcaagtgaattaaatatgacacaaccttgccgtttggcgtcttgggaacgtcccagttaatggcgatggagttgcctctcgtgacgttgtcatgatgacactgtatgctcaagttggtgggttttgttgccacgccgtccatcgttgtgccgttcacgttttcggaccatggtccacaagtcttggttagatcactacatgcccttaccctaaattcgtagtctgtggcggtcttaagcttatcaaacatgtatggcaagtttcgagaattctgctggtaaatggcctcttcgatcactttgggcacctcgcccgattcggagacaatcagttcgtagtattgtatataatcaatgagatctggcggcggtggattccagccaatcgttatcgtggacgccgtgctgccggtggtctcgacttttggtataaatatgggatcataactaagcgtggtgattccctggggatactgggtgggttggccattgccaatcgagttctttcccacgattcttaaaaaataggttgtgttcggcttgaaatggtccagaatatacgatgtatggctgccgttaataaagtccttatgataagtaaaagtcggtgttccagcctcctgcagagtgatgaagaacttctgaattggatcgttgccgtcgttaacggtccaatttaggtatattttattagcaccaactgccttggcgaaatcaatgctaacttgtggcacttccattacgaaaagggtaatctctttggaggtaatttcgagtccggtgtcatcgaagacggtgcacttgtaggtgccattctctttcttgtaaacttctgtgaattccagggtgaagtttaagtgcgtatcgtttagcttcgaaatggacgagaaggtgtccaggaattcaaactggctgccgtccttaagccacttgaggtttctattagttgtctcattttgtgggtacatctcgatcaaacagtacaacatgacatcctgcttgatttttctcttaatcctatcgggggtactttgcaggactttggatggaaggtatggcctaacttggaattcagtcgaatggttttgccccgtttgggctgtgcatgtgtagttccccgagtcctttatattgacatcgagaagcgccaggacattcttatacttgatgaagtcttgactatcgttgttttcactgccatcgtcgttggatttcaatggctcagttcttattttatatctgaaaagatcgaaaaatgatcagattattatgttattccatctttatgggggcagaaatatttttagatgcttgtgcaataagttactaaccttgtatggtttttattaatagtttggttgcccagcttccatgctactgcttcgttttcagatgcgcactctagagatacgtttttacctatttctgcccactctgtaaataaatttcattaaaataattatcagttttgtatatagacgtaattatagaaattacaccgatctagtagcaacatgcttctgtcagcctaaaaatatgttagacttaaaatatatcttcctgattaatggttgtgtatatttaaatctgattatagcttccgggttttatgcgatttagtaaaatattcaaattagaactatattgaaggaaaatttcttatttaactttcctattaaattttaagttttatgatggacaccaagaaaggtttttctggatgggcggtaaaagccagacataaaaatgaaactacacccacaatattggccataaaactcgcggtagtaatccggcgtaatttcggaatcaacacgtatttagctgaagaaatattacaaatatatatatatgtgattatatttcagataaatcagatagatgtacataagtatgtacgcagaaacataaaacgtatgtatgtaccgggaagtgtgtacatatgtatgcgcgactacttttgtttagccccaattgaaatctcaccccatcgccgtaatctttgggcgttaccgacatagttcgagtgctactgtatctaagaactatacaaccgtcttgttaaccaccatatcaaatgataattccagtttccaacttaatgtaaaacactccattcacatttgcaaaaacaacacaaaaaaaaaatgagacattgcaatttgttgacacccacaaacggttcttgatgtacgtatgtatgtaccaattatgatgttcgtctgagtttttgaaacattaccttgtttcacagatccttgcacacatatcgcacaaaggaaaatatatgcaagaattatatttaatagcatcgacatgcgtcggtagagtaacgccatggcttgctaatttctcactccgagccggataaatacatatgtcaaaaattatattcgatgtctgcgttgagttaaaaagctctactgcgttgaactaatgtcgcggcgagtgcaaaacaccgacaaatgtgttttattaaaaaccagttaatagacggcgaccgcgaataagtattaatcgttattttcttaacactggattgtttttttttcgcgatatgcggcgttatcgataagtcagtcgaatatgtacccttggctgcggttaccaagggatttggaacaactgaattggaatataatcgtatattataataatataatcgtaatcgtatttattaacatgagtaattaataagacacaagtatttatttatagagcagtatgacattaattgttacttaattgttgcaaatttataatttatttctggaatgcattaattcatttattacttcatattcacttttattacgattccgtttggtagccgatatattttacaataccaatgagcgttgctatcttagcacacgatacaacagttcaccgcaaccaccaaattccaagtaaactagccggcattgtttgtgcgcgtttttttttgcagaaaaccaccaaaaacacataaaaacatgaaattagtaaggtatgttatgcgtcatttacctaaactaaaactaaacttgttagcaatgcgtgcagtatagtttcattcagtttttgagttctgcgattctgcacacatgtatgcatgcaaaagcgatgctcccatttgttgtttttgtacacaaaatttaatttaatacgaatgttgttttgatctgttattataatagttttccattatttacttgtatctggtaacaattcttgcactttaagtagcattttgcataactatattcaatgcaatcaacgctcttaatccaaggccaccaaatacaagctacctttaaattcgtactaatttgctaaaagtaaaggctctactaagtatatttcatcataaaggctgcttgcatacaccttattgtatctcatttttcaatcacccaataagatatttgtttctacctataatagccttgcatctctgaaatgctgcatctttgcaacagggatttccttaatttcgtttactaatcttcccgttgatgcattac

SEQ ID NO: 22883 - DNA, 4488 bp, DROSOPHILA
tcgcggtcgccgtctattaactggtttttaataaaacacatttgtcggtgttttgcactcgccgcgacattagttcaacgcagtagagctttttaactcaacgcagacatcgaatataatttttgacatatgtatttatccggctcggagtgagaaattagcaagccatggcgttactctaccgacgcatgtcgatgctattaaatataattcttgcatatattttcctttgtgcgatatgtgtgcaaggatctgtgaaacaagagtgggcagaaataggtaaaaacgtatctctagagtgcgcatctgaaaacgaagcagtagcatggaagctgggcaaccaaactattaataaaaaccatacaagatataaaataagaactgagccattgaaatccaacgacgatggcagtgaaaacaacgatagtcaagacttcatcaagtataagaatgtcctggcgcttctcgatgtcaatataaaggactcggggaactacacatgcacagcccaaacggggcaaaaccattcgactgaattccaagttaggccataccttccatccaaagtcctgcaaagtacccccgataggattaagagaaaaatcaagcaggatgtcatgttgtactgtttgatcgagatgtacccacaaaatgagacaactaatagaaacctcaagtggcttaaggacggcagccagtttgaattcctggacaccttctcgtccatttcgaagctaaacgatacgcacttaaacttcaccctggaattcacagaagtttacaagaaagagaatggcacctacaagtgcaccgtcttcgatgacaccggactcgaaattacctccaaagagattacccttttcgtaatggaagtgccacaagttagcattgatttcgccaaggcagttggtgctaataaaatatacctaaattggaccgttaacgacggcaacgatccaattcagaagttcttcatcactctgcaggaggctggaacaccgacttttacttatcataaggactttattaacggcagccatacatcgtatattctggaccatttcaagccgaacacaacctattttttaagaatcgtgggaaagaactcgattggcaatggccaacccacccagtatccccagggaatcaccacgcttagttatgatcccatatttataccaaaagtcgagaccaccggcagcacggcgtccacgataacgattggctggaatccaccgccgccagatctcattgattatatacaatactacgaactgattgtctccgaatcgggcgaggtgcccaaagtgatcgaagaggccatttaccagcagaattctcgaaacttgccatacatgtttgataagcttaagaccgccacagactacgaatttagggtaagggcatgtagtgatctaaccaagacttgtggaccatggtccgaaaacgtgaacggcacaacgatggacggcgtggcaacaaaacccaccaacttgagcatacagtgtcatcatgacaacgtcacgagaggcaactccatcgccattaactgggacgttcccaagacgccaaacggcaagaccctctacgaaagtgttagcccgaacacaaactacacggtgacggtgtctgccataacgcggcacaagaagaacggcgaaccggccaccggaagttgtctaatgcccgtctccacgccggatgccattggccgtaccatgtggtcaaaggtgaacctggactccaagtacgttctcaagttgtatctaccgaagatcagcgaacgcaatgggcccatatgctgctatagattgtatctagttagaattaacaatgacaacaaggaattgccggacccggagaagctaaacatcgccacatatcaggaggttcacagcgataacgtgactagaagtagtgcatatatagcggaaatgataagtagcaagtactttaggccggaaatattcttgggcgatgaaaagagatttagtgagaacaacgatataatccgcgacaacgacgaaatttgtcggaaatgcttggagggtactccatttctgaggaaacccgagatcattcacatacccccacaaggttcactatcaaattccgattctgaactgcccattttgtcggagaaggacaacttgatcaaaggagcaaacttaacagagcatgctctgaaaatcttagaaagtaagttaagggataaaagaaacgcggtgaccagcgatgagaatccaattctaagcgccgtcaacccaaatgtgccactccacgattctagtcgagatgtcttcgatggtgagatagatattaactccaactacaccggattcctagagataatagttcgggatcgaaacaatgccctgatggcttatagcaaatactttgatataattactccggcgactgaagctgaacccatccaatccttgaacaatatggactactacctaagcattggggtcaaggctggagccgtattacttggtgtcatacttgtatttattgtgctgtgggttttccatcacaagaaaaccaagaatgaactgcagggcgaagacactttaacactaagagattctttgagcagggcattgttcggtcgacgaaatcacaaccacagtcattttataacttccggaaatcacaaaggattcgacgctggccccattcacagattagatttagaaaacgcctacaagaaccgacataaggacactgactacggatttctgcgggaatatgagatgctgccaaatcgctttagcgatcggacaactaaaaacagtgatttaaaggagaacgcctgcaagaacaggtatcccgatataaaggcttacgatcagacgcgcgtaaagttggctgtcatcaatggcctgcaaactacggactacatcaatgctaacttcgtaattggctacaaggagagaaagaagtttatctgtgcacagggtccaatggaaagtaccatcgatgatttttggcgaatgatttgggaacaacatctagaaataattgtgatgcttacaaatttggaggaatataacaaggccaagtgcgcgaaatattggccagaaaaagtatttgatacgaaacagttcggagatattttagtgaaatttgcacaagaacgtaagactggtgattatattgaacgtaccctgaacgtttccaagaacaaagccaatgtcggcgaggaggaggaccgtagacaaatcacccaataccactacctaacgtggaaggacttcatggcaccagagcatccacatggcatcatcaaattcatacgtcaaatcaattccgtctactccctgcaaaggggtccaattttagtgcattgcagtgctggtgtgggtagaaccggaaccctggtggctttagattccctaatccaacagctggaggaagaagactcggtgtccatttacaacacagtgtgtgatctacgacaccaacgaaattttttagtccaatctctgaaacaatacatctttctttaccgggctttattagatactggaacctttggaaacacggatatttgcattgatacaatggcttctgcaattgaatctcttaagcggaaacccaacgagggtaaatgcaaattggaagtggaattcgagaaactactggccacagcagatgagataagtaaatcatgtagtgtgggcgaaaacgaggagaacaatatgaagaacagaagtcaagagattataccctacgatcgcaacagagttatactaacaccacttccgatgcgggaaaactcaacttacattaacgcatcattcatagagggctatgataatagcgaaaccttcatcattgcccaggatccacttgaaaacactataggagacttctggcgaatgatctcggaacagagtgttaccaccctcgtcatgatatccgaaatcggagatggtcccaggaaatgcccgcgatactgggcagatgatgaggttcaatacgatcacatactcgtgaaatacgtgcacagcgaaagttgtccatactatactcgccgcgaattttatgttacgaattgcaaaatagacgatacgctgaaagtcacacaatttcaatacaatggttggcccaccgtggacggagaagttcctgaagtctgccgtggcattatagaacttgtagatcaagcatacaaccattataagaacaacaagaattctggttgtcgatctccactcacagttcattgcagcctgggaaccgatcgaagttccattttcgtcgccatgtgtattttggtccagcatctgaggctggagaagtgtgtcgacatctgtgccacaacaaggaaattacgatctcagcgaacgggacttatcaactcatacgcacaatacgagttcctacatcgcgcaataattaattattcagacttacatcacatagccgagtcaacattggattaagttagatatgtatatacttatacgagtacagaat

SEQ ID NO: 22884 - protein, 1428 aa, DROSOPHILA
MALLYRRMSMLLNIILAYIFLCAICVQGSVKQEWAEIGKNVSLECASENEAVAWKLGNQTINKNHTRYKIRTEPLKSNDDGSENNDSQDFIKYKNVLALLDVNIKDSGNYTCTAQTGQNHSTEFQVRPYLPSKVLQSTPDRIKRKIKQDVMLYCLIEMYPQNETTNRNLKWLKDGSQFEFLDTFSSISKLNDTHLNFTLEFTEVYKKENGTYKCTVFDDTGLEITSKEITLFVMEVPQVSIDFAKAVGANKIYLNWTVNDGNDPIQKFFITLQEAGTPTFTYHKDFINGSHTSYILDHFKPNTTYFLRIVGKNSIGNGQPTQYPQGITTLSYDPIFIPKVETTGSTASTITIGWNPPPPDLIDYIQYYELIVSESGEVPKVIEEAIYQQNSRNLPYMFDKLKTATDYEFRVRACSDLTKTCGPWSENVNGTTMDGVATKPTNLSIQCHHDNVTRGNSIAINWDVPKTPNGKTLYESVSPNTNYTVTVSAITRHKKNGEPATGSCLMPVSTPDAIGRTMWSKVNLDSKYVLKLYLPKISERNGPICCYRLYLVRINNDNKELPDPEKLNIATYQEVHSDNVTRSSAYIAEMISSKYFRPEIFLGDEKRFSENNDIIRDNDEICRKCLEGTPFLRKPEIIHIPPQGSLSNSDSELPILSEKDNLIKGANLTEHALKILESKLRDKRNAVTSDENPILSAVNPNVPLHDSSRDVFDGEIDINSNYTGFLEIIVRDRNNALMAYSKYFDIITPATEAEPIQSLNNMDYYLSIGVKAGAVLLGVILVFIVLWVFHHKKTKNELQGEDTLTLRDSLSRALFGRRNHNHSHFITSGNHKGFDAGPIHRLDLENAYKNRHKDTDYGFLREYEMLPNRFSDRTTKNSDLKENACKNRYPDIKAYDQTRVKLAVINGLQTTDYINANFVIGYKERKKFICAQGPMESTIDDFWRMIWEQHLEIIVMLTNLEEYNKAKCAKYWPEKVFDTKQFGDILVKFAQERKTGDYIERTLNVSKNKANVGEEEDRRQITQYHYLTWKDFMAPEHPHGIIKFIRQINSVYSLQRGPILVHCSAGVGRTGTLVALDSLIQQLEEEDSVSIYNTVCDLRHQRNFLVQSLKQYIFLYRALLDTGTFGNTDICIDTMASAIESLKRKPNEGKCKLEVEFEKLLATADEISKSCSVGENEENNMKNRSQEIIPYDRNRVILTPLPMRENSTYINASFIEGYDNSETFIIAQDPLENTIGDFWRMISEQSVTTLVMISEIGDGPRKCPRYWADDEVQYDHILVKYVHSESCPYYTRREFYVTNCKIDDTLKVTQFQYNGWPTVDGEVPEVCRGIIELVDQAYNHYKNNKNSGCRSPLTVHCSLGTDRSSIFVAMCILVQHLRLEKCVDICATTRKLRSQRTGLINSYAQYEFLHRAIINYSDLHHIAESTLD

SEQ ID NO: 22885 - DNA, 4884 bp, DROSOPHILA
tagataagcaggagcagaaggaaaacttgccggcgaaggcgtcaaccagcagcaaaaagattaagacgccgccgcaggatgatgccgccgaggaggtcgaagaggagtctgctcaggaaccgactcccaagaaggccaagaagcctgctgccaagcggggcggtaaaaagacataagattgagtataaatacgctgactttcccactttgtttttggtaacactaagttacgaacccgtacgcttaccctacgcttaaggaaggcaatgagtagcccagattcgtaagatagatcggaaattttgcttattgtacgttaagatctacgaactgaatcctgttaagttctttttattttgataaatagatgcccgcttatatcttacaagtctgcctaaagacgaaaacttctttatcaatccaactaagtgtttattatatatattcgttcgcaatacgaagccgtagtaaatttgtatttgaacgcaaaaggaaactaaatgagatttatttacaaactaattaacttgattatatcatacacaaagatatacatcctactcacagtgtattataaattcttggctcaggcggggcaaatgggagattaccggcaaaaaagctacaaaagattgggagattgtctcgtaagcgcgagacatcatttactcaataatatcaggaaacacgaaattgttactcttatggtaggtcttaagatttatacaaaaatatgtatttgcttggagggtggttcgatttgcaatgaagggaaacatcttaaaattacctttaaaagcaaaggtgtctaaacaattcgcaggacccgggaattcatgaatgcaagccattgaagtatgtaagaaggctttaatatttgtagttttcatacctggcaagggtcaaaatggattattacgtgtacagaggtgaacaagttgcatttactgctgaacaaatcgaaccaccctggcatgcacagttgagggttttggcttcactacgagtagtaacacggctgacgattgcctctgcctgagtcgactgtggctagggaggtggttatggtagtggtggtggagtttccgccgtagttgcttcccaggtagaagctcacgaacaagatgccgcacagcagcgatagcgaaagaacgacgcgcaccatcttccttgcgaatgcgatgaatcccagcaaatggccgccggcagcaacgccgcccagctgccaatcaccagtgccctgacagctgaggcacagctgcagatgcgcctgtatcagtgcctcgaggcattcgccatcgtattggtccatcgtatcggcacagtccagacctagattcatcaaatcaacagcacaggcacagttctccagctctggacagtcgcagtcgtcttcgttattgttgtggctatcgcgagcggcaatgtctagctcctgcctggtcaaattgcacgggctaagtaaatattatttgcgcttagcgcacgaatacgccgttgccttgggacaggtagcggcgtgctggccgagctgctggtacatcagaaagccgaagccggcaaacaacaggaacaacagcgccagcgtcacgtattgcaggttctgggtgaatgccaactgacgctccattgccgtagctggatctacgccctattatacgaaattattacaatagaagtacacactcgcttttacatggctaggatatacttacagcaccggacttcttgctgcaatccacgctggccttactggacttgcttgcgcaatctagctgcgcttttgatttgttctcatcgaagcggcagaccagtcgatgctgctccacatccgcagatgtgggggatttgctccgccacagctcggtcacatcggcgccaccgcattcaccgcctggcgcgaccatagccatcaccaggaacttatccttgctgtcgtcactaagcttgtgctccgacttcaaccatatgttgatggtggcctcctgattgggctggatgatgccgcaacgtggtcgcacacggaacttctccggcgatgtggtttggatctgcaaggtttcggaatgatggattaatctggtatatgaagtatgcgtgtagatttcacccaccttgtacgtcactgccgaggtggcaatagacttgatggtcatcgtggcttccgcattcttggaattgaagttgacaaaatccttgggattgatgtgcaacatgcctgatcaaggaaagccctcttggtattaattggcagattttttcaaatttcaaatttgggtgggaccaaaaaattttgtttatagagtataacgaactaaaatgaggcgacttggagctacgatatgtatgagtatatatgtgacataatgagcagtgcagataaatggaaagtcgattttaaattgggacctatgcgtgtttcaaaactttttagatgggttaaggcctgatttcttaccctcggatggagtgtgcatcttgttgatgttggtctccttgagcaccatgggagcggaatcgacaaaggtgacctgccgatgaaagagaactcgttgaaatgaccgtcttttgattggtggataggatggtttcggtgcggccccttctcatcagaccccatcgaacgtgcttttccatgtcattttcagaagggccgccccactgctcttggcacccttgagctggcattattggcgaaggttccactcgaactggaggtcgccgggtgaattggtttcatttggtcttcagccggatgtcgcttattctgtgcgggacaactggcacatcacttgtgcattggaatcatgggttttatctgcccttcggatgcaatcggacactcacgtaactaaaacgccctgcctccgacattggtcacattcgccagtctccacacacaatttatatccttaatcagactcaagatctaagacatatagacaaagccggacttttgggctcttgtgctctttgcatccaccaaaacaaaaaacagctggcaaccctaaaactgtggatttcctggcgtggctttagggatttttttaaacgcgttagtaaattcgtatatattcaaatgttttttaacgctgttttgaatcagtatagtttaaaaaaaatatttgagatactcgcaaaaacaatacttaaatcgtattaaaagtaattgactctacggataaagtcctcctttaacagtattctaattatatctgtataaataagccttacgaattttcaaattttaacttgccctttaagccggtctttatgggcgtagccattttactagttcatttccaccaattcgctttccagatacaaactccaactggtacctaaaaccattcattctccttaacttaaactgaacaaacaacagttctcattttcagcaccgaacaaaagaaagtatgcagggtgaagtaatcgtcttgaatggcaagtcaaattcgatccgactcggatttgttgtgcttttgcttgacttccacgtaacgcacacatgatcatggtgacggacagtgtccattatgctttgccggataaacttaaatactgtgaggttttcaatggtttatagatgatttattgattctaataaatgacacagatttcttaagcgaaattcaatgagcatgaaacacaaaaaacattctacacgaacacactcacacacacataccctgggcattttgttgtttttgcttaaactttgagtagtgaatatcaattggtacgataacaatgcagtttccacttatgtttgctcctttgttaataacaattacagattgcacatttccatgacgattacgacaagttgaggacagaaacaaacgtaaaatgcgattgctttgcaggtttttgtgactagttcgcgcaaaagtgaaaatactactgaattgaaagcatacccaaaagctcgctccgtgactgctgtctcgctcacactcgatcagcttcttccagctgttgttgctgccgcttccgtctggcgtaaaatgaactgcaactgtaaatgaaatgaaagtgccgttgaaatgagagaaagagagagtgagagagagtgcattataaacgatgacgtcgcgtgggtgtgataacagcgtgtgggtgtgtgttggcgtgggtgtgagagaaatgcctgataatatccgctctgggagtcatttttacaaatacagtgcacgtacgacacaaatacgcacacattgaaccgcccataatccctctgacaatgtgtgttctgattagtgagaggtttggttttatcttttatatgttaattgcgctgttatgttactgttattgcattgtattgattcatcgcttctaaaaaaaaaaaaaaaaaaaaaaaaaaaaaaaaaaaaaaaaatgtgtgttctacttttttcgggtcaacgcttcggggcctcgagaactgaccattagccactgaacccagccagaaacagaaagtttagcaatatgtcaaataaaaggctataaatagctactacaatgttctgcccacaaaagcgcacgtgcactgggaaaaaaattagggggaaacattttatattttatgttatctatacatctatatgatgcttaaaagtttcgtaaaatgcatgagccattgtaaattttaaattgaagatttcgtgattaaaactatgatttgaatatgcagctgcacctaaaagattgttatagttttcgcaagatgtcagtttgaacctgaatatcacatattaatctagcttgtaagcaaagtgaaatggctaatttgtaccaaactatgaagataatcccaaatatttcccccagtgtacgagttaaaccttcgcttggataaggttagtggtcagttggggacaggcaactcacgcaggacac

SEQ ID NO: 22886 - DNA, 1312 bp, DROSOPHILA
cgaactagtcacaaaaacctgcaaagcaatcgcattttacgtttgtttctgtcctcaacttgtcgtaatcgtcatggaaatgtgcaatctgtaattgttattaacaaaggagcaaacataagtggaaactgcattgttatcgtaccaattgatattcactactcaaagtttaagcaaaaacaacaaaatgcccagggtcacctttgtcgattccgctcccatggtgctcaaggagaccaacatcaacaagatgcacactccatccgagggcatgttgcacatcaatcccaaggattttgtcaacttcaattccaagaatgcggaagccacgatgaccatcaagtctattgccacctcggcagtgacgtacaagatccaaaccacatcgccggagaagttccgtgtgcgaccacgttgcggcatcatccagcccaatcaggaggccaccatcaacatatggttgaagtcggagcacaagcttagtgacgacagcaaggataagttcctggtgatggctatggtcgcgccaggcggtgaatgcggtggcgccgatgtgaccgagctgtggcggagcaaatcccccacatctgcggatgtggagcagcatcgactggtctgccgcttcgatgagaacaaatcaaaagcgcagctagattgcgcaagcaagtccagtaaggccagcgtggattgcagcaagaagtccggtgctggcgtagatccagctacggcaatggagcgtcagttggcattcacccagaacctgcaatacgtgacgctggcgctgttgttcctgttgtttgccggcttcggctttctgatgtaccagcagctcggccagcacgccgctacctgtcccaaggcaacggcgtattcgcaggagctagacattgccgctcgcgatagccacaacaataacgaagacgactgcgactgtccagagctggagaactgtgcctgtgctgttgatttgatgaatctaggtctggactgtgccgatacgatggaccaatacgatggcgaatgcctcgaggcactgatacaggcgcatctgcagctgtgcctcagctgtcagggcactggtgattggcagctgggcggcgttgctgccggcggccatttgctgggattcatcgcattcgcaaggaagatggtgcgcgtcgttctttcgctatcgctgctgtgcggcatcttgttcgtgagcttctacctgggaagcaactacggcggaaactccaccaccactaccataaccacctccctagccacagtcgactcaggcagaggcaatcgtcagccgtgttactactcgtag

SEQ ID NO: 22887 - protein, 363 aa, DROSOPHILA
MVLKETNINKMHTPSEGMLHINPKDFVNFNSKNAEATMTIKSIATSAVTYKIQTTSPEKFRVRPRCGIIQPNQEATINIWLKSEHKLSDDSKDKFLVMAMVAPGGECGGADVTELWRSKSPTSADVEQHRLVCRFDENKSKAQLDCASKSSKASVDCSKKSGAGVDPATAMERQLAFTQNLQYVTLALLFLLFAGFGFLMYQQLGQHAATCPKATAYSQELDIAARDSHNNNEDDCDCPELENCACAVDLMNLGLDCADTMDQYDGECLEALIQAHLQLCLSCQGTGDWQLGGVAAGGHLLGFIAFARKMVRVVLSLSLLCGILFVSFYLGSNYGGNSTTTTITTSLATVDSGRGNRQPCYYS

SEQ ID NO: 22888 - DNA, 3426 bp, DROSOPHILA
ttagttttcgtgtttacttcggtccgaaatggtgtgttggaaaattcggcatccgttcttcgcacaggcaatgtacaaatggaaaattaagagagcgggcggagcagggagaaaaggatgctgcggaaaagctttggctctccgccacagctttttctctctctgtctcagcttcctggctctccgtcgccaattgtaaacaattgcgcaatgctcgcctgctgttgctcctccactcgcctcgatgcacaaatggtcactaaaactggattgttgtggccaattcggcctgccagccgcattgcaacggcctgtgggggttgtgttggattgtattgctttgggcgaaggtccttatttggtggtgtttttcaagaaataaagcttgagaacttgtatttgcctctttaaagttatgataaatattgtagatgagcatataaacattaagtgacttaataggtatacttatcaaaatttgttttaaatcaaccgcaataaaatgctatgtttaacccactcagaagaacaaatatatatgcatctttattgatcgatttttaaaaaactacttaaaaattcgaataataaattacgatttaaaaaacatcattacattaaaattcaattctcagtttagtttggcgacatgcctgtcattacacagtattattgacgatcagaaattgaagaactttgctttaacactcaaattgcatttcaatccttatttatagtagtgtgtaaacagtgacagaaggttgtaaatagtttggggcagttctcaaacgttcagcacccggccagacgccttaaagcatggcactgtgcggttcgatgaataaaattcaaaattaacgtactggcaaaaatgaaacggtttcgaaatttgtagaaaagtgaactaattatcaactaggcgaggaagtaaccatccgtggacgcaaacataaactgatgtacgcatattttcatgtgtaaatatatatataaaacgtttctaacaaacacgaggcacgtcgaaatgtaagtgagcaaaaatgaagtgatctctaggttggttttcagtttttattccgactcggggaaatttggtggcttcagttgcttcttgtctttagttgacctcacaaggctgcgtatgtgtgtatatatgtatgtctatgtgtataggtgtacatgtgtatatggataagagtctatttaatcaatttgaaaacggtatcaactaactttcaactaacaataaccttaccgccgacgcttcgctcagtttcgaccatatgtttcccttcctgtatgactaagtgtgcgataccttaacagctgcataactttagtttaccatagtttcattacgcttttgtgcactagtgttttgagttagtttcaagtttccaaattatttacaactagccctgcattccggcgtttactagtttggcgagtatttagattactggaacttgcgcgtggcagttctggccttccaggccttgaccaggttgtaggcgaagtacagcgtaaatccgtgcacctggaagcccacaaagcagaaggcataccagaagacgccgtacggataaccctgtagaaaaaccgaggtttagtagggcggctcttgagggattaactggcccagccacttacgcgccacacaaagatgtctgtctcgtccagctccaccgacttgtccagcgtggcgaactcccacacgtccgagaagtagtaggcgaagcagtagaagagtggcaggatggcgaatagcagtatggccaccatatacttctgcatttcgcgcaccttgttgcccctggcggccgaaaggcccaggaaggaggtgagcaacgacgcggcccacacgtactcccaccacaggggcggtgggacctccagctcctcgatctccagcacaaagatatccaggtggtccagaatgtccgacgtcagcttggccagcatcacgaagaacagcagggcgtgaaagaagatgcagtacttcaacctggacttgttcagcaggctaaaagagcagagaaagtggtcgttcagtggcggatctgtgtgggtgagccccatattggggcgcacatgctgcccagctggcactttgcccacccgccccctacagcagcaagtgggtgggtgcagcagctccagggtgctccgccgccctggctggacgccacctgcgattcggctgcagtaggtgccgcctgcaggtggatctactgccacaggcgccccagtaattagataatttcgagtgtagctgagagctggcgatagcacgaagtgttattaacctaatttgatatgtgccagctacgcgctgcctgaactcgaagtcgttgccatcggtgcccgcgaccattggtccgccgcgcgttgccatttcgttgccttcgttcgtgggtcgtgtcgttcgctcacgtcgttgcttatttttaataaataattgcacaaaaaatagggctggcactagaatcgatgtgtgtgcgataccatcgctgccaccaaaaaactggcgcacatcgatacgctcctcgctaccatcgattactttcgcttgaaagcatagcaaataaccgttagaaagagaggggaaattccgctaagttttagaatgttcattttcagaaagtctgccatggaaactattaatacatctgcatggaaactgtttacaaaacattaattaaattaaataattagccttttaactgtattagcaacacgtgattagtcatattatttaattattttaacttattctattacagttattaaacagttattagttttaataaagtggcaatgtggtcgtggtgactagctccgcttagggaaattttaattgggaggatgacttcgctaggtgtgtaacctcgctaatgctgtgtagaataaatgtgttatacttacatacgtagaacttcagtttttctctagttagtttcggcagaatgtagatagatattcgaactagtcgcaaatgagaacgattttttaaaggtaatgctgagagtttagcattgctaatctgaaaagtgggctggtgaaaaataaaaccaaacctattcttaatggcattaatggcacttaatactttaattttcatatcttttttgcacgattttagaaaatgagggctggttttaatactccgattgaaatcttccatccatatgagaattatttctactaaaagtacaaacgctagactaaaatgaattgaattgcattccaattccaatatgtcttatagaccaaatggcagaactagtaagatttagtaatgattaatgattaatgaacgggtcgcgatgaaaaatattactcgtagattaaaaaagaagtattctagattcctttttcaacgaatatgtatcaggtgaaaggaagtgtttttcgagccaataaagc

SEQ ID NO: 22889 - DNA, 764 bp, DROSOPHILA
aacgacacgacccacgaacgaaggtgcgcgaaatgcagaagtatatggtggccatactgctattcgccatcctgccactcttctactgcttcgcctactacttctcggacgtgtgggagttcgccacgctggacaagtcggtggagctggacgagacagacatctttgtgtggcgcggttatccgtacggcgtcttctggtatgccttctgctttgtgggcttccaggtgcacggatttacgctgtacttcgcctacaacctggtcaaggcctggaaggccagaactgccacgcgcaagttccagtaatctaaatactcgccaaactagtaaacgccggaatgcagggctagttgtaaataatttggaaacttgaaactaactcaaaacactagtgcacaaaagcgtaatgaaactatggtaaactaaagttatgcagctgttaaggtatcgcacacttagtcatacaggaagggaaacatatggtcgaaactgagcgaagcgtcggcggtaaggttattgttagttgaaagttagttgataccgttttcaaattgattaaatagactcttatccatatacacatgtacacctatacacatagacatacatatatacacacatacgcagccttgtgaggtcaactaaagacaagaagcaactgaagccaccaaatttccccgagtcggaataaaaactgaaaaccaacctagagatcacttcatttttgctcacttacatttcgacgtgcctcgtgtttgttag

SEQ ID NO: 22890 - protein, 91 aa, DROSOPHILA
MQKYMVAILLFAILPLFYCFAYYFSDVWEFATLDKSVELDETDIFVWRGYPYGVFWYAFCFVGFQVHGFTLYFAYNLVKAWKARTATRKFQ

SEQ ID NO: 22891 - DNA, 6585 bp, DROSOPHILA
tactaccagcgagctctcgacatctacgaatcaaagttgggtcccgatgatcccaacgtggccaagacaaagaataatctggccggctgctatctgaagcaaggtagatacaccgaagctgaaatcctctataagcaggtcttgacgcgagcccacgaacgtgagtttggagccatcgacagcaaaaacaagcccatttggcaggtaatgttgtgttgttgtgctgttatgcctggtaaatactcaaaagttccttttcttactacaattttcaggtggctgaggagcgtgaggagcacaaattcgataacagggagaacactccatatggcgagtacggcggttggcataaggccgctaaagtggattcgcccacggtcacaaccactctaaaaaatctgggagcactttaccgacgtcaaggcatgtttgaagcggccgaaaccctggaagactgtgcaatgcggagtaaaaaagaagcctacgatctagctaaacaaacgaagctctcacaattgctaacgtcaaacgaaaagcgacgatcgaaggcaattaaagaggatttggatttctctgaggaggtgagtttcaaaatcgaatcacttaacttaattaacttaaattaatcattcccatttattcttgcagaagaatgcgaaaccataaaaatattatttgttcatcgcccacaacggaatctttaagtttatgattgaaagctaacagcaaacacacactttatttattcattccttaatatacataagctctcaagcatacattagcaaataaacaacgttttataccttgttatttcaaaaaatatgtaccgcttttaataataaaccaaatatatttaacataatcctgtttgtatttaaaccttcaaaactaaaccaaaaatacggaccagatatagcacattacagtggaatcagcttaacatttattattgataacaaacagtacgattagtttgcctacgataactgagtatcagttagtcgctatcattgtcatttaaaatcgaggaaactatgcctgcaaactgctcagcccgatccagaaattgttcccgagtgagactcgtatcgttacgtagattttgcgccgtgaggagtaagttttcaaagtccttcagctgactatccagctcgtcggcactgatttcctccttgtgatctgcaaatcaataggacgaaatggattattggtttctcaactcaaatcctgggcactaaccagaaccaaacttgacattggaccaaactacgtttttcaaaccctccacaacttcctcgtagtccttttcagcttcatctgggtcactctcaacattgcttctcaatgttatgatgtcaaaaaggaaattcgttttctccttaatttctccaaaggacaatccaccttcttctgaagtggaagaggttagcagaaagcccagctgaatctgttcattcttcgctaacgtcttgggaatagtgtcgataaaggaggtctgcaagtaattgtaatataatagatatactattattgcttttataaacacttacgtcttgtgaatcaaagtaaataatcaacgcctcggttgcttgaagaattttctccggcacagcttccagttttccagaaaatggaattaagttgatagaagtgttatagtacttggttttaatgatgcacttataacaattaagtgagcactccgttgatgttgattccttcgattgattcacttcagataaaatatctgcaacaaaatggaacgtataaacgtagtagtaaacgtatttatgaatgggttttttttttaacaatcctttatactcttataaaaatgcattgtatgattagtatgctgtattcataccaacagaataaaaacatttaattcgcctgtattactcataaatttcaaataaacaaagctgcaacaacgtgaaaatactgggacaacaaaaatagggcctttgaagaacactctgtactttttcaagtaactaatcttactttcgactatttccagtgcaggaactgctccataagataaaacaagtactactggatccattatattgcaatttctttatttatttcagtcaacaaaaacaaaagctatgcaccagtgtgaccaagcttcgagaacgaaaagttctgaactccaaatgaataaagctttgcttttaccggcacttttttaaaatgtttttttttttttaataatttacatatatattaaaaaggagggaacgctttatttcagtttcccggctataggataccccttactcagctggtacgaaagaagaaaagactatttttttagatagctcactagctcactggcgtttatatttattgtcgattgtggtcgttttggtgggcgtggtaatataaattagaaaatatatggggaaccagtttccattccaaatcaagaaaactgtactccttcccaagtaaaatacctaattatgtacaatttactagacttttctttaaatggcaacatattcatcattatgttttgatatgctaacttatatttactgaatatttttgtcatatctctttatcaactgctcataggttatatcacatttcaggccctcgcccacgtcattctcatagattttctttgcccgctcgaaagcctcaataatgcaggatctgaaaagaaaagtgatctattataattttatttaaatttataaagaaaactttatgcccacctaaatagcttctgatgcagaacgtaggcgctcacatggccggcatccaagtaacgtacttctgctcctggccatatttcctccagactggaacacccctcccgcggcacataggcatcatctttggcacataccgcaattatcagggaggtgtcgaagggaaccgaaaagttcttcaggtgggtgcactcgtccatcatgccgcgcatgaactgcaacgcctcacgttcccaccagttcgtcttggttatgtctattttatcggttttgctctgcgcagacaggggcagaatgaatttcatgaggttggtcaacgttgagcctgaatccttcgatgtttcctccgtttcgatggccaccttttggctaagcgcgtccttggcatcaatggtcagattctcggagtcaagtttggtgttcttcaaggacttggataggaatatggaactgtcttcttgggggcaaatgccctgcgtctcgtacttatccccacatgtgttactgttttcggttgcgtggatctttctcgtatcgctgatatcctccttcagctcttgcagggattgattaaagttctgtatgaagctttggcccgcggaaaacgcatcatcgatcacagtaaccattttggatagccgttctctgtactgtccatccgagaaatactgcgtttccaacatatcccagttgatggactggctcatgacaccctgtaacacatggaataatgcaatttcaatttgatattccatgctatagcagcacctacagttgtaaaaacagcggaggcggtggaccaggatagacatggcacaagtaccagtggttttggccaatttgtagcggccagtgatgccatctaaacgaaaaggattattgttgacaatccccttaatggttattaatcaatttaaactcacatgaccgcccattgacaatcctgtgacgcctagtggtccaaagccattcctttcgcaccagtgaaagagaaccaggcattccaggatgaggcagccgcccatcacaaagatatcagacacattgtgcaggttggaacgcctaaaataattaatgtattattattattatacataaaatacatctaaactattcagacttacgtttggttgtttggttttcttaagccatagaaaggattctccagtattatggatcctatattggcgtcctttagcagaggtttcgcaatgaaatttcgtctacgccaaaagaactgcaatatttgaaaatttgccatttaaatatgtgcgttttaatgtactattatgaacttatggctgaaaatggtcccaaacaaaattgttttctatgtgggtatcgaaagagttgagcaaattacgaacaaatgggcttgaaaatcatggaaaacaaattaaatataaaggtaaagttgggctctaaaactggcttggtaaaagtaaaacaatatctattttggtgggacccacttttagctaaatgctgatagataggcctggcgtctggcctctattgaaagtaaacagacattaatctcggaatttggacgacggatctcgctcgatggtactcacatgatcacccgttccggccagatgaatgcatatgggcttgtgcttttcgtttttccacttattggggatcaagagctgaaagtgcgcctgctgcgactcctcgggcacaactccgggcatgtgcagctccatgggcgtcttaaattggccctctatcagcgtgctttccgcaccgatttctttcttcgttatctccaccggataatcgcggggcacgagcttgaaacatgactccctactggatattacttttcggaactgaaatactctgaaataatggtcgtcagaggcaaaggcaattaatttgggcacaaacactccaattgtacaaaaaatatgtagaaaaatcgaaaaaatatgatgagcacttttggggagcaaaaaaataagttttatgtgaatgattgaacttcagggataattaatactttttaagctttagttgttgaaagcaagttgccaattaaaaaaattatctgttcatatcgatcctaacttgcttagggtatatttcccactaacctgtacggaggaatctaaaatcgtggtcaagtccagtgtccactggtggaagggcactgtaatgcagattaatgtcatcttgaaacgataaaaataaataatctacgtacttaggttgcataaaaaactcatgtttctaacaaagaattcaattaacttaagaaccacatcgtttttaataacataaattcatttctcgatgatataacagaaaatgttgacctgaagttcaataggtttccaaattagtaagaccaagatgaactttgttaattatcggatggtaatttgtgactatgaggaatttagataatatagagcatatattaagataagatgaccctttcaagtaagtaaaactaaatttgtaagtaattttttaataagttagtaaagccgtgaatagggacatgcacatctagttgcctttgaaagaggaaaaagcaaatatatatttaattaataagtcaaactatattttattattattcaaaggcacttgtttaaaagaaagcccaccgaaaccattaaagatcttgtaaactaaaaggacaagagttttcccttgcccgccgattaacggtaatttaaataacctagaggaaattgaattgaaattgaaatcataatagtattacgtaaagaatccgtatggggagcacttatttttcgccattctccgttttcaatgaaaaactcacttgcgcaggttttccggcttgccccatcccttttcgaagaacctcgttatcagcatgcggcgatatatgctatctagtttactcggcatcttcggaaaatggcaaatggggcttcttgttttgccaaaataataataaacaatacgtacggtagggatggtaaaacgtttattgcactatcgataactgcgtagaaacttccatggtgataagacttccaattttaaaaactgacaaaaatttcggattattaatttttgcaatgtctactaatctgaaaactagtataaaaaaaataataaaatacgaaatcggttttggtttctatgtcaggttggtatatcatatttatcgacttatcgatttgaaacaatggtatgtgaaacaattcaaatctgcttatttttattttattaaaaataaattgtagtacttataatttatcaatacacataaaggaatacggaaaaacgataaatacatttacttaattttatggattttttgtcccatatttacaaaatgaaaagtgtaatattaaatacgttcataatgaagtcatttttacaaactgataagtgaaatattcaaaactattataagaaaattcgaaaaccattaatccacacaaccaaaaagaatgtaaaccacacttatcaagctcataaaaagtacaattcttattctcagtttttattacattgtatcttataaaatatgttacttattttcctttggtagttttatcaatacgatacgtatacactacatttatatttgtatgtatattatgtgtcgggcaaacgtaattcgttaaaaaaattacgcttgctcttgtaaatactttattaaaagattttataaatatacaaataatttatcatagcacatttgatgcattgatgttccaacacgtgcattctgtactcgtataagtatatacatatctaacttaatccaatgttgactcggctatgtgatgtaagtctgaataattaattattgcgcgatgtaggaactcgtattgtgcctagaaaccatataaacatctaatta

SEQ ID NO: 22892 - DNA, 1785 bp, DROSOPHILA
atgctgataacgaggttcttcgaaaagggatggggcaagccggaaaacctgcgcaaagtatttcagttccgaaaagtaatatccagtagggagtcatgtttcaagctcgtgccccgcgattatccggtggagataacgaagaaagaaatcggtgcggaaagcacgctgatagagggccaatttaagacgcccatggagctgcacatgcccggagttgtgcccgaggagtcgcagcaggcgcactttcagctcttgatccccaataagtggaaaaacgaaaagcacaagcccatatgcattcatctggccggaacgggtgatcatttcttttggcgtagacgaaatttcattgcgaaacctctgctaaaggacgccaatataggatccataatactggagaatcctttctatggcttaagaaaaccaaacaaccaaacgcgttccaacctgcacaatgtgtctgatatctttgtgatgggcggctgcctcatcctggaatgcctggttctctttcactggtgcgaaaggaatggctttggaccactaggcgtcacaggattgtcaatgggcggtcatatggcatcactggccgctacaaattggccaaaaccactggtacttgtgccatgtctatcctggtccaccgcctccgctgtttttacaactgtaggtgctgctatagcatggaatatcaaattgaaattgcattattccatgtgttacagggattcaggctcaacgttgaccaacctcatgaaattcattctgcccctgtctgcgcagagcaaaaccgataaaatagacataaccaagacgaactggtgggaacgtgaggcgttgcagttcatgcgcggcatgatggacgagtgcacccacctgaagaacttttcggttcccttcgacacctccctgataattgcggtatgtgccaaagatgatgcctatgtgccgcgggaggggtgttccagtctggaggaaatatggccaggagcagaagtacgttacttggatgccggccatgtgagcgcctacgttctgcatcagaagctatttagatcctgcattattgaggctttcgagcgggcaaagaaaatctatgagaatgacgtgggcgagggcctgaaatttcctgcactggaaatagtcgaaaatattttatctgaagtgaatcaatcgaaggaatcaacatcaacggagtgctcacttaattgttataagtgcatcattaaaaccaagtactataacacttctatcaacttaattccattttctggaaaactggaagctgtgccggagaaaattcttcaagcaaccgaggcgttgattatttactttgattcacaagacacctcctttatcgacactattcccaagacgttagcgaagaatgaacagattcagctgggctttctgctaacctcttccacttcagaagaaggtggattgtcctttggagaaattaaggagaaaacgaatttcctttttgacatcataacattgagaagcaatgttgagagtgacccagatgaagctgaaaaggactacgaggaagttgtggagggtttgaaaaacgtagtttggtccaatgtcaagtttggttctgatcacaaggaggaaatcagtgccgacgagctggatagtcagctgaaggactttgaaaacttactcctcacggcgcaaaatctacgtaacgatacgagtctcactcgggaacaatttctggatcgggctgagcagtttgcaggcatagtttcctcgattttaaatgacaatgatagcgactaa

SEQ ID NO: 22893 - protein, 594 aa, DROSOPHILA
MLITRFFEKGWGKPENLRKVFQFRKVISSRESCFKLVPRDYPVEITKKEIGAESTLIEGQFKTPMELHMPGVVPEESQQAHFQLLIPNKWKNEKHKPICIHLAGTGDHFFWRRRNFIAKPLLKDANIGSIILENPFYGLRKPNNQTRSNLHNVSDIFVMGGCLILECLVLFHWCERNGFGPLGVTGLSMGGHMASLAATNWPKPLVLVPCLSWSTASAVFTTVGAAIAWNIKLKLHYSMCYRDSGSTLTNLMKFILPLSAQSKTDKIDITKTNWWEREALQFMRGMMDECTHLKNFSVPFDTSLIIAVCAKDDAYVPREGCSSLEEIWPGAEVRYLDAGHVSAYVLHQKLFRSCIIEAFERAKKIYENDVGEGLKFPALEIVENILSEVNQSKESTSTECSLNCYKCIIKTKYYNTSINLIPFSGKLEAVPEKILQATEALIIYFDSQDTSFIDTIPKTLAKNEQIQLGFLLTSSTSEEGGLSFGEIKEKTNFLFDIITLRSNVESDPDEAEKDYEEVVEGLKNVVWSNVKFGSDHKEEISADELDSQLKDFENLLLTAQNLRNDTSLTREQFLDRAEQFAGIVSSILNDNDSD

SEQ ID NO: 22894 - DNA, 5654 bp, DROSOPHILA
ttcgtctgttgcgctgagcaaaatacttgccgcgtcaacgtgtcttatgtataaaatatgtataaacatgtatttgggctgtgtgtgtgtgtgtgcagaagactgccttgttcgacttgctcctgactttcggctagttgccaattaacattttgagtaacaaatttatgcaacatcatggagaagtcgtcgtgttctcgactccgcagctgtgatgttcctgaatattataatgctaattaggtgctggtagggcgatgtttgtatgatagatggcaagatgaagcgtcaacatacttaatatccaaagctcttccatcatcctaatacgaactacattgcaccgatttggtcgacaaagagtaattctttggtatgctttagaagagacctacaaatgcgagcaaacaaaagttcaacaacaaaaatatattaaacataatagtttgataagcaacaaagtataaaatctatcttattaaaaaaagaagttacaaaaactgttcaaatcgttccacctcaataattttaggtataaggaaacaaggatgggctcgattttggtgaaacatacaatcagattgaggtcctggcaaggcaatctgatacacacactgtcaacaaccgtatacacttgcgtgttttactttatgcgggattataaaattaggtacatatacattattaactataacattttaaaaaatctgtactttttcacacaaacaacaaacatttgctaatagcccaaaattatgctacgattttcaattcgttttggttgtttttaccgcgtaatactcgaagcgtatttatcatttagggattctgtttcttgcttagttggttttacaataaggacactagtgaattacattcaaaacggttgatgcgaatgcgaccagctgaaagtttgagtaaaaatccagtaggaaagacaaccgaaagctgtgaaagtagaaacgatgatggtggcggtgacttccatttccggttccgtttagttctgcagagcggctcgtagaagactgtccagagtgaactgtatggtcccattggcagccgcctgcaaaacggatggcggcttgggcagggacggaaacactgtcgaagctcccgcttgactgccctttcctcgcaggcaatccataccagtggtcgccagcgtttcgggaacggtggcttcgcatatgctgggcggtgacggtggcgatggcgcttgcagagggctctttgatttttctgtttccgacttttcctctggctgagcctcttgaagcggctcctgttccttcttctgctgcttctcctgctgggcaatcgcagtgttgaccttgttccacaggttgctgatgacagcgttatccttgccagcagctgccgttcgcttcgcaatcttctcgatgaaactctcggtttccggagcaggatccactgtagtttctacaatattttgcttttgctgcgatccgctttcgctgcgcgagtgcgagataagacgcggtcgtatctgcggtcgctctgagggcaattctggcagagtagcagacaccgccagaccctggctcaccagttccagcattatgcgccgtgtgatgccgaacacaagatgctttttctcttccgtaatgtatgcttcgtactgtttggccttactttcatcgttgcccaccggcgcgggacgacgcagtttggcccgcatggattctacggcttgcgcacccggaggttgctggcatgatccatccggtttgaaactgaccaagtcgtagacgaagtccttgttaaccgctttaactcgcttacggatgggacgcttctcctgggaatgttctccagattcgggtgagatttgggtacgagacttgcgacgctttttgctgggcgtgggagtaccctccagaggctcctgtccgggttcttcttttatcgcggctgttggagatttgggttgcacttcacctacagattctgttagggttttgagatgcttcaagcgtctttcgtaggttttgatagggggtttagcatccttctccatcactgtaagctcctcctccttatccagcaaaattatatctccgtcgacatcgtctcgagagtactcgcactcgtgggtggacacatattgctccgtcagctggtctcggtctccttctatcttatgagtaaatcccaaatgatttacaatatcgtagcgcctaaatgcgcgatattcacacaggttacagccaaaacggcgtgcgcggtaatgaaacatggatatgtgacgacgtaggttcccgagggcattgaactgcttgtgacagatcttacagcgacatcgcagctgcttctcaactgggacgttacgtttcttcttggccttacccttgacatcttctgcatcggcattggattcaggtccggcccctggtgttagctcgtgctcgtcgtcggtgttagaggcttcgtcactagcagagtcacttacattgcctaagttaagctggtccaatgacactgtgtgcagaccaggtgcaaatgagtcgttcggctctggtagatcggcaaacatctcattcagagtaatttcctcggttttgatcggtttttttttcggcaggtctatggacgtcgttggatcctcatcagctgcatccacactggaatcattgctcttcatcttcagttttttgacagaaggagcaggcttagccagcgcctcctgcttcgcccgacaattaagcaggtgtgttgacaaggcagcgcgacgctcgaatgatttttcgcaatagatacacaaagacatgatcttacggtgctcaccgctggcatctagtggctcagggacatagcccaccacgtcgtcggagagctgtaggcgcttcaactcccggcaggggcccttcggctgcacatctccttgctgaatgcgtcgcttgaggatagtgttccgcatcattcgaatacgtcgagttggcttcctgaaaaattaaattgcaaaaggaccaacattaatattagttcacacattgcatgtataatttttagaaaaaccactatccctataaaaatgtatctgttatatttttatttatgattattagttgttctgtttttatgattcagggcttaaaaaattcacataaatagaaagtaaattagattgtttccttggaaacaatatgatttttgacatatacatatatgtataaggaatgcagtatgcagtaagcagatataaatggaccatgtgaaagaaaaaaggaacctgtccccttgaagtagaataatatcatatattttataataataaaatataaaaattctatggtcgggttaagttgaacttacttgtgatccttcgacaaatgacgaataacagcagcggcctgcagaaaggtcagcgaacaggctgggcactgaaacacaaacgccgatgatgagtgatgcttctgaatgtgcacctcaagcgttttgtgcgtctgaaacgtcagattgcctgtgaacgagattaggaaacacagctatcactaattgtattcaaggcctattcggttaggtagtcgtacagatctcgcagaaaatactcggctccgtttcgtcgctgatggactgctcgccggagtcgctgcctgcattgttttccagcttaacggttgccaaggccttgccgtcgggtcccacaatggtttcagatggattaagcatgcgatgcacctcgtccagttctgtccttatgctgtcgtcgtggtccactttgatggtctgataaacagcctggctagagttgggcacagactccagctgcagaacagtgggcgagctgcacttggcctgtgatgtagccttttcccgtcgcagacgctctataacaccactcaggtcccttatgccgccgccacctcctcctcgtaagggacgcacgtcgcggggaacaggcgagcatcccgtgcttctgctgcgtagcatatgttcaatgtcctgcggggacggaccaccacccgtttgtatgatcatagtggaattctgatcctgggggagaattaacagcgattagttgacatcctatggtattagagaccttgtaatggggttgtctttactgcccactcactgtgtatccgctgccatttgccgaacgagcgctgacgcagcaaaagacgcgtttgtggctgatgaaattggccaggctgcgaaacatgttgcggcacaccttgcactcgtagatcaggctgcactccagactgagcagctggcgcacctgtgggagaatctgattgttatccggggatccaccaaactggggcgcaggagcctccgccattgcgggccacaattgagtcacgtactccactcagatgagactcacctcgctggtgccatcctcataggcccgacgggcctcctcgaatcccgtgtgggcggtgcgcagcggccgctgcagcaggctgatgtcgtcaccgttgtggtccatctgctcctccttgaaagtgtcagagttacaacgtgagcttcgctttctcatggcgctggtttgcgcgcttgctcccactgctaaccaaaaaatttgagacctgtcctagcgcgctgccctacggaatattttcaccgacgtgaggttcttaatctgtttctaattagcgatcaaagtggttttccaattcgaatatggacctgcatcttgcattttttgtattcagtatgaccgtgcttgagcgctgcttctgctgcgatgctgatctggtatttttattaacctgtgcggaattttttgtttcaacttaaaaaaaaacggaagagtcgaaaatatttaatcaggcaaaaccaataagctggaaccacatttgttttaatattcgactagaactaacaattgaagtttgatttctcccttgctcagtgggcgtaacttccatcaattctcaaaacccccaaacaatattgtcaatacataattttggaattagcttattgttaaatctttaattgacatgccaagccctaataagttcagaaaaagcgctaaaagttcctaaatattacctgcaaatgtaatttattcaaatagaaaaacgtttattttggcgttcagcacatggtcacactgatgacttgaaaaaaacatagtgaccggaattaggctcatcatattagtttcaccttttttattaaatcaaaacagacacgatgagctgtccaggatttggagaactaaatataccctcgtcgcgtgccttctgggacgactgcgacgaggatgaattggagaaccttaagccggtggagaagtgcgtgatctaatgttatttacgtaggtagtcctaatttcttggattcgcaggctgcagctgaagtttgatgatgattgcgatggggaagctgcccctgtggagagcgagatgctggtggtcattgagggcgtcaacgtcactcacttcgcctcttctctgctggaaaaggatgcaaagcgtgtgtgcgccattcctgccaataactcgaccctgcactggagtcattcgtccaaacagttgctggccataatcaacgaggacctgaccagtagcggcgaggtagcggagctcctactgccgtacgtgaagcttgccaagaaagtgatcactctgacgcttaagccaaaggtcgagttcaaaagcgaggacatccagctc

SEQ ID NO: 22895 - DNA, 3024 bp, DROSOPHILA
tattcgaattggaaaaccactttgatcgctaattagaaacagattaagaacctcacgtcggtgaaaatattccgtagggcagcgcgctaggacaggtctcaaattttttggttagcagtgggagcaagcgcgcaaaccagcgccatgagaaagcgaagctcacgttgtaactctgacactttcaaggaggagcagatggaccacaacggtgacgacatcagcctgctgcagcggccgctgcgcaccgcccacacgggattcgaggaggcccgtcgggcctatgaggatggcaccagcgaggtgcgccagctgctcagtctggagtgcagcctgatctacgagtgcaaggtgtgccgcaacatgtttcgcagcctggccaatttcatcagccacaaacgcgtcttttgctgcgtcagcgctcgttcggcaaatggcagcggatacacagatcagaattccactatgatcatacaaacgggtggtggtccgtccccgcaggacattgaacatatgctacgcagcagaagcacgggatgctcgcctgttccccgcgacgtgcgtcccttacgaggaggaggtggcggcggcataagggacctgagtggtgttatagagcgtctgcgacgggaaaaggctacatcacaggccaagtgcagctcgcccactgttctgcagctggagtctgtgcccaactctagccaggctgtttatcagaccatcaaagtggaccacgacgacagcataaggacagaactggacgaggtgcatcgcatgcttaatccatctgaaaccattgtgggacccgacggcaaggccttggcaaccgttaagctggaaaacaatgcaggcagcgactccggcgagcagtccatcagcgacgaaacggagccgagtattttctgcgagatctgcaatctgacgtttcagacgcacaaaacgcttgaggtgcacattcagaagcatcactcatcatcggcgtttgtgtttcagtgcccagcctgttcgctgacctttctgcaggccgctgctgttattcgtcatttgtcgaaggatcacaagaagccaactcgacgtattcgaatgatgcggaacactatcctcaagcgacgcattcagcaaggagatgtgcagccgaagggcccctgccgggagttgaagcgcctacagctctccgacgacgtggtgggctatgtccctgagccactagatgccagcggtgagcaccgtaagatcatgtctttgtgtatctattgcgaaaaatcattcgagcgtcgcgctgccttgtcaacacacctgcttaattgtcgggcgaagcaggaggcgctggctaagcctgctccttctgtcaaaaaactgaagatgaagagcaatgattccagtgtggatgcagctgatgaggatccaacgacgtccatagacctgccgaaaaaaaaaccgatcaaaaccgaggaaattactctgaatgagatgtttgccgatctaccagagccgaacgactcatttgcacctggtctgcacacagtgtcattggaccagcttaacttaggcaatgtaagtgactctgctagtgacgaagcctctaacaccgacgacgagcacgagctaacaccaggggccggacctgaatccaatgccgatgcagaagatgtcaagggtaaggccaagaagaaacgtaacgtcccagttgagaagcagctgcgatgtcgctgtaagatctgtcacaagcagttcaatgccctcgggaacctacgtcgtcacatatccatgtttcattaccgcgcacgccgttttggctgtaacctgtgtgaatatcgcgcatttaggcgctacgatattgtaaatcatttgggatttactcataagatagaaggagaccgagaccagctgacggagcaatatgtgtccacccacgagtgcgagtactctcgagacgatgtcgacggagatataattttgctggataaggaggaggagcttacagtgatggagaaggatgctaaaccccctatcaaaacctacgaaagacgcttgaagcatctcaaaaccctaacagaatctgtaggtgaagtgcaacccaaatctccaacagccgcgataaaagaagaacccggacaggagcctctggagggtactcccacgcccagcaaaaagcgtcgcaagtctcgtacccaaatctcacccgaatctggagaacattcccaggagaagcgtcccatccgtaagcgagttaaagcggttaacaaggacttcgtctacgacttggtcagtttcaaaccggatggatcatgccagcaacctccgggtgcgcaagccgtagaatccatgcgggccaaactgcgtcgtcccgcgccggtgggcaacgatgaaagtaaggccaaacagtacgaagcatacattacggaagagaaaaagcatcttgtgttcggcatcacacggcgcataatgctggaactggtgagccagggtctggcggtgtctgctactctgccagaattgccctcagagcgaccgcagatacgaccgcgtcttatctcgcactcgcgcagcgaaagcggatcgcagcaaaagcaaaatattgtagaaactacagtggatcctgctccggaaaccgagagtttcatcgagaagattgcgaagcgaacggcagctgctggcaaggataacgctgtcatcagcaacctgtggaacaaggtcaacactgcgattgcccagcaggagaagcagcagaagaaggaacaggagccgcttcaagaggctcagccagaggaaaagtcggaaacagaaaaatcaaagagccctctgcaagcgccatcgccaccgtcaccgcccagcatatgcgaagccaccgttcccgaaacgctggcgaccactggtatggattgcctgcgaggaaagggcagtcaagcgggagcttcgacagtgtttccgtccctgcccaagccgccatccgttttgcaggcggctgccaatgggaccatacagttcactctggacagtcttctacgagccgctctgcagaactaa

SEQ ID NO: 22896 - protein, 959 aa, DROSOPHILA
MRKRSSRCNSDTFKEEQMDHNGDDISLLQRPLRTAHTGFEEARRAYEDGTSEVRQLLSLECSLIYECKVCRNMFRSLANFISHKRVFCCVSARSANGSGYTDQNSTMIIQTGGGPSPQDIEHMLRSRSTGCSPVPRDVRPLRGGGGGGIRDLSGVIERLRREKATSQAKCSSPTVLQLESVPNSSQAVYQTIKVDHDDSIRTELDEVHRMLNPSETIVGPDGKALATVKLENNAGSDSGEQSISDETEPSIFCEICNLTFQTHKTLEVHIQKHHSSSAFVFQCPACSLTFLQAAAVIRHLSKDHKKPTRRIRMMRNTILKRRIQQGDVQPKGPCRELKRLQLSDDVVGYVPEPLDASGEHRKIMSLCIYCEKSFERRAALSTHLLNCRAKQEALAKPAPSVKKLKMKSNDSSVDAADEDPTTSIDLPKKKPIKTEEITLNEMFADLPEPNDSFAPGLHTVSLDQLNLGNVSDSASDEASNTDDEHELTPGAGPESNADAEDVKGKAKKKRNVPVEKQLRCRCKICHKQFNALGNLRRHISMFHYRARRFGCNLCEYRAFRRYDIVNHLGFTHKIEGDRDQLTEQYVSTHECEYSRDDVDGDIILLDKEEELTVMEKDAKPPIKTYERRLKHLKTLTESVGEVQPKSPTAAIKEEPGQEPLEGTPTPSKKRRKSRTQISPESGEHSQEKRPIRKRVKAVNKDFVYDLVSFKPDGSCQQPPGAQAVESMRAKLRRPAPVGNDESKAKQYEAYITEEKKHLVFGITRRIMLELVSQGLAVSATLPELPSERPQIRPRLISHSRSESGSQQKQNIVETTVDPAPETESFIEKIAKRTAAAGKDNAVISNLWNKVNTAIAQQEKQQKKEQEPLQEAQPEEKSETEKSKSPLQAPSPPSPPSICEATVPETLATTGMDCLRGKGSQAGASTVFPSLPKPPSVLQAAANGTIQFTLDSLLRAALQN

SEQ ID NO: 22897 - DNA, 3634 bp, DROSOPHILA
acttgctccaacgtggagttatgccatccaggtgtggggaactgccgccaaatcccagctcaataggctccgtgtcgtctagtcgagagctgcacgtcgtgcttttgggctcccctggtaccgtgacaaacaaggtaatcgaaagagatctgaaagttacccctcttggggatcagattaattttcacagcagccgttatgccgacaggcttatggtccacccgaaccgactagcaaatagcctatctaatcccatctccctccgaaggctgaagagggtacaccccaccgatctccctacacccttacacaataagtaattaataactagatacattttcccttttgtacttaataattaagaaaccacttggtctaatatacctttatacacacataaggttaagttcagaggaattgaccgaacgattccttttggaaccaaaataaatagaatgaagtttaaaaaaaaaaaaatatattgttatatatatacaaaattggagggaaaaagtctctttaaagacacttcatgttccacctgtttccaatttatcctgttttatcgaccctttaatgatctcagaattccatgtctgacttctgtctcaaaaaatagtagccaacaataaaaaatgagattgagacaaacctgttgatatgcgttgggaccattttatttattatattatatgtatgttacattgttaaattgcgtttggaaaaatgcctacataatactttgacactcctttcggtcgttcttatattattctagcctgagatggtttcatacatcaaaagtgaagtctttagtttttatagttgtattcaaatatttttgggcgccactgattacataggacaacttaaataactaattttttctgaatcacaagaacagacattatttgccgtctctaacatagttaagcgtttttttttaaactatattatattaaggctcacagagcaaaaaatgtgaaatagtataagcaacttacaagtaaatgcgaaagaattgacgtgcggtcagcttcttgttgcatattgggcacttgtgcgtagctctgatggctgtttcgatgcattcgcggcagaagacgtgtccacatttggttgacactggctcgcgcttcgatacactgtccatgcagatggggcacttgtataactcctctttttgggactcatcaatgtcgcgattaacgcgttttggtggcgacgcaacgtcgagatccactaccgggtcattttcggctgaccgacgtggcagaatggtgagggagtcgttggagtgaagattcactgtgcgacttcttgggccttcgggggtgcatagatcgatgaaagcatcgggatcacgattccgagcggatcgaacaggtggtgcacggtccaaatgggacagatctatcacttctactggactcgctacggaaaaagtaagaaacggtattcggtttattgctagctctatccgcgaaagctatctggttttcacaaaattttaaaaaatatagataaattttgccttcaaaagtaagtaacccggcagggttatagaaagaactatgtcattggttattgtggaattaaaaacattgttcattgtgaaacccagatgcgttcattttgatctgcacttacttctgcggcgaattctacgagttgttggcgttgaggttctcgtggcgaaggtgtcaatctgtgccacaacttcctcgcagtagcgattcactgaaatatgaaacaattaacagaaaacttcgtaatgattatggagtgacatactgcgatccaactctgcttccatctggatcacatcctgggtaagtgatctgatctgcgaatgagcatcttcagtcgagacagacaagttagccatatttaaggggttattgctttgcggtgactgcagttggtttgaagcttctccgactgaagattcgctggtattggtggctgaagatgagtctgattccacagataaatcacgctccactggggatgggcgttccaaggacgaatgggaatcagcggatgaatcagattccgcggatgactgagattccacggatgtattgtgtcccgaattggattctatggatgaatgggagtccacagaagagtcggatacactggaattggagctcgaactggatacgttgctgtccgctgactgatcaagaatggatgagttctactaaataaatcaatcataaatcggaattaactagtttaaagtccagggtatacttacaaaacggaaaatagtcgaatctgacattgttcgagcaacaaatgaccaggaaacttgtgaaatgatttcgtagtaaagacaaaagcaggtgaacccagatatacatgtgctttagtgcagattgaaatgtgcaaaatagtttcctcctttcacgcgaccattcggttattttaaagatgacactttacggacattcgggaacaaggatttaagatcgactatcgatttttgcggtattatacaatgctgtttagaatgacacttgtaattcaataaaaatcaataatttattaaaaataaaatttccgtttcggcgaaattctttgataacaaaataattataagaaatgtatataaatatgtcgacattacaaaaccataccatcactatgtaaacgatattttttaggcgattaaatgccatcgatatataccgtgccgtggtagtgttagaaaattgcgggaattaacgttaaatgcacgtcaccaaagcagaataatagaatattttcgaaacaaaacaaagttggagacatggacaaggatgcgtttacattacaggccatacggcaggaccttatcgataacaatctgcaggctaaggcaataatacacgtaagtctccgctatctgaagagaaaccctcattaccgagcttctgtttttaggacatcctgaacagccgcacctccatcgccgaactcgaggagctgaacgaagcgggccgctccaaactgtctgctatccgcaaaagcatcgagcggctggacgactgggcgcgggacacggcagactctgcgctggccaatgaagtggacgaccaccgtgatcagttctccaaaacgctgcaggcgttccgaaaagcaaacgtgtccacgatgctggagatcgagaaggccaatcgggaggagttaatggccattaccggcgagagtgagctacgccaacgaaccacaacacgggcgcggcacaaccagggcagtctggtttcgcaggagaacgacgtgaccgagaagatgctggctatatcgcggcacctctcggagaccacccagaagagcgccatcaccctggaaacgctcgtggcctcgtcgcaaaatgtggaggccaccagcgacgaactgcaccacacggccggcagcattagcatgtccggcaagctgctcaaaaagtacggacgacgcgagtgcactgacaaaatgctgctcttcttcgccttctccttgttcctcgcctgtgtcttttacatcgtccaaaagcgactcttctaagactccacaaatggacaaaacccgttcccaaaatagcttaaggttgtcgcttctgttgtctaggtatagctagattaagcttagcacatgaccatacctt

SEQ ID NO: 22898 - DNA, 1304 bp, DROSOPHILA
taatgtcgacatatttatatacatttcttataattattttgttatcaaagaatttcgccgaaacggaaattttatttttaataaattattgatttttattgaattacaagtgtcattctaaacagcattgtataataccgcaaaaatcgatagtcgatcttaaatccttgttcccgaatgtccgtaaagtgtcatctttaaaataaccgaatggtcgcgtgaaaggaggaaactattttgcacatttcaatctgcactaaagcacatgtatatctgggttcacctgcttttgtctttactacgaaatcatttcacaagtttcctggtcatttgttgctcgaacaatgtcagattcgactattttccgttttaactcatccattcttgatcagtcagcggacagcaacgtatccagttcgagctccaattccagtgtatccgactcttctgtggactcccattcatccatagaatccaattcgggacacaatacatccgtggaatctcagtcatccgcggaatctgattcatccgctgattcccattcgtccttggaacgcccatccccagtggagcgtgatttatctgtggaatcagactcatcttcagccaccaataccagcgaatcttcagtcggagaagcttcaaaccaactgcagtcaccgcaaagcaataaccccttaaatatggctaacttgtctgtctcgactgaagatgctcattcgcagatcagatcacttacccaggatgtgatccagatggaagcagagttggatcgcatgaatcgctactgcgaggaagttgtggcacagattgacaccttcgccacgagaacctcaacgccaacaactcgtagaattcgccgcagaacgagtccagtagaagtgatagatctgtcccatttggaccgtgcaccacctgttcgatccgctcggaatcgtgatcccgatgctttcatcgatctatgcacccccgaaggcccaagaagtcgcacagtgaatcttcactccaacgactccctcaccattctgccacgtcggtcagccgaaaatgacccggtagtggatctcgacgttgcgtcgccaccaaaacgcgttaatcgcgacattgatgagtcccaaaaagaggagttatacaagtgccccatctgcatggacagtgtatcgaagcgcgagccagtgtcaaccaaatgtggacacgtcttctgccgcgaatgcatcgaaacagccatcagagctacgcacaagtgcccaatatgcaacaagaagctgaccgcacgtcaattctttcgcatttacttgtaa

SEQ ID NO: 22899 - protein, 319 aa, DROSOPHILA
MSDSTIFRFNSSILDQSADSNVSSSSSNSSVSDSSVDSHSSIESNSGHNTSVESQSSAESDSSADSHSSLERPSPVERDLSVESDSSSATNTSESSVGEASNQLQSPQSNNPLNMANLSVSTEDAHSQIRSLTQDVIQMEAELDRMNRYCEEVVAQIDTFATRTSTPTTRRIRRRTSPVEVIDLSHLDRAPPVRSARNRDPDAFIDLCTPEGPRSRTVNLHSNDSLTILPRRSAENDPVVDLDVASPPKRVNRDIDESQKEELYKCPICMDSVSKREPVSTKCGHVFCRECIETAIRATHKCPICNKKLTARQFFRIYL

SEQ ID NO: 22900 - DNA, 4650 bp, DROSOPHILA
gaaagcagctttggtgatcttgaacagcgaagaatccagcacggacgaccaaatcgagagtctggatgtcataaggagccacatcgatgacatcgacaatgccataacgctggtgaagctaggaggaactgcaactctactccgctacataacacattcggatagcgaagtgcgagaatcggcactcaatactgtcgctgaagtggcccagaataatgtattttgtcagaacgccctcataaacgataagtttttgcctgcacttgcaaagaacttgagccattcgaatccgaataccgtgcggtgctccttgtatgcgatatcatcgctgataaggaactttcagcctggatacgacgagtttaagcgcataaaggggatcaggtccttgataccctgtctgaaatccacaaatacaaatgtctacgtgaagactgcttttctaattgcatcgttaacttcaatcgagaagtctgtcagaggtaaattgaagtagtaattataacccagtgtttgaaatcctaattatttgtattcccatcagatgattttgtgaaggaagaagtgtttcctgtgctagtggaaaaccttaagcccgttgatgactttgatatcaaacaagaaactacgctttttgcactttcatctctttcgcgggaatcggagttaaaactctctacggaaaaacgagaggaaatcctatcgaagcttcaacaaattatttccaaaaacaaacagtcggaaacgtgtgaagtaagattattttatatatctattgttatgtatcaaatttcatacctactttatttacaggacatggttaattatgcaagaaatatttttgacaacttaagtgcacattaaaaacaaatcgatttttcacgtaaatgttaagttaaataaaatgggctttgaaagtatctctagttcacaaatctttcgaagaaacacattcctgtgtttataatcttgtaaaaatttattaatttcaatgcgtcagttatgttggcaatgtgtcaaagtcgtcaccaactgaaacgatcggaacgtgctccaaattaacttcaatcgggttgtcacatagcctatttcgttttgcaaatatattccaatccatcacctgcacggcgtgcagactttccgcctcgttatgatgccgcaacaccatggactccttcaaaggtaacaacaattaagatttacaacgaaaaatattttgtttagggtcagcataccttaattttctcccacttgtcatcaacatcttgcagccagctgaggagcaaacgtccattaaagcggcaacgagcactcttttccttttcatcctgctccggtgtgatcatgttgtagacctcgtcgtccttcaaatacgtgcaaacggaatagggcgccggctgtccagatatgctcctggccgccttcgagtgaacgcgtattatctcctgctcaacgttcatgcatagtttctcccgctccacggtgtgcgcttcgatcagatctcgcctggccttctcctgatcctgatagatcctctccatggcctgcggaacagtgcgtggaatatccggaactgagatcgtcgcattgcgtcttaataagtaggatttctttgtcagcagatactcgttgtaaccttgcggaggtcttggcttcaccggatacaagctcttccacttcttttcgatctgacgacggatgctcaagaacatctggaagccattggtgaagggatggtcatgggggtgagattcttcggagttgacaccggaatccgccgcatttgagttcttcgaactgtcgtcggtgtttttcggtcgaatctttcgcttccgtggatggagttccacgttcgagggatttatgtccttggacgaggatgtcgacgacgtcgacgggcttggaacattggtgattgcctcctggtcaaactggtggccctgcgggatcggactagatgtcatgttgctataggagagcttcacatctgcaggatcgttggcatgattcgatgacgctggcgatggagagctgctctgcatttgcggggaggagttattggaactgcgctccacactggtcactccagtgcgatgagagcttcgcaggaccctcaggttcttttcgtcattgaagagctttatattcttgtcatcgagggctgtggagcaaatgctattgctcttctgtggactttcgtgcgggctaatagattgattggttatgacggtgtcaatggaatcgctattggagctgaccacatacggcagggcggcattgcgagaggcagtcaccttgccagttcgaagcacattgccctcagtgtcgattgagcagttctgctgcggaatcacaatttttaatggcggcactttgagtcctccgttgtataggctgtcgttactcttgtaatcatcgctgcactccgtttcgttctcaatatctacattcttactagtctccgccggctccttttcggcattggaagcgctgcttttgtttcctgacggggatcccttcgttgcagctagcttggagcttttctccacgcgcgatgtgagcttcagggaggcccccttcacgtcctttccatgctccgaatccttgcgcttctttttctttacgtcctcgccagattcctcgtagtcctcctctatgtctgagtagcagcgcttggcagccgaagttccctgatgattcgtatcgctggatttaccatcgttgctgctctcctccgctgaagatttgtctttcgtgtccaggacctcttgcttctcattcaggctgccctcgtcagtctctgcgtctcctttcttgcattcattcttctttaaggtggtgcgggatgaatctgcaagaacgagaatcttatacattacatttgacggctgtgtgatttagtttggaagatcatgtaggaagtaaaatgaaagcttattgtctatcggatatcttttcgggtggaatttgtagttatgtttgaaggaaaaccaactaaaatgattttgtgtgaaaactaagaacttaagcatcgttaaatgagttgtttttaattttggtttctaaagtattagctcggataagagacagggtttttttgacatctttacacatatttcttcaataataattggtatcttcatttgaatcagttaaatgacaatttatccgcaatcgaaaccagtttctcggatacttttacattattcctgactctcagatacatttatgtatgtacatacgtagatatgtacatgcatagatgtatatgcgtgtaagtatgtacgcagcgaagtacccacgatgtaaattgaaattcaagccgacgagcaaaagttctaagctttgtgactgaactataaaatccacttgaatcatgtgaaaagtagacattcacttaattattttgcttatttacctgtcgacgagttggctgtcatttggatgagcagagccatttgctgcctctccgacattggcgtgtttgagttcgatctgggttgggtagctcctgtattaaatcctatccccttcggtcttgggggtggcatactcttttgttcagttttagacggtaaaaattaaaatatagaacaaaaacggagacttgaaaaagtcttgcaaaatttattacaaaaagaatagtgcgaccgtatcgtgaatacaaaaatatgccagcttgctaatataataacgatgttttcaaatccattaagttaacaacaaattaatttatatattatgtgtacaaatttcaagatacacctttaattagttccaaaaattaaattttttattgaactaaatcaatacctgctccaccaaggtatgtgcgtttgttgacctccaacatgttatagatgcttacaaatagcatgttgcgcattattacttttaactactactttatttatactacatcttagctattatacgaagtcttattgttagtctacccgattttttcaggaattttcatttctttagttagtgtttcgattccactgcgttctcctcccgacagtgtgaccactactgcacagttgaagaaaatcctagcttgtcaaacacaattcaacgccccggctacggtcacactcagttttattttagaagttttgcagtgtaagatatttttatagcaaatctacgcactatttcgcttatttgaggagtttgcagagcaaaaccgctggtaataagttacaatatttgaatgcactgcgcgataacttgcataatcatttccaactggatttcgaacgacaaaatccattcacccacacacaaacacatctacttgagcttatctgtgtatgtacatatgttgcacataaatataagtgactgccacttgaagaaaagttttttactggaaaatatgattcgttttacataaataatcaagtctagttggaaaagtgctcggcggcagctcgtgtggcaaagtaaacacaaatggaggcctaaggcctaagtaatcgtttagcatgataaatactaaatacaatctcttaatgccactaacttttatgtttaagtgttcatagatattatgtacaaaaagtgactcactttttaatacactggaattagtgagctggggtgttgtaaccccatttgcaatatttataatctgactattccaat

SEQ ID NO: 22901 - DNA, 2022 bp, DROSOPHILA
tcgcactattctttttgtaataaattttgcaagactttttcaagtctccgtttttgttctatattttaatttttaccgtctaaaactgaacaaaagagtatgccacccccaagaccgaaggggataggatttaatacaggagctacccaacccagatcgaactcaaacacgccaatgtcggagaggcagcaaatggctctgctcatccaaatgacagccaactcgtcgacagattcatcccgcaccaccttaaagaagaatgaatgcaagaaaggagacgcagagactgacgagggcagcctgaatgagaagcaagaggtcctggacacgaaagacaaatcttcagcggaggagagcagcaacgatggtaaatccagcgatacgaatcatcagggaacttcggctgccaagcgctgctactcagacatagaggaggactacgaggaatctggcgaggacgtaaagaaaaagaagcgcaaggattcggagcatggaaaggacgtgaagggggcctccctgaagctcacatcgcgcgtggagaaaagctccaagctagctgcaacgaagggatccccgtcaggaaacaaaagcagcgcttccaatgccgaaaaggagccggcggagactagtaagaatgtagatattgagaacgaaacggagtgcagcgatgattacaagagtaacgacagcctatacaacggaggactcaaagtgccgccattaaaaattgtgattccgcagcagaactgctcaatcgacactgagggcaatgtgcttcgaactggcaaggtgactgcctctcgcaatgccgccctgccgtatgtggtcagctccaatagcgattccattgacaccgtcataaccaatcaatctattagcccgcacgaaagtccacagaagagcaatagcatttgctccacagccctcgatgacaagaatataaagctcttcaatgacgaaaagaacctgagggtcctgcgaagctctcatcgcactggagtgaccagtgtggagcgcagttccaataactcctccccgcaaatgcagagcagctctccatcgccagcgtcatcgaatcatgccaacgatcctgcagatgtgaagctctcctatagcaacatgacatctagtccgatcccgcagggccaccagtttgaccaggaggcaatcaccaatgttccaagcccgtcgacgtcgtcgacatcctcgtccaaggacataaatccctcgaacgtggaactccatccacggaagcgaaagattcgaccgaaaaacaccgacgacagttcgaagaactcaaatgcggcggattccggtgtcaactccgaagaatctcacccccatgaccatcccttcaccaatggcttccagatgttcttgagcatccgtcgtcagatcgaaaagaagtggaagagcttgtatccggtgaagccaagacctccgcaaggttacaacgagtatctgctgacaaagaaatcctacttattaagacgcaatgcgacgatctcagttccggatattccacgcactgttccgcaggccatggagaggatctatcaggatcaggagaaggccaggcgagatctgatcgaagcgcacaccgtggagcgggagaaactatgcatgaacgttgagcaggagataatacgcgttcactcgaaggcggccaggagcatatctggacagccggcgccctattccgtttgcacgtatttgaaggacgacgaggtctacaacatgatcacaccggagcaggatgaaaaggaaaagagtgctcgttgccgctttaatggacgtttgctcctcagctggctgcaagatgttgatgacaagtgggagaaaattaaggagtccatggtgttgcggcatcataacgaggcggaaagtctgcacgccgtgcaggtgatggattggaatatatttgcaaaacgaaataggctatgtgacaacccgattgaagttaatttggagcacgttccgatcgtttcagttggtgacgactttgacacattgccaacataa

SEQ ID NO: 22902 - protein, 615 aa, DROSOPHILA
MSERQQMALLIQMTANSSTDSSRTTLKKNECKKGDAETDEGSLNEKQEVLDTKDKSSAEESSNDGKSSDTNHQGTSAAKRCYSDIEEDYEESGEDVKKKKRKDSEHGKDVKGASLKLTSRVEKSSKLAATKGSPSGNKSSASNAEKEPAETSKNVDIENETECSDDYKSNDSLYNGGLKVPPLKIVIPQQNCSIDTEGNVLRTGKVTASRNAALPYVVSSNSDSIDTVITNQSISPHESPQKSNSICSTALDDKNIKLFNDEKNLRVLRSSHRTGVTSVERSSNNSSPQMQSSSPSPASSNHANDPADVKLSYSNMTSSPIPQGHQFDQEAITNVPSPSTSSTSSSKDINPSNVELHPRKRKIRPKNTDDSSKNSNAADSGVNSEESHPHDHPFTNGFQMFLSIRRQIEKKWKSLYPVKPRPPQGYNEYLLTKKSYLLRRNATISVPDIPRTVPQAMERIYQDQEKARRDLIEAHTVEREKLCMNVEQEIIRVHSKAARSISGQPAPYSVCTYLKDDEVYNMITPEQDEKEKSARCRFNGRLLLSWLQDVDDKWEKIKESMVLRHHNEAESLHAVQVMDWNIFAKRNRLCDNPIEVNLEHVPIVSVGDDFDTLPT

SEQ ID NO: 22903 - DNA, 3260 bp, DROSOPHILA
aacgaatctagtatatccttatacgaatattatgtaaattcttttcagattcggatggggaaatacccaaatgatcaaaaataaatgatacgctatggtggtgctattgattttttcgaaactgtatatttgggttctgtactgtatttgggttccgaaatatgtacgtttcattaatatcgctcattcttctatcttttcagtcgggccatgtacaagcaccaacgcgagactggtcaccacaattggccacacaactgcagcaagtgtggccaggtctttcgcacatcaggctttatgcgcatgcactccgtgaatccctgtgagcgaaacttacacaagtttaaaataactaagccaaatgaattgcagcaacttggcaaaaaaccaaagccggaatgaatctgtttgtatacagcgaagcattaatttaacattaatttaccattaatttagcattaatttagcattaatttacctttaatttaccattaatttacttaatacgaaataaagaatgtcataatggtaaaaatctagatttttgttttgtgtacttttgtgcgaaatagtttgcgaacaaattaaatccactttgcagtgatttgtgtcgctaacacaattatttgtcaagctacaaggatgaaggagccgcatggaggtctggatgtcctggtggctcctgtaacaaggacgagctgccatttgccagctgcgaagcacgtgaaaccagtttcctcagtttctttaaaaatgtatagaatgggcggaaattgtgtgtgtgcgtcctctgtaggaattcaagctgctggcattcagcaggctgtttcgccatccgtttaaaggattcgactatttagttccttctctgaaggaattttgagtatttccctttgcgaaaaatctgagaccttgctaccttgaagcttaaagtagtactcaaagtcgtcgcttaataaaaaaaaggagcatctacatatcgaggtagtagtcaagtatattaactggaaccagcctcaaacctaaagaaatgagtacaaatataacttggtttcccactttgttcatttggggcatagtaaaatcatggagaaacgttaaagttgccaaccgcagactcaaactcaggttttaaggcaagcaaattataattaaaaaccttcataagtggattattttacgtttgcctagtactagtatggtgtataaacaatttagtattaaaaagagataagacattttgtggaacataatttccaattttaaataggcgagtacaattaacaataatttcaaattgaaggatattccgaactacagtgattagtacagtccatcgcttttttaaattcatatttgcctcatattcgtttcctcaaactaatgtattcatgattgatctatgatcgcatactaacctggctgcaacaggtgtgatgagccacaggtaacccccgttgacggtggtcatgttgctgatgcctccctgcggatcggtagcaccagcaccgccgctggccaggcgctcttgctgctgctgccgctggacatgttgctgctgcgtctgttgatgttgctgcgtctgctgcacctctatggctggctggtggcgactcaaatgagggaccagtcgctgctgctgctgctgctgctgctgctgctgctgtcgtcggttgttgctgatgctgttgtgattgcttctgctgttgctgctgtgattaccgatgttgttcaactgaagatcactaaagctgccggccagggaactaaatcccgtggccggaatgctgccagagatcgtgttgattacaccggcttgctgatgctgctgcggcgcgagtcgctggccccgcggcaatgttgcatagggcgagtgttgctggtggtggtgctgctgctggtggtgcagcaactgttgctgctggtgctgcgcctgctgcgatgggtggctgtgctcgatggatgcactagtggtcagctggtgtatggcaatcggcggcctttcggtggtgttgcagattacattcgctggtcgaatgttattgtacggattctcgctgttgatgctgtgcgtggaggccacgcgaaacacattgggcaccgaaggataatccctcattttatattccactagctgcactgagccagaacgaacaaaaaaaaaaaaaaacaaaacaaaactaaaataaatccaacactttgaaagcgcgccaaaagttggtttgttttcgaatttctggctgggcacgtccgttgcgctggagaactttcactcgactaagggaagctgtggtcctggccaaaggactcgactcggccatgtaaaacgaaccgaaacgaataacttcggctgctgcggatgatgattttgctgcctctgctgctgctgctgctgctgctcactggcgattataaaacacaggagccatattttatctacgcttttgatggtctccatccagcagcaatccacgcctgatacccatcaccaatcctatgattcgccgcttccttggcagacctaaatatagcggctatgaccaatggaaaattaacttttacatttgcacagctggaaaatcccaggtatcaggcgtttcagctgcggcctgtagagttcgtatcaattattctgaatacgaaaattacacacattatgtggccaacaggcgtgcactgaaagaaaagccttgatttctataactgtgcataagattatgaataaaattcataaaaatcaattgggttttttttataactaatacaaattcaaaagagtaattccttatcgtaagcgttacgcacggagtcgtcgaggatcgtttcgtcagttaaccgcgcattttgaatacaaattctttaggttttaaagtttacgagttctcaacgttcatttatagggccgaaagcgcttcttctacatgttttctaactgtaattaagtagtattatattttccatttgattgtacataggtcattgttcgctgtgcagtccaacggcaaccaggagtagtaataacaacaaccagcagacgtttgcaacttccgttgtaagctaaaagtgacttccggtcgcttggggatccccactatctgtctgtgcgcgtgcaagtgtatgtgtatgtgtatgtgtatgcgcttgtgtgtgtgtgtgtgtgtgtgtgtgtggatatgggatatagtttgccgagttgttgttgcactcgcctgcaaatctaagcatttattgcaaccccggcttctttggctgcaactctc

SEQ ID NO: 22904 - DNA, 864 bp, DROSOPHILA
agcgcaacggacgtgcccagccagaaattcgaaaacaaaccaacttttggcgcgctttcaaagtgttggatttattttagttttgttttgtttttttttttttttgttcgttctggctcagtgcagctagtggaatataaaatgagggattatccttcggtgcccaatgtgtttcgcgtggcctccacgcacagcatcaacagcgagaatccgtacaataacattcgaccagcgaatgtaatctgcaacaccaccgaaaggccgccgattgccatacaccagctgaccactagtgcatccatcgagcacagccacccatcgcagcaggcgcagcaccagcagcaacagttgctgcaccaccagcagcagcaccaccaccagcaacactcgccctatgcaacattgccgcggggccagcgactcgcgccgcagcagcatcagcaagccggtgtaatcaacacgatctctggcagcattccggccacgggatttagttccctggccggcagctttagtgatcttcagttgaacaacatcggtaatcacagcagcaacagcagaagcaatcacaacagcatcagcaacaaccgacgacagcagcagcagcagcagcagcagcagcagcagcgactggtccctcatttgagtcgccaccagccagccatagaggtgcagcagacgcagcaacatcaacagacgcagcagcaacatgtccagcggcagcagcagcaagagcgcctggccagcggcggtgctggtgctaccgatccgcagggaggcatcagcaacatgaccaccgtcaacgggggttacctgtggctcatcacacctgttgcagccaggtttgaggctggttccagttaa

SEQ ID NO: 22905 - protein, 240 aa, DROSOPHILA
MRDYPSVPNVFRVASTHSINSENPYNNIRPANVICNTTERPPIAIHQLTTSASIEHSHPSQQAQHQQQQLLHHQQQHHHQQHSPYATLPRGQRLAPQQHQQAGVINTISGSIPATGFSSLAGSFSDLQLNNIGNHSSNSRSNHNSISNNRRQQQQQQQQQQQRLVPHLSRHQPAIEVQQTQQHQQTQQQHVQRQQQQERLASGGAGATDPQGGISNMTTVNGGYLWLITPVAARFEAGSS

SEQ ID NO: 22906 - DNA, 9434 bp, DROSOPHILA
agctctttggcactcggctggacttcaacgagtactacaagaagagggacaccaatttgagcaaacccctgaccttcgagcacatgcgcatgagcaatgtgttcgccgtgaacagtcgcttcgtgatatgtacgccgtccactcaggaatagcgaccaatgtccatgcaatcggtttatcccagtgtccatacatcataccaaatcccaaatcccatacagcatcagcactccattcagttcaattgctgctaaatatttgagatatctcgatatcattggagccaatccaaccaaacaaactaatccaattattaactaagccttcgaatcgaaaacaacctctatacatatatatctcaagctttgccgtcaatcgcctggctgcaagccatcaacttaagatatctccaatacaaaattattgagtagttgtaacgaaagtattaagcgacaatttgtttgtcgaaaaacgcaacgttctattttgtttgcgaatcccataattttttttacatcgaagcttagttgaaatagattttcgtaagtgcatttgccaattgccatgttgtaattaaagagaataagagaatgttacgtactttaaaagaatgttttaaaaaagttaatgttttgaacagttttaaaccgtaatgcgagctcgaaataaacgcaacttgcattgaaagtttccgtctctatttaattattataaattacaaaaatttgggttataagagtgtaatagttatttattcaattattgtaaatgcgtataaaaagaaagccgaaatattcagttatttatattatttccttctcactctcactcaaactttctgatctcaaaacggttttgtaatcgaatgcgcagcgagttatcgacagtccacgaagcggttaacatttcaccgctagcgagtgcagccacctactattcagcgtagccaaccaccaacgtgcagcaaacatcgatagtatcgattaaacacaaatttgcgtaccacctctagtttgcgagcgtattaaagttaaaaaaaaaacgaaaacaaatcggaaaaagacggaagtgagtgctttgtgctgccgccggtgatgtgctgaaatcgcttcgccaaaatagcccaatttcccaatcgagacaccgattgcaaatcaaagtaacgccacggagtgcagcaaaaagaaaaacaaaaacaacagcaactgcaaacatggcactgaaaaaagtgaagggtaactttttcgagcgtatgtttgataaaaacctcaccgatttggtgcgcggcattaggaacaacaaggataatgaggtaagcgtgcagccccgcctccaccgcccaccaaaacagctgtcctccaactgccacgccccccccaagcggcccagctgtgcgtccaattagaactcgctaattggctgacaaatttcgtttgcattaagggaatcttattagagtttggtgtgcttgcatgtgtgcgtgtgtgtgtgtgtgggtgaaagtggctgtgtgtttgtgtgtgtgaatgttttggcatctgccaacagtgcaaaaggaaaagcaggaaaagcttgaaaagaaccacaaaaccgaacgcagaaactcccaacgcaccaaattaattagcaagtggcttttatcaaatatttacccacgttaattcccccgccgttggtctttttattcggtccttatcagaatgcttggcaggatcggctaacggtacttgagttttcacacggagagaaaattgcgtgtgatttgcaaaaataaaattgtagcttcatttgcttcgattgttagtaattgcaaatattaatgcaataaaaataataataaataaattgccaaaaaatcagtttccatccagttatggtttgcatatcgtgcaacaagaacaattgagaaataagaatatatgcaagaataactaagtttgtctacgtaaacaaaaaaataagtggctcttgattgaattcgatttctatatcttccactgcgcatttcgattgttatttttgctcttgtgtggtccactgtaagcgctgatttacaaatgtgcttaaaattatagcattcattcgtttcagtaagataaaaaaataaatattaattgaaaattgtgcatttttaatctcaactaaatgttactcatcagctagcgcagtttccatataacttttcatgtaaacaacttaaggcggccattatatttccattttgtacagcacaaatgaagagtaaacaatcaaactttgtatatttacattcgattttattaacaactgcatcggaattaatgcaacaacactattattctacccgccactgtatgatttggaatttgtgtttttctttatttttgttctattgctgtgggcataaaactgatagccccacgacgattctcagatatgtttgttgttttactctgcgctgccattgcacatttcgcattttcacatactatatttcgaatataaacatattgattgacaataactttctccgcaggccaaatacatatcgacgtgcattgaggagatcaaacaggagctgcgacaggacaatataagtgtcaagtgtaatgcagtggccaagttgacctacgtaagttgaatcttggaatccttaaaccaaagacgcaccacagatgattaactcactatttgcgaacaatgatgagggacttttaaaatttataggggtgttttaaaatggttaattagacaatcgcaaatgtgctgttcaaaaataagctgattatacgcaccgacagcccaaagaggattcaggattccccttcattagaatcatcagtgcagatgattgcgtgtgcatggatgtgcaccggattctggtggcagccattcaaagtcgaccaagtgcatggctgcacttgatgcaaattgcctggcggccggtcggtatatatggggggtccttgtaggcaagtgcgacaataaggactaaaacagcaacagccgttaagctaacaactgaatcggcggaaacaaggcgaacgaaggagcaacctttgttccacgcccacaccgctgggtgtggtggtggtggtggtggtggtggtgtgcccaccactaacaagcgatccaaaagatgccatcaaaagttggcacagttgtgttggccaaaatagcactgctatcctgcaaaacctaaaaccagttggctgaaactgaaatctagtgcataagctaaatggtttttatcatttatagttcgattgccaagtctaggtaactagtgacttaccctcgagtgttaggtgcaactaaggcgattttaatgctaacgagagtccttgggcctatcctctgcacatatttcacaggcatacatttgcacaaaatcagcagaaaatgttaatatttattgattcgatttcgcttgcgacagatacaaatgctgggctacgacatctcctgggcgggcttcaatatcatcgaggtgatgagctcatccagatttacctgcaagcgaattggctatctggcggctagccaatgtttccatccggacagcgaggtaatattcacattacttactgcattaaagaaagcatttaatttcgatttctattttccgcacattgcagctgctcatgctgaccacgaatatgatacgcaaggatctcaactcacagaatcaatacgatgcgggtgtggcgctcagtggactgagctgctttatatcgcccgatctgtcccgcgacttggccaatgatattatgacactggtatggatattatgacactttgattgatttgtacctatcgcaactaatctgcagatgagttcaacaaaaccgtatctgcgcatgaaagccgtccttatgatgtataaagtatttctacgctatcccgaggcattgagaccggcatttcccaaactcaaagagaaacttgaggatcctgatccaggtttaaacaacatacatatatatatcatcctgctgatatttccatgcaattcatatatctaatgcactactattttgggttttacaggtgttcaatcagctgccgtgaatgtgatttgtgaactagcacgtaagaatccaaaaaactacctgcccttggcgccgatcttcttcaagctaatgaccacatcgaccaacaattggatgctgatcaagatcatcaagctggtgagtgcggatccactgatcactggccaccatatagattcacaatgattactttattttgacttttaagttttgttttaagtacgtatctgtttatcttttgattttcgtttgttcgtttgtgaacaaatggtgattttgtttttagctgtatactatgtatgtatataacatacgtatgtatacctcttttatatatgacaattgaatttttgtctaacaaaaagttaattaacactacaactactcctccccctctcctccctctgctcccgcctccaaacaaaccaacaaaaaaaaataattaataatatatacaaaccactccaaacaaatactaatgaaaactgaatgaaatgccaaatgaaaatcgaatgaattttagttcgcgagcctcacgacaattgaaccggcgctgggacgcaaattgactcagcccctaattgaaattatttccaggtttttatcggcgcgcttttctttaatcagaccaacgaaaaatccaattcagaaaacttaattaaaaaccagcacgcgctttgatttactctaaagcattttactatttacaatttagttattgaacaaatccttattgtttcgttggtatatattttcgtatcctaattgtttaaatggaatcaacacacagacattgttgtattctttagtaattatttccatgtcttcttttgatttaatcggggcgaaatcgtatagctactttttttacgatttttctcggatttatctacatcacatatttcacagccactccttcacaaacccccctcccaaaaaaaaaaacacatgagcgtcgtaattgattattataaatgtattgaaattacccgaatggacaatgcaatttcaatgacacacaacttttgtacacccatgttgatgcacatgatgatgttccatgttccccaaaatgaacaaagcttatcgaacaagttataaattgatatacgttttcaatatttgaaaccatctatgtctataagctttgcttcatctgatcacatcctcaattcacaccgagtcgttatcctttggcttcattgtgttgaaaactgcttaattcgcttgattcaaaataagaacaaacttcaaacgatgaaatgtataccaataccaactattatttcgctataaaaaataaaaaaacatatatatgtacaaccaagaccctgagatacacaaaaatatatagacatatcatcaagagattcgatccgaatggaaaaggaccaggaccagtttaagagaaagttaaattacttcttagagtattccagttccagtttaccattttcttgaacacttcattttctagtttcgttttcggttttagctttagttttagttctagttttagttgtggataaggacgttgatgatttcgattgtatgtaatttataatttcttgcttgtttctttttctctttgcatttgcagtttggcgctttaacccccttagaaccccggctaggaaagaaattaatagaaccactcacaaatctaattcataggcaagtcttaaaatcattgcaaaacaaacaaacaaaacaaaacaaaacaaaaatacaaatacaaatcaactgaactgaactgaaaatgtaaaatacgatacgatttcccaagaatgtgtggaaaacgattgcaacaaagcaaggcgaaagcaaaagaaaaaattcgaaatcaaatcgaaagtgaccgattaaaggtcgatatcaattgatcgataattgaagctgctcgatgattgtgcgtctgaacgttatatattcgtttattatcatttaactgtacaaatcttctagcttcttatgtccgttacctctttctctctctctctctctctgtctatctctttctctctcccactcgctcaacttatgactgtcgccatactgcttaagtttgtatttgtttctataatttcatcgtttgcctatcgattttttgcttatcgagcacactcattgagatccaaagttctaaactagtcaaatcggatgaagcgaaagaaaaacaaatgatcgagccgttgcagttgttgttgttgctgttgttagtttttctttttggttgccattgctgcgttgctttgcaatgttgtgtttccccaatgtctatcgcaataatcgctaattgttatcgctaccacaatatatttatatatatatgctatcgatattgctaccgttgttgttgccattgccaattgctatttgctattgttgtagtgcaatgtttgtcgctttaccgctgcttactcttaatacaagttcctactttttgggggtctcaaactaatacaaaccacaaaaaaaaaacaaaaaaaattatcaaaactaaccgaaacaccaacaaaaaatgaaaacaaaacaaaacaaaaaacgaaccaaaaaccaaacccaactcactcaacagcacctcggcgatgagtctcctgtatgagtgcatcaacacggtgatcgcggtgctcatcagcattagcagcggcatgcccaaccacagtgcctccattcagctctgcgtgcagaagctgcgcatcctcatcgaggactcggaccagaactgtgagtataaataacccagctaagaagctaacgattatattttcaattttcccattcagtgaaatatctgggactgttggccatgtcgaaaatcctaaagacgcacccgaagagtgtgcaggcgcacaaggatctcatactcgcctgcctggacgacaaggacgaatcgatacgtctgcgcgccctggacctgctctacggcatggtctcgaagaagaaccttatggagattgttaagcgattgctgggccacatggagcgggcagagggttcggcctatcgggacgaattgctttacaaggtgatcgagatatgcgcgcagagttcgtatctgtatgtgaccaacttcgagtggtatctaactgtgctcgtcgagctcattcaacttgaggctggctcacggcacggtcgccttatagcagagcaactacttgacgtggccattcgagtgcctgttgttcggcaatttgccgtcaacgagatgaccaatctgctggacacgttcaccgtttcggcgcaaagtaattccatgtacgaggtgctctacgccgccgcctggatcgttggcgagtttgctggcgaactggaggatgcggagaagacgctcaacatcctgctccgtccgaggctattgcccggtcacatccagggtgtctatgtgcagaacgtgattaagctgttcgctcgcctggccaccacgtgtttagagcttcaggatctgcctggcttggtgacagtaagtgctctctctatacgtattttcaaatgattgtattctgagtattaccattatcattggtagctctgcgaccatgtgttggacaagcttcagcacttcaatggttccagcgacattgaggtgcaagagcgagccaattccgcttgcatgctgatcgagatgctgcgcaaccagctgtccacgtcgaccgatgccatggccatggacacgacgacggagggcggcattccgccgctggccattgagattgtccaggagatgacgctgctgttcacaggcgagctaataccggtggcgcccaaggcgcaacggaaggtgcccctgccagatggtctcgatctggacgagtggattaatgcaccgccaccggaagatgcggcaagcagttcatcctcggagcacgacaaggacgagctattcgttagtgccacgcaggcaggaacgggagctgatggcggcgaaaagcggcgacagagtctcgagctcacgcctgagcaactggagcggcagcgaatggctcgtctcattgagcagtcgaacaatcctcactacctcaagtccacgcccacggcgagtggtgcctcgaatgcggatcagtatgacaatattgatgacatacccattacggagctgccactggacatggagggcgtggccgcactgcgcgtgggcagtaagttatgcgcagtgattatacacaaacagcgatgtatcaagttatctgtttttgtagtcaccaagcggtcggataagtacctgcaggaacagcaggcggcgcagggcagcaaggatggcaagaagaagcataaaaagggtaaaaagagcaaaaaggccaaaaataaagtggcatacaacagcagctccgaatcggaaggtggtaagcccggagttaacaatgttgtgtcgcattacaatgacttctaacttcaacactttgcagaaccgaaacccttgcacattgtgaacaccacgctagacatgcccgaaggtgtctccatgtcggacagcgaggacaaggatggcaaatacgatccaaatgatccgcatcgagccctggacattgaattggacatgtaatcaacgagctgaaagctgcgcagaattaaaaaaaggctaattgtatttttataaatctccttacagtacggagttcgaggcgcccgcggtgaggtcagcgtccaaaaagtcagcggcggacaaagagaatctcaagacgccggcggattcggccggcggtggtaacgccgccaagaaggataggaaaaaggacaaggacaaggacaaggagaggaaggtgaagcgggagcatcgggagagcaagcgggaacgcaaggaggctgctgttcagtcggtgatcgatctcattgacgccgacacgcccactcccagtcccagccacatctccgccaccagcaacaacaacaacacttcaactgtccttccagatgcgcccaagcatcacaaaaagaagaagaacaaggagaagacgacggatgaagcgcctgatgcactggccaccgccaccgggagcagcatcatcgatgtgggcggcgaggaggcatccgaggtggcgtccaaggtgcacaagaagaagcataaaaaggagaagtcacagcgcaaggagaagaagaaggcttcagaatctgcatccgtatccgccatcgtttcgattggcgactacgaacagccactgggaatctcaacgcccagcaaagagattttgtaattgctaagctccaagttccactaatctaattaatcattattacgattgttttttgtgtcgattgattattaagcctttattcggaaattttgtgagaggcgaagctagcttcagaatctctccattttcgttaagttgaaacaattgcctcctaagagaatgaaaaaaacctaaaaaaattatcgctgcgatataaaaacaaacaaaacca

SEQ ID NO: 22907 - DNA, 2691 bp, DROSOPHILA
taccacctctagtttgcgagcgtattaaagttaaaaaaaaaacgaaaacaaatcggaaaaagacggaagtgagtgctttgtgctgccgccggtgatgtgctgaaatcgcttcgccaaaatagcccaatttcccaatcgagacaccgattgcaaatcaaagtaacgccacggagtgcagcaaaaagaaaaacaaaaacaacagcaactgcaaacatggcactgaaaaaagtgaagggtaactttttcgagcgtatgtttgataaaaacctcaccgatttggtgcgcggcattaggaacaacaaggataatgaggccaaatacatatcgacgtgcattgaggagatcaaacaggagctgcgacaggacaatataagtgtcaagtgtaatgcagtggccaagttgacctacatacaaatgctgggctacgacatctcctgggcgggcttcaatatcatcgaggtgatgagctcatccagatttacctgcaagcgaattggctatctggcggctagccaatgtttccatccggacagcgagctgctcatgctgaccacgaatatgatacgcaaggatctcaactcacagaatcaatacgatgcgggtgtggcgctcagtggactgagctgctttatatcgcccgatctgtcccgcgacttggccaatgatattatgacactgatgagttcaacaaaaccgtatctgcgcatgaaagccgtccttatgatgtataaagtatttctacgctatcccgaggcattgagaccggcatttcccaaactcaaagagaaacttgaggatcctgatccaggtgttcaatcagctgccgtgaatgtgatttgtgaactagcacgtaagaatccaaaaaactacctgcccttggcgccgatcttcttcaagctaatgaccacatcgaccaacaattggatgctgatcaagatcatcaagctgtttggcgctttaacccccttagaaccccggctaggaaagaaattaatagaaccactcacaaatctaattcatagcacctcggcgatgagtctcctgtatgagtgcatcaacacggtgatcgcggtgctcatcagcattagcagcggcatgcccaaccacagtgcctccattcagctctgcgtgcagaagctgcgcatcctcatcgaggactcggaccagaacttgaaatatctgggactgttggccatgtcgaaaatcctaaagacgcacccgaagagtgtgcaggcgcacaaggatctcatactcgcctgcctggacgacaaggacgaatcgatacgtctgcgcgccctggacctgctctacggcatggtctcgaagaagaaccttatggagattgttaagcgattgctgggccacatggagcgggcagagggttcggcctatcgggacgaattgctttacaaggtgatcgagatatgcgcgcagagttcgtatctgtatgtgaccaacttcgagtggtatctaactgtgctcgtcgagctcattcaacttgaggctggctcacggcacggtcgccttatagcagagcaactacttgacgtggccattcgagtgcctgttgttcggcaatttgccgtcaacgagatgaccaatctgctggacacgttcaccgtttcggcgcaaagtaattccatgtacgaggtgctctacgccgccgcctggatcgttggcgagtttgctggcgaactggaggatgcggagaagacgctcaacatcctgctccgtccgaggctattgcccggtcacatccagggtgtctatgtgcagaacgtgattaagctgttcgctcgcctggccaccacgtgtttagagcttcaggatctgcctggcttggtgacactctgcgaccatgtgttggacaagcttcagcacttcaatggttccagcgacattgaggtgcaagagcgagccaattccgcttgcatgctgatcgagatgctgcgcaaccagctgtccacgtcgaccgatgccatggccatggacacgacgaatgacgctgctgttcacaggcgagctaataccggtggcgcccaaggcgcaacggaaggtgcccctgccagatggtctcgatctggacgagtggattaatgcaccgccaccggaagatgcggcaagcagttcatcctcggagcacgacaaggacgagctattcgttagtgccacgcaggcaggaacgggagctgatggcggcgaaaagcggcgacagagtctcgagctcacgcctgagcaactggagcggcagcgaatggctcgtctcattgagcagtcgaacaatcctcactacctcaagtccacgcccacggcgagtggtgcctcgaatgcggatcagtatgacaatattgatgacatacccattacggagctgccactggacatggagggcgtggccgcactgcgcgtgggcatcaccaagcggtcggataagtacctgcaggaacagcaggcggcgcagggcagcaaggatggcaagaagaagcataaaaagggtaaaaagagcaaaaaggccaaaaataaagtggcatacaacagcagctccgaatcggaaggtgaaccgaaacccttgcacattgtgaacaccacgctagacatgcccgaaggtgtctccatgtcggacagcgaggacaaggatggcaaatacgatccaaatgatccgcatcgagccctggacattgaattggacat

SEQ ID NO: 22908 - protein, 627 aa, DROSOPHILA
MALKKVKGNFFERMFDKNLTDLVRGIRNNKDNEAKYISTCIEEIKQELRQDNISVKCNAVAKLTYIQMLGYDISWAGFNIIEVMSSSRFTCKRIGYLAASQCFHPDSELLMLTTNMIRKDLNSQNQYDAGVALSGLSCFISPDLSRDLANDIMTLMSSTKPYLRMKAVLMMYKVFLRYPEALRPAFPKLKEKLEDPDPGVQSAAVNVICELARKNPKNYLPLAPIFFKLMTTSTNNWMLIKIIKLFGALTPLEPRLGKKLIEPLTNLIHSTSAMSLLYECINTVIAVLISISSGMPNHSASIQLCVQKLRILIEDSDQNLKYLGLLAMSKILKTHPKSVQAHKDLILACLDDKDESIRLRALDLLYGMVSKKNLMEIVKRLLGHMERAEGSAYRDELLYKVIEICAQSSYLYVTNFEWYLTVLVELIQLEAGSRHGRLIAEQLLDVAIRVPVVRQFAVNEMTNLLDTFTVSAQSNSMYEVLYAAAWIVGEFAGELEDAEKTLNILLRPRLLPGHIQGVYVQNVIKLFARLATTCLELQDLPGLVTLCDHVLDKLQHFNGSSDIEVQERANSACMLIEMLRNQLSTSTDAMAMDTTNDAAVHRRANTGGAQGATEGAPARWSRSGRVD

SEQ ID NO: 22909 - DNA, 4695 bp, DROSOPHILA
acgaactgcgcgtactcctcgcgccagtccatggatcgtggccatgtccgcgtcttcaactcctgcttctggaccttcaagttgtgcgcatagtggcccgagatcagggcgggatccgtttgcttccggaacgcggtgactgttcgcttcggcttgtcggcggtgtagtccttgtagaacgcttgcgaggtggtgatgtccttgcagcacctcggcagtatgtggtccagaaagatcaaatccatttcggccagcatggcgtcttgtgttttttcagccattgcggaaaatatatttttatgtttttttttgtgtttccgtaaaactcaattacagtgttagcctatgtaaaggtactgtgttctaagtatttttcaatcgtcagattcgaaaaggtatcagtgttgtttgttataacataaaatctcttgacgttggaagaactacttattttttaatataatataatatataaaattaattggtcttgtattataatcatactattattgccaaggcattaaattaacaatgagattcgcaaatctactatgaagtaaataaaattggataaagagttttttaagagattccctaacattaacaatatattaaaaaaatagtagataatacggaattcatattacggatattaacatacagttttgcggcgaattcgatcttaactcagcagtttataacattgcatacttttatgccctatggatttatgcccctattggatttattattatactccttacacataggtcatccgttgatgaccttaaaaatgttcttttaaagtgcaccaaaacttgcacgccatagctttaaagctgaaagactatattgacatatcatattgtatagttattctgatcaataaatcctctgactaaaaatgctaaacccccgaaagggtcttaaaaatgtatattttttaccgtttttgtaagcaattgccataatatttaaatgtctggctcagagaaagaaattgttggtttataataatattattactagacttttattttcattacgacttaacaagaataacatgtaacaattgagtttgacttactacactagccagtaaaatacttgcagagggatccttatcattatggaatcaagggcactatcaactaagggaccagctctctagttacgcttgccattgaggcgatcctggatctgctgcaaactaagcccctttgtctccatcaccacgaagaggacgaagaagaaggccaccaccatgcagacagcgaagagccagaaggcatagtaggagcccaaggcatctaggctgggatagaagaaggtgaccaggaagccgagggtccaacaggtgcttgcaacaaccgaggaggccaccgactttatgttcgccgggaacatctccccgagaacagcccacggcagcggtccgaatcccgtgcagtacacgatgttgtagatgatcagagcaggaactggcatccagaccacactggagatgtctcccttgaccagctgcatgtagaagaatgctcccagggccgcaagcccaatggacatcacactggaggacgtcagcagcatcaccttcctgccaaggcgatcggccaccagaggcgtcagtgccgaggatcccacctggacacatccgattatgatggtggcaatcgccggatccagcccagtgttggcactggcgaagatagactggctgttgaagaggaccacattgatgccggacagctgctggaaggagatcaggccagcgcagatgaacaaggccctgcgattgccggcattcttgaacaaatccatcactgtgcccttgctggccatcgcctcctctacattggcctggatctcggccatctcgtcgtgcacgccctcggcactctggccccgaaggaactgcagcgacttcagtgcctccgactttcgaccttttccggcgaagaagtacggactctcgggcatcatgtagaagaccaagtcgaacactacgggcaccacaatgcaacaccactgtagagcctggtatgaaacatacggtccaatggcatagacgtacagaatgccacctgtagattaagcataaaagattagtcgtttgtcccactctcccttagagggtacctatccaatctacttacccacaatgaagagctgcatcaaggatccggtggctccgcgcacattgtccgtggaaatctcacccacatacatgggctgcacggtcatcacgaagccgacgccaaatccctggatgaggcgggacatgtacagaatccacacctcggaggccaccatatttaggccgaaagccaggacgaagaacagactgctggagaggagcacccactttctgccaatgcgatcagccatcggaccggccacaaatggagccaccagagctccgacggcaatcaatgatgaaatccaggcatcttcatcggaagttatgggccggctcagcggcgagtctgaggtgtcctcggacttgagcttgggcccgatgggggaggtccagcctagggtggttcccaccacaaaggcggacaagttggctacaaagcatgtaatcgattagttaaggagaaaaaaattactttgattgttggacgatgaaacttggttatttaaaaacacaaattaattaaaaatatgacaaattgtcgaaatcggtgtttttcttattggtaatgtaaagtaagtaaatatttaataataatttgttttcttaaaaaacatacatttatgactcaaattactctttagattaatatgtgttaagtcaccccttttggaattcgggatgagttagttatgttatatttgcgataaatgataagaatattgactattgactcacctgccacggcagccataaaaatgcgaccggacttgaccggttcgggtgacatcgttcgagtgtttccttctcttatctggaacgtactgacttccgtgtaggagtactgtactccggtctcctcctcccggcttattgagggcatctggccgacttgggttgtacagaagcagctgcaagagcgcaagagtggaaaagcgaaagtgcctcattagcaatgcggctgactgggattaatgatcttattcgcatttgtaattcaatcggctgcaagttcaaacggtcagaactcgacacgtctccgatttctttgtgggatggaggatgggggatgcgggatgacgcatgccaccatatgggaggggaagccaagtagctaccggaattgtactccaaacagcttgacacattatctgccgattttttaacgcatcacgttatcagaccattagccagtttatctggacttaatagcacagaaaaagttaaacggaggcggaactgcagtcttttcattatttaatgaatgaccaaattattttaattgcactatggacaaattaatgtctgtcgcatttgtactgctaattaatttatttattcgctgccacttatgtaatcacctctggcacttttagcaaatttgtataatgattgcgacaccaagtcattaatggtgtaaagtggaattactattgtattactattcactttgcattcttacagaaaaatatccttggaatcgcagtaaatcccactcgagtaggatctgcaaatgaaattaaaaccgacgcagtccggggaactggagaactgtaatgctgtttgaatagtcgcatcgcgcgaatttaaagattttccaccttatatggcaggctttcgaaatccatacacgtccaataatgctcactgacactcgacttgacgagtgctcctacacgtgcattatcttatcagggaagcgcctcccgattcacggcaaacccatttataggctataccataccataccatagcatatagtactacaagtatattatactattctataatcggagctgccatctctcgatcgaaactctctctgccttggccatcgaatcgaaatctctgtattccgctgttgttcgtttggaatcgcgccatttgtgtgcattttgcacttgaactggcccatatacgtacgagtatgcccacatattaaatgtgataaggaggtgcagcgaaaactatgccccaatctcaatttgtttgcttcgccgactcgccggcaaaagggcgaccggcccacttcggtcctggtcaactaaaaacatacagccctttcgatatacaacaaatcttaacccaaataaataccctatattctgtcgagtgaaggattacaaaaaaagaaaaacgcttttgaacttgatagaagttttccctgaaaagtaagcaaacttcagattcttgctctacaaaggcaaatatttacatacattctggtatttaaattaagttgagtttaaaaatataacgtatattatgcaatgtgtgtttatgtacctctatagggctggaaaacaaacaaaaggcgccaatctacaagtgcctctgacactcacacacccttctgaattcctaaataaaatcaaatgtcgccaagcgcggcgtaaacaagttttgattacgactgctaattattgagtaatttccgatgcattttatagccctgtccttggatctatttagttggttccaaatcgaaggtggggacacaatttctgcgcctggggcgagacacgtgaagagggtgtgagggcactcgaaatggagcc

SEQ ID NO: 22910 - DNA, 1767 bp, DROSOPHILA
attacagttctccagttccccggactgcgtcggttttaatttcatttgcagatcctactcgagtgggatttactgcgattccaaggatatttttctctgcttctgtacaacccaagtcggccagatgccctcaataagccgggaggaggagaccggagtacagtactcctacacggaagtcagtacgttccagataagagaaggaaacactcgaacgatgtcacccgaaccggtcaagtccggtcgcatttttatggctgccgtggcagccaacttgtccgcctttgtggtgggaaccaccctaggctggacctcccccatcgggcccaagctcaagtccgaggacacctcagactcgccgctgagccggcccataacttccgatgaagatgcctggatttcatcattgattgccgtcggagctctggtggctccatttgtggccggtccgatggctgatcgcattggcagaaagtgggtgctcctctccagcagtctgttcttcgtcctggctttcggcctaaatatggtggcctccgaggtgtggattctgtacatgtcccgcctcatccagggatttggcgtcggcttcgtgatgaccgtgcagcccatgtatgtgggtgagatttccacggacaatgtgcgcggagccaccggatccttgatgcagctcttcattgtgggtggcattctgtacgtctatgccattggaccgtatgtttcataccaggctctacagtggtgttgcattgtggtgcccgtagtgttcgacttggtcttctacatgatgcccgagagtccgtacttcttcgccggaaaaggtcgaaagtcggaggcactgaagtcgctgcagttccttcggggccagagtgccgagggcgtgcacgacgagatggccgagatccaggccaatgtagaggaggcgatggccagcaagggcacagtgatggatttgttcaagaatgccggcaatcgcagggccttgttcatctgcgctggcctgatctccttccagcagctgtccggcatcaatgtggtcctcttcaacagccagtctatcttcgccagtgccaacactgggctggatccggcgattgccaccatcataatcggatgtgtccaggtgggatcctcggcactgacgcctctggtggccgatcgccttggcaggaaggtgatgctgctgacgtcctccagtgtgatgtccattgggcttgcggccctgggagcattcttctacatgcagctggtcaagggagacatctccagtgtggtctggatgccagttcctgctctgatcatctacaacatcgtgtactgcacgggattcggaccgctgccgtgggctgttctcggggagatgttcccggcgaacataaagtcggtggcctcctcggttgttgcaagcacctgttggaccctcggcttcctggtcaccttcttctatcccagcctagatgccttgggctcctactatgccttctggctcttcgctgtctgcatggtggtggccttcttcttcgtcctcttcgtggtgatggagacaaaggggcttagtttgcagcagatccaggatcgcctcaatggcaagcgtaactagagagctggtcccttagttgatagtgcccttgattccataatgataaggatccctctgcaagtattttactggctagtgtagtaagtcaaactcaattgttacatgttattcttgttaagtcgtaatgaaaataaaagtctagtaataatattattataaaccaacaa

SEQ ID NO: 22911 - protein, 491 aa, DROSOPHILA; identical to SEQ ID NO: 561

SEQ ID NO: 22912 - DNA, 3859 bp, DROSOPHILA
gtcctcgccgctcaagataggcagatgtgcccgagcgtgggacctcgataaggcggggactatttacttaggcctctgcgtaggccatttactttaagatgcgattctcatgtcacctatttaaaccgaagatatttccaaataaaattagtttcttacaaaaactcaacgagtaaagtcttcttatttgggattttacacatcaataaaaatatccaatcaatgtgtaaaatttaaatgattctttttcttgcggctcatatgtacattagatctttaaaaagatgtcaagaagatgaattaatcgagtggattgcctacttctcggctttggaaaaattaaatgtaagcttgagttggatttctggggaaaagaatataaataatatgctttaaaataagcagttatttaaagacgtttactgaggtaactcttcagcatgtccctaagttttcatttgtaattgcaatataaaacaggaatttctaagtcataataattgttttattattattattattattattattagtttacggtatatacatatatccacttaccgcttcgatttcctgctcgaatcgcacaggcctcagccggcatagcaccacgacgagatagatgaagttgacaaaaagtcccatgcccgaccacaggatgacgtccggtgcaaaggccaccaagtagccatgcatgcccatcatcaggcagccaatgagcagcatggcacgcatccacagggcgccgtagggaccgtgtggagccaaaaaggctaggaagagaaaggcccagccgagctgaaagtacaggtgatgtggcccgaggcactgttcgatggaccaatcgccgggattgatcgatcgcagggttccattgttgtcccaggtgatcgttccactgctggcggcgctcgttcccgccgtgctctgggcgattaaagtgccggcggcggaggcatctgctccagatcccgaactgcctggtgctcctgctcccgtagcagctgctctgcccatgccaatgcccatgacactactggcgctgctgccggcactgttgatcagggcgcccataccaacgccagctgcactgcccgccgtgctgggcattccgttgatccaggcgaactgccttcgtttcagtctgtcactctcctctcagcctgatcgttgagctattttttgcagcacgtattttgcctaattaccaaattgattggttgatgtactggttggttgttgtccacgctaggcgaatgccaaaaatctgccttttgtttctatcttccacctttctctccttcgcctaattcgtttgttgttgcttacgcgcggttttcctcaacctttgttggtggtggtttgttttgttattgctgctgcccttttcaaaatgtttgtgctttgcggttggtgtcttgaatgtattttttgcttgcggttcatatcctagctagttgaaatttgaattactttgcattttacagcttagtcagccgtttagttaatggccttagactcttatttccgtatttgtttaatatttagctggggctattggtgagctaacctttgatgaggctactgctgctgccgcctgtcacattttgcatcgcttaggcagctgctgaaagaaattgaaaaaacgttgtcaagaaagtttccagtttcagctaacgaattaggcaaagaaatgttaagtaggggcagttgctgaataaatgcgatagtaattggctttggcaatttattaattaactattaatggatattgcaacaccaacagtaaagccccgctgtgaactcttacagctgctagtgaatgccccagttcttggagtgtagccactccttgaattattactccttgagtagactagggaaaggatatcagatgacggactacttattacaaacagaaatgtacataatgcaattcaaaagaattatatttttacagtttgttatttattctctcaataagtattttgttattgactactgatattgatatttataaaacacattacagacctcaagaggaatttaatacaatactgattagtaacaaaggcgctgagtactcatcggagttaaagtaattgtttataaacatttaatatgattatgaatctcggctgactaatagtacatacagatgtggacatacatacagtatgtagatatgaactttagcgacttcttctcgtaacttcagatcacgacgcacccaaaattccgtataaattctcagaaacccgtaatattgtatatcatgcgaaaatctacaaaaaatctaggtaatcgggtataaatcatagcaaaatccactgaaattcacggaagcaaagactatctgcaatgttatttttttattttattttttttttttttcggccgacagagatccgcacaacctgtttccgactcgaccaggccaacaaaacttggccaaaagcactccagagagtatatacacatatagaacaaagcaaacaacgggtgcgagttttgtttgctgaccccaaaaaagaacgccagccgaacaaaaaaaaaaaaacactaaaaacactgggaaagtggccaaaagtgggcgagggcatggtctatacggtccgtggtccccatatagtttatggtattggggttggtctggtgagtgcgactggaaaacgaaacatttccggcctggacatgaataataaaacaaagccaacgagcaggaaagatagtgtgaaaagaaaagggagaaattgtggatacaagagcgacaaagaagggcatcgaaataatcaatttgatgtcgcaaagttcgtggtcgcccatgcactggaagaaaaagaaaagcccagaagataacatttccaaacttttcgacaatgccaactaaaataatgtgagcattgacccgatcttgatggcgtcttgatgatgtcttgacctgatcacgatggcgatacgatattcaaattctaatttaccataacatatctacgatacaggattttctctcagtgtgattattgacagtggtcaaccaaccgatgacaggcagtcagtctgacgtccacgatgatgatcataatgcgctagtgatgtggactgttactcaacactttgcatattgactgcactgccacaatgtctttggcgtgcgcctaataacgataatgatgatagcggcgcaagtgacacacatcagtcacaaaaacaaacaaggccaacacttcctcgtcattatcatcaactcttcgggggtgtgcagcagcaacacaaaaaaagcaatgtaaatcagttgagtgttaacgaaatgcaaataccctaaaaacggaatgaacatttaccacccagaatagagaaaagagtgcttgttcttggcctcggtcaaagaaatttttaaaaaacgttggcctatctattctattccgaatatctacagcgtagcaaatgaagagttgtccggtcttgaatatcgacgagcgccacctagcggaggatatacgtattactcatatttcctgacgtcgttctaaaaatcttcatttatttaaaacttatttttttaacaaattcttttgttctttttggtgattagctagctagttgaagtataggtagatgtttggaatacatatattagatagaattggtagaatttggccagaaaattaggaaaaagcattaatagggggggcgttcaaaatttaaatttcaatattgcactgcactgtcacttgaatctgtaatctaagtccaaatattccagatcataaagttcacgttcatacggacaatcaataaattgcttatggataatacaagcacaatataattcaattttttatattttatggacttt

SEQ ID NO: 22913 - DNA, 628 bp, DROSOPHILA
gtaaagtcttcttatttgggattttacacatcaataaaaatatccaatcaatgtgtaaaatttaaatgattctttttcttgcggctcatatgtacattagatctttaaaaagatgtcaagaagatgaattaatcgagtggattgcctacttctcggctttggaaaaattaaatagatccgcacaacctgtttccgactcgaccaggccaacaaaacttggccaaaagcactccagagagtatatacacatatagaacaaagcaaacaacgggtgcgagttttgtttgctgaccccaaaaaagaacgccagccgaacaaaaaaaaaaaaacactaaaaacactgggaaagtggccaaaagtgggcgagggcatggtctatacggtccgtggtccccatatagtttatggtattggggttggtctggtgagtgcgactggaaaacgaaacatttccggcctggacatgaataataaaacaaagccaacgagcaggaaagatagtgtgaaaagaaaagggagaaattgtggatacaagagcgacaaagaagggcatcgaaataatcaatttgatgtcgcaaagttcgtggtcgcccatgcactggaagaaaaagaaaagcccagaagataa

SEQ ID NO: 22914 - protein, 85 aa, DROSOPHILA
MVYTVRGPHIVYGIGVGLVSATGKRNISGLDMNNKTKPTSRKDSVKRKGRNCGYKSDKEGHRNNQFDVAKFVVAHALEEKEKPRR

SEQ ID NO: 22915 - DNA, 10061 bp, DROSOPHILA
tatatatctacatatatatatatataaactaatgtgttaaaagcagaaaatatacatcaaaaataaaaattaaaaacatattttaatgcgttttcaatgggcaaattcgtttatttagttggaaataatttaggatcgggccaacatttattttgcttttttttcgttacagaaatctccggatattaaatgcaattacgtatagaagtgagtaaggtaaaccggatgagagtttaactatgttctaaattaaataccggaggtttctgtttcaatacacattatatacattatatattatttcacatattatttcgcgttcaaatctggtggcgaagaatccttcttggtcaccggttcactcggtggttccagcttgatttctggggctcaggattagcccacatattgctaggtagttgggttggctgctccaggtactgctccaccgcatccagctgctgatggcccattgcgacgaaggaaagtccttgtccattggaattccaagacatccttgcagcaccttaagctttaactcccccagcagtaggtatcaaacacgacttgtagccaattacagccgttggtgtgctccatggcgaaacgcagttggtcagtctcatctatgtcttcagcctttatattaaatattaacaattttaaagtttaccatttttgcttacaagcaattgcaaatgcaaaacggacagtgtgaccaggcgagtgagagttggaaacgtttgcggccccagagctgtcagatgtttgcaatggaattaacataaaagctgaaagctgcacttctaaacataactgttatacaaaaatgctacattcagtaacattccgacagaaatacatttttatagtaaaatgtagaacgataatcaaaatggcatagcctattgcagacgagcgctgccagatcgctgcaccttcggccagtgtgtgcccgccagcggctaggactttgccttgtcaagtttcccagattcggtaacactgcactaaataattttaataaattatttgtatgaagtacgcgccaattggatgcgtttttgtcctatctgtcgaagatttcacgcatcccgaacaattgccagtgactgcacgccgtattatagccagggaacagctgtgcgtttgccattggccaacagttgttgtccacttcgcaattaccaagccatccaaaatcggctgtttaacgcgcgcttgattggatatttatgaacaattcagtgcaccaggatgtcgcaggacaggatcgccggcatcgatgtggcaaccaattccactgatatatcgaatatcattaacgagatgatcatctgcatcaagggcaagcagatgcccgaagttcacggtgagatttgggaatgtgcaatcactcactggctgtccaggcacgcaaggcatacggactgctctggcattccgggaagaaggcctccacccttgggaatcgaccacgtgcttcaggattatagttaatcccagaaactcaacatatttcatggcattttcaaacagagagtccttgagatatgcaactaacaatacatatacttatatttttatagttctagattaaatgtagcaataaccattgccaaagtgtgttgcatagtcgtaaatgttcaaaattaatgtatatatcccacaaacaattcaaagtattcaaagatatttatccgaaagtagatagttttgaattgtttttaaatgactattgatcacatatacttaactataaaagtatgagcaagtttcttagatcctcaaggtcctcaatacgtacaatttccaaatcaatgaatctaaggatacgtaatgcaacacatacactagacactatacataattgtaggcttcattgcccttgttttaatgcactttgttcaatcttttgcagaaaaagcaatggatcatttaagcaaaatgattgccgccaatagtcgggtcattcgggactcaaatatgttgactgagcgcgaatgtgtccagaagataatgaaactgctgagcgcccggaataagaaggaggagggcaaaactgtgtcggatcacttcaatgagctgtacaggaaactcacgttgaccaagtgcgatccgcacatgaggcactcgctaatgacccatctacttacgatgaccgacaattcggatgccgaaaaggcagttgccagcgaagatccacgtactcagtgcgataatctcactcagattctggtcagtcgtcttaactcaataagttcctccatagccagtctgaatgagatgggagtggtcaacggaaatggagtaggagcagcagcggtaacaggagcagcagcggtaacaggagcagcagcggtaacaggagcagcagcggtaacaggagcagcagcaagccacagttatgatgccacacagtccagcatcggattgagaaaacagtccttgcccaactacctggatgcaacaaagatgttgcccgagtctcgacatgatatagtgatgagtgccatttactccttcaccggcgttcaagggaagtatttgaagaaggatgtggtaacgggccgtttcaagctggatcagcagaacatcaagttcctgaccaccggccaagcgggcatgttgctgcggctctccgaacttggctactaccacgatcgagtggtcaagttttcggatgtatcgaccggtttcaatgccattggcagcatgggccaggccctgatttccaaactcaaggaggagctggcgaattttcacgggcaagtggcaatgcttcacgatgaaatgcagcgttttcggcaggcctcggtgaatggaattgcaaacaaggggaaaaaggatagtgggcccgatgctggcgatgaaatgacgctattcaagctgctcgcctggtatataaagccactgcaccggatgcagtggttaaccaagattgccgacgcctgccaggtaaagaagggcggtgatttggcatcgaccgtttatgatttccttgacaacggtaacgatatggtcaataaattggtggaggatctcctaactgccatttgtggcccactggtgcgcatgatctccaaatggattctggagggcggcattagcgatatgcatagagagttctttgtgaagtccattaaagatgtgggcgttgatcggctatggcacgataaattccgcctacgattgccaatgctgcccaagtttgtgcccatggatatggccaataagatactcatgacgggcaaatccattaattttctaagagaaatctgcgaggagcagggtatgatgaaggagcgcgacgaactaatgaaggtcatggaatctagtggtgagttaaggcatgctcttcaaattggattagcgaaatcgaatgatttaaatgctccatgctcttatctacagcctctcaaatcttttcgtacacaccggacaccagttggcatgcggccgtggaaacgtgctaccagcagacctccaaacatgtcctcgacattatggtgggcccacacaagctgctggatcatttgcacggaatgcggcgctacttgctgttgggccagggcgattttattagcattctgattgaaaacatgaagttagttttcttgatgaatgtaattgaaacttttcaatttctaatgtaacacttgaaaatcgccttttcaggaacgaactggagcgaccgggccttgatatatatgctaacgatctcacctccatgttggattccgctctgcgctgtacgaatgcccagtacgatgatcctgatattctaaaccatctcgatgtgattgttcaacgaccgttcaacggtgatattggctggaacatcatctcgctgcagtacattgtccacggaccactggccgccatgctggagtcgaccatgccaacgtacaaggtgctcttcaagccactctggcgcatgaagcacatggagtttgtgctctcgatgaagatctggaaggagcagatgggcaacgcaaaggtaagtggctggctattagacttcttatcggttgtttcgagtgcatgcacatattttagattgccaagtgccactcagagtgcacatggtgattccagtggtcagcgaactgctagcaagcggactctgctttcaatacacaagtttggcttttgttcccaaggtaaattgggtcaaacttttgactgattggctaggaggcaattagggaaattataaatatatagggaatatcttgacttgtttgagttctttgactgcctgatttatgaacttaccaaacctaaaatcaagcttatctggttgagaaagctactatacggatttttagaggttttcaaagattacaaacaatttataggctaatctggcaacaggcagttgtgggggaatctatttttgtggttcgaagtgaagtcgaagttcgaaaggttttagccaagaaatcgactacaagagcttgataagattgcccgctcttgtaatctaatccgcagcgattacccacttaccgataaaacccatttgtagtatcaaagtgcacaggaatttgtcgttttcgccttatgtattattttctagttttgtagacgggtttttccgtacaaaaataacattaattatgtggtgaaacaaaaacacgaatacagattacaaattacacacacgaaaaaaaaaaaaaattgtgtaaaagggaacacacacacactgtctcgttgaggaatgtgctaactgggctgggttattgttgatcactccttttttacaacttggcgtcggtcttcaggagcggcgccagcttctgggtgagcatgatgttgccggcgatcttcagcttgcccttcatgaaggcagcctgggggttcagcttgcccagggcgatgtcaaccatgtcctcgtcggcgaccgtcaaggtggtgtccaccttgatgccctgggcaggtccctcgtaggccttggcgttcttgcagtccagagctgaaagtggtattcgttaataggttgttcatttgctcattggacttggaatatgctaccaaagtagacattcgattcttaaaactagcagataacttagcggatttaacttagcacgatttaatgtatgtatatatgacaacgttttaaagtgacttcttgtgcaacaagtggcatacatacatgcatatatggcaagtatgttgttctgttgctgtaatatatattctctaaatcgtgcaaataggcaattcagtggcttttgttaatgccaacagctggtgccgaagtacaaacgccgtgcactttgaactgtgactattacaaaatgcaaaacacacacacacgcaaagacgacgtactagtattctccactggccaggagcgccaacagaagggggcttagcaactggggggtaggaaaatcaccaactcagagtccgaaagtccccttcggattgagcccatctatgtacatacgcccctgtgctgcgcgttgggagtgtgtgtgtgtgtggtgcgtgtttttatgggctccattgggcgatggataactgatacttactccactccttggccaccttgccgtccttggtgattttgtacaggaacacaccgttgaccgccttggccttggcctcgttctccttcagtccatcgatgatcttttggaaaacggcgtccgactgcagagacatggttgttgttgttgttgttgtgggggtatttctgtgtgtatgcggttttgtttttccggaagaataaagaaaatattcagtgggcttgtgcgtcgtagaaataaaagaaaagtgcttacgctttgagagcggaacgcgaagtaatgagcagaaggcgtgcaatcggcgattttattgtcgcttttttcactacactgcccctgttgtgtgggagcgggatggtcgtatagcaagttgccggtcgcgatatgtcgccctcactcgcacctgttgcattcgcataagccttgttgtgctgttattgtcgcgctccctctctctctcgctctcttccaaatgttagccagctgatgcacagtgggcatgaactcaaaataaagtggctgcacgaaaaccttttgcatatcagatatagcttttatttatatcgtttatgcgatatttctttcattaagctgaattgaaattctgatatttgatgatatcagaatgaaaaagtaaataactgtatcgatatcatttggttttcaccgcttgttagcccactgttacaggtgtggagtttagactttaacattaacatgaaacgcctaacatgaagccgtaacagcggttatcagctgttgtccacgatttagtgcaaagtgcgcacccagtttgaaatgcccataaaacggcgataaggcttgaagactcttcagattatttcgacaaaatatgtcacctaacgagcccattgagaaaatatttttaaccccccaaatgccatatatcgtgattcgattcataaaacgcaagcattattcagtactattattttgcattgaccaatggatttcagttagtaaatgcatcaatttatagggttaaacgacaagtagaatgtgcgttcgtatcagcttcacttccttatgagctctcgaacttttccggatcgattccggccttcttcatttccacggcaatggagaagagatagtcatagcattccgacctggttgtaaaaagagagataaacgattaggtctataaaagtgctcggtgtctgagaataagtgaggcaacccacatggttttggccttctcccagttctgtccccaaacgtagacgccgtgtcgtcgaaccaggatcgcactgcagcccggatactccatcatggcggcgtacatactgtcggccaggtcgcgttcaaagggtgtgttctcgatgatcggtacgacgagctcctcgtcgtagcgcaaatatcgcttgtccgcctcatcgtagacgcccttgatcatctccaagtgggtgcagcggaaggttttccctggccacaggagcgtggccattacggcgtgctgcgaatgggtgtggatgacggctcccgcctgccgatgctgataggccagcataaagagcggcgtacattggctcttcttcaggcccttgatctcaggcggcagttgcagatccttgccggttatatcctgcacgaagagatcctccggctgcattcgctccttctggacgcccgacggtgctatgtagatctcatcgctgaaacggattaaccggcttatatggctgtctggatagatgtatagtatcacttgtactcacttgtacttaatgctcatgccacctcctgtgccggtcacccatcccaaatgatagaattgcctgcatagcgagggaatcaagtggcgaggatgctccgccggcaagtctttgaagatcgagagggccatctcgctgacaatgtgactttcgtgggacgtaatcttcgtcgccgtgcgacactgataacgggagataaagggattctgaaagcgacaaatcacgaatgtaaacaatgctgccgtcgatagacgattgcaatcggtgtatcgctgttaacacacagcgttgccgttacgataaacattgtccaattagaaatggttttttgaaaattgaataatgtgcaatagttcattaagagaacaagatattattatcaccgtattacctcaaaaatgtttcatagcgctgttgaaaacgttttttacaagtataaatataataagcttgctacatttgaacttttttcaattttcttgagtagtcctattctgtaagtcttattataaacttttttgtttttatgtggctcacctttggaattatattgtttattaaacatcttttcaggcccttcgtacaatgaagtccgaaatcggcaaggcgtcacaccgcctcaaccttttcacttccgagatcatgcactttatccaccaaatgcagtactatgtgctatttgaggtcatcgagtgcaactgggtggagctacagaagaagatgcagaaggctactacgttggacgaaatcctggaagctcacgagaagtttctgcaaacgattttggtgggctgttttgtcagcaacaaagcgagtgtggagcattcgctggaggtggtgtacgagaacattatcgaattggagaagtggcagtcgagcttttacaaggactgctttaaggagctaaatgcccgcaaggaactgtccaaaattgtggagaaatcggaaaagaagggtgtctacggactgaccaacaagatgatcctgcagcgcgaccaggaggcgaagatatttgccgaaaagatggacatcgcctgccgcggcttagaagtcatagcaaccgattacgaaaaggctgtcagcactttcctaatgtctctcaactctagcgacgatccgaatttgcagctctttggcactcggctggacttcaacgagtactacaagaagagggacaccaatttgagcaaacccctgaccttcgagcacatgcgcatgagcaatgtgttcgccgtgaacagtcgcttcgtgatatgtacgccgtccactcaggaatagcgaccaatgtccatgcaatcggtttatcccagtgtccatacatcataccaaatcccaaatcccatacagcatcagcactccattcagttcaattgctgctaaatatttgagatatctcgatatcattggagccaatccaaccaaacaaactaatccaattattaactaagccttcgaatcgaaaacaacctctatacatatatatctcaagctttgccgtcaatcgcctggctgcaagccatcaacttaagatatctccaatacaaaattattgagtagttgtaacgaaagtattaagcgacaatttgtttgtcgaaaaacgcaacgttctattttgtttgcgaatcccataattttttttacatcgaagcttagttgaaatagattttcgtaagtgcatttgccaattgccatgttgtaattaaagagaataagagaatgttacgtactttaaaagaatgttttaaaaaagttaatgttttgaacagttttaaaccgtaatgcgagctcgaaataaacgcaacttgcattgaaagtttccgtctctatttaattattataaattacaaaaatttgggttataagagtgtaatagttatttattcaattattgtaaatgcgtataaaaagaaagccgaaatattcagttatttatattatttccttctcactctcactcaaactttctgatctcaaaacggttttgtaatcgaatgcgcagcgagttatcgacagtccacgaagcggttaacatttcaccgctagcgagtgcagccacctactattcagcgtagccaaccaccaacgtgcagcaaacatcgatagtatcgattaaacacaaatttgcgtaccacctctagtttgcgagcgtattaaagttaaaaaaaaaacgaaaacaaatcggaaaaagacggaagtgagtgctttgtgctgccgccggtgatgtgctgaaatcgcttcgccaaaatagcccaatttcccaatcgagacaccgattgcaaatcaaagtaacgccacggagtgcagcaaaaagaaaaacaaaaacaacagcaactgcaaacatggcactgaaaaaagtgaagggtaactttttcgagcgtatgtttgataaaaacctcaccgatttggtgcgcggcattaggaacaacaaggataatgaggtaagcgtgcagccccgcctccaccgcccaccaaaacagctgtcctccaactgccacgccccccccaagcggcccagctgtgcgtccaattagaactcgctaattggctgacaaatttcgtttgcattaagggaatcttattagagtttggtgtgcttgcatgtgtgcgtgtgtgtgtgtgtgggtgaaagtggctgtgtgtttgtgtgtgtgaatgttttggcatctgccaacagtgcaaaaggaaaagcaggaaaagcttgaaaagaaccacaaaaccgaacgcagaaactcccaacgcaccaaattaattagcaagtggcttttatcaaatatttacccacgtt

SEQ ID NO: 22916 - DNA, 3518 bp, DROSOPHILA
taacactgcactaaataattttaataaattatttgtatgaagtacgcgccaattggatgcgtttttgtcctatctgtcgaagatttcacgcatcccgaacaattgccagtgactgcacgccgtattatagccagggaacagctgtgcgtttgccattggccaacagttgttgtccacttcgcaattaccaagccatccaaaatcggctgtttaacgcgcgcttgattggatatttatgaacaattcagtgcaccaggatgtcgcaggacaggatcgccggcatcgatgtggcaaccaattccactgatatatcgaatatcattaacgagatgatcatctgcatcaagggcaagcagatgcccgaagttcacgaaaaagcaatggatcatttaagcaaaatgattgccgccaatagtcgggtcattcgggactcaaatatgttgactgagcgcgaatgtgtccagaagataatgaaactgctgagcgcccggaataagaaggaggagggcaaaactgtgtcggatcacttcaatgagctgtacaggaaactcacgttgaccaagtgcgatccgcacatgaggcactcgctaatgacccatctacttacgatgaccgacaattcggatgccgaaaaggcagttgccagcgaagatccacgtactcagtgcgataatctcactcagattctggtcagtcgtcttaactcaataagttcctccatagccagtctgaatgagatgggagtggtcaacggaaatggagtaggagcagcagcggtaacaggagcagcagcggtaacaggagcagcagcggtaacaggagcagcagcggtaacaggagcagcagcaagccacagttatgatgccacacagtccagcatcggattgagaaaacagtccttgcccaactacctggatgcaacaaagatgttgcccgagtctcgacatgatatagtgatgagtgccatttactccttcaccggcgttcaagggaagtatttgaagaaggatgtggtaacgggccgtttcaagctggatcagcagaacatcaagttcctgaccaccggccaagcgggcatgttgctgcggctctccgaacttggctactaccacgatcgagtggtcaagttttcggatgtatcgaccggtttcaatgccattggcagcatgggccaggccctgatttccaaactcaaggaggagctggcgaattttcacgggcaagtggcaatgcttcacgatgaaatgcagcgttttcggcaggcctcggtgaatggaattgcaaacaaggggaaaaaggatagtgggcccgatgctggcgatgaaatgacgctattcaagctgctcgcctggtatataaagccactgcaccggatgcagtggttaaccaagattgccgacgcctgccaggtaaagaagggcggtgatttggcatcgaccgtttatgatttccttgacaacggtaacgatatggtcaataaattggtggaggatctcctaactgccatttgtggcccactggtgcgcatgatctccaaatggattctggagggcggcattagcgatatgcatagagagttctttgtgaagtccattaaagatgtgggcgttgatcggctatggcacgataaattccgcctacgattgccaatgctgcccaagtttgtgcccatggatatggccaataagatactcatgacgggcaaatccattaattttctaagagaaatctgcgaggagcagggtatgatgaaggagcgcgacgaactaatgaaggtcatggaatctagtgcctctcaaatcttttcgtacacaccggacaccagttggcatgcggccgtggaaacgtgctaccagcagacctccaaacatgtcctcgacattatggtgggcccacacaagctgctggatcatttgcacggaatgcggcgctacttgctgttgggccagggcgattttattagcattctgattgaaaacatgaagaacgaactggagcgaccgggccttgatatatatgctaacgatctcacctccatgttggattccgctctgcgctgtacgaatgcccagtacgatgatcctgatattctaaaccatctcgatgtgattgttcaacgaccgttcaacggtgatattggctggaacatcatctcgctgcagtacattgtccacggaccactggccgccatgctggagtcgaccatgccaacgtacaaggtgctcttcaagccactctggcgcatgaagcacatggagtttgtgctctcgatgaagatctggaaggagcagatgggcaacgcaaaggcccttcgtacaatgaagtccgaaatcggcaaggcgtcacaccgcctcaaccttttcacttccgagatcatgcactttatccaccaaatgcagtactatgtgctatttgaggtcatcgagtgcaactgggtggagctacagaagaagatgcagaaggctactacgttggacgaaatcctggaagctcacgagaagtttctgcaaacgattttggtgggctgttttgtcagcaacaaagcgagtgtggagcattcgctggaggtggtgtacgagaacattatcgaattggagaagtggcagtcgagcttttacaaggactgctttaaggagctaaatgcccgcaaggaactgtccaaaattgtggagaaatcggaaaagaagggtgtctacggactgaccaacaagatgatcctgcagcgcgaccaggaggcgaagatatttgccgaaaagatggacatcgcctgccgcggcttagaagtcatagcaaccgattacgaaaaggctgtcagcactttcctaatgtctctcaactctagcgacgatccgaatttgcagctctttggcactcggctggacttcaacgagtactacaagaagagggacaccaatttgagcaaacccctgaccttcgagcacatgcgcatgagcaatgtgttcgccgtgaacagtcgcttcgtgatatgtacgccgtccactcaggaatagcgaccaatgtccatgcaatcggtttatcccagtgtccatacatcataccaaatcccaaatcccatacagcatcagcactccattcagttcaattgctgctaaatatttgagatatctcgatatcattggagccaatccaaccaaacaaactaatccaattattaactaagccttcgaatcgaaaacaacctctatacatatatatctcaagctttgccgtcaatcgcctggctgcaagccatcaacttaagatatctccaatacaaaattattgagtagttgtaacgaaagtattaagcgacaatttgtttgtcgaaaaacgcaacgttctattttgtttgcgaatcccataattttttttacatcgaagcttagttgaaatagattttcgtaagtgcatttgccaattgccatgttgtaattaaagagaataagagaatgttacgtactttaaaagaatgttttaaaaaagttaatgttttgaacagttttaaaccgtaatgcgag

SEQ ID NO: 22917 - protein, 917 aa, DROSOPHILA
MSQDRIAGIDVATNSTDISNIINEMIICIKGKQMPEVHEKAMDHLSKMIAANSRVIRDSNMLTERECVQKIMKLLSARNKKEEGKTVSDHFNELYRKLTLTKCDPHMRHSLMTHLLTMTDNSDAEKAVASEDPRTQCDNLTQILVSRLNSISSSIASLNEMGVVNGNGVGAAAVTGAAAVTGAAAVTGAAAVTGAAASHSYDATQSSIGLRKQSLPNYLDATKMLPESRHDIVMSAIYSFTGVQGKYLKKDVVTGRFKLDQQNIKFLTTGQAGMLLRLSELGYYHDRVVKFSDVSTGFNAIGSMGQALISKLKEELANFHGQVAMLHDEMQRFRQASVNGIANKGKKDSGPDAGDEMTLFKLLAWYIKPLHRMQWLTKIADACQVKKGGDLASTVYDFLDNGNDMVNKLVEDLLTAICGPLVRMISKWILEGGISDMHREFFVKSIKDVGVDRLWHDKFRLRLPMLPKFVPMDMANKILMTGKSINFLREICEEQGMMKERDELMKVMESSASQIFSYTPDTSWHAAVETCYQQTSKHVLDIMVGPHKLLDHLHGMRRYLLLGQGDFISILIENMKNELERPGLDIYANDLTSMLDSALRCTNAQYDDPDILNHLDVIVQRPFNGDIGWNIISLQYIVHGPLAAMLESTMPTYKVLFKPLWRMKHMEFVLSMKIWKEQMGNAKALRTMKSEIGKASHRLNLFTSEIMHFIHQMQYYVLFEVIECNWVELQKKMQKATTLDEILEAHEKFLQTILVGCFVSNKASVEHSLEVVYENIIELEKWQSSFYKDCFKELNARKELSKIVEKSEKKGVYGLTNKMILQRDQEAKIFAEKMDIACRGLEVIATDYEKAVSTFLMSLNSSDDPNLQLFGTRLDFNEYYKKRDTNLSKPLTFEHMRMSNVFAVNSRFVICTPSTQE

SEQ ID NO: 22918 - DNA, 10721 bp, DROSOPHILA
catatgatccgaatatccactgtgagaagaaccctatcattcgtcgtctgcacggagctacgcgctcctctcgccgggcattccgcgaaaaggaacgcaagcgattaatggatttgaatacttttccttaatctatgaacatacttacttacttacatacatcatatgaatacatacatatacatatacaacatacatacaaataaacatatttcatacatttcgaaaaaggagcgttttatgttagcatagatcagcgtttatttaaaaatgtattcaaattaaaaattaataagagttaattcaaggaatcttcaacatataatttcataaatattcatatggtaattaaaattacaaataagagagccacaattggcggcaattttgttttttttttttgctttctgccgccacttggaaatgtacagcaattcctgttcaatatttacttcgttttcttttgcatcgctttctgccgccaattggaaatgtgctgcaatttgggttatgtagctgcccgccctgttcaaaaattcctggaaaataagattttactgaattgaatgtttttaaatcttgataaaaaggtaagatcattgggcgagtatatatatacatccagtgagtgtgtaaataaagtaatgtttcattgtttttactaaatatgcatatgtttgcttgtatgcatttctttcctttttcttttaaaaactacttctctgagatgccactctgttggaccattcccagaagccatcaaaattcaataagtttcgtttatcttagttttcctcataggcaggcttactacataggattgaatttgtatttacatatatttgcaaactttttaataaacttccccgttttaaggggaagcttcgccaagtgcgcttttataacccaccaccttaccagaatcgaacagtctggcagcacggtctcgccgaaaaagtataaaaacccacgtctcgtcgctctctggttcagtcgagttgagttttcacggcgtgaacaacagtgtgcgttattggttccttattctgcggttcttcaatcctttttgttccaatcctactgaaaaagaaatcaaaagttcacatcgttaagcggcaaaaacaacaaaagcgaaggtgaataaggcataaaaaacagcacacgcaactgaatagttgtgggtgtgcgagtgtgtgtatgcgcgtgtgaaggagccttttagtaaacactcacacacttgtgtattttttttctgtgagacacaagatatttgagtgcattttttgccatttgccttgccaacccctctcccccgcacgcatataagaagagaaagagaggcagggaaaaaataaaggagcccacgaagaaaagcaacaactattaaacaggctcctcatcgtataaaagcagcgcagccgccgtcaacgtcaactgcagtgggccaacgtcgttgcagtcgtgtcgttagtttttgttcttgttgcagcagcagcatcaaagacagaagtagagagagcgagcgaaacagccggagagacaaaacaaaaagcacttaggtaagtggcaaaataaaaaaaaacgcagaaacagcagcagcagcaacaacaacatcgatcttgacgaagaccaattcaaagaagcaagcgaaaaaaactgccggcgaatgcgaatataaaagcaaaaacgaaattacagtcgcggtcacaaaattatgccatattagatgatttcaataaaaataggtgaaatttaagaatttgttgatgcgcgttatttgctccaattggaaaacgttggtctacgtgataaaatcaaccggcacacacgcacgcacccgaaaattcgagaaaaactgaaacgaggaaagccgaaaccgaaaaaaaaaacagctgcccacattggatggggggtgaatttgtttgtttttttttctgcctgccaaacttgttccttaggctttttgattttattttcgttgtctcgaggtttatttgcattcggcgccccgtccaatgtttccatgtcatccgattttgttttcccatattatctaccagaattgctggctcacagtggtggtacaattcactctgcataattaacgattatttaagtatttaacaaaatcagatgcaaatgcaatatgacctaaagtataatatgactccaaacccgagatgtgttattagaagggttctggacggggaattttgcaaacaattccaggcaaaatacaaaaaaatttcaatttttctggttactggatgccaaacaaatacagttctcagtttataaaaggcataacaaaaccatcaaatttattctgtagtttcaaaaagagtgggtgacacaaattggtttttaatttcttttatatctatttatgcaattcatgtgcgcctaatagttcgatctcttctgttaaaaaaaacaaacaacagcattcaatggtgagaacgtctctgcttctttttcttgttctttttattggacattgcttatgtattttattttttgcgaaatgtttgcgacgcaatttcgacagcgtcactttatttttatgctcttttccatcgctcctctttatctctctctccacttcttacaaactcaaccttttcctgatttcggggttaaaaaataatttcggacacgcatcaataaaaagcgcgaaggtggaaaagagattcgaaaaaaatgctgaaaagcgttcattttgttatttctgttgttgttgttatccgaaaaagggggcacaacaagtgcgaaagaaggagatgaagaatcagatgagaaagagaccggaaggagacggcaataaaaacatagaaattcgtgaggcgcacaaaattttcaaggttataccgggcaaaacaaacataagaccggtaacagcatatgtatatgtatgtacatccatattacagagggggaaatacataagaatccgcgtttaaagaagaggagaaagcacaagcggcgcaatataaaaagcactcaaaaaacaaaaacaacacatgaaaacacaaaaaaaaaaacaacacatgcggctcttttttgcacgttatctttgttttcatttgtattatgctgacatctatatgtacatggatgaaagaattgtatgagaagagtgccaaatcgacaattttacaaccgaaaattgcgataattaatcagaaaagtttatcaaacgaatgtacataatttaaataaatcatattatgtattcgtgttggtttgtttgatttgattttatacatatttatgtttgtgctatatagcatttaaattaaaagtgcaaaacagcataaaaacatttcaaataaatagggaaaacaaaagcagctggaaaagtaaaacatgtgtatgtatgtaggcacttatgtacaccaaaagcaattacataggcatggaaatacaagcaactttcaatttagagttagtgcgaaggagacggctatattgcttgtgggggttgcaaagctttaacggtaacaaaattatgtagtagctttggtgttgttgttgttgcgtgaccttgaatttcgtctataggggagtttcgatacatgtccctatcgctatccctgtcacacccacgcccattgacaaacatttgcaatttccaagacgcagtaccgttattatatacagatgcggtcaaaaaaatggcgcgaaagctgaacatattattatgggtatatcttaaaaatgaaaacctagaaactttttgcaaaattgttagcacttacaaaaaaaaatccgtaaaatagcgaccccagtcatttgtacatagtatatattgacttctgatcttgtcattacaattactttgtattattgtgagcattaaatttatgggcatgccaaagagcttgttctatatttaggcaaaaactattagatttgaatagcccgaaaaagaaacctaactgaacttggaaagaaggggtttctgaggggccattgtcggctacgtgccagacatcatgtgtatttattttagttccatgtttttcacagccgcgacgcgcacaataaacaagtaaaactttcgctgactaacatcccgtctttaaggcgagacatgtaaaatatacaaacgaaggcgtttcctaagaacagtgacaccaaaccacgccatcaacgttctctatctcttctatatgtacatatgttttcctaaagtttcaagtttcataattgcaccgaagacccgacccattgctttaaacgattaaattgcatattcgtaatcaaatttgttgtagttttgcttatttttctgttgatgcttgatgctttaatgttaaccaataaccaaaaatcctttacaattgcaattttatttttagaaaagaaaagaagccacgcacctggtgccagagtacaaaacccaaacatctacaatatccgagctgtgcattccaaggagataacgaggaacgtatatatcgaagagtttgagaacatcgtcaggatggaagtggaatcgaataacaaacgcgccaccaacggcggccgtcacttcactccaccgtcggactccgattccaaggagagttccgtcgagcgggagctgaacgaagagatcgaggcggtggagctaaatgggagtggtggtggcggccactcgaacggccatgttaagaagctgatggctgtcgaggatggcaggattaagcgtaaggccaagcggttaatccaaagacagaatagtggttctggcggcagtgccaatcaaactaatggcaatggagctgctggcgctggtggagcacatggagcaagtgtaatgccgctgggaatcaacagaattatgccgtcgcccggtggctatgtggtgccacatcgacgctggaagaatagccggcgttcgcgaaccatcaatcgtggtcgaggactgcccaaaaagggtggtggcggcggcaagggcgtctggggattgcccggttccgaggctctggccgaggtctatgaggacgagaatgatcctaactacgatagtgagtgcaacgatcgtaatgtggagctgcgcgaggtgatcactgagataacacgcgaggagttctttaagctggcggagcccattgtcttggagtactacgagcacggggatccgcatgaggtggcactgagctttgatgagatactgcaggcaccgatgcgcgagcacgtcaccagcattctcgtggagatcgccatggatcacaaggattcgcagcgcgagatgacctcggtgctgatctccgatctctacggacgcgttattaccggcaaggatattgagaagggattcaatatgctgttggccaatctgccggatctcgtcctggacactccagaggcgccaatcatgctcggcaattttatggcccgcgccgtggccgatgactgcattccgcccaagtttgtggccaagtcgggggaggagctaagacatttgggactgggcgaacatgccgaacaggcccttcgccgtgctgactcgcttatctacaagcatgtgtgggcccatttggacaatgtctggggcatgggtgggccactgcgtccagtgaagacaatcaccatgcagatggagctgctgctcaaggagtacttatcatcgcgtgacgtagccgaggcacagcgctgtctgcgtgccctcgaggtgccacactatcatcacgagcttgtctacgaggcgattgtcatgacactggagtcacttagccagaccaccgaggaggccatgtgcgagctgctcaagcagctagatctcacctgcctggtgctgcccgcgggcatggagcaggtgggtcatatatatatgcatatacatatatttaatacatgtagttataaatagttggactagtctagtaatttcattgataaccgaaatcctttcaatccacgacaattaactatctctaatcctttagggtttcttgcgcgccttcgacgacatggccgacatcgttttggatgtgcccctggcctatataatactcgatcgcttcgtcgagcgctgcaatcgcgccggattcctaaccgacaagattataaacaatgtgccatcgcggtaagttttggtgtttagtccttaaggatatggggaaaccctttttaaggttgggatgtgtggaatggatttcaagtgctgtttgtttgatttaatcatatgatcagaaataagattatcaactggtactgaaacgatgagcaggctcacctttgtatacaaacacacaaatcccactacctgcaagaaaagtatacttagtaatgagagcgagacgtgtttacgtaatcgtagcagctataaagacaacacgcccccaaagtagtagtgtaccccctataaactggggctatacgtacatacatacattgttgtttacaatcttaaaactcaatatacttatagtctccataaaaagcggcgggtctatcgatcagatcgtcagctatgtttgtacttacatacatgtacatatatacatacataattaaaggtgtggattaattgttaataagaccttggcattcggtttgatagcaaaatgaactaattgtcgattttgttatgattttgcttgattattctatttttggcgaagggtagacttacatagctaaagatttatggaggccattcgtttgttctaattttcgcctatgagtgtaaacagtattggacacatacatatgtaaatatgtaatgatcaaataaatatgatatgatgacattgagatatataaataattaggattacactttaaagtacatattttttatcgtttttaaaaactagttaatatatttcgttctttatagaatgaagttgaattgctattattttaaccgctgctgtgctgaaatgtgcatgcatgtatgtacatacatacatacgtgtttattttgtgtttttgccggcttcgacttgtttattgttctcctattttttttttggcgtcttcgttttttttgtgcttttggctgattttcttatacatacataggcgacggctattacatacatgcagacgtgttttgtttgggtgtatatgtatttgtatgtttgtttatgaattttctattgcgcagtttagtttcgcattttggaattaacttaacatttgtgtatgtacatacttcgcgtcatccgttgaggcagtcgccgattgcttttggttctttttcgtttttttttttttttgtatatttgtgttgcgtattttcttattgtttatgctgttgtgccggtttatcaggtgccggctagttatgtatatttattctttattccgagttcttgcttgcctccactttttctgcgatcagctttattattttcccactttctgtttctttatggtttatggttgtgtttttgctatgagttgatgggaaatcgtaactgtgtgactggttatgcatacatatgtatgtatgtatatacataagtatacgggtatgcacagatgcagatgcaaacataagaggacttctgttttcaattggtaatttctaatacgacgttctaaagttgcgttggattttcgggatcctgaatccctttggtattatcgtaattattactatttaacagatttacttggtataatgctagcatgcgggttattattattacgttatttcaacaatacttttatttaatgcataggcctggcaaaagggtaattaaaaatccatattcttccatcgtgtgaacatgtgcaacgtagggattgtttgggaggggtttggtggggtgaatgtggctggacgtctcttatcgattggttttttatcacggcaaactttgcattgctgaattgttgttgttttgcttggactttattatgaattctgttgttgtttgttggtgcaacaacctgcatgtggctcaagatcgtcttggcgtgttgttgttgctttttgttttgttttgtttttagtgtttgtgcgaaggtaaacatggctgccaagttgctgttatcgacctgctctgccactcccactttagtagtgctgctgttgttgctgctgtcgttgttgttactgccactactataactgcatttgcatttgcatttcgccttgacagcggctattgcactttgccacagcgcgcgacagccacaaatgcaataacaacaactgcaacagcgactagaatagcaacaaactgcagcagccgcaaaggcacaacagcacaaacaccgctcattttacacccaacaacaactgcatttgacgccaacgcaactacaactgcaaaagttgtttttttcattctgttttggtttttttttaaagctgaactcaatgccaagagactcagacataacggttcatgaggcccagtgctggctgttttccagctatattctaataactccaatatattcgctttaagaatatatgtgaaataaattaataaagtatggtatagaatcaagttcttgatcatttttagttagttagcttaaagaaatcgtagttgtaataaaatggcaaatgcttcatctataaagtagccaaactgccagcacagcgctacaactggctgtggtttttttctgaggtctccgctcttttatgcttttgctttattatttttgatttatttttatatattttgttatttgtttaactcttgtatttacttgctttgctgatcgcgcgcttatcttgcctcaattttaactgactcttctacaccagtgcacttgtgtgtgtgtttgtgtttataaatagatatgtatgtatatttctgcatttagtaccccacttggtcacatatttatagtagcaacaattaaggctccagctggtttttgccattgttgttgtttgttttgtttctaggccagaatcctttgattggccagcttggtggtgtccccctttaaatatataaaactagttttaatttacctcgctctccccaccttctcaccaccccactgcatttggttcacccgctacttttgcacagctgttgcagtaaagagagcagtggagagagagaacctcaacgggagagagagactcccaacgggagagatagagagagagagagcgaaaaagggtcaacggttgaatgaacttttgtgcaaattcgttgttgttcttgttattgttgttaccaaatttgcgccaagcatttcgcaacttgttttttgttttctcctctttgttttcttgttctttgtattatatttgttttttttttgttttgttttagcggcaatgcattgcataattgtaattgcttagtgcgtaaggcagcgcgagagagagaaagagaacgagatagtattatgcagttgcatttcacatgcatttatttctttgtttaagaaaagctacaccactgcaaagtcttttaaaaataagaaaaaaaacattgtttaacaatagcaaatgtgtatcaggctaaaatgatgatttgtttaccgaacttcaagggccattatatttactactactcgaattgtgttaccgatttctgatcaattttccccgttttatatttgcagcggacgcaagcgtttcgtttcggagggcgacggcggccacgtgaagccgactaccttcaccatgcgtgattaaatcatagggacaacggggacgttatatgctgcacatgcttatatgaccactgcccccagccacccaatgacaactagaggagcaacaagagagaagcaaacattaaacaaaaacaaaaaaaaaaacaccaaattacaaaaaaaaaaaacgaaaattcatacgaacgcaaagaataaatacaccatttataagaaacaaaagacgatatgaagaatttgtcgcaaacttgataaaaagaacttatcctcagaatccagataaggacacaaacgaaaaacaaaaacaagcaaaaaaaaaaaaccacaaaaaaacaaacaatcaatcggaatttgatctccgtttaaactatattcattattatactacataaacacctacaacgtatatcttacctacatgtaactaccagcgtaattcgaaagtatattttaaatatttgttaaaaaaggagatatgagtgaaacgatcacaaaaaaaagaaaaagaaagaagaatccagccaaaagtatgcggggaaccacgagcaggagcaacaggaacagagatgggtcgctttttgtggctaggatctcacataaaggatgcgagtgggcgtacttagcacgaccgtcattatgccacatgaaatcaaagcatattatttacatgaaactgttataggcactcgtacacacacactcacacacacctcttgggttgattgaattgattgaataacttgtatttggaacgaaccaatgatgatgatttatgctatcaacgcaatcaaaactctgatgattacacaaaacaaattccattgacttgaaattgagaaaaacatttataatattcctatgcgcatcgaaaacatgattttccttaatttttttgtaactttgtgtgtcagaagactaacataattaagcttaattttactttatacgtatatttacccacggattcatcttattctgcttgcttttttttttttttgattgaataaaagctgcattttatatgataagaaaaagactttgttttcgccgcacttatattttaaaatgttcacacttcatgaagaaacaaaattcgacatattcttaaaaatgcgcgcccacacatctat

SEQ ID NO: 22919 - DNA, 2320 bp, DROSOPHILA
gagttttcacggcgtgaacaacagtgtgcgttattggttccttattctgcggttcttcaatcctttttgttccaatcctactgaaaaagaaatcaaaagttcacatcgttaagcggcaaaaacaacaaaagcgaaggtgaataaggcataaaaaacagcacacgcaactgaatagttgtgggtgtgcgagtgtgtgtatgcgcgtgtgaaggagccttttagtaaacactcacacacttgtgtattttttttctgtgagacacaagatatttgagtgcattttttgccatttgccttgccaacccctctcccccgcacgcatataagaagagaaagagaggcagggaaaaaataaaggagcccacgaagaaaagcaacaactattaaacaggctcctcatcgtataaaagcagcgcagccgccgtcaacgtcaactgcagtgggccaacgtcgttgcagtcgtgtcgttagtttttgttcttgttgcagcagcagcatcaaagacagaagtagagagagcgagcgaaacagccggagagacaaaacaaaaagcacttagaaaagaaaagaagccacgcacctggtgccagagtacaaaacccaaacatctacaatatccgagctgtgcattccaaggagataacgaggaacgtatatatcgaagagtttgagaacatcgtcaggatggaagtggaatcgaataacaaacgcgccaccaacggcggccgtcacttcactccaccgtcggactccgattccaaggagagttccgtcgagcgggagctgaacgaagagatcgaggcggtggagctaaatgggagtggtggtggcggccactcgaacggccatgttaagaagctgatggctgtcgaggatggcaggattaagcgtaaggccaagcggttaatccaaagacagaatagtggttctggcggcagtgccaatcaaactaatggcaatggagctgctggcgctggtggagcacatggagcaagtgtaatgccgctgggaatcaacagaattatgccgtcgcccggtggctatgtggtgccacatcgacgctggaagaatagccggcgttcgcgaaccatcaatcgtggtcgaggactgcccaaaaagggtggtggcggcggcaagggcgtctggggattgcccggttccgaggctctggccgaggtctatgaggacgagaatgatcctaactacgatagtgagtgcaacgatcgtaatgtggagctgcgcgaggtgatcactgagataacacgcgaggagttctttaagctggcggagcccattgtcttggagtactacgagcacggggatccgcatgaggtggcactgagctttgatgagatactgcaggcaccgatgcgcgagcacgtcaccagcattctcgtggagatcgccatggatcacaaggattcgcagcgcgagatgacctcggtgctgatctccgatctctacggacgcgttattaccggcaaggatattgagaagggattcaatatgctgttggccaatctgccggatctcgtcctggacactccagaggcgccaatcatgctcggcaattttatggcccgcgccgtggccgatgactgcattccgcccaagtttgtggccaagtcgggggaggagctaagacatttgggactgggcgaacatgccgaacaggcccttcgccgtgctgactcgcttatctacaagcatgtgtgggcccatttggacaatgtctggggcatgggtgggccactgcgtccagtgaagacaatcaccatgcagatggagctgctgctcaaggagtacttatcatcgcgtgacgtagccgaggcacagcgctgtctgcgtgccctcgaggtgccacactatcatcacgagcttgtctacgaggcgattgtcatgacactggagtcacttagccagaccaccgaggaggccatgtgcgagctgctcaagcagctagatctcacctgcctggtgctgcccgcgggcatggagcagggtttcttgcgcgccttcgacgacatggccgacatcgttttggatgtgcccctggcctatataatactcgatcgcttcgtcgagcgctgcaatcgcgccggattcctaaccgacaagattataaacaatgtgccatcgcggacgcaagcgtttcgtttcggagggcgacggcggccacgtgaagccgactaccttcaccatgcgtgattaaatcatagggacaacggggacgttatatgctgcacatgcttatatgaccactgcccccagccacccaatgacaactagaggagcaacaagagagaagcaaacattaaac

SEQ ID NO: 22920 - protein, 507 aa, DROSOPHILA
MEVESNNKRATNGGRHFTPPSDSDSKESSVERELNEEIEAVELNGSGGGGHSNGHVKKLMAVEDGRIKRKAKRLIQRQNSGSGGSANQTNGNGAAGAGGAHGASVMPLGINRIMPSPGGYVVPHRRWKNSRRSRTINRGRGLPKKGGGGGKGVWGLPGSEALAEVYEDENDPNYDSECNDRNVELREVITEITREEFFKLAEPIVLEYYEHGDPHEVALSFDEILQAPMREHVTSILVEIAMDHKDSQREMTSVLISDLYGRVITGKDIEKGFNMLLANLPDLVLDTPEAPIMLGNFMARAVADDCIPPKFVAKSGEELRHLGLGEHAEQALRRADSLIYKHVWAHLDNVWGMGGPLRPVKTITMQMELLLKEYLSSRDVAEAQRCLRALEVPHYHHELVYEAIVMTLESLSQTTEEAMCELLKQLDLTCLVLPAGMEQGFLRAFDDMADIVLDVPLAYIILDRFVERCNRAGFLTDKIINNVPSRTQAFRFGGRRRPREADYLHHA

SEQ ID NO: 22921 - DNA, 2501 bp, DROSOPHILA
agggtacggcggctctcaagcctgcccgagatacatttatatatacatatacacgccgtgtgtcggcatatttagttttaaaatatgctggcggtggcatatgtacgtgttgtgcgagttctacattgatatactctagatatatgtgtaattgtacttggtaggattaggcaaagctattttcaaaagactccaggctattgcaatatgcttttatgctttttttttatcttgtgacatttcacattcgatgctccagccaagtgaaaacgatttgtaaactgaagcaattagcgggaggtactgggtactctgggtactgggtctttgtcggtaggactgtacgatgacggtattattagttcttagccaaacgtttcaacgctgtttatgttcttatctgtaatcaaaactatttgtactctggttttatattaggtgttaagttgggccgcattgttggcgccagcaagatgtagttactttacacgatagttatatgcgcagagatatgtgttgtctatcctagttgtatgcgttcaaaacataagaacatacacacgctcacgtttgtaataaccatgtaactgtgatacagaaggtgagaatcttaatgaaattggtgtttatacagacatagtgttatatccctaaacaatgacgtattgtaattacctgcaacaaaatggccctgtacttccttcattgaacttatgtgttgaagtgatttaataaatgttacttgtaaaaccactacaaatgcagtctcagaattgatggatcagtttattgaatgggtgttatgcaaatccgtcatagtgcggatataattatttacttttacttgttaaccctatgccaaatttgcttcatttacatcaatacgggtttgtgtggaatgcttagtgataaacaaattgcttgcacccggctatccactttccattttccattttctcgattagacttccatgaaggttcaattccattgaaggctcctttaaaacgattccccgacgggcttgattgtgagctcatggatctgcacattgggaggcgtctggatgtaataggacactgcgtcggcgacatcctcagcgcgcagcatgggaaagtttggaatgaccttattgattttctcatcaatgatctctgtgtcgacggctccgggacttatgctctagaagtggataggtattaagactcatataagtgttttagttgctttcgatggttggtaacagatttttaaaatgattcaatgtgaaaccataatctttttgttttctgtgcctaatgtacatctgaaatcaaagtctactgaccctaaaatataatacattttgaagttgaagtcgggcaacacgggaattttgtgacccacgacgctgttaatgacgaccacatggccatcggtgacgttgcgcgtctgctgcgatcggaaggcttcgcgggcacaccacacgaatcccagtaaattggtgtccagaacggctcgcatgtcgcggcattgttgggatccgtgatgagggaaccggtagtgatgccggcgttgttcaccaggacattaatgtaatgccttaacattattgtcattcgaaaaacaaaagcctgtccttttttaataatataaaatgtattaccttaaatgcacgtatgcatgtacgtacatatgtacatatgtatgtaataaatacttcgagctagctcaattaaaaatcaaattaaatattattactgttttggagctaagagagaaggagcttttatcaataaatatatagaatgacaagtcattctgatgtaaaaaattacgatctgagaataaaatgcaagaaaaaaaactgaaaaaaacatgacatttgaaatgtgcaaacaatatcgatgatataaaacaactgttaatataatgagtatcagtacatagcaagattagtatatgtatatattacaaagctacctcagggaatcggtcaccacgttatcattcaaacatgtgcatattctttctagaaataaactttttttttaatcataacgtgggtaaacgttttagaattctttctcgactatcagctactcagctagtaacagggcgagggagacattaaatttttttttattttattattttatttttttttgcacatctttgcatttttcgatctttggatccattaacaacacacagacaaagacggacagatcgacttctgctctacgattaacaggtctaaaattcgataagcgaagatatgtaattcatctaaaataatcctttttacggtaccttttgtggtacttcgtatcatagtaggcgccgaatgtatatttagtacaataataactattaataaataaatccaactgcatgcagtagctggagtaatcgtgacctggttaactcgacttgggtgcgattcagtgcttgcgaagtgtgtagcgatcgatcggccccgatggcataataccatccttggcctttatcagcgccggaaggc

SEQ ID NO: 22922 - DNA, 297 bp, DROSOPHILA
atgcgagccgttctggacaccaatttactgggattcgtgtggtgtgcccgcgaagccttccgatcgcagcagacgcgcaacgtcaccgatggccatgtggtcgtcattaacagcgtcagcataagtcccggagccgtcgacacagagatcattgatgagaaaatcaataaggtcattccaaactttcccatgctgcgcgctgaggatgtcgccgacgcagtgtcctattacatccagacgcctcccaatgtgcagatccatgagctcacaatcaagcccgtcggggaatcgttttaa

SEQ ID NO: 22923 - protein, 98 aa, DROSOPHILA
MRAVLDTNLLGFVWCAREAFRSQQTRNVTDGHVVVINSVSISPGAVDTEIIDEKINKVIPNFPMLRAEDVADAVSYYIQTPPNVQIHELTIKPVGESF

SEQ ID NO: 22924 - DNA, 4084 bp, DROSOPHILA
tccaccaaacgcccacgccgcccatggtaagcagtttgcccacagccgtgcccgtttgaccgagacagaagcgatccataccgaggaaacccagcagcatgctgtagatcagtgtggtcacaaagtagtgatccgtgtagcggacacagggcactccggcgcgcagaaaggtgcgattaccgtagcactcgatgtcggcaaacacggtgcaccagaccatggcgtgctccacctcttcgtacgtggaaccaccgaacttcaggcatccgtatttcttttcctgctgcgccgtggcgttctcccgatgatcgacgggatccttgcaatcgagaaagtcgcgcggcagaaacgagcacatcacattcggtcccagtggatagaaggccgagtttccagctccgcccgaggcggaagatgccgaagatgacgatgaggagggtcccatgccggagcccagttgcgcctgaacgggcaccaccgattgcaccgccgtgccggagaccacagtctgcggctgctccttgtcgctgcgtgcctgtatcgcttgggcatcgtgttgtctggccaccaggaacgccagtagtccgtagaaaatccgcatctttgcgagctccttatcaaaatatagctagccagtgtggccacaccttagcacagctaacagagctctgttatctgcgatggcctaccgatagttctgattttaagcaccacgacaacgaatggaaataaataaatgcaaataaaccacctttcaagtaacagtgctccttagcatatttattggcattagtgtgatcgtagtctttagttaagtacatttagtgaagtgctatttagtataatgcgtttatttatttcagactagttaccaatcacgcgcccatctctacattcgataggcaacggccctgttgcattggtgtgcacacactggccgcgtaatcagcgggcgcgaaccatttttttttttttttgtgcgacagaacaaaaacaagagaataatagacgcttaaagagcattacccgtccgaatttcacgggcagtacgaaaacaagaacggagcagagagcccgcttaatacgacgcgtcattttccaccattttactgctgtgatttgtttgaattttgctgtgtcagcgcattggaaattcgttggacaagaataatgaatctattgctcctggtggccaccgcggcctccgtggcggcactcacgtccggtgagccgtcactgctctcggatgagttcatcgaggtggtgcgcagtaaggccaaaacctggacggtaaattcctttgtttccaacccttttcttgctgacgtgacaagaaaattgcattttcccgtttcctatccgccaggtgggtcgcaatttcgatgcatccgtaacggagggacatattcgccgcctgatgggcgtccatccggatgcgcacaagttcgcactgcccgacaagcgtgaagttcttggcgatctatacgtgaatagcgttgacgaacttcccgaagagttcgattcccgcaagcaatggccaaactgcccaaccattggcgagattcgcgaccagggttcatgcggctcctgctgggcctttggtgccgtggaagccatgtccgatcgcgtacgtagcttaccttatcgatattataaccccttccattctttgtttgtccagctgataaatttccccatttttttttattattattttctttttgtatttgttatcaatgatttttttttttttactgatttcgcaatgggcaggtgtgcatccattccggcggcaaggtgaatttccacttttcggccgatgatctcgtctcctgctgccacacctgcggatttggctgcaatggcggtttccccggcgccgcctggagctactggacgcgcaagggaatcgtcagcggaggaccctacggatctaatcaggttggtgatcttctcctgctttaatgggattttgcaaatcatatttagtttggtttaaaagggcttgcaatttggttttgcttgcagatgagtttccaataaaaaaaagggtttgttttctaacgaagaaaaacatactttatgtgcaaaaataacctgtatttgtacatattgtatttctacgccgaaatagttagaaagcaacttgattttgttctttgtttacttgaagtgaactgaagactcagtttacgacgccataaaaaattgtataccacagatatcgctagaaagcggcttagtatatcatatacaaacatccatatacacaaagctatatgtatatatatcatatacgaacatctatagatatacatgcatatattgtgaatgcactccagattcgcgtacatcctcaacgataagttttagctgctactaactcatttcccagatatagtaaggcaaacagaagaaaaaacgattctaatatgcacttattttgcagggctgccgtccttacgagatttctccctgtgagcaccatgtgaatggaacccgaccaccatgtgcccatggcggtagaacgcccaagtgttcgcacgtctgccagagcggttacaccgtcgattatgccaaggacaagcacttcggctccaagtcgtactcggtgaggcgtaatgtgcgtgaaattcaggaggagatcatgaccaatggaccggttgagggcgccttcaccgtttatgaggatctcattctgtacaaggacggtgtctatcagcacgagcatggcaaggagctgggcggtcatgccattcgcattttgggctggggcgtttggggcgaggagaagattccgtactggctaattggtaactcgtggaacaccgattggggcgatcatggtttcttccgcatcctgcgtggccaggatcattgcggcatcgagagctccatttcggcgggtctgcccaagctgtaaatgttatatgtattccggcatcaagctgatatatcaaaacccctctattttctatcatccctccttttattttcattccgattcgcaactgacgtttgtagttaatgtaaacaacctaaacctgattgataataaagtattgtatatgactgtggaactgtactttgctcgtatacagtgggacctctctaactagaaacaaggcaaacaaaaaaaagaaaatgattatcaaactggaactcagatataattaaaagcgaataatactatttgtgaaacaatgctataactatccaactataaactattgtttagcgtagctatgccttttttatttaatagtagagattaatagtagagagtatctgatcctctatactatgtacacacatttaaatggaacgccgtcaatcgttcaatcgttaaactggctagctgtatgttttgcgagttataaatgtgattagcatcgcatttgattaatcaaacaaagagtacagcttgcaatcgcattcgtcatttggtgcgattttgttgagttaatttattattacattagttagcttggccatacatacatacatacatacatatatgtacatacatatgtaaaacttatctcgttgaagctgcccacaatttgcagcaccaaatgtccattcaaattgtacacatatttattcacataacatgttttatttatttttctcatttgcaacatcaaatagaacatttgttttgtattttcagttttttttttgttatcttgtcatgaaccaaccgcttctcttatcgattttctgtgaattgattgactggttttgtagccactcttctattcaccgaaactcgatatttttctaacaaacagcttacatcgaaaaatatttgttactgccacatttcaattggtttactcttgttatttgtcatatttcaatttcaactgttggcttaaaaatctcttaattttgggtaggtttacattatatatctatatatatatatatccattttcgtggaatcagctcagcttaatttgttttggtttgtaattcttgctttgcttttatttttaggattttgtaaatagattgcatttggcttgctcctcatcttttttatttgttttgttcatcggtttgtagattttttttgtca

SEQ ID NO: 22925 - DNA, 1354 bp, DROSOPHILA
aataatagacgcttaaagagcattacccgtccgaatttcacgggcagtacgaaaacaagaacggagcagagagcccgcttaatacgacgcgtcattttccaccattttactgctgtgatttgtttgaattttgctgtgtcagcgcattggaaattcgttggacaagaataatgaatctattgctcctggtggccaccgcggcctccgtggcggcactcacgtccggtgagccgtcactgctctcggatgagttcatcgaggtggtgcgcagtaaggccaaaacctggacggtgggtcgcaatttcgatgcatccgtaacggagggacatattcgccgcctgatgggcgtccatccggatgcgcacaagttcgcactgcccgacaagcgtgaagttcttggcgatctatacgtgaatagcgttgacgaacttcccgaagagttcgattcccgcaagcaatggccaaactgcccaaccattggcgagattcgcgaccagggttcatgcggctcctgctgggcctttggtgccgtggaagccatgtccgatcgcgtgtgcatccattccggcggcaaggtgaatttccacttttcggccgatgatctcgtctcctgctgccacacctgcggatttggctgcaatggcggtttccccggcgccgcctggagctactggacgcgcaagggaatcgtcagcggaggaccctacggatctaatcagggctgccgtccttacgagatttctccctgtgagcaccatgtgaatggaacccgaccaccatgtgcccatggcggtagaacgcccaagtgttcgcacgtctgccagagcggttacaccgtcgattatgccaaggacaagcacttcggctccaagtcgtactcggtgaggcgtaatgtgcgtgaaattcaggaggagatcatgaccaatggaccggttgagggcgccttcaccgtttatgaggatctcattctgtacaaggacggtgtctatcagcacgagcatggcaaggagctgggcggtcatgccattcgcattttgggctggggcgtttggggcgaggagaagattccgtactggctaattggtaactcgtggaacaccgattggggcgatcatggtttcttccgcatcctgcgtggccaggatcattgcggcatcgagagctccatttcggcgggtctgcccaagctgtaaatgttatatgtattccggcatcaagctgatatatcaaaacccctctattttctatcatccctccttttattttcattccgattcgcaactgacgtttgtagttaatgtaaacaacctaaacctgattgataataaagtattgtatatgactgtggaactgt

SEQ ID NO: 22926 - protein, 340 aa, DROSOPHILA
MNLLLLVATAASVAALTSGEPSLLSDEFIEVVRSKAKTWTVGRNFDASVTEGHIRRLMGVHPDAHKFALPDKREVLGDLYVNSVDELPEEFDSRKQWPNCPTIGEIRDQGSCGSCWAFGAVEAMSDRVCIHSGGKVNFHFSADDLVSCCHTCGFGCNGGFPGAAWSYWTRKGIVSGGPYGSNQGCRPYEISPCEHHVNGTRPPCAHGGRTPKCSHVCQSGYTVDYAKDKHFGSKSYSVRRNVREIQEEIMTNGPVEGAFTVYEDLILYKDGVYQHEHGKELGGHAIRILGWGVWGEEKIPYWLIGNSWNTDWGDHGFFRILRGQDHCGIESSISAGLPKL

SEQ ID NO: 22927 - DNA, 7519 bp, DROSOPHILA
gttctgacagtgttgggaaactaactataaacaagagcatagattgctatccttcgctctggcttttcagtttagtttggcttggttttcagttttcatgacaggaccaaaataggaaaagggaggcaagaatgctgttcatttgacatttttaagcaatttccagtttgagtgtgttttttgttttttgttgttttttttttttggtatatttgtatatgtgctgtgggaaaatgttctgagagcttttcattgctttgcatctttaatttccttagtccgctatttcttttattttatcgcattttggtatttattatatccaatggaatgtggcaaggcacgaaggaaatgggcgaaaaggaaggacaatgataaagggcaagcaggaaacacgcaaagaatgctgctgccagctctggatttttgacccaaaaagaacgagttacaacatatatatgtacatagataaatttaaacaaattccgcccaagcgtcctaaatttaattaggggcttctaacacttatttacagcaccaaaatgaaataattactaattaacattcaagcgcttctttttatactattttaagaaatattcgtaataattttacaattgcgattttaaatcgaaaaatcaggtgttctcgttttcgaaattgtaagaatttttcgatttgtaaacgggtaattttgtctggccgaaatgtaaagtaaattgattttctttttaatataaaatctgatcttatttactaaggcaaaaaatagtttactccgtggtctattgatgttaatgtcaaaaagaatggttaagattcttgtaacgcacgatttctttattcaaatagaactgaataaatcaaatggtctattacaaagtgcttttaagcgttatgctttcctaattaaagggcagcaacacatcgatagctcttcgataaaaacgtagactgacatcacctgtcaactgtcgtccctatagcgtgcactactaaaattatttttgccccacgagaacgtaaactacaatgaaggaaataaaaaagaaatcaaagccaaaacgcaagcccactcgcatggaagtggaggagagtgagcctgagatgccgttctcttataagacgcagccagatgaaggtgagtctgtgaatggggaggcacatacctcggatgacggcgatgaaatggagctggccaccttcaaagccgccagcaagaagggtgtcatctacatatccaacctacccaagcacatgaccttgacccgcctgcgtgaaatcttgggcgagtacggtgccatcggcagagctttcctgcggtcgcagaagctgtcaagtgagtggaccaagtggcatacacatgtataagacccactaattacccaattactttaggaaagcctcataatttcctcttcgccgagggttgggtggaattcaaatcgaaacgtgtggccaaacagatcgttccactgctcaactacaagcagatatccacgcacaagaagtccccattttattactcactgtggatcatggagtacctgccgcgcttcaagtgggcccgtctaaacgaactcatgaacatcgtgccggtcaccaactctcagaaccatctcaagttcctcaataagaaggcgaagaaggccaagaaagttaagaaagccaagaaggctctggctgacagacttcttgagttagtgctagcctctagcatctaatgttaactagattgcaaatatacttaaataaagtagatcaaatgaaaatcttttattatttagtcgcccaaaattatttgaaatttacttcaaaaagttttttggccccttttacgttggttttccggcttcattgtttggagatgaaaaatggataggaaaatccacagtgaaaaactatatatataagcaatatttaccataagaaaatatttttaaaatagctatcttgactttgtcgtatatattaaagaacatatttgaagattcacgagtataaacataagacactcctgacaaagagatgcgaaaattggaatgggtgagaggagttgaaggagacgacgtgttgagtgccacaattttcatctttctgtcttccttactgcggcatcattttctccgcaggctgcaccaagagaaaacaaaacaatgaagaacgttatagatggcaagtttcccgactttgagacacccactacacacagtattttgctgcaagctttcttactcctcctgctatacaaactttccaagccacacaatctacccctttccttaacaccaatttaccaggtatgaaaatcgcaacgaatgcaggaagaatgctccaaatgtctagagcctgcacaagtatgcaattgtttgtggcaaacaaaatgccaaacagaaaaaagaagcgacaacaaacaagagcaccgacaaacttttaatacataaaaaagaatacaatgtgtagctttaaaaataactgataccggaaatatatttgaaaaacttaagaaccttgaaaggaattatgtacaataagttagaattttggcattatttttaggcccagactcataaacggctttacaatcctgacttatttttccagagtgtgaaaagatagtaagaaacaagaagaggaagactgtcgactgtgaccggtttggcaaaagacggtggtgagtttttcaaacttcacacaccgtacacatactacatacatatatacacacatatacctacatacctacccacccatccacttgggcgtttcttcaacaaccctcctcgaattttactggagcatggagaaaatgcgtggatgacacacacaatagcagcaatagcaaaagcaacaataaacaatacagtgcactccaaagaagcggaacatttcctacactttttaagttcactgtacggtatggaaataaaacaagttcgaaagaagtcgttattttccctacaaagtgactcaaagtgactctaccagagtatggcagagtattttgcttattttaaagattttaaattcgctatgaaagtatatgatcaataccttgagtgattcgagggtatactgtgatacaaggaagacgaagattttcattccggcacaaacaaaatccgctaaaactcgccgatggccgtcgtggtggatgatgatgggtgctaaggtgggtggttgaatgggtggtaaggtggcacaagtgacgctttcgcttatggcgacagcctggcagctttgacatttgcatgtgtattatgcgtggccctgtgggcatgtgtttgtgtatggcgagttttccacaccctcgcgaatgccagagcatccttctagatgggcaaaaatccttcaaagttcagaaacagaacaacaggcaacaaaatcatcgccacatcgccttttttttaaaacttttttgctccatttttgttcgctttgagagctagacatatggacagatggtcagaaggacagcagagcagctgcacagacaacagacagcacccttgacattttccaatcaagcttttggacacagagattggctattggaggatggccatctgatccagatataaactgatcaattaccgactgagcttgctagcataattggccttcaaaagtcattagactcgatgcacatgaacaaaaaaaaggtatcttggaaattgaacttagtaactaaaaactatcaccataaattccaaatcatatagtttcttccttggtgaaagatgaaagcaaccatgatatcaatatcttatagtttggttataccttaagaaaccctccaaatgttcgatttatggaagagcaaagctattattagaccctggattacatgtaatataacatatttttgaagttatttatcgcaacccgaactccgctaaacaggactttgtggttcagccaagatttatcggctcattccgttcgctttctggttgtcgtcgcatccgcgggataccatcctcagtacagccaactccatggccagtgcggtgtggcccagaaagctaaaactgaaactgagactgagagaccgaaactgaaacaaaacacacacacagctcctccacaacatggcacatggtccatccgcaatccttcgtcgcgaatcctcctccgcagttgagaggagaagtttggagggctgctctgctgtactgctgctcctgcggttttcgtccccaaaaataactaacccccgatgtgagagcatgggccacacgccagttttgtgtgtgtgtgtgtgtgtgtggaggggagggagggagggggttgtctaaagtaaatggcaaaatggaatgcttggacatggacagaacggagcagcgaagcagccagggtaacacggctaagccggctacggaaaaatcagcaaatacgcctgtattttttggctggcgtctgtcgcactccctgccctttcccatttcccttttgcatcctccgccttcccccctcttcaacgctcacttttccattttcccgctggcaggcgacagccaccaccgaaaattgccacccaccttgcatacacgcaggaaaatgattaaccaatgttgcgaccataggcatttgcaatggcaatgcaagacagatcgcctcgactataagatacctattactcaaagcaaatgaagcgagaaaaaattacaattgcagcaaagcaagtttcttttcaaagaactttcaattcactttttatatacgagttcttcgatgatgtagttcaaattgccaaaaacaaaaatatgctcatttatttatttttgtgtaatttagagaaacagccattgggcgtctacaagttttttctttatttttagcccgtttgtttaatttgattgtttttattttcaatttctacgtcgactgtctgcttgttgatattcctctatttctatatattgtacataaacatatattccttgcaatctcattctgttaaacgataattgtaatcatttcgaaatggggatgactttatctggccagaaatcgttatcatccgtaaaatgtgggggttggtcgcattcaacgagattttaaacttataaagtctaatacctctaatacgggggatgacatttatctagctttttatcaaaacatggtgcgatagaaaatcgaaaaattgattcaagcgtccttttttaattcaattagatgtacttcatttttgaaatgcaattaaattagaaagtacatcctaatgcgttctacacacgcttgggttactaaaaaaaattgattttcactgaaaatatttggtttaattggttgggctgtccatgtttgccagctttcaaaattgaaatattcgatctcagctgccttaacttacatgtataagcatgtacaaaaggctaattaagctacaaattcattgatttattccattcgatgatataatggacccatggtccaataaatgtgattgaaatgctaacaaacgaaccaatgcatccattaaaattaatttcactaatcggtcggtggattcgcctttccattatgcaattgaagtgaattattttgtggaacgaggctcgttccaatttcccgtcgactgtcaaactttgaagtacatatgtagtttcgtttctttttgtgtgcttattatgctgtgtctacaatttggcaaaattacaaaccaaacagtaaaatcagcagtctgtgaatgtgtgaatgtgtgtgtgcggcagaaagaatcagtaaatatatatatttatatatataatataaacttatatagatggatgagtgtagccagatggaagacaagtgtgtacaccgagaaaataatatttgtgagtttatcctacttcgaattgccttcaaagttttaaattttaagtttttgaaattacaaatttttcttttcaatcggaacttggaagttgcgcattaaagtgatgtgctttaattatcttgatatgtaatagtataaggttttaagtttgttttttttttttaaattataaaaattgttttaggaaaaatgatacgaatggttagaaataaataccagttttgaaatcaaatcaaatcacttctttgtgtaaggaatgcaattgtatagggcttccctttttttaattttttcagacaatggaaaagtgtgcaaaaaatgcttaccgcaatttgttgttgccagcgcgacgctggctgcagtcgggcgtcgctgctgacgccgctgcttcttcggatgctgcggtcgcaagagaaaaaagttggcaacttttgatgtttgttgttttggctgtttgtttttgttttttttttacttttttccttggcttcggttaacgcttttcaccgatccgctgctttttgcaatattttatggcttttattttccactgctttgctacttcgcttgcactttaacacacaaaattccaaaacattaaaaaaaaaaatatagagaaaaaacatttcacgcttggcttcattagcattattgttcgtttatttgttattcgtgttgttttcctttaacactttctcgttcgcgaaagtaaaattatacggagttagatggaaagaaggagagataataggagcaactaaactagctggattccatagaattttgttgtttgtggatagctatcatttacgcgatttctactaattgttgttgattgcgtttttagaacgaaaccataattatcaacttaaacttgcaaattacattgtatagctaaacttttagcaaaacttagcgactaaattgtcttttggccactcgaaattcaaacacgttcaaggaaataaagcacagctgtcattacaaatggactttccctctaactttagtgtaccaagtacattgggttaatggctctataagaacatttttcattcagcgtttaatgtgcccataaaagttaagctatgctgtaatttaagcagaattaattcagtttcttagcgtctggaaaaccgcgaagctatttcattgatcgacttcaaaatttaaaacctattactaagtgctctaaaaactaggcaccatttaggagccaacatgtttgccatttatctgatagacttgagtgtttcctttagattaaggggaactccgattcaggatgctgctaattattaaggaagctactggattcgcttaatctcgttttcatcgtcgtcgttagccgagtaccgagtaacggtatcggatggtatcgagtaccggtaccgaatgccgagcaccgttaggcagctgcttttaatgagcctgaactttcacaccgctgcagcagaatgtaaaactattatgcacactgcaaaaaacaagcgctggtcattcgctacaattactaaaaaaaaaataatactatttccttgagaatagcattttaataaattagaaattggatctgtgaaataagaaatgaactattaaccaaaagctatgtttaagagcattttagaaaacttgagagaaatgctcgatcgatttgcaactttgtattgatcaaatggcactatagagacc

SEQ ID NO: 22928 - DNA, 1185 bp, DROSOPHILA
attatttttgccccacgagaacgtaaactacaatgaaggaaataaaaaagaaatcaaagccaaaacgcaagcccactcgcatggaagtggaggagagtgagcctgagatgccgttctcttataagacgcagccagatgaaggtgagtctgtgaatggggaggcacatacctcggatgacggcgatgaaatggagctggccaccttcaaagccgccagcaagaagggtgtcatctacatatccaacctacccaagcacatgaccttgacccgcctgcgtgaaatcttgggcgagtacggtgccatcggcagagctttcctgcggtcgcagaagctgtcaagaaagcctcataatttcctcttcgccgagggttgggtggaattcaaatcgaaacgtgtggccaaacagatcgttccactgctcaactacaagcagatatccacgcacaagaagtccccattttattactcactgtggatcatggagtacctgccgcgcttcaagtgggcccgtctaaacgaactcatgaacatcgtgccggtcaccaactctcagaaccatctcaagttcctcaataagaaggcgaagaaggccaagaaagttaagaaagccaagaaggctctggctgacagacttcttgatttgttttttttttttaaattataaaaattgttttaggaaaaatgatacgaatggttagaaataaataccagttttgaaatcaaatcaaatcacttctttgtgtaaggaatgcaattgtatagggcttccctttttttaattttttcagacaatggaaaagtgtgcaaaaaatgcttaccgcaatttgttgttgccagcgcgacgctggctgcagtcgggcgtcgctgctgacgccgctgcttcttcggatgctgcggtcgcaagagaaaaaagttggcaacttttgatgtttgttgttttggctgtttgtttttgttttttttttacttttttccttggcttcggttaacgcttttcaccgatccgctgctttttgcaatattttatggcttttattttccactgctttgctacttcgcttgcactttaacacacaaaattccaaaacattaaaaaaaaaaatatagagaaaaaacatttcacgcttggcttcattagcattattgttcgtttatttgttattcgtgttgttttcctttaacac

SEQ ID NO: 22929 - protein, 210 aa, DROSOPHILA
MKEIKKKSKPKRKPTRMEVEESEPEMPFSYKTQPDEGESVNGEAHTSDDGDEMELATFKAASKKGVIYISNLPKHMTLTRLREILGEYGAIGRAFLRSQKLSRKPHNFLFAEGWVEFKSKRVAKQIVPLLNYKQISTHKKSPFYYSLWIMEYLPRFKWARLNELMNIVPVTNSQNHLKFLNKKAKKAKKVKKAKKALADRLLDLFFFFKL

SEQ ID NO: 22930 - DNA, 3245 bp, DROSOPHILA
tcgcagcatattcaattattcagttattgccattataaatgatgataattcctgtcactgttattggctgaataatcatccgtagctagcacatttcgtaccaatttttcgattacgttccctgtgtgatagttgtacaccgtggtcctatagtaaatcacacacctctatcgatcttttaccgaatgaatcgcggatgtgatgacctgcgttctgggtactgccaacaggcaacgcacgataagatagtcgcgatgcaagaaatttatctatgcctcggcaagagtgcgatgtacgaacaggtggcatgccctcgaatcaacaaattgccccgatattaccgccatcgcatcgcgaaactgaagttgagtggtgaatccgtagtaaacagccttgatgggtgcaattaacaactggatttatgataagccattaagtcaatttactaagagtgtgtgtattgcagttaacttcaagttgcatttgtggaatcacaagtgtgacaactcgcttgaactgatgatgactaaggtcgcaaaatcatagttcttttattggaatctacttgaaagtgtaaaggaaagaattcgatataaaaatgttagctttatacacatcacacatcaaattaaatcatcaaatcgtttgaaatgaagttaaattgtcagcattgcctcttaaaattaagttcccatcgctgtgcacttccaagttagaaaacgttggtaacttttacactttatgacagattaattgcaattcagttcaatctaagactgaaatgccagcttgtgtaaggaaataattgaaattgacatggctgagaactgttagcaatctgctggtttccgtgattaaagtgcatttgaaacacacactagtctctctctagtcggatttatcggcagatgaattttttattttatttttattttataaaatatattttttatatgtatctacccacttttttgttcaacaactttgagtaaactttcaaaaagaaattcacacagaaggaaaatttaaagtaaattcaaaattcaaaaaaggtttatccctaattatggttaaggttgtggaggacatctttggtattgcgaccaatccgtttaccaaacaggcccaagtgattcgtcgctacacgatgaccaacaccaatcgcctgtccgtggccatcatccagctgggcgcaacaatccagagcattcaagtgccagatgcctatcaccagttgtccgatgtggtcctcggattcgatgatgttgccgggtatacgaaatatagaaattatcattttggttgcacgattggcagagtctcggatgtggtgggcaacggcgagttcatcatggacgagcgacgtgtcgttgtatccaaaaatctcggccagaaacaccaaactaatggtggctttgtgggcttcgatcaggtcatttgggatctggaaatgaaacgaccggatggcgtcaccttgcgtcatatatccccggatggacacgaaggttatcctgggaccttgaaagtattacttcacttcaccataaatgacgacaatcggttttttatacaaattgaagctaccactaatcaaacgacgccggtaaatatatccaatcatatcatctttaatctggctggccagtctaccggaatcaagggcatttttgaccatcaaatcaatattgaggcaatagaaacgatggaaacatcaaatggcgacggacttcccacgggtcgatttaagaacgttaatgattccgtatacgatatccgattgccagtattcatgggcgaccgagtgcgtcagtttgaaaagaaaccggtaaagggttacgatgtttgctttgctctcgacaaggagtttgatgcaattagaacgcgttatgtgggcagatttttgcatccggattcgggcagatttatggaaatattcagcaatcagccgtgtgttaaattcaccaccggcaattgttttccccaggaaccgcttggtgagccaccaatattgggtaaaaagtgcacccgctattggcaacattgtggctttagtcttcagctacttaactatccggatgccgtaaatcagccggattttccacgcatcttcatcaatccgggcgagcattatttccatgaaaccatctaccattttggcgttcaggaatcgtggaaatgctgtgccgatccggaggaactggaagccctgggcgaagaaccactgcggaaaccaaaggccgtttgaaaagcgcagagaagggcccttgaatggccgctacttatgtaggccgtttgagaatcgcagagaagggcgcttccattaaactgtgcgttctatggtagcaactttgtgtcctcaacgtaataaaaattttctaagtcgagtaatcattgaataaataaaatttgcttctctattaaaatgccatttgtatatattatcgcacaaaggaattttaaaatgctgtacattattaaataggtcaaaatatttaataatgaaattaaatgaaacttggattctttaaggagaacgactaaaaagtaaataataaatgaccgccattgtatcttcacaaataaaacaaaaacgactggatattacattctaaatctattttcatacagaaaccctattttatttcaagaatgtttctttggccttcttctgctagaaagccaatttaaaatgctaacctttgcaaagatgtgtctctcgagtctctccttttaaatggaacacatttcggtgacagattttattgaagcaaccaaagccgcaatccaaaggcccagtaactttgacattggcattaccattgccattggcctcactgaactgaactttaagcgacaatggacgaggatgactgactctgtgactgtgacgacgatgcggtgtcgatgtgaatgacgagccatgattttgcatttatttgcacaccatccttatattttcagtggggtggcgccaatgaggcatgatatggaaccagcggcacggacggaaagaacaatgccgaggcttcctcgcaggcaactcgaaagcccattacaacaactgcaggtatgaatggtcattataccccactgttttctctatatacacttgcaaaaaaaaaaattgttcttttctatggatttctgttctctaaactacacttcatgttattaaggatttctcgaagagatatgtttcaattaatgcgtgcgtttgatgtcttcttatgtataccctttgagaa

SEQ ID NO: 22931 - DNA, 1245 bp, DROSOPHILA
aaagaaattcacacagaaggaaaatttaaagtaaattcaaaattcaaaaaaggtttatccctaattatggttaaggttgtggaggacatctttggtattgcgaccaatccgtttaccaaacaggcccaagtgattcgtcgctacacgatgaccaacaccaatcgcctgtccgtggccatcatccagctgggcgcaacaatccagagcattcaagtgccagatgcctatcaccagttgtccgatgtggtcctcggattcgatgatgttgccgggtatacgaaatatagaaattatcattttggttgcacgattggcagagtctcggatgtggtgggcaacggcgagttcatcatggacgagcgacgtgtcgttgtatccaaaaatctcggccagaaacaccaaactaatggtggctttgtgggcttcgatcaggtcatttgggatctggaaatgaaacgaccggatggcgtcaccttgcgtcatatatccccggatggacacgaaggttatcctgggaccttgaaagtattacttcacttcaccataaatgacgacaatcggttttttatacaaattgaagctaccactaatcaaacgacgccggtaaatatatccaatcatatcatctttaatctggctggccagtctaccggaatcaagggcatttttgaccatcaaatcaatattgaggcaatagaaacgatggaaacatcaaatggcgacggacttcccacgggtcgatttaagaacgttaatgattccgtatacgatatccgattgccagtattcatgggcgaccgagtgcgtcagtttgaaaagaaaccggtaaagggttacgatgtttgctttgctctcgacaaggagtttgatgcaattagaacgcgttatgtgggcagatttttgcatccggattcgggcagatttatggaaatattcagcaatcagccgtgtgttaaattcaccaccggcaattgttttccccaggaaccgcttggtgagccaccaatattgggtaaaaagtgcacccgctattggcaacattgtggctttagtcttcagctacttaactatccggatgccgtaaatcagccggattttccacgcatcttcatcaatccgggcgagcattatttccatgaaaccatctaccattttggcgttcaggaatcgtggaaatgctgtgccgatccggaggaactggaagccctgggcgaagaaccactgcggaaaccaaaggccgtttga

SEQ ID NO: 22932 - protein, 392 aa, DROSOPHILA
MVKVVEDIFGIATNPFTKQAQVIRRYTMTNTNRLSVAIIQLGATIQSIQVPDAYHQLSDVVLGFDDVAGYTKYRNYHFGCTIGRVSDVVGNGEFIMDERRVVVSKNLGQKHQTNGGFVGFDQVIWDLEMKRPDGVTLRHISPDGHEGYPGTLKVLLHFTINDDNRFFIQIEATTNQTTPVNISNHIIFNLAGQSTGIKGIFDHQINIEAIETMETSNGDGLPTGRFKNVNDSVYDIRLPVFMGDRVRQFEKKPVKGYDVCFALDKEFDAIRTRYVGRFLHPDSGRFMEIFSNQPCVKFTTGNCFPQEPLGEPPILGKKCTRYWQHCGFSLQLLNYPDAVNQPDFPRIFINPGEHYFHETIYHFGVQESWKCCADPEELEALGEEPLRKPKAV

SEQ ID NO: 22933 - DNA, 2864 bp, DROSOPHILA
ccctcgaagaagctgctcatccagcagcaacagcagcgtcagtaccaggtaaagctagatccgaaagtcaagacggtcacgtcgggctctagcgagaagccttcgacatcctcgagtgcagccgcagccggcgccggaggacgcatcaaggccaggagagtgctctacaagaagagcgttggagcagcggcagtcgcccagaaggcgcccggcgagacctacgtaatgcgcctgtttgagcgaagtttggacctgtccaaataccaggataagactcctttgtaccccatatgccgcgcatggatggcaaatcaacccaagaatccagctgtgggtgcatttcaaacagatgcttcactcacggccaccaaacgtgaggacaacggcgaagaaatcctgtcccaaattaaaagcggcgagataaaggtgatcaaccagctcccgcaggccaagtccacggatctgcccataattccgcctcgtctggagttcagccaggaggacaagaagcgggaaaaggctctccaaggtgccagtacctccgatcttctgtcctccaatatgaaccgctggaagaaagtgcgcggacactggataaagcatatcaagaagtatgaaaaggagcgatatgaagttattgacaagattatgagcttggtctgcaaaaactgaagcgtatctaggtgattttggaagtggtatagaaaatgaaaaataatttggattaattgtgcacaaagaattaaaaaaaatcctgtttccaaatcgaatatatatgcaaataagatgcttgtacactttatatacttatataaaataaaatcaaatttgtcaagtagaccacttcaagtctatcaagagaatgataaagcgtttttatatttgcatattttcctgattaaaaaataatatgaaatgcatttgtattgcagcacggaaaggcaaccgcagctgatttgattggattatcccaagatttttgataagaaagacatttgtcattgacttgaataaatgtttatttgtattggtagaagatgcgttccctttgcggttaaattagttctagtttagagctgtgtatgaagttatcattattattttgggttggcaaatgctgctggattgttctggttccgattatgatgttcttcggctcgtcgccggtgcgccggtccgcaaccccctgcgatttggtttggggtatacacattgggcatcctgtgcgcctattcgaccttgagcagctcgacgtcgaaggtgagggtggagttgggcggaatgacgccggggtggccacggctaccgtaggcatagtccggcgagcaaatcagcttggcgcgctggccgacgctcaactgggcaactccctcatcccagccacggatgacctcgcccttgccgatggtgaacttgaatggcttgttgcggtcgcgcgacgaatcgaactgcgtggaattcaaggcggatcattagctggggatggcgaggatcgggattcgtactcaccttggtgccatcgtccagggtgccggtgtagtggaccgtgaccttttggccattcttgggataggtgctgcctgcgggcggggaatgcaaaaatggatgtgtgtgagcgggacgaccatattgtcgcaggtatttccgaattgtgcattgcgaaaatgcactaaataggttagaaaggccggtagtttacggcatttcttgcggattctaacccaatcattggatactcaccatcaccaggagcaattggaactacttgtacgcccatttcgattagtttttttctggcaaattaccgagcggaaaataagcacgttgatttcagttcgtcgcgtcgccgaatgacagctagcggtgggcgatggtcggtgagcggaaactatcgcacacatcaatttgattaattatcaaaaccaattgctttccgagttatcgataaggacgtttttgtattttggcgcgtccgtttgaattgtttactatgaaccgaaagaataaagcagtgcaagatcttgcctcttatcttaaagtccgagacacattggtcattggtcaacttgtataggtcccccaaaagtgtgctaagtattaaataaacataactatagttatataatttatttaaattcctcgactcagttatttgttatcaactgtcacagtttgattgccatcactcgcagctttgtgtgtggggctgccggtgtgaagatcactcgtccttcatcgtccttatagtcggcgtagtcgatggaatagatgcactccatgcccaaggcccccttctggcgagcggagtagaagctagtgcagaaggccatcataagggggaaaccattcgatcggcccagctccatcagggtggcggccaggcgggagcccaggcccttgcccctcttccacgaggccacgctggtcacgtgggagtagagcgccttcgggatgtcgtagcgctcaaacagattgacttcgcgcttggccttcattagtaaatgatacattcgaccccaagcgttatcctccacattctcgagcttcaaattcaatgttcctgcattcacattatcgggataactggcacatgccagaactagacccacaatccggccaccatcgttttcatccagtgccaaaaggctggtgccctcggcgattatcgactggttgaaggcgtcgttgatctcctcgttctgctggtgaacgggttcgccgctggactggcacagaggctccgatgtgtagtactcagcctccatataggcttttacctgtgcataatcctctgggcgcatgatgcgtatcgtgacgccatctattgtcgtgggagtcatcgcgatccggagctaattcgttct

SEQ ID NO: 22934 - DNA, 643 bp, DROSOPHILA
ccgctagctgtcattcggcgacgcgacgaactgaaatcaacgtgcttattttccgctcggtaatttgccagaaaaaaactaatcgaaatgggcgtacaagtagttccaattgctcctggtgatggcagcacctatcccaagaatggccaaaaggtcacggtccactacaccggcaccctggacgatggcaccaagttcgattcgtcgcgcgaccgcaacaagccattcaagttcaccatcggcaagggcgaggtcatccgtggctgggatgagggagttgcccagttgagcgtcggccagcgcgccaagctgatttgctcgccggactatgcctacggtagccgtggccaccccggcgtcattccgcccaactccaccctcaccttcgacgtcgagctgctcaaggtcgaataggcgcacaggatgcccaatgtgtataccccaaaccaaatcgcagggggttgcggaccggcgcaccggcgacgagccgaagaacatcataatcggaaccagaacaatccagcagcatttgccaacccaaaataataatgataacttcatacacagctctaaactagaactaatttaaccgcaaagggaacgcatcttctaccaatacaaataaacatttattcaagtcaat

SEQ ID NO: 22935 - protein, 108 aa, DROSOPHILA
MGVQVVPIAPGDGSTYPKNGQKVTVHYTGTLDDGTKFDSSRDRNKPFKFTIGKGEVIRGWDEGVAQLSVGQRAKLICSPDYAYGSRGHPGVIPPNSTLTFDVELLKVE

SEQ ID NO: 22936 - DNA, 6071 bp, DROSOPHILA
ccgtccattgggcgatgcactgcgcgatgcttcccgcagcggcaagttttatttgggaaagtaagtatcgaacgtaagtcaaactaagccagttctaaaatatttcacttccagtgacaacctaacacgtttgtggaactactctccagataacttgcaggcctgcaaaagtgaacagcgaaacttcctaccgctgctggagacatatttagaaacgccgcacgaaaaggttgatcccgcttttgagtggcgagctctgcgcttgcttgcccgccaaacaccgcacttctttacgtcgctctctcagccatcgagcaagatctccgattatcttgagcaagtgcgcaaacgtctcatccgggacaaagagcccaaacctgctgcccttttatcgaacaactcttctgagaacaattttggcctgtcggtcaacaacgttcatacggagggcgagcaggatgctacggtcgcccttcaggacggtgaaccagagcaggatcttgaagtagaggacaacgaacctgtggtggaagaggtggatgaggtaccggcgcacgagaaaccccttatggttaccaaagagcatatcgaagaggtggcgccccttataggcgagccatggatgaaggtgggaaagaagattggcttcaccaacgatgaacttctcttctttcaaatggagcatcctacggcgaacgtggcctgcgttaagatgctgacaaactggatatccgatgacgacgacgccaccctggaaaactgggcgtacatgctagagggattggagatgaataaggccgccgaagcggtgaaggcgattattgagcgcgaaaaatctggatccactgccgccttctgcctccggtaacgacgatgaggtgctctctgattagcatcatccccatgccgatcccaccctagttattataatttcgtttcaatcataaaacttctttatcacaagtaaaagaatgggcgaatatctattcccaatcaccactcaacgcctcttggccggcggaccgttacggggcttgttgtgcaccatgttaacgcacttggggatatgacgctccgcagcctgttcgttgaatcggcgaccacagtggggacactggacatagtctggattctccgaaggtggcggtggtggcaggtcgctcaacttgccgccgcgcgccaagtgcgccttcacctgcttggccgctctaatcgactgaatgaagtcctcgtgcttcttacgccagttgttcttcttcactccagtggtcagacccttctgctgggcagcactactgtaagttgaacggttgcgattgcccttcgacttcatattgaacgccgcggcctcggtgccctcgatccgctgcttggaggcatcgaatatcttgcgtttggtggtcagcatgcgctggcacacctcctcgtgcttcgccagacgatccgtgttgaagtggcgtccgcagtagcggcataaagcggtgccctctgggattgcagtcgttgtgtcctggtagcgaagggtaatcttattatacgcccactgccgacaattattctgctatactcaccatgttgacctttttaactggtgatttgggttccgccttgttggaaacagacatttaaaataaatcccaaatatgtttagcttgagactgacacctccgtgccacgtcgatgctacttacccgtcgaacaaatggtggcgaaagacgaccggctgtcggggcagcaccggttcctccacttactcgttgggtcgcctgaatcttgggactgcgttgtggcgcgggagaacgttggtggagcgtggtctcctgggccggcggtgtcttgcgggtgaccacgggcttaaggttgcgattcaaagtcccgcggggcgtggcgaacttattgttattgctgtcactagtgatcctcctgcctggtgcatttggtgcatcccgcatggtcaagtcggccacgcccttgacgagacgctgcattgggggctgcgggcgagattttgtttgggcgggtggcgagggcagagtgccgatcggcttgaggggattgctgcgatcaatgcccgccccgcggcggcgctcgtcgaacatctggcgcactttcccattcccgatcaacctggtggtggcggcactgggtgctccagtggccaggttctcggcacttgacttcgtgctcatcagctcccgcctacgcacctcctgctcctgttgcgtgcgctgctggaaacgcatctgaaaattgaagcacatttgttgtaaataattcgcttataattttcaaatcaaaacctagtgacctttttaaaataaaagactttccattcaattagcctttcgtgaaaaccgaaaacatttaaaatatcaatcatcatttaactgattgctttgtaatttcaccctttttaattttcaaaaaaatgttttctgttgcaaaatggaattcaaaattgctttcttttttggcttacgggtgcagaatttgtgctgctattgccactaggtggcaggtgactcaaagcctccatgaggcgccttgctgcccaggactcgttcagcttcaggggcaggatgtgatcctggccgagctcggattcgaagtcgtactggagcagctctccgtccacgtcctcgtccccgtccgtcgcttgcaacattccggtccggagagcgcgtgacaactaagcacacgggactggggctggacattagcgcgtccacttcccccgagtggagtcattaagtgcacaggtttcggtgtgtttgctcgtctattgtggcgatggggaggtgtcacccccgcttttggtgccacctccaggccccagcgaataaatccgtgcccacttacgtgccgccagtacataaagctcctagccacccgacccgcctgggcgaaagaaaccctatcctgtgcccgggaacgggtcgcgggcagggatattggtgtgggtgcgggtgtgggtgtggatgtggacgtggttgtgggcatgctcttcccgctgttgtcccttcaactagtgcgcttgtcttctgcctctggtgtcctggtagtggccttcgaactcagccatggccacctggcaagttgtccgggcaaaaaatgcaagtcctttgtgtatatcggacactcgagaaatcctagctggctgtccttttgtttagctgcccgcttgcttttgttgttattggcttgcaataacaacaaaaaatcaatgactgcaacgttgccaggacacggcccacatgggaatacatatatatatatatgtatatatataggaccttccccaaatgctcggcaattgttgaatgccgccaaggaagcgccgcgaccaggtgacaaaggaccttcgcattgtcctttatccgcccgcccctttgagcgataaaaatcgcgagcaactattttcccatgtaaattttatgattgatgaattaccatagctggctggatggacactcaaaaaaaagtattgtatatggtacatatgtacatacatctaatttggttaagttactcaaagttctaaagcacctttgaatttttaaaaatttaaggcaagccaatttaaagtatcatcttaaaaatagagatccgtctaggcaatctgtataaatatatacgtttaggtaatattactaagtttattaacttttaattaattaattaatgaaatgaaatatatagctattttctattttcattcgatttcccaatgtcgttcttaatgtcaaccctttttggaaattgagcgctaatactcgtgcagtgacgtagttgggctaaaactaattacagctaattgcgtggaaatgatctggccccttttgctgtcgacgcccctgttcgcagttaacaaacatatgacattcaaggagcgtctatgcttgatgcgggggcaaccaaaagttcccattaccaaatatgagcagcggcgaatacaatttaattagctgtcatttcgctgggaaaaaacttcatcgaaagaagtcgaaatagaacttcaccaaaaactacagaccatataaggctattcacggaaattaaagtagcttaaataatatatatatatataaataaatatatatatttcgggtttactaactaaataaattagagcagaaatcgacttccttaggtttatttgaaaatgtgcagtggtcaagtaagtgttttgatataaatcatatttcatatttattatttatatcataagttttgtatgttgaaggtgctagaaggatcgttactagtcgtttttgtatgacaagataaacggttttcttcttcaggattttgatctttagaaggaagtactcttcatcgaaagagctaaatcttgtacattttcaaagttcgaacttcagaaagcagctaaactaaattactgataactaaataggtacgattatgcaacttaatacggaccctaattccgatttggaactgtaaccgactctcacctgcatttgcgccagccttgaggtcttcatatctccggaaccttgtgacgccattgccaaatggagtctgttcgatgcgatggcagtcgtttgaattcgatgcgattgctgcagagctcgtgtgtgggctttggtcaaggtgatgacgcgactgagcttgtttagctgccgcagacccggctcagactcagtctcagattcagttccagtctgagtctctccggtgagtcatcaaagttggcacaaaacaaacaaatcgtcgtcggcagcagcaacagcagcagaggcaggccagtaaatgtcgccaggaggcgtcagtggatgtggttgggcgtgggtggcgatctggaagtggaagtggaaaccgatgaaaccgtgcccagataattgtgggccgatggccgctcctaatacggtgcgatcaatgaacaaaccaatccaattgaattcagtttatctcgccaaaaacgaacaacttcgattaaagtaaacggttatcgtatttacaaaactacaaatctagaccgaaaaaactcgcgaaaggtaaggaaaatacgtttgaaatttgccaatagatcttaaacactatgtggtgccgaaatctgaatcgattgaacaaagacagagaaagcaaggagctcctactgatgttgacataatcaaaattactcaagcggattttaaaatgttttaagataagtcgacaaaaccggggttttttaattattcaatcgtatcgaatttcttagacatttgtaaaatgtttgaaatattaaatgccgtttatctttagtatttatttagtaaatcaaactaaaatgtattcttaacaacacaaaaatcaatatacgaaagtagaacattcaaaaattaaatgattgtaacatatagtatgatgatattaaaaactcgatatcgtataccttatattttagtttatccgagctctaaatttattggaccacatttttaaaagcatatggcatttaaaagtatgcatttattcgaataatttaacgccatacaataaggtaaaaacttatttgcatgatatgttaattctgcctttagaaatatttatatttggtctaaatcattttgcttaagcccacatttataatgctagaggataaatcttttttaatcaaatctatatgggtgtagggtatacaaaagtcaccgtatccccacttccttaggctccactcgctctttctcataccattggtttattgtatttttcggctgtttggcacacgtcgcttcgcgttgactaatcccaacactgagccggctttgtttgtgcttggagctgcgatttgcataccctggcgaatcgaactcaccgtcttagcagctgaatggagcgacgtgtgacccggactgggccagctgggattggcttcgctccgttgacctggagagtggacagcgggcacgcgagtttattgacacacaaaggaggcacttaaacgaggatacaactttagagccggagagccctgaattgggtcaccgcaggataggtggtggctcctctgtgggcaactggccagctgttgacggactgtaattacgcatacgccgcgtgtgcct

SEQ ID NO: 22937 - DNA, 1605 bp, DROSOPHILA
gcaccacatagtgtttaagatctattggcaaatttcaaacgtattttccttacctttcgcgagttttttcggtctagatttgtagttttgtaaatacgataaccgtttactttaatcgaagttgttcgtttttggcgagataaactgaattcaattggattgatcgccacccacgcccaaccacatccactgacgcctcctggcgacatttactggcctgcctctgctgctgttgctgctgccgacgacgatttgtttgttttgtgccaactttgatgactcaccggagagactcagactggaactgaatctgagactgagtctgagccgggtctgcggcagctaaacaagctcagtcgcgtcatcaccttgaccaaagcccacacacgagctctgcagcaatcgcatcgaattcaaacgactgccatcgcatcgaacagactccatttggcaatggcgtcacaaggttccggagatatgaagacctcaaggctggcgcaaatgcagatgcgtttccagcagcgcacgcaacaggagcaggaggtgcgtaggcgggagctgatgagcacgaagtcaagtgccgagaacctggccactggagcacccagtgccgccaccaccaggttgatcgggaatgggaaagtgcgccagatgttcgacgagcgccgccgcggggcgggcattgatcgcagcaatcccctcaagccgatcggcactctgccctcgccacccgcccaaacaaaatctcgcccgcagcccccaatgcagcgtctcgtcaagggcgtggccgacttgaccatgcgggatgcaccaaatgcaccaggcaggaggatcactagtgacagcaataacaataagttcgccacgccccgcgggactttgaatcgcaaccttaagcccgtggtcacccgcaagacaccgccggcccaggagaccacgctccaccaacgttctcccgcgccacaacgcagtcccaagattcaggcgacccaacgagtaagtggaggaaccggtgctgccccgacagccggtcgtctttcgccaccatttgttcgacgggcggaacccaaatcaccagttaaaaaggtcaacatggacacaacgactgcaatcccagagggcaccgctttatgccgctactgcggacgccacttcaacacggatcgtctggcgaagcacgaggaggtgtgccagcgcatgctgaccaccaaacgcaagatattcgatgcctccaagcagcggatcgagggcaccgaggccgcggcgttcaatatgaagtcgaagggcaatcgcaaccgttcaacttacagtagtgctgcccagcagaagggtctgaccactggagtgaagaagaacaactggcgtaagaagcacgaggacttcattcagtcgattagagcggccaagcaggtgaaggcgcacttggcgcgcggcggcaagttgagcgacctgccaccaccgccaccttcggagaatccagactatgtccagtgtccccactgtggtcgccgattcaacgaacaggctgcggagcgtcatatccccaagtgcgttaacatggtgcacaacaagccccgtaacggtccgccggccaagaggcgttga

SEQ ID NO: 22938 - protein, 383 aa, DROSOPHILA
MASQGSGDMKTSRLAQMQMRFQQRTQQEQEVRRRELMSTKSSAENLATGAPSAATTRLIGNGKVRQMFDERRRGAGIDRSNPLKPIGTLPSPPAQTKSRPQPPMQRLVKGVADLTMRDAPNAPGRRITSDSNNNKFATPRGTLNRNLKPVVTRKTPPAQETTLHQRSPAPQRSPKIQATQRVSGGTGAAPTAGRLSPPFVRRAEPKSPVKKVNMDTTTAIPEGTALCRYCGRHFNTDRLAKHEEVCQRMLTTKRKIFDASKQRIEGTEAAAFNMKSKGNRNRSTYSSAAQQKGLTTGVKKNNWRKKHEDFIQSIRAAKQVKAHLARGGKLSDLPPPPPSENPDYVQCPHCGRRFNEQAAERHIPKCVNMVHNKPRNGPPAKRR

SEQ ID NO: 22939 - DNA, 10560 bp, DROSOPHILA
cgctcgttcttcagataggcctgcacattggtctccgtcaccggatcaatcggctcgaaggtttggcgggcgctgagcgactccagcttctgtgtaagcttgggcaggtccacgcccttagagccgagcagtatgtggctgcatttgaatgaccggttaatatgacaatttttggcgcctggcctatagcgaactactcacgcctgcagatcattggtgcccatttgggtgacacgcgagtgaaactccttggttgcctgcagaacctgggacatggtccgttccacgcccggcacctccgtgtccgtattggtctcgttcgtcaggcgctgggcctgcttcagcagttccatcagatccatgtcgtgatattgggatggaaaagccggtgccaataaaatgatatttccaacgaagcgcacaccaagctgctagtgctgccacctggtcgcagtccggattatttcggcgccataaaatgtttgcaatcggtggtattctttttggtatatttaatagtacaactgttatatgttagaataactataataatgtctacagatggtatataatttaaaaggaatatttgataattaaaatcattaaattgaaaaatttatatagatagcagactaagaaattatttctcaatacctaaaagttgttataaaaacaaagaaaatagtcgatttccccgaacgcgaaatttcaaaatttttatggaatatcgatatattggggaataaattgagaacaaatgggagttttgtaggtataaggtatttttggtattacgcaatctgttattgaaatgtcccaataacaactgttattgagagggagttgtaagtacaactttaaaaacatttggtattagcttggtatttataggccggccgaaaggcaggaccgtctggtaacactgaacagcaggcgttagtgtatttcgcgcagtgcagattggtttattcagcggctaaccaattcaatcgtgaatagactttagcagcgcgcaaatcgtagaacagaacggcatattttttttaaacactgcgaggcgagcttcttcttccctccgtctctctgtgtgtgtgtgagtgtgctgcctgtgtgtgttacagcttgtgtacgtgagtgtgtgtattggcaaaggaaattagcacaacaaaagcgaaaaggaaacgaacacgcacgcacctcgtcacgcggataaagaaaaaaactcttcgatctgatcagagatatcgagaataaacgataaaaataataacaatatcgcaatgtcggaagttgaatcgcagcagagccaggagacgaacggcagcagtaaattcgatgtgcccgagatagaattgatcataaaggtgagcgaacagcgacatttgcatacccctgcagttttccatttcgctctgcgcaaatttccgtgcagagtgaaaatgcagccggggcaaaagcagaagcaaatgcaaacaaaggcaaaaacaagaagcgactgggaaaacgcgaactgccgtttgtttctcctcctcctccctcttttcggcttcttacccctgttcgttcttcgttgtcttcttcttcttcttctcactgtggcactttgcagtgtgtcacatttggttaaaacgaacagaatacgtttagcacacaccgccccctcccctctcgccgacgttcccctttcgccttgcggttcctaagcatcgccaaaaccggttttctccttttctccctatcgcacattcacacacacatacacacacacatacacacacacgcacgcacactatcgcatacacatgcattcgggcacatctgcacagaacgaaattgttgattgagttatgattttcagaactccatgattaccattataaagcatccaaattaaatattacagcatacctttttggtgcaatactctaaagccgccctttttccaaattatccgagcataccaagctgttcatatgaaatatctttttaatattttataattaacaattaatcatgatattgctgtgtgcgcacagtctgaaatttgtggaacgtaacatattacttcggttcttatctgctaaaaaatttaatcacatttcattgcgccaattgctcaacaaatgctccttcatcatagttctcctaagccccccgcatcgccccccttcgcaaccatcagcatgtttctctctgtgtgtgtgtgtgtgaattagaggttcttttttatcttttagtgatttctaaatttcttgacacatacgtcatgctcctccaaagaatcgaagaaaacaaaaagctagcactccgcacatttgcggtcaagataatagcattgagaagccaagattcctaaagtgtgattaattaaatgaatttaaatcatagaacttaactttagattgctcaatatgtagtgttttatttctttatgtattacaaataatcgataataaaaacttgttcgattttttctcctcgaatacaacgcttttcttatcagttctgttcttcgatagtggaaaaaaaaacatgtgataaaacaattgttcattggcatctttcttaaaggtgatattattgcaaaatgagtcaaagaaagattacgaaccctttggtttttttttttgtattatagtagaggccgcaatctatttctttccccggaattgtaagtcgagcatgagtccacttaattttgtttcttttgttggttcccactgtttgccgaagtaattgtaattgttttcggaacactttggagccctgctgttgttgattctattggcaaactcgactcgactcaacttggccactcatccagcccacgcaaatggagaccgcacctcgagtcgtctgcccatgagtaatttccctcacctttgcattgcctaaacccaaacagtacaatataccatgtgttataccattcgattcccgaaagaaaaagaaaaaaaaaaccccactcgacgctaaacaactgacatgagcaatcgtgtacttcgaatagggtttcgtaaccagttttgtttccaaattaaacagcaatacgatatgtaatggctgaaattagtagctatattctattcatatcgtatgatcgtaagtttttggtcctaacactttcgaaacccatcccccatttcccccttaaacccaatgatccatggcccgctcccttttcctgttttcgtgggagaaagtgcttgggagcacctgtttcctttcatttcttttttttttttctctaatttttgcctgaatttttggccagttaaaagcaatagttaaactgcagcagaagagtgacagaagcatctttgacataacaacgcactccatgtaaggcccaacgtttccatttccatagcaatttcccagcgaaaaagtgaaagttcaatttgccgccgccgaggaaagctgtgttgttggtattgttcagtttgtggggttcaagaagagcgagtgtggcagtggatccagctatatatgtatgtaagctggggatcgtggcatgcctctctgttccgcgcgtgcaggcaacaaacaaatacaaatgtgttttcttgtttcttcgtttgctgcaaaacaaaacaatcattgaacgctaaacaggtttttctcgtgcgcgcttttccgcctccttgacttggcttggctttggctttggctgcggctccaagttcggtttttggtttttggttttggtgttggtttcagtttcggtttcggcttggaaaacaagcaaaaacccaaagccaaagccaaagccaatgcctaccctcggagtcatcgcccacgcgagatttccagaaattggccaagccatcgaatcgaatcaaaacaaagcgccgatcaaaacaaaaggcgatcgccaatgcactcgaagaaaattagctacctaattttgacacatccatcaaatgcttgagcacagtgagcattataaaataagatttttggtgttattgcaaatacttagtactcgtttctttgccacacacaatggccttctatggggcaacctttccacccaaggatgaatctcatgcaaacttgagctaaattagcgccttttgttgcaactgaacgccaagcgattgttgcggcttcagttgtgctaagttgaggaaaatgcgcttctttgttgtcacttcaacggcagcaaagagtcaagatgaaaagctgcacttagtaaggcgctttttacacactgcaattaaataagtgggcatgcaatataaagctggcttaaaaacttaaatacaatgaaatactttgaagcactaataggaatttcataatgctttgtctaatttattgtttattactgctttatataggttatttttagagtaatagacatgcctgaaattagtgctgataagttcgaacaatatatatatatggattatagtaaggaagtacatccaatctaagtaccactgtacgtgtcttccttgcctcttctatggtttgtgtttttgtgcaaaagtgacagttgagttgttgatttcttgttttattcacgcccccacgttctctctccgtgtgtgtgtgtgtgtgcattgctgtgtgactggctttttagccaagaaaaacacgcaaaggcttgacatcctccgcccacaatttcccgcccccacaattttccccagctttactccaaaactgaagtgcattcgttctaattgacaatcagtggtattttttgttgttgttccctatcttaatgtttataacttcctttcgtaactcacatcgtatattttttatgacttttacttgcccaacgttttttctattcttttgatttacctgaattaagtgcaatatgcttcttaataatccatagcttatgcttttataagatttaaacgtaattcttgaatacaccttggcataggtttttgggggggaaatgcgaataggcattggaaaacccattagcccattaaaaatttgtggcccaagatatgccggctgacttcacctgccatgcgaccacttggcctgattatatttctattattttggctattacttcatcaggccccatcatcatcaccaacaaactgcggcgataacttccgccgcccaacttttgataagatatggcacatacatacatacatacatatatgtatctgtgtttttatgtggcccaatagaaagaactccggcattcaagaatcgaatcgacgctcttctcaaggttgacatctgcccccaacatcatgatcatgattaaaattaaattattgcgctgcagctgtcagcgaactggttcccaaaataaaaacaacccatccccaacccatagaaacaaaaagaacaaaaatataaataaaataaaacatgactgtggcattcactatttccaacaatttcattttcgtttacatttacgatttctgttcgctggcgcaaaaagcttacgaatttcattttatttgacttaacttaacttttccgccctcctatcttatcgcgccacgaatttacaattaaaaggaaaacaaatcgaagttgttgagtgtgcgtacatataaatatatccatgtacgattgcgtacaaaataatagggcttaaaattacgaactttgaaataccataaaattgtttaagcatttttaccaacacacgaatagttagttagtatgcaaaaatcatggtcgataagatgggtagattaatcaactttaaaagttaaataaatgaaaaatctatgattttcaccgcctctgtggctagtcaaaaaaaaagcaaaaaccacaacttatttttctaaaacgaaaacgtattcaaagacgaacgtttatattggctaggtatttatttagccggcagtttttattagccagatgtggccatataaagtatatatatgtacatatatttgaagcatatgtacgtgaatggcacttgacatttgctaactgctttttggtctgcctgctctcgtcatttctattttgaaaaagtcaattgcaaccgccgtctatgtgtctgtatctctatctgtaaatgtatctgtatccatagttttgccatatactttgtatctgtatatgtgtctgtagctcaagatgattgcctgactgactgacttcgactgacctttcgacgttgccacacgtcttagtcttgcattttgcaattcccattttcaatttgtgcaactcatattgcaaactacaatgctcgctagagatggcaaaaatattgtaatgcgatattattagcaattaatggcaaaagcaatagttttatgtaaaaatttcgtacttgtattcgccaacgaaaaccgattgcgcttagctgtagaatgtattgccaacaattagtgcggccttaaaaaatcgagtcaacaaaatgcgggccaagaaaatatgatacaaatacgagcggaacgaatatgtgcgacggactgaaagtaatccgggtcagttgggaatttatggagcttggagctatgggctatggatggatgtgcgtagaccaggtaaacgaacgtgcacagttaataatgtgcgaaagaatacaaatgaaccgtttaagcaccgcggcggaatgaaaaaagatacaaaattatacgaataccgctcccacaatcattgtagtttattttttgttgttgttgttgcctttcatagtttgattatgctgcgaccatgtgggctggaaaatgggttgggtttttttttggtttggtttggctgggtttcgttattaagccattaacacacagggcaatgctaattaacttcgcattcgaaataatattttaattgcctgcaattggtgcgttaaattgaatttacaaaccgaagttaactgtggttaattattgcgtacgcctcgttatcatatttatcacttatttcaaatgtgtatttggcaagtgttgaaccgtaaccatatttaactcataaccccataacgatgtggttgtataaaaatagatataaccatatacttatagatacatacgtatccgtgtagtcacaaacaatttagctaaattcatggattcgctgtggagtttggagaatgccccagctccacgacaacctcgttcttgagcagccagtagatttgctaactctcttcagtttctgtgctgtagtggcaaaatgtgtgaaaacagcagtgcaggctggcttatctaacgaatacaaatatgcacagtgccatataaacgcacattgattgccgcctggcgttggagcttatttgaagttaagccggctgtcgacgccagcagaaatggttttgcgggggggggggggagggggttaaatatgggcagcaaatacaaaaaaggctggcaacggcaatcaacaagtaaacttcacacaccgcacgcctgatgacatcatcgtcatcatttgtgtgatgtgttgttaggctttagctgcttctcagctgcagcaatgccatcgatctacagtggatattggctaagtagaaccgccaggttgcagtgcgaaattcaaattaatatatgtacaaatcatgctcatataaattccatttaaatttactaaacttcttcatcatatccacaatcgcataaaaagattaaagtatttccgccttttgttttgtttaaaaccactggcagctttaaataatcacgtaaatagtcagggtgtgctaaatatgcttaatctgtaaatacttgtgatatcggcggctgatattgctggaatgcaaatgcagagacttgactcaacttagtcagtgctcactgtagcctgtggcgctggcattgccttgccgtctcactatttatcttcccatctgtgtagctacaaatgtatctgcctatcctccactggccttggcagtgcagcgatgcagaattctcgtcgggcttggctagtatcgtcgtcgtccactcgacgtcgcttgtcttgcctttggatcgcttccggtcccccaaaaaaaaaaaaaaaaaaaaaaatggcgagcaaacaaacctcgatggctcatcacgccacgctgggctgttgaacaacgcagaacgtttatggttatgatgattatgatgatgatgatgatgatgatgatgtcacatgatcataatggaaaactatgttgtcttattttgttaaatttctgtttgatttgcgtttatcagtaattgccggcacgcgatgtgccattatgtgtccattaagtggactggaggcaatgtccaatcgctggaaaaatgcccagtccccggaatgtgacccacattaacacttgatggtatcgccgcaaagccaacttatcgaaatggccaagtaaacattttcgcacccctctcactttttgattaaaaaaaaacgcttgctttccccgaatccccgagacactaaattggttaacattttccgcttcgatttgcaggcctcgaccatcgacggcaggcggaagggcgcctgtttgttctgccaggagtacttcatggacctatatctactggccgaactgaagacgatcagcctgaaggtgacgacggtggatatgcagaagccgccgcccgatttccgtaccaattttgaggccacacacccgcccatcctcattgacaatgggctggccattttggagaacgaaaagatcgagcggcacatcatgaagaacataccgggcggctacaatctgtttgtccaggacaaggaggtggccaccctgatcgagaacctgtatgtcaagttgaagctgatgctggtaaagaaggacgaggccaagaacaacgccctgctctcgcatctgcgcaagatcaacgatcatctgtccgcgcgcaacacgcgcttcctcaccggcgacaccatgtgctgcttcgactgtgagctgatgccgcgcctgcagcacatccgtgtggcgggcaagtactttgtcgactttgaaatcccggtaagcagtgggggtgttccagggtatcacagccacagcaggagtaactgcattatcgtatttgccaatggattagtcaggaaaacttttgctgataaagactttatttgcgaatagaaagcagtgggcaaatattgacttagtggctttgtgactttttgcctaaatgattaatagcgcaagaatgaatgtgataagttgtattgcaatatagatttaatagcaatctaaggctaatacattgtataactttgattgtgaatgggctttaaatcattttcgttattgccgctcgaagtccaattatagccatcagctacagaatcgaatgaataagccaacccgaccaggtatcaatgactcaacgttctcactatccgactccttgcagacgcacttgacggccctgtggcgctacatgtatcacatgtaccagctggacgccttcacacaatcgtgcccggccgaccaggacattatcaatcactacaagctgcaacaggtgcgtaacttgccattgtgccaattttactgggctccaatctctagaatctccatttgccgcttgcagagtctcaaaatgaagaagcacgaggagctggagacgcccacgtttaccacatacattccaattgatatttcggagtaggtttcctatggagcagatccatgcagccacaccacacatcaactaatagtatacagcaatcgcaaccacaatattttggacaattttacaacagcagcaactctgaggactatacatagatgtatacttaacggatataactacccatgcatatattatatataaatatatatataaacctactatatataacaagcataacaacaagtgttctttaagcagccgcgttgcctttcttcagctatgcttaatttaaaccccatttggaaaaaaaaaaaaagaaacaccagccacaatctatcgagaaggctttgacttacttggcccgcctgcatgtttgtttgcttaattaatattaaaacatttgtgtttgacatacagatgtccacaggcaaacgcatgaatataattacgtagctcgctgtcaattaaaatgtatcgatcgcctgaaggagcgcttcccgttcctttaaaatgtttattttaatttataattttttattctgcaaggagcttttttgttgtattcgaagacaaatcttttttttctattgcaaaattatgattttgaatttttttttgctccctggcgaaagttttccattttgttcgcttttaatttttatttaaatattttattttatcataacaagaaaaacaaaacaaaaaaaaaaaaaaagaaaattagaggaggaaatgaagagtattttttgtatttaagtgaaaattacaaataaaaaaaaaacacaaaaagacaattattgccttttacttaacatgttcatttcatgataagccttatcaaagatataaatcattaaatggcatcgtcttagctcgaataaagagctcctcttcgatttcaacataatggtcaacagttttattataaatctctccgagaattaacaattaacgcgtacactaaaacaaagaacaccatcagaattggccaattgttcggttcgagcgaagcacatttggcccaatcacagtacca

SEQ ID NO: 22940 - DNA, 1063 bp, DROSOPHILA
ctttagcagcgcgcaaatcgtagaacagaacggcatattttttttaaacactgcgaggcgagcttcttcttccctccgtctctctgtgtgtgtgtgagtgtgctgcctgtgtgtgttacagcttgtgtacgtgagtgtgtgtattggcaaaggaaattagcacaacaaaagcgaaaaggaaacgaacacgcacgcacctcgtcacgcggataaagaaaaaaactcttcgatctgatcagagatatcgagaataaacgataaaaataataacaatatcgcaatgtcggaagttgaatcgcagcagagccaggagacgaacggcagcagtaaattcgatgtgcccgagatagaattgatcataaaggcctcgaccatcgacggcaggcggaagggcgcctgtttgttctgccaggagtacttcatggacctatatctactggccgaactgaagacgatcagcctgaaggtgacgacggtggatatgcagaagccgccgcccgatttccgtaccaattttgaggccacacacccgcccatcctcattgacaatgggctggccattttggagaacgaaaagatcgagcggcacatcatgaagaacataccgggcggctacaatctgtttgtccaggacaaggaggtggccaccctgatcgagaacctgtatgtcaagttgaagctgatgctggtaaagaaggacgaggccaagaacaacgccctgctctcgcatctgcgcaagatcaacgatcatctgtccgcgcgcaacacgcgcttcctcaccggcgacaccatgtgctgcttcgactgtgagctgatgccgcgcctgcagcacatccgtgtggcgggcaagtactttgtcgactttgaaatcccgacgcacttgacggccctgtggcgctacatgtatcacatgtaccagctggacgccttcacacaatcgtgcccggccgaccaggacattatcaatcactacaagctgcaacagagtctcaaaatgaagaagcacgaggagctggagacgcccacgtttaccacatacattccaattgatatttcggagtag

SEQ ID NO: 22941 - protein, 260 aa, DROSOPHILA
MSEVESQQSQETNGSSKFDVPEIELIIKASTIDGRRKGACLFCQEYFMDLYLLAELKTISLKVTTVDMQKPPPDFRTNFEATHPPILIDNGLAILENEKIERHIMKNIPGGYNLFVQDKEVATLIENLYVKLKLMLVKKDEAKNNALLSHLRKINDHLSARNTRFLTGDTMCCFDCELMPRLQHIRVAGKYFVDFEIPTHLTALWRYMYHMYQLDAFTQSCPADQDIINHYKLQQSLKMKKHEELETPTFTTYIPIDISE

SEQ ID NO: 22942 - DNA, 4340 bp, DROSOPHILA
tgcaactgaaagttctcgaggagaacgaagcaagcgtgcgtttgagttacggtgaacagcaggcttcactggagatcacccagatctcagagccaattaatagagctaaggcctatggacgaatcgcctttgccattccggcggcccagcagccacctctccaagaagcggttaaagcagctggcggggccattctaacacctctgattaccctggatacgccaggaaaggccaccgttacggtggtaattctcggtgaccccgatggtcatgagatctgctttgtcgacgaggagggcttcggccagctatctcaggtggagtccgatggcgataagcgactggatcgaaacatcgaaaaggatcccttccaaccgaaatgactttcccagcaatccttgagcactgttatttgtacacagcaccttttgtatttggattttgtattgtctaatggttaatggctgttttcaacggagatattatactttttaaaacattgtaaaacatcacctacgctcgttcttgttttacaacatacatatattttattacataaactgtcgataaaattaagcgtgcgtatgggacttatttttctttgttataagaagtattttagcttttctagtattgaatcaatcaaaaacacctttaaacgaggtgaaaagacatcctgatatcagctattgtggtttttaattcgactaaacaaacagatggtcataaatccgcttaattggtccttactagcgaaaaggatttcaagtatatgtattcttgatttggaacacatatattttattaagtattgcgtacttaagtattatttttatgatcctaacaacgtgctcgggattttcctttcattttcatttcagttttagaagagacaaattggtttcgatttcgttttttgtagcatttatttttttagggtgtttcctgaatttatttttattttttttttacttgagcgacaaggagacgttggtgcagaatgaaggactcgagtcaatcggcgccggcaggccttttggtggcaaatctgaagtcttgggaaacgttcgactggccgacggagcagcagcgttggatctaccgcagttggggccagtactttgcgcggatgcggaagaacacctttgcccagaagtacttcgacaaatgcatcacagagaatgagagcacggatcacaaggctctttatctgcgcagcaaattcaagagatcggtggccctgacgcaggacgcattggaggatagcttgagggccatggaggtaaggcaggcgtgggacgcaaatgtgtccatggagctcggagatgcgctctacgatttgaatcggtttgaggagaacaagagcctgctgcacgacaatgtccgtcggcatgcgggcaccgctctaaagagcttcgagaatcgcctcgtggtagtcgatgagaatctcaaggattgcacgggcttcagcctggccaacttcttcatggagcattccgcgcagctgcccggcttctatgcccatcagcaggaggagcttcgaagggccgacaggcggccgctgtggaaaatcctcaaggagcgaaaggagtgtgatgtccagagcaggatcgatcgcaaggaggtgatgctctccccactggaaagagagcgcaggcgtcgcaagaccaaaatattttatcagaactatttgggtcgcagctggaccgattttttctttctgaaaacacttcgccggcatcccaactgtcttctagacaatcatttcggctcctcggcggaccgcaccaagtatcttgagtatgcgttccagcgccttaagaccttcacacggatgctccaggcaaggagacccatgtacaaggagtacttccatcggaatccccagatagaggctcgcatgcgggatgcgaacttgttccggatccagtaccaaaccaggcgaaacatggtgagcatcctgcggaccattaaggtgctgcgggggcggaatgatatcaaggtgagctacggctggtgggttacatattccacctatgccaggtaaaagcgaaaccagctagtttaaaataactaaccacattaattatagcgcctgcgcaagtttgtggaggaagtgatgggcagctacgtggtcatcaagacgaatcgactgatgccctggaaggcggagttcatgaacgaggtgtacaacaatctggccctcagtttgtgcgagggataccgcctgccgcccacacgggtcacgccctacgacaagagcgccatgtgccagctgctcaacataccggtggccaagccgctggagcacacggagctcatcttcggggatcgatccacctactcctatgccggcgccgacaaacagagcaccgatcgattggcagaccagtgagtttcagttatttcgaactcatagcgaactcgcaattgataaattatagatatatcaataataatttgaagtatgtatttatgtttctagaatatcagctagcgccatctatatttgatggcatacatatttttttaaaatttccttaaagttaaagttacttaaagatctataagtagtgtgaagagtgcttaaacgcaacatacaatttaattttaagaaatttaatattaccctattttaaacatgattaattcgccaacagaaaccaaatcgagtatctggagaaacgacttctattcgcccgcctgccgatcgaaaggagctacttgctccatgagctggccgatcggcatatgcagaagaaccactttgtgcagagcctgtcctacgcccagaaggccatcgaggaggccagggtatgcaatagcctgatctgggagtttctcagcaccatgctgatggccaagtcacacgcggtgctccacaagtacgagcgccaaacggaggtgctcaactccgcctacgaactggccgcccagctcaagtcgccccaactgtgcaccttcatcgaactgtgccgcatgctcaacaaggactacatcacgttgcgcaagatgtcccaactggtgaccaccaaacggctgcgcaccaaaatctccaacaggtccagtttcctcagctcacccaactgttcgcccaacttctcggaattcaaaaaggaagagtatggtcatttggccgcctaagtcggcggattggatggaaggcagtgcacataggcagtgccttctattcgaactgttgcctttggtcgggccaagtgtcagccacaaaatccgctaaaacaaatcgagttcctatcagatatcgttaaagtacaagttcagagccagatgtctgtagcatttaaagtatgtctttacacgtaatgtaactaaatcgtacaaatgcactgagaaaaaaaaacaaccaaaatcctataaatatatctaaagttaagcgtacatatatgctgaattgagctgttattgtggactatatattcatgtttaccgatgatacagtcaatttaataaagaccttcgagagtgtgtgatttaaaatcgagcagcaataccctttggcatgaaaataatccaaaattaaaatgtcactgccccatatttgaatacaaatgaacggaataaataaagttaacaaaatgcagggaatgtaaaaactattaaatgggccaacgaaatcaatggcaatgatacaaaactaatatcaaaataaaatcatttaaaagagtataacaattaaaaatcaccatatcgcatttcaacgagattataacaataacaaaacacgtttcttttttcgcctgcacttatttttggtcaaacgaaatacaatctaaacaaaattccggacggtcctggcataaaaaatttgttttcacactcttaaattatttatgttcgatggggcgggtatgcgattgcacttgactccaatttggccaatacccccccaccatgctcctcccgcacggctgacctcgcccaactggaaactacgatttgcatattttgttgctaccatcgttgttatttttgccatttttcgtcgttgttgtcagcattgaattgtcgcatgttggccagggttgggaactgcaaactgcaaactggaactagaactgggcctgaaagagaaattacattttattttgtcgcatgtcgcggatggccaataagaaacaacaaaaggcaaaaggcgtatggaaaagggggattcgaagttcagaaatagtagatactcttgcatttgcatagtggagatattgattttatcctagagcattagttagtttgtatcgcttgtatgggagtaccattcgttggtgaaagttaactacaatacttcacactcttataacaatatctgtaaatcctaatag

SEQ ID NO: 22943 - DNA, 1981 bp, DROSOPHILA
atgaaggactcgagtcaatcggcgccggcaggccttttggtggcaaatctgaagtcttgggaaacgttcgactggccgacggagcagcagcgttggatctaccgcagttggggccagtactttgcgcggatgcggaagaacacctttgcccagaagtacttcgacaaatgcatcacagagaatgagagcacggatcacaaggctctttatctgcgcagcaaattcaagagatcggtggccctgacgcaggacgcattggaggatagcttgagggccatggaggtaaggcaggcgtgggacgcaaatgtgtccatggagctcggagatgcgctctacgatttgaatcggtttgaggagaacaagagcctgctgcacgacaatgtccgtcggcatgcgggcaccgctctaaagagcttcgagaatcgcctcgtggtagtcgatgagaatctcaaggattgcacgggcttcagcctggccaacttcttcatggagcattccgcgcagctgcccggcttctatgcccatcagcaggaggagcttcgaagggccgacaggcggccgctgtggaaaatcctcaaggagcgaaaggagtgtgatgtccagagcaggatcgatcgcaaggaggtgatgctctccccactggaaagagagcgcaggcgtcgcaagaccaaaatattttatcagaactatttgggtcgcagctggaccgattttttctttctgaaaacacttcgccggcatcccaactgtcttctagacaatcatttcggctcctcggcggaccgcaccaagtatcttgagtatgcgttccagcgccttaagaccttcacacggatgctccaggcaaggagacccatgtacaaggagtacttccatcggaatccccagatagaggctcgcatgcgggatgcgaacttgttccggatccagtaccaaaccaggcgaaacatggtgagcatcctgcggaccattaaggtgctgcgggggcggaatgatatcaagcgcctgcgcaagtttgtggaggaagtgatgggcagctacgtggtcatcaagacgaatcgactgatgccctggaaggcggagttcatgaacgaggtgtacaacaatctggccctcagtttgtgcgagggataccgcctgccgcccacacgggtcacgccctacgacaagagcgccatgtgccagctgctcaacataccggtggccaagccgctggagcacacggagctcatcttcggggatcgatccacctactcctatgccggcgccgacaaacagagcaccgatcgattggcagaccaaaaccaaatcgagtatctggagaaacgacttctattcgcccgcctgccgatcgaaaggagctacttgctccatgagctggccgatcggcatatgcagaagaaccactttgtgcagagcctgtcctacgcccagaaggccatcgaggaggccagggtatgcaatagcctgatctgggagtttctcagcaccatgctgatggccaagtcacacgcggtgctccacaagtacgagcgccaaacggaggtgctcaactccgcctacgaactggccgcccagctcaagtcgccccaactgtgcaccttcatcgaactgtgccgcatgctcaacaaggactacatcacgttgcgcaagatgtcccaactggtgaccaccaaacggctgcgcaccaaaatctccaacaggtccagtttcctcagctcacccaactgttcgcccaacttctcggaattcaaaaaggaagagtatggtcatttggccgcctaagtcggcggattggatggaaggcagtgcacataggcagtgccttctattcgaactgttgcctttggtcgggccaagtgtcagccacaaaatccgctaaaacaaatcgagttcctatcagatatcgttaaagtacaagttcagagccagatgtctgtagcatttaaagtatgtctttacacgtaatgtaactaaatcg

SEQ ID NO: 22944 - protein, 594 aa, DROSOPHILA
MKDSSQSAPAGLLVANLKSWETFDWPTEQQRWIYRSWGQYFARMRKNTFAQKYFDKCITENESTDHKALYLRSKFKRSVALTQDALEDSLRAMEVRQAWDANVSMELGDALYDLNRFEENKSLLHDNVRRHAGTALKSFENRLVVVDENLKDCTGFSLANFFMEHSAQLPGFYAHQQEELRRADRRPLWKILKERKECDVQSRIDRKEVMLSPLERERRRRKTKIFYQNYLGRSWTDFFFLKTLRRHPNCLLDNHFGSSADRTKYLEYAFQRLKTFTRMLQARRPMYKEYFHRNPQIEARMRDANLFRIQYQTRRNMVSILRTIKVLRGRNDIKRLRKFVEEVMGSYVVIKTNRLMPWKAEFMNEVYNNLALSLCEGYRLPPTRVTPYDKSAMCQLLNIPVAKPLEHTELIFGDRSTYSYAGADKQSTDRLADQNQIEYLEKRLLFARLPIERSYLLHELADRHMQKNHFVQSLSYAQKAIEEARVCNSLIWEFLSTMLMAKSHAVLHKYERQTEVLNSAYELAAQLKSPQLCTFIELCRMLNKDYITLRKMSQLVTTKRLRTKISNRSSFLSSPNCSPNFSEFKKEEYGHLAA

SEQ ID NO: 22945 - DNA, 3267 bp, DROSOPHILA
aaaatagaaaatagaaaaaaaaaaattaagttagctgcatttttaagttacctgcatcgaggcattgtgcaaagtactcgaggcagctaagcgaattatactgtattaatttagttgtcgccttgtccgtttgcattatttattgtgatttcttcgctcgtcgagtgcgaaaatatgttgtagcctacttatatgcgcgatgcaaaaatattttcgcatttcaaatgcttgtggttgcaactgcaactgcgactgcgatggctgattgcggttggttgtgtgggtgggtggctgaatggggtgctgtggccagtgggcggtggctggtagttggcaaatgtgggttgggggttaacacgaatatatattgataaatacacggccacacgtgtatcagccatagctcgaggcgaaactacagcaacggccattatagctgtgacattggtaaaatattaaatttgttcgttataaaattgcgttaaattttttaaagatttgaacttaagaattgctcatatttggtattttggggaatctgattatttaagcaacaaaggttggaatcctgaccgtgactttttggaataccatgtagccatgatggttaatatcctgggcagttttattggcaaccgtcatatatcaggaattgttagaagcagtcacaactagttctttggccgcagctataaccacatttacatatggtgtatgtatgtataccacttaatgtatgtttcagcacactgagaacttaactgcctaacgcaattaggacaatgcacaatgttaagggtacagcggaatagttagcccgtctggaacaaggacaacggggcgtatacggaacgccgcgatttccccttacatttagcaacacctaatattatatactacccaagcgactaccagttgctgagctccttccaatcgaagtcaaaatctgcggccaaggacgaatgggtcctgcgtgccggtgggttgtgctgaagggagtttagaatatgaaatcaccgcagtccatggcatagtcgaagtcctcgccgccgatgtcatcgacgcccgaggagtgaaagtcgaagcctccgatgtccgtgtggtacactgccccgctgcaggaggtgtcgatcaggttggtgcagtgggtggtgggcagggcgtgcagggtgaaggtgtcctcgcactgcgaccaggtgagtccgccgctccaaaccccgttgggcagcgtggcccatccccatccgtgaccccagggtagggcgcaggccagcgatgcctttgagtccggcttcttgctgagaatggccaccgccgcgtcgctcttcaccagcggatcctggctctgccgatacaccttcgtggaaatcgccgacgagcagcggtggtgtttactgccgctggctccgtgtgacgccgccttccgctgcttcacctccgactgggtggccgctgcataagaaaatgggaaattctactatgatataaactgaaggctaaggtcataattccagctttggcctactaatcacaccgatttctcgttttatccaaatctccaaattgttacttaattcggtctggcccttaaaacctgactcaatcatatccaaaagtatcttaataatggcaaagaaatgtatatttatctttgtaagcatgagttctttttcagtaaagttcactttaacttctatagtattattactattattattattattgctgttatatctatggtttgcacagtttacttatttatatactaattctcagccctagtcaatatgtatatcagttaaacgacaccacctgtcgtcgaggggacttgagcgaaacgagtatccgggtggattacggatgtttaggaggatttactcacgtctaatgcgcaccagcggacgacggagcacgttcatcaggtgcggcttgtccaccaccagctcgatttgaggcggcggcggcagggtcttggtaatcgcatcgatccagtcgctcacctcctgctccgacttggccagcatccagtagaccttcgaccgcttgcgctgcgatccgagggcaatcaactgggacacattcacgcccgccggcagcggcggacgacgcggtatctggccggtccagtgggcgatggccagcatctcaggcgcctcctttaccaggatcttgcccgtcggcgaggagcgtcccggctccgtgaaccaggccatggtcgagtcgtcgtacagcaccacccattcctccgcccagcggttccagaacatttgctctgtaaaggcagaaggacatggtttcatattggattcaaattgtataagttcatcatcttcaatgcttaataaaacccagaaaagaagtaattttccatatagtttagaagtaaggattattaaaataattattcaatcctaagggcatccaaatgcagcttagctttcattcctgtgttttatattgttatcccattaatttgcatgacactgacgcatccatggcgctgccaaagcattacccttgaatgtgaccccgaaatgattataccccattccccctgcacggtaccacatccatctaactcatccacggatgctgcgtcatcttgttgagcctgagcctgcgaggactgctgctgttgtgctgatttgacagattgtcgtctcttccaagggtctctggtcgcctctgggcggaccgggcctacataccgtgctgacagccagagaaagggcctaaatcgtccattcaaggtcctgcaattgtcggacaactactcttgtcgcaggtgaattcctcctcgaaagggggtaattataaaattcaccaggaattcaagattttatgaaggcataacttatacgaggcaatacgaggtctttatcccgctaacaggtgttatggatttattcagatatctgaagtatctaattgtttgatcgaaatatctgtcgatcgattcatttactaagctatagttatacttaagtcaggagatactcacttttgtagcgcagtagatagcctcccttgatttgttttccaccagttcctgcgaaaagagaagaagaaaggaatggaatggagtgagtgccaagtgggtaaagtcaagtgcgccagcgaatcccatctagtccgcatccgctgcccatagcccaattttgtgtacccagaggccagtcacacgataccactaattgaacaggaatcgaggtctgcagctggagcccattttccattcaaggacttctttccttttcgtcgccattc

SEQ ID NO: 22946 - DNA, 837 bp, DROSOPHILA
atgttctggaaccgctgggcggaggaatgggtggtgctgtacgacgactcgaccatggcctggttcacggagccgggacgctcctcgccgacgggcaagatcctggtaaaggaggcgcctgagatgctggccatcgcccactggaccggccagataccgcgtcgtccgccgctgccggcgggcgtgaatgtgtcccagttgattgccctcggatcgcagcgcaagcggtcgaaggtctactggatgctggccaagtcggagcaggaggtgagcgactggatcgatgcgattaccaagaccctgccgccgccgcctcaaatcgagctggtggtggacaagccgcacctgatgaacgtgctccgtcgtccgctggtgcgcattagaccggccacccagtcggaggtgaagcagcggaaggcggcgtcacacggagccagcggcagtaaacaccaccgctgctcgtcggcgatttccacgaaggtgtatcggcagagccaggatccgctggtgaagagcgacgcggcggtggccattctcagcaagaagccggactcaaaggcatcgctggcctgcgccctaccctggggtcacggatggggatgggccacgctgcccaacggggtttggagcggcggactcacctggtcgcagtgcgaggacaccttcaccctgcacgccctgcccaccacccactgcaccaacctgatcgacacctcctgcagcggggcagtgtaccacacggacatcggaggcttcgactttcactcctcgggcgtcgatgacatcggcggcgaggacttcgactatgccatggactgcggtgatttcatattctaa

SEQ ID NO: 22947 - protein, 278 aa, DROSOPHILA
MFWNRWAEEWVVLYDDSTMAWFTEPGRSSPTGKILVKEAPEMLAIAHWTGQIPRRPPLPAGVNVSQLIALGSQRKRSKVYWMLAKSEQEVSDWIDAITKTLPPPPQIELVVDKPHLMNVLRRPLVRIRPATQSEVKQRKAASHGASGSKHHRCSSAISTKVYRQSQDPLVKSDAAVAILSKKPDSKASLACALPWGHGWGWATLPNGVWSGGLTWSQCEDTFTLHALPTTHCTNLIDTSCSGAVYHTDIGGFDFHSSGVDDIGGEDFDYAMDCGDFIF

SEQ ID NO: 22948 - DNA, 4269 bp, DROSOPHILA
acgatgactagccaccaaaagttcaaaatcgggaccgaaagactgaatggcatctacgaggagtaatccgtgaaccgacatggaaatattcgtctcatgcggttcttttgttaagccagctcgtgccccaataatttgaagctcggcaatgctcctttctgtcgattgcatctcgatcaccagttgatccattacaaactctatgacaactcggctcctatcgtcttccgcaaggtttttgattctctcgcttgcgtaaatcgtgttaccgcctctgtaaatgttttccatttcctttgaagcctttataatgggtttcataatgttgcaacaattgtttatgagttcctcgttgccgtgtattaatattgttgggcaggtgccgaagagcataaacgagggatactccggatcgacggtgaagatattcctttgctcgagtgtgaggtttatattaaatttatcaatcagatggaaattcgacgatgttttcaagcacgcttgccatcgttcttcgtatttacaaaccagaacttgaaggtttgtaaagttgatcaaatatttatcgtaaatcttattgtgcaaaacgtactctagttgaacgtttttgttcagaaagctttccgtttttggattttcaagcagcgtcggagattccgaaccacttttttccgatgcaggcggagttgaacatggagtcaaataggtttcatcgtcatcgcttgtgttttcagtaacagccgactctatcacaggtataactctcttaacctccattttcctcatttcgagttttccgaaatcgagcaaaaccatcaacgaattgctaactttgtagttttccaaaaatattatgcgtggcgcgaaaatttcaatttcgaacatccaaatttttcgatttacctaaggaataacaagagtgttagcgtttgttatgaaagttttaaatgattgactcacctcatttccactaaacatttcattccagttcttcataaagtcagttttcttcgcgactctattgcgcggtgagtatttaaaggaattcgaatcggccagaaaatctaaaagccactggatcgcatcctcattatagataagatctagaccttttgatttaatgttcagctgaaagcgtaaatgattgcaattttcgtattgtaattgaaacaggatatcctcctggagagcagcattctttactagttgatttggtgtggctgtattccctgtttgtggcttaattaagtaattgtgcatcgtatcactactggttttgtctattaggtatacttcttgtaaggatatgcccacagtgtaagaagttaactgtgggctcaactggaggtaggcggagaagttgttgaattgcatttccatagacttgttcctgccatcatttaatttatcttcggtctgcaggattaccagtcctttgagaagcttgattgaaaagtgtccgaagacagcatcgctttttaagtcggaagagttctgaagtgagttctccaacgcaacgagaatatcatcttccaaatgtttcagcgattcatcctgttcattatttggggtactgggactgttcgcataccaacccatccagtttggaaaccaatgaaagagcatattcttgccctgctcgttctgtgattcaaaggcgaaacctttcgtaaacactttttcaaagcatatccttctcattatggttaaatccgatatctttctatcgctctcgatgtaggctttaaactccttatctgcagcggatagattttcgttgggatttaatataattgatttgtagagcagcatgtaacgaagattttccttgagcattaaccacttttcctcatttttcttaaagtcaaatccatggcatatggtggcgtatttccaccatgcgattggattactttctacggtgcatgtgggtcgctttagcctgtattgtcgaacttccttaacctgacggatttctgacagcttatctaacatttgcagtcgctggacctggaaatattaaaataatttattaaaacaaataataagcatatcaaatatggtgataacaactgcgtcatgggaagtacaactgtgtttattggggtacaagttcattttggggcttggttagatagaaataagcaaatttgttggtgattgatattgaaccaatattattcattcacgaataaaatgtattgtttgataatcgcttaaaaagcaatcgaaatatgtacctaattctgatgaactttggacctcagtaaattacgtctcatttaagtgttatttgtggcttcaagttgggcttagttaccttagatatgtctatgaccacctcgggaaccaggagttcacaggaaaccctgggtttgtctttggtacgtatcacctgctggcatttatcgcgcttccacctggccgttgcacaaatgggcttgatgatgaaattgtgggacctcagttcgcaggtggagtgcattttttcgagaatctcctggttagagtacgactgacatttgatgtcctcgtgcaacaaatcccagtagaccgagagctctttgagctccaccagcttgtagttcatttcgttgttgttcattttgtaggacccattggtccaatcacagtcgcagctctgggcggtcagagatccaatcttgatgcccgtgcatatcttgctcttgccggtgtccacgatgtcctcgaaccgaaagtgcacatcggatatcttgagttcaatgttgtcaatgatgttggtggccatgttggtgccatacttcagccagttattgtaggatgagaagtagtaagactccatttgtttgcccttttcggaacgccagcctgcttctgcggtgtccagcacggccagcttatactccaaatcctgcaacttctccttctcgtagtcccagttgtccaggttcttcggacagatgatgcagaacaggccctcgatggagatgcaccatggcgatgtcctgaactggcggaccggaatctggagtttgattttacggatactgccggcggtgacttcgaccggcaaattgaacgagcggagggcatctttgcgtatgggtatgttctcgagctcaacttcgcctgcgggaaaatatattgtttatgcgatgcggaataaagataaacaattatatcacagtacccgagagcagtgccaccgacaattgggcggaattcaagttctccagatactttcccagatacgtgttcagcacccacgttatgaggtctcgcaacatgcttgtttattaaccactgacgctaatcctattaaatatttgtttttaattcatgccctaaaaccacaactataaacatatgattggggactatctacaccgcataaatattgccgagtcacaaatggaacaagtggaatcggaacaggttgtgggattggattgtagttgaataaacaagtggtttctttggtttatttatttcataaataatttaaatgggaagtagttaataagataatatatatcagtcctaatttcgggtgttgcttaagtttgaaatatatgtaaatgatgttttgccgatgtagctatcaatcagattggtatcggatatcggtcttgtgcgatattcttgaaattccatcactaattattgttaaaaacaaaaattttattgtgattgctacagagtctatttcccaaaatgaccgatccaaacgtgccaagaggagccctaagcttgcaggcaagtaatttgggtagagtatctagtgaacttcaataaaatgtatatttttcttagaatgttctgaaatatacggtgcaacaccacgatccaaatccagaagcagccccaaagttggaaactcccgatcctgaggtatgtaaacagctcaaattgagagaattttacaaatatttagaatagttattgtgttaggctttaaaacacctcaagtagttatactttctgaataattcacaagtgtgtcctaagcagtgagtcaatcgaatcatctagaacctatgtatttggccatgtgctcctccaaatggaacttctattgaaagccaaatttgtttggaaattacttttctggcactttgtacagtagtatgaaagctctttttgatataacaaagtataacattagttattgactagttacttggagctacaatatataaaatattttatttttcagagagctcagtttttggcaaatgccctaaatgccatgacagtggatgctgcagcggccctgaaagcagcttt

SEQ ID NO: 22949 - DNA, 1557 bp, DROSOPHILA
atgttgcgagacctcataacgtgggtgctgaacacgtatctgggaaagtatctggagaacttgaattccgcccaattgtcggtggcactgctctcgggcgaagttgagctcgagaacatacccatacgcaaagatgccctccgctcgttcaatttgccggtcgaagtcaccgccggcagtatccgtaaaatcaaactccagattccggtccgccagttcaggacatcgccatggtgcatctccatcgagggcctgttctgcatcatctgtccgaagaacctggacaactgggactacgagaaggagaagttgcaggatttggagtataagctggccgtgctggacaccgcagaagcaggctggcgttccgaaaagggcaaacaaatggagtcttactacttctcatcctacaataactggctgaagtatggcaccaacatggccaccaacatcattgacaacattgaactcaagatatccgatgtgcactttcggttcgaggacatcgtggacaccggcaagagcaagatatgcacgggcatcaagattggatctctgaccgcccagagctgcgactgtgattggaccaatgggtcctacaaaatgaacaacaacgaaatgaactacaagctggtggagctcaaagagctctcggtctactgggatttgttgcacgaggacatcaaatgtcagtcgtactctaaccaggagattctcgaaaaaatgcactccacctgcgaactgaggtcccacaatttcatcatcaagcccatttgtgcaacggccaggtggaagcgcgataaatgccagcaggtgatacgtaccaaagacaaacccagggtttcctgtgaactcctggttcccgaggtggtcatagacatatctaaggttaaggaagttcgacaatacaggctaaagcgacccacatgcaccgtagaaagtaatccaatcgcatggtggaaatacgccaccatatgccatggatttgactttaagaaaaatgaggaaaagtggttaatgctcaaggaaaatcttcgttacatgctgctctacaaatcaattatattaaatcccaacgaaaatctatccgctgcagataaggagtttaaagcctacatcgagagcgatagaaagatatcggatttaaccataatgagaaggatatgctttgaaaaagtgtttacgaaaggtttcgcctttgaatcacagaacgagcagggcaagaatatgctctttcattggtttccaaactggatgggttggtatgcgaacagtcccagtaccccaaataatgaacaggatgaatcgctgaaacatttggaagatgatattctcgttgcgttggagaactcacttcagaactcttccgacttaaaaagcgatgctgtcttcggacacttttcaatcaagcttctcaaaggactggtaatcctgcagaccgaagataaattaaatgatggcaggaacaagtctatggaaatgcaattcaacaacttctccgcctacctccagttgagcccacagttaacttcttacactagtcgcgaagaaaactga

SEQ ID NO: 22950 - protein, 518 aa, DROSOPHILA
MLRDLITWVLNTYLGKYLENLNSAQLSVALLSGEVELENIPIRKDALRSFNLPVEVTAGSIRKIKLQIPVRQFRTSPWCISIEGLFCIICPKNLDNWDYEKEKLQDLEYKLAVLDTAEAGWRSEKGKQMESYYFSSYNNWLKYGTNMATNIIDNIELKISDVHFRFEDIVDTGKSKICTGIKIGSLTAQSCDCDWTNGSYKMNNNEMNYKLVELKELSVYWDLLHEDIKCQSYSNQEILEKMHSTCELRSHNFIIKPICATARWKRDKCQQVIRTKDKPRVSCELLVPEVVIDISKVKEVRQYRLKRPTCTVESNPIAWWKYATICHGFDFKKNEEKWLMLKENLRYMLLYKSIILNPNENLSAADKEFKAYIESDRKISDLTIMRRICFEKVFTKGFAFESQNEQGKNMLFHWFPNWMGWYANSPSTPNNEQDESLKHLEDDILVALENSLQNSSDLKSDAVFGHFSIKLLKGLVILQTEDKLNDGRNKSMEMQFNNFSAYLQLSPQLTSYTSREEN

SEQ ID NO: 22951 - DNA, 8626 bp, DROSOPHILA
aaggacaaccaaaccaatttagaggtaaacggaaaaatagtggatgcgtgtaccaccttgatggaatgtgtcaaagctctaatccaaaaatctcgtctcctgcaacacgaaatcgtggcttcccaaaaaggtagctaacaatattttttaattcaatgaagttactgacaagtaattactctttcaggaaatgcgagtgctaatgagttttataggcggaacagtcagtggtcagatggtttgatatccgcctcgaaaagtgtggcgaaggcagccaactatctggtggaagctgcaaacaaggctattgaaagtgaatctggcaagaactttgaactcattgtggctgcccaagaaattgctgcctgcacgacccaaatggttattgcgagcaaagtcaaggctgaacgtaatagtcaaaagctaaccgacctcacaaaagcctcgcgaagcgtaacgcaggcaacaggaactctggtcgccaccgtgaaggattgcaactcccagctggagcagcagagtgaaatagaactttctaagctaacgccatcacagattaaaacgatggaaatggaaattcatgttaaagtactcgaaatcgaacaagctctccaaatgcaacgactaaaactctcatcgtttcgtaaggagcattacaagaatgccgattattaaataccatatttattaatgttactaactttacaaacattcttttttgtattaatgcccgtcatgacaaataatatatctacacaatatttacactgcggtcattttatcctacaatgaatccgtaatatctgtttatagtattccgtgtcgatcgctttttgatccttgatttatatcacaccatagtatgtgggttcattatttcttaaatgtttattttacttactacttgaaattaaaatagcacttattgccaaagaaaataaaatgtaacatttgttgtcaaaaggtttttgtttattatcacgaaccgacctattgcattttataaaacggcatgttcacgttcatcaaagacacttttagcgtagtttatctaaaagaaaaagacaagtatggaatatatgtgataatcatttcaaaatttgtaaaagtaaataaattatatgataaacaaagtctgcgcttcaacaataatagtttattattgaaagataatttctactaatttctgctaagatgatttctacttacgcatcttgatgctgcctcagcacattcctcggaacgacaccgtatcctgggcctggtaatctttggaagattggttgatatctcgatgtagtgactggccgacgccctgctgctcgtggttggcgttgtgccggcattcgttaccactggatggcacgaaagaatctcactaacatgacattcaaacataatggttggattggcgtcgcttagtgaaaagattcgtacgtattctgtagaaaccagcaagcgcaatctagcctccttgtcgctccatagattgggttcatatgaaattatcttctccgaaaagttcttttgattgattaggtacagatattgctgccccttgctttggcgattggaatacaatggcaaaagaccaccaggagcaccagtcacacatctgggtagccttttcctttccggagcgtttctgtgactatctcggcttgtttcacgaacggcactggcagtttccgatgccaggtccaatacaccaatgatcggtttggtgacagtgcctactaagccctttcccaatccactgagaaagccaggaacgccatcggaagtggcaccatcgtaagtgtgtcttacaatactcgttactccgcccagcagtccaaatccgagacccttcagacccgctgcaaggtgaccgccggatgtattggactgcagttccagaatgcgttgcctcgtctcattgtcgtgatcatccagcacaacttttcccaggctatcggacagcgtttctgttagcttcgccgtcgaattcgatatgccatgcgtaacatttttcaccaaactcttgacggagccctcaaaaatcagtccggatactccttccgaaagatcgttggcaaatcccaatggattaccaaggaaatcgacgctgcccaaaattgcagccgcatgccatttgacttggttgatgtagtgcttcttcagctccttccgataaacgtccatcgtctcaaagtgcaatttatccgaatacctgtcgagttcaatcaaggcatcttcgaattttattagagtgagtccaagtgccttcttggtttcatgcaactccaccggcaactttgaagaagtgaatgctgaaagtcgaacctttaaagagaaaattgagttgtttaagaccattaagtctagattttaaaaaattacctgagttgcgccaatacttaagttctcaaaatagtatctcttcatatcctgcagaaaaggcttatcatccgtgttctcgaattggtattgcacacttaagttctgacggttgatcttgccgtagcccaggaatgaagccactttaagtatcagcttctcctccagactcgccgttgagggtttcaagtccagagttaagtacttgaaaatgattgcattcttgttgggcgaaggtaacattttcagtttgagaacaactgcattttgtgtttcttcaagatcattcgaagtttgcgtgtgcaatgcaatcggactcacagcatccagcaattgattatcgatttgtatataggcaatattcagatctaaggaattctccaaagcactctgtacaatatcacaatttatgtgatcgaggctgatgaacatgatttcctcacaaggcttgcgagctatgatggatatgccgattcctttaacaagctccacattaatctaaaatgatataactcttagtttgttatacgttagattttttcatagtcttacttaccaaatactcatgcacgaatgatacttttcccttatccgtaatttgcctattattcagggaagcatgcatccatagtaaatcgggagttaggaatactgaattttgtttaattttaatatcacatatttcgatcgtggatatgggtccatccattttcgtcgaaagctccagctgtcccgatccaggccttagtttctgtgcaacaatgtgttgtccaatgggtatttgtttactcgaacttgccctgttttccgttctgcccacgactgcctcatagttgggcttcaggccgctctctccaaatcgagactataaagtaaaccattttagattaaaggttatcaataaaacataaagaaatccttacctgtacgcacatattggcatggcacatcagccgtccattctcaaatctccatgtctgcgttgtaactctttgcttattgggtgttcggaccaccaagttggtgaactccatgggattcggagccttctccagatcgagtacaagtcgcactgcattcgcatcatttgtttgaatcggcggggtggatccttcatgctccaactgaccattcgagttcattagccacaattgtgaacgatcacccgagtttttctcaactatcacaacttttttaccacgtacgcccaaaaccaactgtctgtgcgtgttttcctcctcatttgaacgctcaaaagttccttgaaatgcgatgtaaatgaagttggtgtacgttagtgttttcttaatgttgtttttgttgttaatcgggaattctatcatgtttcctccaggtgcctccatcagcaaaatctgttggcccaagggatcatccatgacataggataacgaagattgcggtctaactggcgtaatccaaacgggcttcgatctcagctgtgagaaattgatgacaacttccgaacaattgtcaattcgaatcggtggtggtaaagttcgcgcgtccgtgaataagagtataaaagtagcatccttcgagatgatttccaagcgaagaaaaaacatttctccccactcatttcgcacattgatgtacaagctctggacatctttgatgggaatcccctttgaccaacagcagcactcgatctccggaattcgtacgcaaataatctgctcctgatcccagttgggccaatggaaagcgaagttgcaatcaacgggtgctgatataatcttacgcggatcgggacggtcctaaaaataaaaatatatatcacacaagcttaatttagataatgatattacaactcacatagttaacaatgtcgcagagctgcataaactccagcttatagccactacgattgtgcagatggaatctgggagagagcgtaacaaaggtcgtgcaagcatagagtcctctgcccctcctgacgctgattccaatcgcatagctgccctttgtattttccgcacgcaaatccctgtcggccaaatccttgtgcgtactaaaacttttgcaccactataaacatgggagtaattcacaatttaaataacaataatatccagctagactttagcataccatattgttggagccataagcttttcccaatcgcagtaccagtgccggagatccttcctgatccgaaaacgagaacattagcggcgccacttgccgcgcagtttcgtgctcctcgaattgcccagctgccgtatgactggtaccttcttgtttgtagatcaggggaagtcctgttttgttgattatccaaactggagcactgatatatagttccattcccttgcctggcaccgattgtatggacacgcgcacgtgcagttcccgtttttgaatgtcaatcaatttcagtttcggttctataacgcccctgtggctcacgggaatcttaagttggcccgaaagttgaaagttgtccagtgtgatgctcagattgaggggctggcaaatgttaacgttgtagatattaacactttccgatgagtttattctgccggtggcatgctcgtggatcttgaacataaggtcacagcaaagcatattgtttatcttgagcggtggcagaagcgtaatcttatgacccggtaaattctgttccttacagtgataaatttcccggcttatattcacgaaagtgtacaagatactcttgttggtatcgtagccagcgagtagctgtcgagtgtcatccttgccgcaggctttccacaggatttcttcattgctaaaaccagtgtcctcgtaggcatcgctttcactcgtattatgtgccacatataatgaggcatcgatgaacttgagcggcacagatagttcatcgtttggctttattacacttattgaactcagtccatcgctgtgcgtgcctttcaaggtcattttcaggaacacattccgatccagtttgtttatcacgcccaacgaggacttgactttgatgagcttctgggcagatccaatcaatgatatatcgaagactatccgacttttcgtcaaaaactgcgagtccaattttgtggtgcggaaaaacatgcccactttgtccaccgatatgggtccaatcaatgtccagccatggatttgtacgaaaatctggtgtagattcaattggtgagagtgcacgtgtctaagtttgcttttctggctaaaatcaaatgttttcgtctcgttcggctgcacggagtaccagttcttgatcaattccacctgctgtaagtcggaacgcgtcaaatctccaagtggagcgtaaatcggtttaaaaagcagtggtgttccgctgagattttggagcgcgaacggaataaaaggggaacgttgcctaaagttcttggctccattgtcattgaaatcgtttgtccagttcttcagaaccatgtgaaacagttcaataaacgtggacgtcacgttcaacttgagcatctgcttgctggaaattccaatctcaaagcgttttttgttatccaaatgacccttggtgtacttccagttcaaattggactcccacgtctctgccactggttcccatccactcagacgacgattataatagttgacggacacttctgtgtcaatgttacccaagctatagtgtcgaatatttgtctccttgggattgggatcctgcgtttggaaagtaaagttgagcaggaacttcgagagcgatacctctagtagtggcacatctgcatccatgcaatcgtcaattataaacaccgatatgagactggcatccactacagcggttttcatttccagggcgggatttcggtaggtgttctgtttttgctgggacagccaaatggcggcgtcgttgattcgccaattatttatctgcatggcgtacagacagtcggatatctcgaagcccattgccacgagcggagccgccttctccagatccgaatcagcttttgatataacgttcttcggtcgtgatgtttgtgtgggcagtagtcgcgccattctcgaaaacaatttaacatcaacataggagagccgaatgttcaagtgcttctgaattagtatgttcaagcaattactccgaagttctataatcagcgtaaagggatcgattatggacaaagcactctcctcttcggcgtccagggtgcaggaaaatatttccaaatggttaatgtccaaagatagaggcacaatgttgctatttggtttataacaaatgacagttgtactcttcaaaatgattgcgttcgagtccaagcgactacattcctcagcgaatataatctccgagtctgtaatatttacaacatattccgtggaaatactggtgtcgatctgtggcttttgagcaatctgatttgccgcattatttaccactggtgccggtgaatcttcttgcaaatatgacttcaattgatccagaaaactgaggagagcaaacactctcatgttgttgagcattattgtgtacttggaaaaagtggcttttttcctgcaatggacttcaacctgtacggaattctcgattcggacctcctttttggatggctccaatatgtttttaaacacgttttcgttgctcttgtcgctttcgtttctctcgtcaacaattagaatattgctcgatattaaatcaatatcctgtgagccgtcgctgaacaagtcgatttccagagtggatttcaaaaagtggatacacgccaaaggttctatggcagcactttgcgaagtatttaaagccagtagcagtgacacgtcttccagtaaaattcgaatcgaaattagaatggacactatcttagacacttcattctttggcattaggttaatggttgaaagtctttcgatggatgtgcaactgttattgtggtagttcatgtaaatatcatcggtttgttctccaatattgttgttcagaaaacttcgaatcagtttgtattgctgaatattgatgatgccactcaattttgagaaggttccttgaacactgatgtctggacagacgcgatgggcatctgccgaaaggtttctctccaactgcaggtgaaggaagcatgactcattgaagaacggctgacccaatcgtaggaagttcatatcagcgattataattcgatctttctcctgatcagctttagctttcatggagcttctttcgccggagaataggtttatattgaccaggtcaattcgcattacatccaggatttcatctttacttggcgttgcactcattttgcttattatattgttgtcactggcaaagtggaaactatttttcagagagaactggccaaggtatgcgattattacttcatttctgttataggatgatggaagcactataactggagaatcagcttgaatcactagcttcattttcgatgggcgcatattctgttcactgccgtgtttctttaattttctaataacaggctgtacaaatacaaaaatacaaaaaaagcgattaaaaagataaagaccaatgaaaggtatttctgtattaccgtttgcaattgcaacagatccttaacgaaaacatgtaactcggttgaaaaacgttttgtgtgtatataatgcactgcagacatgttaattcgcagggttgagtcggtgtccaaagtatttaaagcttccagatcgaccagttttctaaaaaggcaaaggaaaataatatagaagtattcaaatctggggtttagctcagccttactttttatatacaaaattcaaggcttccgtgccactagtaagaaacttctgcttgtaaatgtttccatatttggttagatcattaactgacacagatcccaagcagccttcaacgattttggagtaggggtcctgaagaatcatgaaaacggcattcgacacatttactctggacaagagcgactcattgcgaatcaatgtaaagttaaagctccttattgacaccttcagcttactacaaactttgtcaatatctaaaataaataatatttgttagatgtagttaattttctcataagcactcacgtttttcaacgagtttcatctcttcggggtatttttcattaacgttatccacggaaaccagaccaaagaagtcgaatatagtataccaccgttcaacgcaaatggccaaattcaagcaattaaactgaattgaacttgtttgctccagtttaccattttgcgcagatcgtccggtatgtgatttgtaaataactaacgtttgactctccttcttttt

SEQ ID NO: 22952 - DNA, 5709 bp, DROSOPHILA
atgagtgcaacgccaagtaaagatgaaatcctggatgtaatgcgaattgacctggtcaatataaacctattctccggcgaaagaagctccatgaaagctaaagctgatcaggagaaagatcgaattataatcgctgatatgaacttcctacgattgggtcagccgttcttcaatgagtcatgcttccttcacctgcagttggagagaaacctttcggcagatgcccatcgcgtctgtccagacatcagtgttcaaggaaccttctcaaaattgagtggcatcatcaatattcagcaatacaaactgattcgaagttttctgaacaacaatattggagaacaaaccgatgatatttacatgaactaccacaataacagttgcacatccatcgaaagactttcaaccattaacctaatgccaaagaatgaagtgtctaagatagtgtccattctaatttcgattcgaattttactggaagacgtgtcactgctactggctttaaatacttcgcaaagtgctgccatagaacctttggcgtgtatccactttttgaaatccactctggaaatcgacttgttcagcgacggctcacaggatattgatttaatatcgagcaatattctaattgttgacgagagaaacgaaagcgacaagagcaacgaaaacgtgtttaaaaacatattggagccatccaaaaaggaggtccgaatcgagaattccgtacaggttgaagtccattgcaggaaaaaagccactttttccaagtacacaataatgctcaacaacatgagagtgtttgctctcctcagttttctggatcaattgaagtcatatttgcaagaagattcaccggcaccagtggtaaataatgcggcaaatcagattgctcaaaagccacagatcgacaccagtatttccacggaatatgttgtaaatattacagactcggagattatattcgctgaggaatgtagtcgcttggactcgaacgcaatcattttgaagagtacaactgtcatttgttataaaccaaatagcaacattgtgcctctatctttggacattaaccatttggaaatattttcctgcaccctggacgccgaagaggagagtgctttgtccataatcgatccctttacgctgattatagaacttcggagtaattgcttgaacatactaattcagaagcacttgaacattcggctctcctatgttgatgttaaattgttttcgagaatggcgcgactactgcccacacaaacatcacgaccgaagaacgttatatcaaaagctgattcggatctggagaaggcggctccgctcgtggcaatgggcttcgagatatccgactgtctgtacgccatgcagataaataattggcgaatcaacgacgccgccatttggctgtcccagcaaaaacagaacacctaccgaaatcccgccctggaaatgaaaaccgctgtagtggatgccagtctcatatcggtgtttataattgacgattgcatggatgcagatgtgccactactagaggtatcgctctcgaagttcctgctcaactttactttccaaacgcaggatcccaatcccaaggagacaaatattcgacactatagcttgggtaacattgacacagaagtgtccgtcaactattataatcgtcgtctgagtggatgggaaccagtggcagagacgtgggagtccaatttgaactggaagtacaccaagggtcatttggataacaaaaaacgctttgagattggaatttccagcaagcagatgctcaagttgaacgtgacgtccacgtttattgaactgtttcacatggttctgaagaactggacaaacgatttcaatgacaatggagccaagaactttaggcaacgttccccttttattccgttcgcgctccaaaatctcagcggaacaccactgctttttaaaccgatttacgctccacttggagatttgacgcgttccgacttacagcaggtggaattgatcaagaactggtactccgtgcagccgaacgagacgaaaacatttgattttagccagaaaagcaaacttagacacgtgcactctcaccaattgaatctacaccagattttcgtacaaatccatggctggacattgattggacccatatcggtggacaaagtgggcatgtttttccgcaccacaaaattggactcgcagtttttgacgaaaagtcggatagtcttcgatatatcattgattggatctgcccagaagctcatcaaagtcaagtcctcgttgggcgtgataaacaaactggatcggaatgtgttcctgaaaatgaccttgaaaggcacgcacagcgatggactgagttcaataagtgtaataaagccaaacgatgaactatctgtgccgctcaagttcatcgatgcctcattatatgtggcacataatacgagtgaaagcgatgcctacgaggacactggttttagcaatgaagaaatcctgtggaaagcctgcggcaaggatgacactcgacagctactcgctggctacgataccaacaagagtatcttgtacactttcgtgaatataagccgggaaatttatcactgtaaggaacagaatttaccgggtcataagattacgcttctgccaccgctcaagataaacaatatgctttgctgtgaccttatgttcaagatccacgagcatgccaccggcagaataaactcatcggaaagtgttaatatctacaacgttaacatttgccagcccctcaatctgagcatcacactggacaactttcaactttcgggccaacttaagattcccgtgagccacaggggcgttatagaaccgaaactgaaattgattgacattcaaaaacgggaactgcacgtgcgcgtgtccatacaatcggtgccaggcaagggaatggaactatatatcagtgctccagtttggataatcaacaaaacaggacttcccctgatctacaaacaagaaggtaccagtcatacggcagctgggcaattcgaggagcacgaaactgcgcggcaagtggcgccgctaatgttctcgttttcggatcaggaaggatctccggcactggtactgcgattgggaaaagcttatggctccaacaatatgtggtgcaaaagttttagtacgcacaaggatttggccgacagggatttgcgtgcggaaaatacaaagggcagctatgcgattggaatcagcgtcaggaggggcagaggactctatgcttgcacgacctttgttacgctctctcccagattccatctgcacaatcgtagtggctataagctggagtttatgcagctctgcgacattgttaactatgaccgtcccgatccgcgtaagattatatcagcacccgttgattgcaacttcgctttccattggcccaactgggatcaggagcagattatttgcgtacgaattccggagatcgagtgctgctgttggtcaaaggggattcccatcaaagatgtccagagcttgtacatcaatctgagatcgaagcccgtttggattacgccagttagaccgcaatcttcgttatcctatgtcatggatgatcccttgggccaacagattttgctgatggaggcacctggaggaaacatgatagaattcccgattaacaacaaaaacaacattaagaaaacactaacgtacaccaacttcatttacatcgcatttcaaggaacttttgagcgttcaaatgaggaggaaaacacgcacagacagttggttttgggcgtacgtggtaaaaaagttgtgatagttgagaaaaactcgggtgatcgttcacaattgtggctaatgaactcgaatggtcagttggagcatgaaggatccaccccgccgattcaaacaaatgatgcgaatgcagtgcgacttgtactcgatctggagaaggctccgaatcccatggagttcaccaacttggtggtccgaacacccaataagcaaagagttacaacgcagacatggagatttgagaatggacggctgatgtgccatgccaatatgtgcgtacagtctcgatttggagagagcggcctgaagcccaactatgaggcagtcgtgggcagaacggaaaacagggcaagttcgagtaaacaaatacccattggacaacacattgttgcacagaaactaaggcctggatcgggacagctggagctttcgacgaaaatggatggacccatatccacgatcgaaatatgtgatattaaaattaaacaaaattcagtattcctaactcccgatttactatggatgcatgcttccctgaataataggcaaattacggataagggaaaagtatcattcgtgcatgagtatttgattaatgtggagcttgttaaaggaatcggcatatccatcatagctcgcaagccttgtgaggaaatcatgttcatcagcctcgatcacataaattgtgatattgtacagagtgctttggagaattccttagatctgaatattgcctatatacaaatcgataatcaattgctggatgctgtgagtccgattgcattgcacacgcaaacttcgaatgatcttgaagaaacacaaaatgcagttgttctcaaactgaaaatgttaccttcgcccaacaagaatgcaatcattttcaagtacttaactctggacttgaaaccctcaacggcgagtctggaggagaagctgatacttaaagtggcttcattcctgggctacggcaagatcaaccgtcagaacttaagtgtgcaataccaattcgagaacacggatgataagccttttctgcaggatatgaagagatactattttgagaacttaagtattggcgcaactcaggttcgactttcagcattcacttcttcaaagttgccggtggagttgcatgaaaccaagaaggcacttggactcactctaataaaattcgaagatgccttgattgaactcgacaggtattcggataaattgcactttgagacgatggacgtttatcggaaggagctgaagaagcactacatcaaccaagtcaaatggcatgcggctgcaattttgggcagcgtcgatttccttggtaatccattgggatttgccaacgatctttcggaaggagtatccggactgatttttgagggctccgtcaagagtttggtgaaaaatgttacgcatggcatatcgaattcgacggcgaagctaacagaaacgctgtccgatagcctgggaaaagttgtgctggatgatcacgacaatgagacgaggcaacgcattctggaactgcagtccaatacatccggcggtcaccttgcagcgggtctgaagggtctcggatttggactgctgggcggagtaacgagtattgtaagacacacttacgatggtgccacttccgatggcgttcctggctttctcagtggattgggaaagggcttagtaggcactgtcaccaaaccgatcattggtgtattggacctggcatcggaaactgccagtgccgttctggtaacgaatgccggcacaacgccaaccacgagcagcagggcgtcggccagtcactacatcgagatatcaaccaatcttccaaagattaccaggcccaggatacggtgtcgttccgaggaatgtgctgaggcagcatcaagatgcataaactacgctaaaagtgtctttgatgaacgtgaacatgccgttttataa

SEQ ID NO: 22953 - protein, 1902 aa, DROSOPHILA
MSATPSKDEILDVMRIDLVNINLFSGERSSMKAKADQEKDRIIIADMNFLRLGQPFFNESCFLHLQLERNLSADAHRVCPDISVQGTFSKLSGIINIQQYKLIRSFLNNNIGEQTDDIYMNYHNNSCTSIERLSTINLMPKNEVSKIVSILISIRILLEDVSLLLALNTSQSAAIEPLACIHFLKSTLEIDLFSDGSQDIDLISSNILIVDERNESDKSNENVFKNILEPSKKEVRIENSVQVEVHCRKKATFSKYTIMLNNMRVFALLSFLDQLKSYLQEDSPAPVVNNAANQIAQKPQIDTSISTEYVVNITDSEIIFAEECSRLDSNAIILKSTTVICYKPNSNIVPLSLDINHLEIFSCTLDAEEESALSIIDPFTLIIELRSNCLNILIQKHLNIRLSYVDVKLFSRMARLLPTQTSRPKNVISKADSDLEKAAPLVAMGFEISDCLYAMQINNWRINDAAIWLSQQKQNTYRNPALEMKTAVVDASLISVFIIDDCMDADVPLLEVSLSKFLLNFTFQTQDPNPKETNIRHYSLGNIDTEVSVNYYNRRLSGWEPVAETWESNLNWKYTKGHLDNKKRFEIGISSKQMLKLNVTSTFIELFHMVLKNWTNDFNDNGAKNFRQRSPFIPFALQNLSGTPLLFKPIYAPLGDLTRSDLQQVELIKNWYSVQPNETKTFDFSQKSKLRHVHSHQLNLHQIFVQIHGWTLIGPISVDKVGMFFRTTKLDSQFLTKSRIVFDISLIGSAQKLIKVKSSLGVINKLDRNVFLKMTLKGTHSDGLSSISVIKPNDELSVPLKFIDASLYVAHNTSESDAYEDTGFSNEEILWKACGKDDTRQLLAGYDTNKSILYTFVNISREIYHCKEQNLPGHKITLLPPLKINNMLCCDLMFKIHEHATGRINSSESVNIYNVNICQPLNLSITLDNFQLSGQLKIPVSHRGVIEPKLKLIDIQKRELHVRVSIQSVPGKGMELYISAPVWIINKTGLPLIYKQEGTSHTAAGQFEEHETARQVAPLMFSFSDQEGSPALVLRLGKAYGSNNMWCKSFSTHKDLADRDLRAENTKGSYAIGISVRRGRGLYACTTFVTLSPRFHLHNRSGYKLEFMQLCDIVNYDRPDPRKIISAPVDCNFAFHWPNWDQEQIICVRIPEIECCCWSKGIPIKDVQSLYINLRSKPVWITPVRPQSSLSYVMDDPLGQQILLMEAPGGNMIEFPINNKNNIKKTLTYTNFIYIAFQGTFERSNEEENTHRQLVLGVRGKKVVIVEKNSGDRSQLWLMNSNGQLEHEGSTPPIQTNDANAVRLVLDLEKAPNPMEFTNLVVRTPNKQRVTTQTWRFENGRLMCHANMCVQSRFGESGLKPNYEAVVGRTENRASSSKQIPIGQHIVAQKLRPGSGQLELSTKMDGPISTIEICDIKIKQNSVFLTPDLLWMHASLNNRQITDKGKVSFVHEYLINVELVKGIGISIIARKPCEEIMFISLDHINCDIVQSALENSLDLNIAYIQIDNQLLDAVSPIALHTQTSNDLEETQNAVVLKLKMLPSPNKNAIIFKYLTLDLKPSTASLEEKLILKVASFLGYGKINRQNLSVQYQFENTDDKPFLQDMKRYYFENLSIGATQVRLSAFTSSKLPVELHETKKALGLTLIKFEDALIELDRYSDKLHFETMDVYRKELKKHYINQVKWHAAAILGSVDFLGNPLGFANDLSEGVSGLIFEGSVKSLVKNVTHGISNSTAKLTETLSDSLGKVVLDDHDNETRQRILELQSNTSGGHLAAGLKGLGFGLLGGVTSIVRHTYDGATSDGVPGFLSGLGKGLVGTVTKPIIGVLDLASETASAVLVTNAGTTPTTSSRASASHYIEISTNLPKITRPRIRCRSEECAEAASRCINYAKSVFDEREHAVL

SEQ ID NO: 22954 - DNA, 9096 bp, DROSOPHILA
ctgataaactaccacccctaaccgaattggcgtttcttgacaaccctgttctgtacaacaaattttcatgaaattttaccaacgcaaaacgtttttccttcgtgcggttgaaaactaaaataaagtttacaaaatggacttccaaaaccgcgccggcggcaagaccggcagcggaggcgtagcctcctggtcggagacgaaccgcgaccgcaaggagcgactgcgtcaactggccctggagacaatcgatctgaacaaggatccgtacttcatgaagaaccatctgggctcctacgagtgcaaactctgcctgacgctgcacaacaacgagggcagctatttggcccacacgcagggcaagaagcatcaggataatctggcaagaagagccgccaaggaggcaaaggaggcaccctcttcgctgctggcgcccgagaagccccgcgtggaaccgaagaagttcgtcaagattggacgacccggctaccgggtgaccaagcagcgtgaactcagcaacggccagcagtcgttgctctttcaggtggactacccggaaatcacggagtccattgttccgcgtcaccgcttcatgtccgcctacgagcaaaagatcgagccgccagaccgcaagtggcagtaccttctctttgccgccgagccgtacgagaccatagggttcaaggtgccgtcccgcgaagtggagaagagtgagggcaagttctggacgcactggaaccgtgacaccaagcagttcttccttcagttcgccttcaagttcgaacctaagatcctgccgccaccgccgccgaatctacatagggcactaggccccccaggcggattccccatgccgggaccgccacgtcctgctatgcatcccatgttcaatggcgttcatccaccgccacccatgctttcaaacaactaattcatcgacaatgtttacgggatttctccaaacgcaagccgattaccacagaaatattcaaataataaacaattttctacttaatacaactcgagggtttttgtatttgtgtttctagcttaataaattgaaaaaatattgctggttttctttgtagctgtacgacttacaaatcgatcgcgtttaaggtaattatcttggattctataatttctgcttaaattaggtaatgtacaacttattaatacacacttggctggccatctccgttcgtcaattacttttagatcttttcgcgcttcttgaaattccttttcgaagcgcagcgggtgattatattagaaacgtgtggcttatgctcgaagatcttcattaactgattctgtgcctcgttgatgccatcggtaataatcttgctgcgttgaatgtttccctgcaaagtaaattggttttatgttgagattcaagcataatggatataagtataagagcgcacctttagcagttcagtgactcgctcaatttcgctgtgcttctccttgtccttttcgagatcctgcagcatggtctccagcctgcccagactaaagacttccgattcattctgtaagaaatcagttcagtcaaagtagcctaccaatactttcgtgcccattgcttaccaagtcctccatttgcgagcgtaaatgataaattttccatccattgattttgccctgcacatttggctgattggccagatcaatgactgtggcccgccgctcctcccttggcttaacatcagtgtaccgatgaaaatgattgttggccaacttatgtgtgggcttatacgtctgtagatcaacggaatcatttgttaactaccacaaaatgaactgaaccttcaacttacattgagcaaagcacaattgcgcggacgacgaatcacaaagtcgacgggatttgcgttctccttgttgcccgccacagcaggtgtactgttccggtggttggcatcgcctggcgcactgttgggagcaacacccggggtcgctgctgtcaccagtagtcctccattgttgtgcttctgcatgtacgaagcgccagccggcggcgttggctccgaacttggaggtggcagcgataaggatgcttgactctgcgtagagtgctggctgtcattgctggcaaatacattatcagattatcaacatgcatcatttgatacaaccactcaaataactcacgtcgatcgtcgcggctttttcctagaggagcagtcataactggagctggagctattaccagtaccattcatacgcgttccttgttgcatctgcgtcgatcccaccaaatgaggcacctgctgaggctgctgttgctgcggcgttggtgcttgcacatccacaaaggcactgctaccactgcgggctcccagtgaggagtgaccaaggttctgctgaatcgattggtgtgatgagtacatcttttgaagaacaaatattaaagccatacttaagcatatattgattgttgtgtacacacctcattaatgggattaaaatgcgtggaattatcgcgcccaccagcgcctcccgtggctggctgatcgccaatcctgtcctgtaattgctgatccacaccaggtgaggaattcgccgacactgtagttgagccgtccgacgaagccggcgagtccgccctcgaatttctcgttgagttcacggggccaactgtggcaggcacactagcggcgctacttgctacaccatgggtgactcgctcccgttccttcttggccagcgcctctacggtcagcccagagccaactgattgaggcactgtcacggacaccggctgaatgttgaacgtggtgcccggagccggtggcatgttttgtccactgttattgctagccattgaaagcaaagtgggtcctagatttttagccgcccgtattggcgaaccttccgcatcccgcttgcgcataaagctggacaccagtgctccacttgcagttgcttgttgcggattgcccgctcccgtggtcaccttaacggacgtatgcagcggaataaccatgtgctgcggcggcgcactatttggtcctgctggtattatcaattgctggtggccaatggttcgggtggctgttccaccagcccccgacggcaacaccgtaaaagtagcctgcgatccgccgccacctgatcccgctccggcagtcgcgtgacttgcaaagggtaacgaagataccgacaagctgccaccggcgctgctaaccaattgtgcctgcgcctgggtgctctgcgtcactgttgtcgtagtcaatgatagaacgcctgtggaggcggaggctggcatagattcgtagtagattgtggcagcacttcccttctcatcgatctgtataacgatttagttttaatagttaattgaagcatcatatatgtagatagttgaaacctaccttcatcaactggctctgtgaagcaactacaggattccaggtgcgttgaaagcccgtcactgttgccccgcttgtgctggaaccatctgctccaggggcagaagaagctggtgccatcatcatcttgcccaaagtgatgccgcttgcgttcttgatgggcgtcagagttcccgtgaggatattaccgcctggtcccactcccgctcccctgccactgatggtaagtggcaggacagtggctccaccggccgccgatgtggcacccgtcaccgagcttgaattgaccacactggcagagacattcggcactggcaccgcctggatgctggccacgccctgcggccccattgtttgtcctccacttcctccgccagctgacagttttccgatgggattaagctgtgtaatagttagcgatggctgaaccttagcggtcatggtgacaggtggacgaatgcctgtcgattgatggtttcaaagatatattattattatttcatttaattgtggtagggtttattcctatcatattccacttacaaaagaacaagtcacgaaataattcttaaattttcaaacactattttatttttgttcttattgtatagttctcagctcagttcaatccataaaaaagtaaactctatataggagaacacctacttccacagctggtcgccggtcaactccagaaccatcttagtgcgaaaatatttcatgtctttcttggaaaacgttattggagcatcccgggttaggtattctgcaaacatgcagacgaacacgccgcaatcgttcatgttgtcttgttgcggcacattttgggcatcctcgatgcgaaattcactggtgtccaaacacagcccgagcttgtcctccgactccatttgaaggtacttcactagtgctcgcatcagattcgggtcaccgcggcctcttgaattgtagtagagcattgttttcgcaggcaaatcgattatgaccaggcaccagtgaacgagcatttggtgaacaggcacaagtatgaggtccatgctaaacagatccacctttctagtccagcgttttacgccatcgaagccactttgcagcaggcggggcacaaagaaagtgctcatggcatacacgctgggcactgtaccaggacgcttctccgatcgctcgaccagtaggttcatgtaaaagttgattattttgtcgttgagccagccgccactggtcaggattttgatatcactgccgcagatgtccaaattgaacttggccacaattacctgctgcagtggatacttagatagttccatcagccgatcatggtgttctttggtcagcggaatcaattcgctgctgattcttatgtcctcgatcacatggacggactgcttaaggatcagcttcttgtatctatcgatttcgcaggcaattcgctcgtgtttggcttttaaacacaactgatgtgcttcattcaagcgctttctatttaacttgtttttttgatccgtccaacgccgaaattgctcgatatagttggaccttaaaaataaggatcttcgaaagcgtcgattgtggctatgtttgaagaccgctggtatggcttgcagcagtttcgttttacggtcaactttcttgaccacctttggtatctccttatgtcctatgtcctccttttcaacgactttaagcggtgtcgggactgcgggaccattgctggttagtttgcggaaaaatttgagtttttcttgcacggccattacaacgtcctcctcttgttcctggaaattctcgggctgctttagaactggcattgtcttggccatagggtaatcctgacactcttttgtgattagatcaaaatatctagatttctccacgatctccttctcgaaagccagcatgctgctgatgattgttggatgttgactaaactgaatgatattagttcgtaagctgttgataacaattgaaataaaaattgggtccccctatttcaacacgaattgatagtagattctctgcttcctagatgacagttaacgtggtttatcgatagtttcatacttaacagcagaagtttcagttttataaaaattaaatactgaattgactattgcttaacagattgctaaactagatgacttgctctttagtaagcattttagagtattccagttataagtactaacttacccatcttagccgccgcggtagtgctcatcaagaatggctgcagcatcacgttcccggccagacgagctccggatccgatgatctgttgagtggttcccgtcgctggctgctgcagctgaatgatccgtgtggtgggcaaattagtggccgtcagagcagttcctccggctccgggaccccgcccgggtgccactgttgctccaccggaaacactaacggccgttggagatgccgtaacgctggtattcagctgcggtatgcttggtgccctgatacttatgctggttgtgttcagcttagcggttggaaaactcttgcccagcggaattggtcgcacctgtcgaggtgttactgtcgttccaccgggcgtcgttgttgttactccgcctgtgggcgtggccacagcaaagcgtggattaaattgctgacccggattctgacttgcattcggtgcagacacattggaggagtaaactagtgtagcctgatgctgcctctgtggcaatacagtagccacataggcctgaggacctcctcccggtcccgtcgcctgttgtgtcgccaagggctggccagcggaaacggaaagagctatgtggaaacacaattaggatgatgttgcagagtaagaaaagatacaacatacctgttggcgcctgcactggagtagtggtcactacactggcattcgaaacccccgcggatgtcgttataattcgctggcgcggctgatgaatggttcggatcagttgcacctgtccctgactctgcatccaagcaccactgttgctggacgagatgacagccgacgatggttgcgatgtgagcgccactccacttctgctcaccgatgctgttgctccgcgtacgaatcctccggttgagctcagcactgttggcgctgtgggcgtaaccgtggccgatgatgtggctctcaatggcgtgacgagccgctggccaactccaacgccaacgcctcccatttgggtggccgtcacactggctcgcggcaagtatgtggcctgggttacgggcctggtaaccgtgatcgatgcattcgccccactcctcgccggtgcagctggtatggctgttatctgagtccttccggtggccgtaacattctctagctgcttgatcattggcatcaccacccgcacctgtgtggactgaccaccagcgccaatagcacggatcgaagctgccgtagtcgcttgtcctgcattcagagcaattggagtgccacctagggaagtttgttgaacttgattggctgacgccaccttaattgtgcctccgctgaggatcggtgtgcccgcaatggatatcccaccgccgccgtcggatttcacgtgggtgatcttggcggccaccgccgggtgcgctgcagaggatggcaaatgggatggcaatgagtatttgtttatgacgccgcgcagctgcaggggcggatgtgagtgcgataccaaggatgcggatgcggataaagatccagtggctgccagagatgatgatgatgatgatggatatatagatggcagcaatgacaacgatggcactgcatgggtgtgcagttgttgggtgcgtatcttaatggttttcaggggggctgtgcgggtggctactgtgagatttcggttaaaagctccacatggaacaccaatggacggacaagtgaaattggggagctacatacatataacattggtttatttgtttggcttttaaatttaataataatatttgtttccttttgatgaaaattaaatataatataaatatacaattttaaaaagatgtatgtttctattttttaagagccaaacaagtaaatttattagataaataactggaaatatattatctttgagatcaagctaaataagaacattttgtgggcagttggcaaccctgaaacgaatgcacagtaacaacaaaacaaaggcatacaaacgcagacgttgctgcgaatgtgaggcacaaagaggaataggaaacaaacagtgcgcgtatgcaagagcaaaagagaggggcacaaatgttatgtatacatacgcatacacggggacaatgctaatacgtatatacgtatggggataaatatatataaatattccacttggatatcggtggacttacctgatggcgctgtagctgtacttccaccgcccaccggccctcctcccgcgccaccctcactaggcgcactcattattccagctttgattttgcgatatctgaaagacgattttggcattagacttctgttccacgtttcacacgattttcgcctcttctacaccacccgctctttctcttcttatcactgcgcactatgtatccacaaaatctctccacaagcacgcacacgaaaacagtctgagaaaggctgtactttgaaatttttcttagataaacttgcctttttatgctaattggtcgcacacattaagcgcagcaaattagacttgatgatttttaccgcgccacctattaatacgagaagtttttcttgttttccgctcttcttttcacaaggctcaattaagtagtgttaccagattgaaaacaataagtaatctatgaaatactaaacgctaggtgttcagaaaaatactcggaaattacacaagtaaggaaataccaaaacaattttttatccgcttaaaccgtcattttaggatgataggtttttaagcacgaattttataaatcatattagtaatacaagtatttccaacatatcataaaattaaggaattcattcaatattttcattgatttatagatttttaactaagtaatgcaatgttaacacatattgttttgtatatatcgtcaaaactttgatttctcttcattaaaatagacaccaaagaagtttgttaaattcaacccaggaggaatgcctactcttcatagtattggggataggttacttggtgtacagccaatattagtcatttaattgatagttattgtcatttaatagattggtattgtgttttgtctccatttccatccagaaactgatgatacagcaaggctctgcaggcattggcataagtaaactctttgtcccaattttgtgactttttcttcattaaagagaagaaaagtaaagtaaagccaagtaaattggcttgttttggtacttttaaacaatggttcacgtttacaattcttcatcattagttttaacaataataataatatagcgaaataggtattagcttgacaatattcaactattatcctcgaaaatttgggcccaaaaataaaactaaaagaatataatcaaaaaattaagacccattggtattttaaagaaagtggtatttttcgcgcgggggcgtattggcggttcgccacctgcggccacactggccaacccaccacttcgcttagttgtgttttcgtcttgccttttccactagtctctctcgcgaagtagttggaaaaatcaccttttgcaaagtttttcgctgggaccaaaaagctacatttttcaaaaaccgaaaggaaattacgc

SEQ ID NO: 22955 - DNA, 4006 bp, DROSOPHILA
aaaagaagagcggaaaacaagaaaaacttctcgtattaataggtggcgcggtaaaaatcatcaagtctaatttgctgcgcttaatgtgtgcgaccaattagcataaaaagatatcgcaaaatcaaagctggaataatgagtgcgcctagtgagggtggcgcgggaggagggccggtgggcggtggaagtacagctacagcgccatcagcgcacccggcggtggccgccaagatcacccacgtgaaatccgacggcggcggtgggatatccattgcgggcacaccgatcctcagcggaggcacaattaaggtggcgtcagccaatcaagttcaacaaacttccctaggtggcactccaattgctctgaatgcaggacaagcgactacggcagcttcgatccgtgctattggcgctggtggtcagtccacacaggtgcgggtggtgatgccaatgatcaagcagctagagaatgttacggccaccggaaggactcagataacagccataccagctgcaccggcgaggagtggggcgaatgcatcgatcacggttaccaggcccgtaacccaggccacatacttgccgcgagccagtgtgacggccacccaaatgggaggcgttggcgttggagttggccagcggctcgtcacgccattgagagccacatcatcggccacggttacgcccacagcgccaacagtgctgagctcaaccggaggattcgtacgcggagcaacagcatcggtgagcagaagtggagtggcgctcacatcgcaaccatcgtcggctgtcatctcgtccagcaacagtggtgcttggatgcagagtcagggacaggtgcaactgatccgaaccattcatcagccgcgccagcgaattataacgacatccgcgggggtttcgaatgccagtgtagtgaccactactccagtgcaggcgccaacagctctttccgtttccgctggccagcccttggcgacacaacaggcgacgggaccgggaggaggtcctcaggcctatgtggctactgtattgccacagaggcagcatcaggctacactagtttactcctccaatgtgtctgcaccgaatgcaagtcagaatccgggtcagcaatttaatccacgctttgctgtggccacgcccacaggcggagtaacaacaacgacgcccggtggaacgacagtaacacctcgacaggtgcgaccaattccgctgggcaagagttttccaaccgctaagctgaacacaaccagcataagtatcagggcaccaagcataccgcagctgaataccagcgttacggcatctccaacggccgttagtgtttccggtggagcaacagtggcacccgggcggggtcccggagccggaggaactgctctgacggccactaatttgcccaccacacggatcattcagctgcagcagccagcgacgggaaccactcaacagatcatcggatccggagctcgtctggccgggaacgtgatgctgcagccattcttgatgagcactaccgcggcggctaagatgggcattcgtccacctgtcaccatgaccgctaaggttcagccatcgctaactattacacagcttaatcccatcggaaaactgtcagctggcggaggaagtggaggacaaacaatggggccgcagggcgtggccagcatccaggcggtgccagtgccgaatgtctctgccagtgtggtcaattcaagctcggtgacgggtgccacatcggcggccggtggagccactgtcctgccacttaccatcagtggcaggggagcgggagtgggaccaggcggtaatatcctcacgggaactctgacgcccatcaagaacgcaagcggcatcactttgggcaagatgatgatggcaccagcttcttctgcccctggagcagatggttccagcacaagcggggcaacagtgacgggctttcaacgcacctggaatcctgtagttgcttcacagagccagttgatgaagatcgatgagaagggaagtgctgccacaatctactacgaatctatgccagcctccgcctccacaggcgttctatcattgactacgacaacagtgacgcagagcacccaggcgcaggcacaattggttagcagcgccggtggcagcttgtcggtatcttcgttaccctttgcaagtcacgcgactgccggagcgggatcaggtggcggcggatcgcaggctacttttacggtgttgccgtcgggggctggtggaacagccacccgaaccattggccaccagcaattgataataccagcaggaccaaatagtgcgccgccgcagcacatggttattccgctgcatacgtccgttaaggtgaccacgggagcgggcaatccgcaacaagcaactgcaagtggagcactggtgtccagctttatgcgcaagcgggatgcggaaggttcgccaatacgggcggctaaaaatctaggacccactttgctttcaatggctagcaataacagtggacaaaacatgccaccggctccgggcaccacgttcaacattcagccggtgtccgtgacagtgcctcaatcagttggctctgggctgaccgtagaggcgctggccaagaaggaacgggagcgagtcacccatggtgtagcaagtagcgccgctagtgtgcctgccacagttggccccgtgaactcaacgagaaattcgagggcggactcgccggcttcgtcggacggctcaactacagtgtcggcgaattcctcacctggtgtggatcagcaattacaggacaggattggcgatcagccagccacgggaggcgctggtgggcgcgataattccacgcattttaatcccattaatgagatgtactcatcacaccaatcgattcagcagaaccttggtcactcctcactgggagcccgcagtggtagcagtgcctttgtggatgtgcaagcaccaacgccgcagcaacagcagcctcagcaggtgcctcatttggtgggatcgacgcagatgcaacaaggaacgcgtatgaatggtactggtaatagctccagctccagttatgactgctcctctaggaaaaagccgcgacgatcgaccaatgacagccagcactctacgcagagtcaagcatccttatcgctgccacctccaagttcggagccaacgccgccggctggcgcttcgtacatgcagaagcacaacaatggaggactactggtgacagcagcgaccccgggtgttgctcccaacagtgcgccaggcgatgccaaccaccggaacagtacacctgctgtggcgggcaacaaggagaacgcaaatcccgtcgactttgtgattcgtcgtccgcgcaattgtgctttgctcaatacgtataagcccacacataagttggccaacaatcattttcatcggtacactgatgttaagccaagggaggagcggcgggccacagtcattgatctggccaatcagccaaatgtgcagggcaaaatcaatggatggaaaatttatcatttacgctcgcaaatggaggacttgaatgaatcggaagtctttagtctgggcaggctggagaccatgctgcaggatctcgaaaaggacaaggagaagcacagcgaaattgagcgagtcactgaactgctaaagggaaacattcaacgcagcaagattattaccgatggcatcaacgaggcacagaatcagttaatgaagatcttcgagcataagccacacgtttctaatataatcacccgctgcgcttcgaaaaggaatttcaagaagcgcgaaaagatctaaaagtaattgacgaacggagatggccagccaagtgtgtattaataagttgtacattacctaatttaagcagaaattatagaatccaagataattaccttaaacgcgatcgatttgtaagtcgtacagctacaaagaaaaccagcaatattttttcaatttattaagctagaaacacaaatacaaaaaccctcgagttgtattaagtagaaaa

SEQ ID NO: 22956 - protein, 1219 aa, DROSOPHILA
MSAPSEGGAGGGPVGGGSTATAPSAHPAVAAKITHVKSDGGGGISIAGTPILSGGTIKVASANQVQQTSLGGTPIALNAGQATTAASIRAIGAGGQSTQVRVVMPMIKQLENVTATGRTQITAIPAAPARSGANASITVTRPVTQATYLPRASVTATQMGGVGVGVGQRLVTPLRATSSATVTPTAPTVLSSTGGFVRGATASVSRSGVALTSQPSSAVISSSNSGAWMQSQGQVQLIRTIHQPRQRIITTSAGVSNASVVTTTPVQAPTALSVSAGQPLATQQATGPGGGPQAYVATVLPQRQHQATLVYSSNVSAPNASQNPGQQFNPRFAVATPTGGVTTTTPGGTTVTPRQVRPIPLGKSFPTAKLNTTSISIRAPSIPQLNTSVTASPTAVSVSGGATVAPGRGPGAGGTALTATNLPTTRIIQLQQPATGTTQQIIGSGARLAGNVMLQPFLMSTTAAAKMGIRPPVTMTAKVQPSLTITQLNPIGKLSAGGGSGGQTMGPQGVASIQAVPVPNVSASVVNSSSVTGATSAAGGATVLPLTISGRGAGVGPGGNILTGTLTPIKNASGITLGKMMMAPASSAPGADGSSTSGATVTGFQRTWNPVVASQSQLMKIDEKGSAATIYYESMPASASTGVLSLTTTTVTQSTQAQAQLVSSAGGSLSVSSLPFASHATAGAGSGGGGSQATFTVLPSGAGGTATRTIGHQQLIIPAGPNSAPPQHMVIPLHTSVKVTTGAGNPQQATASGALVSSFMRKRDAEGSPIRAAKNLGPTLLSMASNNSGQNMPPAPGTTFNIQPVSVTVPQSVGSGLTVEALAKKERERVTHGVASSAASVPATVGPVNSTRNSRADSPASSDGSTTVSANSSPGVDQQLQDRIGDQPATGGAGGRDNSTHFNPINEMYSSHQSIQQNLGHSSLGARSGSSAFVDVQAPTPQQQQPQQVPHLVGSTQMQQGTRMNGTGNSSSSSYDCSSRKKPRRSTNDSQHSTQSQASLSLPPPSSEPTPPAGASYMQKHNNGGLLVTAATPGVAPNSAPGDANHRNSTPAVAGNKENANPVDFVIRRPRNCALLNTYKPTHKLANNHFHRYTDVKPREERRATVIDLANQPNVQGKINGWKIYHLRSQMEDLNESEVFSLGRLETMLQDLEKDKEKHSEIERVTELLKGNIQRSKIITDGINEAQNQLMKIFEHKPHVSNIITRCASKRNFKKREKI

SEQ ID NO: 22957 - DNA, 2919 bp, DROSOPHILA
aaaaatacaaatattaaccacaaaggccttgctcacatctgtggggggtggttgtgggcggtgtgcggtgggtggtgattggtgtgcagtcgcctgtatttatgcatttaaattcgtccgtttctctatacgtatgtgtgttcatattgaatggataaaagggatttgcgtttatttcgttctgcgtctggcctgttgggttcttatgtatatatatatatatatatccatatacgatctgtctatatggccgatgtctgcggggccatttcggaacagaacgcaacacgccggaaacatttttgttgtgccatttgcattgccatacaattttgctcaacacattggcagcaacaacgggcccatttggttttatatttcataaaccggggggatacgacgaaggtttctgttttaagcggcaagtcagaacgtataaaatacaataaatatgtcataaaattgtgggttgtcacaaacactttatatacatttgtaccgaaaaccagtatgggcacctttctgaaactatatattcattctctatattttcactattttactagctatttgtatacagcgtaagttctttattacattctttcaatttacgcttgtccagtccatcttaatatttacttgttcttaaacgagcaccggaaatgatcgtttgagctgtgctaattgaatgaaatgttagactcggctgggaattaaaaaagaactgcgtattttcgttgactcatttcacatttttaaatatatttggtacctggtgattagctacaatttatgcaaatgcaagatcatacaaatattttctacaatggcatcgcgacgagagcacgtctgagtttagaatgcaaatattagtgcaattgtacgtgtctttggcggtggcagctcctcaataagttaaaataaactatgaactaaacgaataacagttattagcacgtgcacgcagaaatgagatggcaccagtggtggacaggacagcctactggaccttcttggcctccttgggcgcaatgggtagtcgttcgatggcctccttgtacagctggttaaggccaaaggtggcgcgcacattgtcgctggagaagaagaacttttgcagtttacccttggaatcgacgcagggcctgcggtccgtctccttgccctgttggaacaggatcacagttggtagctgtcgggagaagctgctgtccgagatgcgatacttttgggccacgtccggaaagcgtccaatgtcaatcttgccgaacttcaggtggtccgtgttgtactcggcggagagctcagcaaaaacgggggcgaagttcacgcagctgggattccacaccgtgtagaagcagatcagccagctggttcgcttgtccctggccaattcctcctcgaagacctgtgcgttgcggaagtaggtgatgtgctcgggtccgcgatacgagggctccggcagcaccatgcccaccaggacgcatagaagcagaaagcccaggccgtagcggaagtccgcgtaggcccacaaaatggcgttggccactttggtgtagaggaacgacgaggccaagtagttaatcatggtgacactgcccgttttgcgtgaccgtatcatcaccacgattagcaggaagaacaagatttccacctcacgactgtccaggtcgcatgcttcatcctctccggcgagaataaataggcgggtgcagatgaactgcgtctttttggccaaaaggtacgatatggccaggagtatgttaacccagtagtatggcttggccagcagagccatctgcttcttccacgtcatctctgcgtccgggggctgaatgcgctgatctgggtcacgattttaattaacaatttcccgagtttttcttttcttgcttttgacagccaattgttaattttagcctcgccgttgactagaaattagcagcctagttgtctggcacgggcgttgccacctgataaaagaacagtggcactcttgtcagtgctggaaatggtattagttcgttggcgccttttcaaattcaaaatcatcaattaacagtttgcctttcttaaacgttctttgatacgttttatttacttatatgcattattatcttacaagtatttagtatttagtatttagcattttttttaaatgataattaatcaaaagttaaaaccataaacagaacttgggacaaccatatttgtttgcccgaaaaccaaccgaaactgataagcgagttattgttacatcagcattttgctaaagtcattgagagattgttgacctagcacacaaaggccactgcaaaaaaaaggtaaaaaaaaggcatcgaggatcttcattatcggcacacacgccgagttcaaatctgcgaaaaagcttggctctctacgtgatctcagacgctcgtggcttccatcagtcgccttatcacccaaatattattttggcctttttttttgtagttcctaaattaaatgtgtttggaactgtgtgaatactgtgagaattttgtacccacttcatagagcatcaccagtattatcgccatcgtggctgactctccgcgttgtgcaaagattaatttttttgtagtaaacactgtgcgcgtcactggactaaacgatttatttttaatcgtattattgagaccaatttacgagggtcatctccatgatccccatcggatcgatcacccacctctttactggtttcactagtaggccgttctttgtttatacagcgattattttatgttcaatacactggcaaataaagtgagcttgcttctatttatagaatattttcaactgtgttattagtaacctccttatcgaatcaaacaactttctcgtggctttatatttaaattcaaccaatcattcactttatagtaaaaaaagtattaa

SEQ ID NO: 22958 - DNA, 919 bp, DROSOPHILA
ctaaaattaacaattggctgtcaaaagcaagaaaagaaaaactcgggaaattgttaattaaaatcgtgacccagatcagcgcattcagcccccggacgcagagatgacgtggaagaagcagatggctctgctggccaagccatactactgggttaacatactcctggccatatcgtaccttttggccaaaaagacgcagttcatctgcacccgcctatttattctcgccggagaggatgaagcatgcgacctggacagtcgtgaggtggaaatcttgttcttcctgctaatcgtggtgatgatacggtcacgcaaaacgggcagtgtcaccatgattaactacttggcctcgtcgttcctctacaccaaagtggccaacgccattttgtgggcctacgcggacttccgctacggcctgggctttctgcttctatgcgtcctggtgggcatggtgctgccggagccctcgtatcgcggacccgagcacatcacctacttccgcaacgcacaggtcttcgaggaggaattggccagggacaagcgaaccagctggctgatctgcttctacacggtgtggaatcccagctgcgtgaacttcgcccccgtttttgctgagctctccgccgagtacaacacggaccacctgaagttcggcaagattgacattggacgctttccggacgtggcccaaaagtatcgcatctcggacagcagcttctcccgacagctaccaactgtgatcctgttccaacagggcaaggagacggaccgcaggccctgcgtcgattccaagggtaaactgcaaaagttcttcttctccagcgacaatgtgcgcgccacctttggccttaaccagctgtacaaggaggccatcgaacgactacccattgcgcccaaggaggccaagaaggtccagtag

SEQ ID NO: 22959 - protein, 271 aa, DROSOPHILA
MTWKKQMALLAKPYYWVNILLAISYLLAKKTQFICTRLFILAGEDEACDLDSREVEILFFLLIVVMIRSRKTGSVTMINYLASSFLYTKVANAILWAYADFRYGLGFLLLCVLVGMVLPEPSYRGPEHITYFRNAQVFEEELARDKRTSWLICFYTVWNPSCVNFAPVFAELSAEYNTDHLKFGKIDIGRFPDVAQKYRISDSSFSRQLPTVILFQQGKETDRRPCVDSKGKLQKFFFSSDNVRATFGLNQLYKEAIERLPIAPKEAKKVQ

SEQ ID NO: 22960 - DNA, 3596 bp, DROSOPHILA
acgtcgtttcccaagtcaccacaaaagatgcggaagtcatcgtcgggccagtcagccagcgaagtatcctcccacacggtgccgccagcgatacgcaccgtcttgcggtctttctttttccgctctgttgtctggaaggattgcagcgccgatgatgcgcgcgctgccttaatggcctcctctgcaatgggattgggtccagacttttccgccttgagcttcttcagcttctgcgttacgtcaaaagagacggcgttgatgtcgatggagggcgcggcggccacggtgggcacgtgcacagactgccggcactgataaagtttgggggcgctgctcaggactacgggagtggcagacatagccttggaagaaccacctccactgcccgtaggcacgaaggtggacataaacgtgggtggaggcggcatcgggggcgggggtacggtcagacgcgatcctccattgccctggtgatgctgcagcttgtgctgcgagttttggtacgtattggcggctatgatcgggcgcacctggttgggcacgaagagattgcgggcggggggcttcgagatctccgcctcgaagcgtgagagctcatcctcgatgttgcgacgctttgtacccatttgaagtggggttttctcttttaaaaaatcaaatcaaagcaagtttttacgaaagtgctgcagaaaactcggagtactaaacaaatatcgatttcgttcccaatcgattgcactatttttattttaaaggcctgtttagacatgtccacagaatcaggctctatttgcaatatataacaaataaaacagttattttaatatcataaaacgaagacatttaatatgttttaactatttaagaaaataactgcgactttttacacttgattacgacaagcacctttccgaacgggccttgatattttctgcaattgttgaccgttaaactagtagacgatagtgtagtgtgacggttcctcattagctggcaaatgccttatgttagtaggctaggagtggtatttcggcttcgtcgacaccagcactgattcaacttcagaattactgttttcttttagacgatctgataaataatactggaattaaaatcgccggaaaagctctagctgtgatagaaagtatcctcagcaagcaaaataaacgcagaagcaatattcctcatacacacatttaaagaaggagcacgggcatacccacacaagcgcacaaaaagtcgaggggcgacagcaaaaacaaaagtgtggaaaatcacaaaaccaataaatttctccatttatttcaaagcactgggccccaggaaaatgccaaccaaggagcgccacatagccatgatgggctaccgatcagtgggtgagttttcccagaaagttccgccagaagcactgacactgttgctgctggcactggtaattgcgtagtatttcgacaacagcaagaactatgatcaattgaccataataattacgcttcgcccgcaggcaaatcgtcgctatgcatacagttcgtggagggccagttcgtggactcctatgaccccaccattgagaacagtaagtgtcacatcccattccgtgcggatttcttagaagccaggctgactccatgcttcgatagcagtagcaatgcgtaatgatcggtaattcccattcgcagccttcaccaagatcgagcgtgtaaagtcgcaagactacatcgtaaagctcatcgacacggcgggccaggacgagtacagcatattcccggtgcagtacagcatggattaccacggctacgtcctggtgtactcgataaccagccaaaagtcttttgaggtggtgaagatcatatacgaaaaactgctcgacgtaatgggcaagaaatagtaggcttcttccccgtgggttccgcttgagagctaagctaatcttttttgcctttcagtgtacctgtggtgttggtcggcaacaagatcgatctccaccaggaacgaaccgtttccacggaggaaggcaagaagctggccgagtcctggcgagctgcatttctcgaaacgtccgccaaacagaacgaggcaagtaccaagacgaatcacactagctgaatgcaactaaggtacttccttcgcagtccgtgggagatatattccatcagctactgatcctcatcgaaaacgagaacggcaatccccaggagaagagcggttgtcttgtatcgtagggcggctgagtagctaaaactacggccgaactgttggaaatacggcaaatcgctatggcaatacgaaaatcgattatctcttatctacacagttgggtcagcgtgcatggcggggccgtaccctttgtgcgcagcaggaaaatctaaaaatctaatagacctagtattcttaagaccacacagcaagtaaccaatatcaagcgatctgaatgcgtccgctaaacgctgcccagcaggttttgtggttcgcgtctggcgcaacacaacaggtttaagttagtacgttttttttacaacaacaattcagttacaaatttcatatacaaattctgcaaacttttagtttcaatttaaatataatttttcaaaatactattcaagattgtattttaatggtcaacattttcgattgtgaaaaatatagaggttgatttactaaagttacaagtgcgtcgagaagacctgccagttgcaattccaaaaagctggatttactttatctcgtccctataactgattaaataggaccaataccttaatgatttctatagattcccaaccgttgtgaattctctggagaccaaggttcagcaagtaaaagaactgggaggatctcggtatggttcttaataagagtaatttcaaaccaaattactatttggataaactgaaagactcacctggccactctagcaatatctgcatctgttagcaaaaaaaggggtctttaaattttaataccgctatttcttatgtcacaattggtcggacgaatttgattgaattaagatttggctggcttaatatttctaaagactgattatagaaaaaagacatagaaattatttcgcattaaaccgattatgaataaaaatatttcttgtcttacttatcttaaatctaaaatgccggctaacagagcgttgcgcggactaacagtgctgttaactgtcagctgccataacccaccacgaaaatagcaaatccaccacaacgcgagttccaatcggaccgagagttaaatgttttccgattttcaaacagcgaacttgtgcgtgcgttaaaattaaactcgttcagcatttaaatcgtgtgagatctttgccttttaacggtaatttaccaaagcgagcgattcgtattaaatgtgaatgttccccatgcagaagaaagcgagcttgtttttcttctctattttctgtattgcaattgtttttttggctgactttggctgggtctgtgtgtgtatacttgtgcgcaatgcgtgggtattttctcagttttttgttctattttcaaattttattgctctcgcataatggtatacatatgtacatcattatgtttgaccgttatttcgaatctccaacaccg

SEQ ID NO: 22961 - DNA, 1250 bp, DROSOPHILA
ccttatgttagtaggctaggagtggtatttcggcttcgtcgacaccagcactgattcaacttcagaattactgttttcttttagacgatctgataaataatactggaattaaaatcgccggaaaagctctagctgtgatagaaagtatcctcagcaagcaaaataaacgcagaagcaatattcctcatacacacatttaaagaaggagcacgggcatacccacacaagcgcacaaaaagtcgaggggcgacagcaaaaacaaaagtgtggaaaatcacaaaaccaataaatttctccatttatttcaaagcactgggccccaggaaaatgccaaccaaggagcgccacatagccatgatgggctaccgatcagtgggcaaatcgtcgctatgcatacagttcgtggagggccagttcgtggactcctatgaccccaccattgagaacaccttcaccaagatcgagcgtgtaaagtcgcaagactacatcgtaaagctcatcgacacggcgggccaggacgagtacagcatattcccggtgcagtacagcatggattaccacggctacgtcctggtgtactcgataaccagccaaaagtcttttgaggtggtgaagatcatatacgaaaaactgctcgacgtaatgggcaagaaatatgtacctgtggtgttggtcggcaacaagatcgatctccaccaggaacgaaccgtttccacggaggaaggcaagaagctggccgagtcctggcgagctgcatttctcgaaacgtccgccaaacagaacgagtccgtgggagatatattccatcagctactgatcctcatcgaaaacgagaacggcaatccccaggagaagagcggttgtcttgtatcgtagggcggctgagtagctaaaactacggccgaactgttggaaatacggcaaatcgctatggcaatacgaaaatcgattatctcttatctacacagttgggtcagcgtgcatggcggggccgtaccctttgtgcgcagcaggaaaatctaaaaatctaatagacctagtattcttaagaccacacagcaagtaaccaatatcaagcgatctgaatgcgtccgctaaacgctgcccagcaggttttgtggttcgcgtctggcgcaacacaacaggtttaagttagtacgttttttttacaacaacaattcagttacaaatttcatatacaaattctgcaaacttttagtttcaatttaaatataatttttcaaaatact

SEQ ID NO: 22962 - protein, 182 aa, DROSOPHILA; identical to SEQ ID NO: 216

SEQ ID NO: 22963 - DNA, 9392 bp, DROSOPHILA
atcggtgttcttttcagggatcttcgaatagctgggcaccagttgggtgaataaagccccagcttcataattgcgttgcacgctgaaaagtataaataatgataaataaaactaagcttgatgattcttggttggcttacaattcattccatttatgggtggctctagcctccaagtggtgataacgtgagagtactgtagtgttggaattacgttagatataaatattgctattgattcgaaattactcacaaggcttctgctgacactctcccacatttactggtcggttacaaattcgtttcctgtcaatgtctcctcgtcggtttgccttcgattgcttggatgttgagaaattatcaccaaggctgccctcaccttcgctgcttatggagtcctcattggaatccactccttccgaatcatattcctcagaagattccttgtccttggtcaaatcatagtcggatgaatcgccatcgaagtcgttctttgcggaagctccctctcccgacttttgtgttgtcagggcttcgccaattttctttaatttggtttcagctctgaaggtaacaacattgttttaagatccaaagacaaatatattatttatgactcacttaatagtagacttcctcttggcccgaccagcattactaaaaacggtttctttacaatctccatccgcatcttccggatcttcagtgacttggggcgctatgcgctttggacaagtccgtatatggaccggaagtgatagtttggtataggagcgctggcaaaattcgcactggaaacgctgcttgttgccacatccctccaaatggagcatcatgcccaagtacgagcccaattgatgattacaaaggcgacaagttagttttcctccgtttttctgaagatagttcttcatcattgtcattatgccagaacgcgtgatattctacaaaaaaaaagttctagtttagattgctgtagcagtttatataagttaacctaccttgggtgtctctcccacaagccaaccaactccataatgctctcctatatggcgctgccaattgttcttatcactccgcaccagacacaatccacattgcagaggaccctgtccttttccatcattagttaagacttcgtcggtgtccaactgatcccgctttcttatgagcagtagacgaagattaaagtcaactactctttcggtttccgaactttcctcagtcttcaactttttggctaatccagtttctatatcagaaggagcagcgcgctttcttcccctttttgagggtaccaccttcggttcttcacatattggcgggatgatttcaatagcatttaaagaatcagatttacttgattttggtattgtggtgtcagctggtacgctactgatgttactccttctgcctttcttaggaaccgattccagaaccgcactttcatcggaagcgttaactgatgatatcggcgtgtctcgtgggactgaacctctgcgagttgacgcctttcgtttgatggggacctccacagaatctccttcaactgcctcaggatcttctgacgctgtggtaagcattgtggttggagtatttgtagctgctattgatcgcgattgtcgttttcctcttgaatttttagatgtagtcgggtctagctgttcttttggggctcgaacactttcatctctattctgttcatgtaatttctcaggttttggctgacttactggtggaactattattttggatgttccactttgggattgccgttttttcctactttttggcaaatcttttgcttgattggaatccttacacgcatcttgttcattacaggaatcctttacaggattcagttgtacgtctccacttggtttctccgaggaatcatatttcgcctggcctaaatcttgagtaacagtcgatatgctaggatcggatacattttccgatttagaatctgcgagagctttgggttcagatttagctttactataacgagattgccgttgtctagttggtcttatcgaactttcagctttacttgatacatctgaacctttaatagcttcactttctatactttcaaagtgtttaatagttggtgaaccttttatttgtggagatttatttcgagtatgccgcttatttttggtatcatttggctctgtcacaacgtcttccatctttgatgtcgaattttctgatgatgagacagtatttattactggttcaggctgaatagcaggcacttcattattgagtgaagcacgaagtgattttctagttccttttgattttacggatacatccggaacgtcatcgagcttttggtcctccggcttctctgatgaatccatcgttggaggtaaatcgtcttttgaagatttcacaccgtcctctttaagatctttcatttctttcttagaatctttagaaactatacaacgagtttttcgttttgctctaatcgcagtgttttccgcagtgatattatcgatcggatttcgtgttgaatctgtgtcttctgtactatcaactgtcgtcaattgttcaccatcttccaaatctctttctgtagctttttcttctttcttcgcgcaacttatgttttcagaatgtttttcagactcgtccaattttttgttatgactcccagactttctttttcctctagatcttaaagatgagactggtttctcaggcgatacttcttcaaggtttttctttaattttgcatttttctgatttgtcaaagcttcgggtgatattagatgttcattttgcttatcagacgcattaccctcttccaagagtcgcaattcagtattttctgaggagcctggtgtttttaaaggactactagtcaaccgcttttcgtttatcttactggtagttgaactatctttaacatgttcatctgtagtcattaaaattgatttggttgacattctcctgctcttttcggattttctgtcaagagttatggaatccttttcctttatcacaggctgtttttcatctgtaacacacttactttcgctggaagcacagaaaggggttatttcgctatgatgagacgatgttgcttctccatctgttttgagtggatcatcaattctcgaacagtctacagttgcttcagtaccagattttgaaggggaaagtacttcatcgacaaaaggcttctcattttcattaacgagctttgcccatgcagtaacatcctcttcactcgttctgctgtcttctatcgacatgttatctccaaaatccattggactagaaggacctgcatcgctgctatcggaatcatcagaaaatgctcccacaacctggtgacggtcaaaagtaaacttagaatccgccgcagagttcttcactggttgctgtatctctatagacggctgctcctcctcggtctcatcgtaatctggtgtagcgtcatcgctgatgtccgtttcattgatcttcatttgtttcactcgctggcttcgcactggagtcttagagcgtttcccttcgttgtcatcgaagcccagaaatatggagccatcatcatcacttgtgctggaagttggaatccgatttccagcattcgcgctaactggatgaagaaactcaaaatgcacgggcttttccgacggatttttctggccaacttttgtggatctcttgctgagcacgggacgtgtcttaacaagtttcttgcggggtagcgctttagatgcttcttctgttttagaagttggcgatagctttttggtttgtggcaccaccttttcggccgtcaggtggccaattaaattctgtattcctttggcatcaactgagctatctacactggtatttaactcctgcgagtccttacggaatggtaactggggctcaccctgtggggcaggtggattttgtgagaggacatcaattagggagacattactgcttgacgatgcgggctgtggaacctcgaagtcttcctgactactggtcttgtgtgtagatttattcttaggcattttgggtgggtggtataactgggttaggtctcgttccgatgatgattttgactgaattttatcttctttttggtaacttatttcactctcatcatctttgtcctcatgggcttggcttttcgctgaatcttcatcttgaactggactgatttcttcttcacactgcttctcatctgctggcacctttggattgtttttaacactagataaattatgatttatttggtctgagctcgtgctagctgaattgtcatttacctcgattcctgggactccgtatcgatcctccatcaggctgtgatcgatagccatcgcctgctcgtcctcctcctcaaaatctaacttggctttcttcacttcaattggcttttggatgcttggtcttttggtgcgttgcactagattaattttagcttttttggatctgataggtgcccttttcacaggaggattgacctcctttaagggctctggatctgacgctgtcttgacctcttccaaaggcacttgtgatttttcgtcacatttttttggcaaagttgtgataacagttgtttcatcgttggcctcttgaattgaggtctcggttaccgaagatttcacattttgcaattcgcttgcagtggtattatctactgggtttgggaagttattgtgtatattagtgtcctccagagctgagtctcccacttgtaagtccaccaatggtgtactcaatgatgttacactgctttgcatttttactgcgttcgggctaatcctcagtacatttgtactgtcgctgcttatatccaaagtagcatgcaatatattcatatcgtccattttaacaatctttccgatgggtagctcctcctcctcgggttgcgtaaccgatgaactagcaaacgaacatcctccaaatccaaatagagcactcaatctttgctcttccggtgaaagatccataaagctgctttcatcgagcggattttcagcggtcaattgagctatgaaatctacagcggattggattttatgctctggtgatgtggccgcagaagaactcgattgttcttgactcactgctgatgtgtccgcttgagaatgcatatcacctatttctgtgttcggttccctattcaatttggatattaaaggaacagattgaaccaagtcggcgttcatatctttaggtatgttttctggttcaggcaaatcaaccaggttcgattctgtggtaacctcagcagttaaatgccctctttccgaagttataggaatatatacaggagtacttgatccaagtgcattcacctctggataattgattggttcattaaaggacttaagagggcttgactcggtagtcggatcaggagttgagggaatatatacaggaaaatcaattgggttagcaactgccataactccttccgtttctaaattggaaactaattctagttccacggaattagaagtggcctgatttggttcagacgaataacgatttccaggtgttgtaggcactgatgtgggaaagtctattgccttgtcttcagtagactcattcgattcaataattgtttgttttgttgattctacaggtaatggatttgaacgaatacttgagccagctgaaaagtctgttgctttatttggctttggattatacaaaggagcaatatttcctttcagagttggtgatgaaaagggcgacgttcgttttggttgaagtattgtgttaatagtgaaatgagtatccattgtggaaataacatcctttgaattaagtgttttcatagcttgaggttgtttcacctgatccgcctgattacgaatctctttggccatctcggccagtttttcccgtgaaaccttaaacttattggcgttcataataaccttgcccttgatcactttagattggatatttggtgttgcagcgctatccggagaatttgtagcttccaccggagcattgggcagccgaagcccactcaaatcgattttctcgttgggtgccaacaccttatgctccagcacaattagcggcggtgttggactcctatgaagttgtgtgggaaccgtaggagctgctcgagctataggaacctctggaggtggatatggttggctaaaaacattcgtagtttgctgtactggaatcctctgtggacttggggaaacttgatgcactgtcccgtgcgggttcactaagggactgtcactcgatacgcacatggctcgatgtttgggcagctgatttaccaaattgagcaaaagtggcggctgcttttgtcggacagtcaagtccgccttggcaatggacatggaagaggctgccggagctggggaaatcccgccactgcgaggagctgtttcgtggcaaacaggtggtggcatcttaggcgctgctttggaagttgtgggcttctgctgagcctgcgtgttcgtgattaagctcttgtttagtattctgttctttaatagcgccttcacttgtttggaacggtcaccatccgttggatttggagtcggctggatgggcactatcttctcgatgtgttccgagatcataaaacgctttactagaggctgaggtgctaaaaattataaaagtgaaacataattaataaaggaaactataagcagaagaacttaggagcaaagttaaaggagcacagttttaaagcgaaataagccatcttatacataaaagatgcaattcattgttaaagcaaacattaaataaaaccatatagagcatgtattagcaaaaacaatcgcacacacaaacggcagtttgaccgcaatgggatttgaacccgggccaaaaagggaattatgttgcctcgcatcgacgcttcgtccctaacctcattttgagcgcgcacttgacgattgaaccaccgaaagagtacgaattgttgtggcacgagtgggtcttgaatctagtttgccagacgagtagtcaaaaaaaatatttaccctttcaagggtatcatatttatgaattaagctcattatccctattttacaattaagtgtaaaattttatttgcttttgaccaattaaattttcataatttatggctttacgtagttagtactctatcacacaacaacaaaaattaaatgattattgattaaactcattattcaattgttaaaatttaaaaaaaagttttcgttaaaaactttttgtgttacatttaacaacaacgacaaaaatattgaagtgttctagtattagcagtatatttcatctcatttcaaagaaaagtaccaactaatctaaatgtcccgaattaatttttttttggttttttaaatttatttattaaaagaatattaaaatatacataaaatatccttgtaaaacatgtgattctcttggcttattaaaatatcgatcgttttaaataattaaataccaaattatgttattcaatataaattttattggcagtatgttttggaaataataacgtcctgtttgacaagtgaacatattgtagatgttcagatacagatacagatggttagccatcctaatatttctaacctatagacctgaatttttaacaaaaatagacttttttaaactaaaaaaaattattttaggttgccattcgaaatacgtaaaaaataaaatatatcgagatacacgaaaagaaagtgaaggcgccgcactcactgcgagacgaactcagaacaattaatacaaaaactaactctttgacaatctgtcggcgtctcaatcagttgcaccatcgttttggttttcggtactgtgcccaaaactcgtagaagcatttagacgattttcgtatcacttggtacaaaacccctgggtttgtaacggttttttgggcgatgcacagcttaaagcaaatatatatatatacaagtatgcattaccaggctgacgcaattgttgttgtggcgactgcaatttgctctctggcgcagttggcgtcgactgcgctgcggcagaggtggaaagactggtggacgatggggcgtccaccctcttggcatccagcttctgcttcctaagcacctcggccagctgcctatcgagtccagcctccttgagcttgttgaaatccagctgaatcttcttaattattcgcttgggcggagctgcagcagttttggtggcgtgtggaggaggggcgctggtgggattaccgggcttcggttgattagaagtggtggtcattggcgccggtggacccatgatgacctgtttgctggagttgtccatttcgcggttactttaaaaatcgcataagacactggcactgtttattccacgaaaatgacgacagaaatcgaaattcttaaacactcgttgcttcgatttttctcaagtccgacgtaatccacgcagtgacatttaaataaaacacgcttttcgaggcctagtacttgtcaccaacactagtttactttagtttagatcgctgtctagacatttttcactttttaaattctaaaaaagatcaagcatgtgcagctcgaattaatagtgtgaccgctttgaaaaagtaaaatattctcaaagcttcggaacgaaaatataccaaaatattatatgtaattctttaaaaaaacatcgcaaaaggaatatataagttattttatgtatattacagtttgcaaaaatttgactatcattaagaattttaatggatttatgaaacattctattatttatttaatactttaatcctgcacacgaactatcgattgactctgataaactaccacccctaaccgaattggcgtttcttgacaaccctgttctgtacaacaaattttcatgaaattttaccaacgcaaaacgtttttccttcgtgcggttgaaaactaaaataaagtttacaaaatggacttccaaaaccgcgccggcggcaagaccggcagcggaggcgtagcctcctggtcggagacgaaccgcgaccgcaaggagcgactgcgtcaactggccctggagacaatcgatctgaacaaggatccgtacttcatgaagaaccatctgggctcctacgagtgcaaactctgcctgacgctgcacaacaacgagggcagctatttggcccacacgcagggcaagaagcatcaggataatctggcaagaagagccgccaaggaggcaaaggaggcaccctcttcgctgctggcgcccgagaagccccgcgtggaaccgaagaagttcgtcaagattggacgacccggctaccgggtgaccaagcagcgtgaactcagcaacggccagcagtcgttgctctttcaggtggactacccggaaatcacggagtccattgttccgcgtcaccgcttcatgtccgcctacgagcaaaagatcgagccgccagac

SEQ ID NO: 22964 - DNA, 5795 bp, DROSOPHILA
tacgtcggacttgagaaaaatcgaagcaacgagtgtttaagaatttcgatttctgtcgtcattttcgtggaataaacagtgccagtgtcttatgcgatttttaaagtaaccgcgaaatggacaactccagcaaacaggtcatcatgggtccaccggcgccaatgaccaccacttctaatcaaccgaagcccggtaatcccaccagcgcccctcctccacacgccaccaaaactgctgcagctccgcccaagcgaactccaaatccaacggatggtgaccgttccaaacaagtgaaggcgctattaaagaacagaatactaaacaagagcttaatcacgaacacgcaggctcagcagaagcccacaacttccaaagcagcgcctaagatgccaccacctgtttgccacgaaacagctcctcgcagtggcgggatttccccagctccggcagcctcttccatgtccattgccaaggcggacttgactgtccgacaaaagcagccgccacttttgctcaatttggtaaatcagctgcccaaacatcgagccatgtgcgtatcgagtgacagtcccttagtgaacccgcacgggacagtgcatcaagtttccccaagtccacagaggattccagtacagcaaactacgaatgtttttagccaaccatatccacctccagaggttcctatagctcgagcagctcctacggttcccacacaacttcataggagtccaacaccgccgctaattgtgctggagcataaggtgttggcacccaacgagaaaatcgatttgagtgggcttcggctgcccaatgctccggtggaagctacaaattctccggatagcgctgcaacaccaaatatccaatctaaagtgatcaagggcaaggttattatgaacgccaataagtttaaggtttcacgggaaaaactggccgagatggccaaagagattcgtaatcaggcggatcaggtgaaacaacctcaagctatgaaaacacttaattcaaaggatgttatttccacaatggatactcatttcactattaacacaatacttcaaccaaaacgaacgtcgcccttttcatcaccaactctgaaaggaaatattgctcctttgtataatccaaagccaaataaagcaacagacttttcagctggctcaagtattcgttcaaatccattacctgtagaatcaacaaaacaaacaattattgaatcgaatgagtctactgaagacaaggcaatagactttcccacatcagtgcctacaacacctggaaatcgttattcgtctgaaccaaatcaggccacttctaattccgtggaactagaattagtttccaatttagaaacggaaggagttatggcagttgctaacccaattgattttcctgtatatattccctcaactcctgatccgactaccgagtcaagccctcttaagtcctttaatgaaccaatcaattatccagaggtgaatgcacttggatcaagtactcctgtatatattcctataacttcggaaagagggcatttaactgctgaggttaccacagaatcgaacctggttgatttgcctgaaccagaaaacatacctaaagatatgaacgccgacttggttcaatctgttcctttaatatccaaattgaatagggaaccgaacacagaaataggtgatatgcattctcaagcggacacatcagcagtgagtcaagaacaatcgagttcttctgcggccacatcaccagagcataaaatccaatccgctgtagatttcatagctcaattgaccgctgaaaatccgctcgatgaaagcagctttatggatctttcaccggaagagcaaagattgagtgctctatttggatttggaggatgttcgtttgctagttcatcggttacgcaacccgaggaggaggagctacccatcggaaagattgttaaaatggacgatatgaatatattgcatgctactttggatataagcagcgacagtacaaatgtactgaggattagcccgaacgcagtaaaaatgcaaagcagtgtaacatcattgagtacaccattggtggacttacaagtgggagactcagctctggaggacactaatatacacaataacttcccaaacccagtagataataccactgcaagcgaattgcaaaatgtgaaatcttcggtaaccgagacctcaattcaagaggccaacgatgaaacaactgttatcacaactttgccaaaaaaatgtgacgaaaaatcacaagtgcctttggaagaggtcaagacagcgtcagatccagagcccttaaaggaggtcaatcctcctgtgaaaagggcacctatcagatccaaaaaagctaaaattaatctagtgcaacgcaccaaaagaccaagcatccaaaagccaattgaagtgaagaaagccaagttagattttgaggaggaggacgagcaggcgatggctatcgatcacagcctgatggaggatcgatacggagtcccaggaatcgaggtaaatgacaattcagctagcacgagctcagaccaaataaatcataatttatctagtgttaaaaacaatccaaaggtgccagcagatgagaagcagtgtgaagaagaaatcagtccagttcaagatgaagattcagcgaaaagccaagcccatgaggacaaagatgatgagagtgaaataagttaccaaaaagaagataaaattcagtcaaaatcatcatcggaacgagacctaacccagttataccacccacccaaaatgcctaagaataaatctacacacaagaccagtagtcaggaagacttcgaggttccacagcccgcatcgtcaagcagtaatgtctccctaattgatgtcctctcacaaaatccacctgccccacagggtgagccccagttaccattccgtaaggactcgcaggagttaaataccagtgtagatagctcagttgatgccaaaggaatacagaatttaattggccacctgacggccgaaaaggtggtgccacaaaccaaaaagctatcgccaacttctaaaacagaagaagcatctaaagcgctaccccgcaagaaacttgttaagacacgtcccgtgctcagcaagagatccacaaaagttggccagaaaaatccgtcggaaaagcccgtgcattttgagtttcttcatccagttagcgcgaatgctggaaatcggattccaacttccagcacaagtgatgatgatggctccatatttctgggcttcgatgacaacgaagggaaacgctctaagactccagtgcgaagccagcgagtgaaacaaatgaagatcaatgaaacggacatcagcgatgacgctacaccagattacgatgagaccgaggaggagcagccgtctatagagatacagcaaccagtgaagaactctgcggcggattctaagtttacttttgaccgtcaccaggttgtgggagcattttctgatgattccgatagcagcgatgcaggtccttctagtccaatggattttggagataacatgtcgatagaagacagcagaacgagtgaagaggatgttactgcatgggcaaagctcgttaatgaaaatgagaagccttttgtcgatgaagtactttccccttcaaaatctggtactgaagcaactgtagactgttcgagaattgatgatccactcaaaacagatggagaagcaacatcgtctcatcatagcgaaataacccctttctgtgcttccagcgaaagtaagtgtgttacagatgaaaaacagcctgtgataaaggaaaaggattccataactcttgacagaaaatccgaaaagagcaggagaatgtcaaccaaatcaattttaatgactacagatgaacatgttaaagatagttcaactaccagtaagataaacgaaaagcggttgactagtagtcctttaaaaacaccaggctcctcagaaaatactgaattgcgactcttggaagagggtaatgcgtctgataagcaaaatgaacatctaatatcacccgaagctttgacaaatcagaaaaatgcaaaattaaagaaaaaccttgaagaagtatcgcctgagaaaccagtctcatctttaagatctagaggaaaaagaaagtctgggagtcataacaaaaaattggacgagtctgaaaaacattctgaaaacataagttgcgcgaagaaagaagaaaaagctacagaaagagatttggaagatggtgaacaattgacgacagttgatagtacagaagacacagattcaacacgaaatccgatcgataatatcactgcggaaaacactgcgattagagcaaaacgaaaaactcgttgtatagtttctaaagattctaagaaagaaatgaaagatcttaaagaggacggtgtgaaatcttcaaaagacgatttacctccaacgatggattcatcagagaagccggaggaccaaaagctcgatgacgttccggatgtatccgtaaaatcaaaaggaactagaaaatcacttcgtgcttcactcaataatgaagtgcctgctattcagcctgaaccagtaataaatactgtctcatcatcagaaaattcgacatcaaagatggaagacgttgtgacagagccaaatgataccaaaaataagcggcatactcgaaataaatctccacaaataaaaggttcaccaactattaaacactttgaaagtatagaaagtgaagctattaaaggttcagatgtatcaagtaaagctgaaagttcgataagaccaactagacaacggcaatctcgttatagtaaagctaaatctgaacccaaagctctcgcagattctaaatcggaaaatgtatccgatcctagcatatcgactgttactcaagatttaggccaggcgaaatatgattcctcggagaaaccaagtggagacgtacaactgaatcctgtaaaggattcctgtaatgaacaagatgcgtgtaaggattccaatcaagcaaaagatttgccaaaaagtaggaaaaaacggcaatcccaaagtggaacatccaaaataatagttccaccagtaagtcagccaaaacctgagaaattacatgaacagaatagagatgaaagtgttcgagccccaaaagaacagctagacccgactacatctaaaaattcaagaggaaaacgacaatcgcgatcaatagcagctacaaatactccaaccacaatgcttaccacagcgtcagaagatcctgaggcagttgaaggagattctgtggaggtccccatcaaacgaaaggcgtcaactcgcagaggttcagtcccacgagacacgccgatatcatcagttaacgcttccgatgaaagtgcggttctggaatcggttcctaagaaaggcagaaggagtaacatcagtagcgtaccagctgacaccacaataccaaaatcaagtaaatctgattctttaaatgctattgaaatcatcccgccaatatgtgaagaaccgaaggtggtaccctcaaaaaggggaagaaagcgcgctgctccttctgatatagaaactggattagccaaaaagttgaagactgaggaaagttcggaaaccgaaagagtagttgactttaatcttcgtctactgctcataagaaagcgggatcagttggacaccgacgaagtcttaactaatgatggaaaaggacagggtcctctgcaatgtggattgtgtctggtgcggagtgataagaacaattggcagcgccatataggagagcattatggagttggttggcttgtgggagagacacccaag

SEQ ID NO: 22965 - protein, 1803 aa, DROSOPHILA
MPPPVCHETAPRSGGISPAPAASSMSIAKADLTVRQKQPPLLLNLVNQLPKHRAMCVSSDSPLVNPHGTVHQVSPSPQRIPVQQTTNVFSQPYPPPEVPIARAAPTVPTQLHRSPTPPLIVLEHKVLAPNEKIDLSGLRLPNAPVEATNSPDSAATPNIQSKVIKGKVIMNANKFKVSREKLAEMAKEIRNQADQVKQPQAMKTLNSKDVISTMDTHFTINTILQPKRTSPFSSPTLKGNIAPLYNPKPNKATDFSAGSSIRSNPLPVESTKQTIIESNESTEDKAIDFPTSVPTTPGNRYSSEPNQATSNSVELELVSNLETEGVMAVANPIDFPVYIPSTPDPTTESSPLKSFNEPINYPEVNALGSSTPVYIPITSERGHLTAEVTTESNLVDLPEPENIPKDMNADLVQSVPLISKLNREPNTEIGDMHSQADTSAVSQEQSSSSAATSPEHKIQSAVDFIAQLTAENPLDESSFMDLSPEEQRLSALFGFGGCSFASSSVTQPEEEELPIGKIVKMDDMNILHATLDISSDSTNVLRISPNAVKMQSSVTSLSTPLVDLQVGDSALEDTNIHNNFPNPVDNTTASELQNVKSSVTETSIQEANDETTVITTLPKKCDEKSQVPLEEVKTASDPEPLKEVNPPVKRAPIRSKKAKINLVQRTKRPSIQKPIEVKKAKLDFEEEDEQAMAIDHSLMEDRYGVPGIEVNDNSASTSSDQINHNLSSVKNNPKVPADEKQCEEEISPVQDEDSAKSQAHEDKDDESEISYQKEDKIQSKSSSERDLTQLYHPPKMPKNKSTHKTSSQEDFEVPQPASSSSNVSLIDVLSQNPPAPQGEPQLPFRKDSQELNTSVDSSVDAKGIQNLIGHLTAEKVVPQTKKLSPTSKTEEASKALPRKKLVKTRPVLSKRSTKVGQKNPSEKPVHFEFLHPVSANAGNRIPTSSTSDDDGSIFLGFDDNEGKRSKTPVRSQRVKQMKINETDISDDATPDYDETEEEQPSIEIQQPVKNSAADSKFTFDRHQVVGAFSDDSDSSDAGPSSPMDFGDNMSIEDSRTSEEDVTAWAKLVNENEKPFVDEVLSPSKSGTEATVDCSRIDDPLKTDGEATSSHHSEITPFCASSESKCVTDEKQPVIKEKDSITLDRKSEKSRRMSTKSILMTTDEHVKDSSTTSKINEKRLTSSPLKTPGSSENTELRLLEEGNASDKQNEHLISPEALTNQKNAKLKKNLEEVSPEKPVSSLRSRGKRKSGSHNKKLDESEKHSENISCAKKEEKATERDLEDGEQLTTVDSTEDTDSTRNPIDNITAENTAIRAKRKTRCIVSKDSKKEMKDLKEDGVKSSKDDLPPTMDSSEKPEDQKLDDVPDVSVKSKGTRKSLRASLNNEVPAIQPEPVINTVSSSENSTSKMEDVVTEPNDTKNKRHTRNKSPQIKGSPTIKHFESIESEAIKGSDVSSKAESSIRPTRQRQSRYSKAKSEPKALADSKSENVSDPSISTVTQDLGQAKYDSSEKPSGDVQLNPVKDSCNEQDACKDSNQAKDLPKSRKKRQSQSGTSKIIVPPVSQPKPEKLHEQNRDESVRAPKEQLDPTTSKNSRGKRQSRSIAATNTPTTMLTTASEDPEAVEGDSVEVPIKRKASTRRGSVPRDTPISSVNASDESAVLESVPKKGRRSNISSVPADTTIPKSSKSDSLNAIEIIPPICEEPKVVPSKRGRKRAAPSDIETGLAKKLKTEESSETERVVDFNLRLLLIRKRDQLDTDEVLTNDGKGQGPLQCGLCLVRSDKNNWQRHIGEHYGVGWLVGETPK

SEQ ID NO: 22966 - DNA, 4323 bp, DROSOPHILA
gttagcatgaccgcattcgaggtggccttaaatccaaagtggaaaatttatagcgaaatatatttttacattacaagaatcttgaatttttccgaaaattcatccttcttaaaaaatacagcaattcgtatttttaaaaatacagttgatttaatttaaattttaaaataagatttaaagtgtttacgtatattattgaatatacatagcagagcaaaccaaaagacgtggatacttctatacccaacgaggttacgaaaaaatcattgatttgaaaagaattgtctgatccctgatcaattctccgatgaaccccattaaagccagatactgaaattggattacttttatataataaattgtttatatattataacggataaaatagtactgtttttctcatataacaacaagttggttaatgttatgttcatatataaaataatacaatttatcaagccgaaagagcaaaattctaattttgtgaccagaaatcaaagcatatgaagaatatgctgcttatgaaagaatttaattagcaacaattccaagcaaatattccaaccaagcacatttgtaatgcccgaaaacaacaataatttcgtgtagagtttcatcaacggaatgagcagtaattacttagttatttagcatttcttcgtaagggaatatagtatgcagcttcttttagtgattttttttcgatgcatcatcataactgggtggcaagttctattagataagacacaaaaaagaagttagacattttttcaatacaatgttccacatcgcttacattataagaaggtggtaaatcattgttgcctgatccactgggcccgccttggttgtagggtgtgttgtaagcacttgctgcagcttcggcttctttggaatctgttaaaatagaaaacaatccattttggtaataaatgttctcaagctcgatatacacagcataaaatttacaccattgcgattcacctcttacaatttatgtttacggtatcaaagctggaaccagcacaacacacatgggtctttgaattggatagaaataatgatgggtgctgccgaatctggctactattggttcgcattttgtgggtaataaagaaaaagttaaagaagaaaccattaaatgtcactaaatcaaatcggatagacttaactacttgaagactcggcttttgttagtaatttgctttgggtaacattgaaacaataaatcttacttgtcgggatggctatttgaggtacagtagtttgcttttaattacactgtaaaataggtcaaaagataaatgcttttttttagattcgggaaataattttgttttgattagtaataggttaatcgttatttggatattaggtgagaaacctgataagggaactcaaaaatgggaaaaaaacaaatataaacactaccaaaaaaggaatattacaccgtcaaatgaattatgctaacaaatcatttattatttggacaaattgaataattttgtaagtgagaaaaataaacagaacgaatgcttctgaatggtttttggatgcctcttgaatactttgagcgtccgaaagcaaaaggtggttcatgatacttcaattaaattcttgataacattttagatctttagatgtttcgactattttaaagatgttcataattttcttgtccttttgctcatatttttttatcttttgctagaataaaaccaatttagaaatgtgcattgtgggagggaaatgttaaaaaagtgatgaatgggatgatgagttctactcacttccagggggcaagctgaagcccataaagctggctccagatgcggcggctcctccagctgctcctgctgcttgttgtccgggtggcggtggtccacctggatagccatttggatttccattcggttgctgaaatccgggggtattaaatccgccaggaacattgccgtatccaccatatggctgtggaccattgtacgtctgagccggagcggcgtacggcggctgtggtggacaatttggggcacatgaagcgtacggcggaggttggacatagccaccggcccatccttgtggcccatagcccggctgctgttgttgctgctgcggcggcggcgctgaaaaaccataccaattgggttcattcgacgacggtgcctgcggctgttgcggtgctggttggtgagcaggtggtgctaagacgaaaaagagaggagtgccccattgggttaaacgaagcgagtgcgtagcgtgaatttcgtgggtaagccaggttgccaattcgcgtagccagcgtgccaaaacaaaagccgagtatagattgggtaaagtgcacgtgcgtttaacttaccgatacccggatacggcggcggattgtcgctcatatagaccgtattcggcgcagggccgctgaatgcgtcatgctgcggcagccagccatagtagccaggtggtggctgatatgccggcggtggtgcctcattccaggatccagccggctgatatggtggcggatcatcaccagccagaccaccgcggtggtagttgttcatcgccgtcttggcggagcgcagtagagcttgaccatatctataagaaatggacttgttaatcagaacattatatattctcttgagtctattcagtattaagacttatcaagagatccgtctaattagttttaatttaggtgcacaatgcacttactcaattgcgccgcctgccttgaaatggagcttgaacttgacctcgcccacgtagtttccatttggctgagcgcgaacctttcccttgatgtagttggccccgaaaacgggctgttcgatttccacatccgaaagagcaacaaacggggcactgaacgactgcatcgaatccgaggacttcttgctattgaagatcattcggtgggaggtgagataaatcctgccacctttggagcccttgaagatgggattgtcctgaccggagaactccatggagacactgtcgctgtggagcagtatgctgaaagtgtaaaagcagttaatttgtgtgccatatttctatcttatcgctggaacataggctaatttcctttcaaatcgccagccacacgtcagtgtttacatttatgacgtcagggatgttcagcattttcagtgttaattaaaggacttttccgttaacttactactctccagcatggatgagcacgccattgttggcgtgagccgtattaaccgacatgtctctttaattttccaactgttttgagtccacaaaaatttgcaaaaatttcatacaactacgttttgtttttctagaaaactgacgacagctgatgattcatagtgaaaagtgtggcagcgccgaaattatcggatatcgatactctttttagggtgaccagtacgagcagtcactcatctctaaatataattagtttttttttatacatacctgtcgtacaattactggggcgttaatatgcgtaagtgataagataatgattttaaaaagcccacaaaatgtgtagcaaagaaaatggaataaatagaaaggtctgggaaattaagaaacaacagtatttgcggtgaattcgacttttatcagcaggtgggacttacgccattttgggcacttgccaccccccagcttttatttcctttttttacctatcgaaaattgaggtgctcagctgattggttattttgttttgctaccggcttcgtttgggttgttatctcttttaaagcaaattacaaactgtgtacattttgcagtaccgctctttgggaccatgccgaatggcgtcagtttgccaaatcacccgaatttcctcaaccaattggcagctgcaatttccacggcggcctcgagcacatctgtcgtgggaaatccctcttcgccccccaaacagatccagaataagatggcaaaacaacaacaacaaccacagggcagtgcgcccatggatctggagaatgagaacgaacactctgcggatgtgagctcctcgacgatgcacaaggaacccaagttgcaggccacatccaactcgctcactctgcccgattcgacgcaactatacctgaatggcttggtgcacacaccacctggatatctgtattttccggccacccaagcgggtggtgctactgcacccggcaatccatcctcggctgcagggggatccacgccggcagcttcagcaaacagcaccgccaatgcgcaaatgctcatggatcctacggccatgatggcggcggcgatgcaacaaatgcaacagatgcactatgcagcggcagcagcagccggaatgaccacagaaac

SEQ ID NO: 22967 - DNA, 1109 bp, DROSOPHILA
gtcagttttctagaaaaacaaaacgtagttgtatgaaatttttgcaaatttttgtggactcaaaacagttggaaaattaaagagacatgtcggttaatacggctcacgccaacaatggcgtgctcatccatgctggagagtacatactgctccacagcgacagtgtctccatggagttctccggtcaggacaatcccatcttcaagggctccaaaggtggcaggatttatctcacctcccaccgaatgatcttcaatagcaagaagtcctcggattcgatgcagtcgttcagtgccccgtttgttgctctttcggatgtggaaatcgaacagcccgttttcggggccaactacatcaagggaaaggttcgcgctcagccaaatggaaactacgtgggcgaggtcaagttcaagctccatttcaaggcaggcggcgcaattgaatatggtcaagctctactgcgctccgccaagacggcgatgaacaactaccaccgcggtggtctggctggtgatgatccgccaccatatcagccggctggatcctggaatgaggcaccaccgccggcatatcagccaccacctggctactatggctggctgccgcagcatgacgcattcagcggccctgcgccgaatacggtctatatgagcgacaatccgccgccgtatccgggtatcgcaccacctgctcaccaaccagcaccgcaacagccgcaggcaccgtcgtcgaatgaacccaattggtatggtttttcagcgccgccgccgcagcagcaacaacagcagccgggctatgggccacaaggatgggccggtggctatgtccaacctccgccgtacgcttcatgtgccccaaattgtccaccacagccgccgtacgccgctccggctcagacgtacaatggtccacagccatatggtggatacggcaatgttcctggcggatttaatacccccggatttcagcaaccgaatggaaatccaaatggctatccaggtggaccaccgccacccggacaacaagcagcaggagcagctggaggagccgccgcatctggagccagctttatgggcttcagcttgccccctggaactttgataccgtaa

SEQ ID NO: 22968 - protein, 340 aa, DROSOPHILA
MSVNTAHANNGVLIHAGEYILLHSDSVSMEFSGQDNPIFKGSKGGRIYLTSHRMIFNSKKSSDSMQSFSAPFVALSDVEIEQPVFGANYIKGKVRAQPNGNYVGEVKFKLHFKAGGAIEYGQALLRSAKTAMNNYHRGGLAGDDPPPYQPAGSWNEAPPPAYQPPPGYYGWLPQHDAFSGPAPNTVYMSDNPPPYPGIAPPAHQPAPQQPQAPSSNEPNWYGFSAPPPQQQQQQPGYGPQGWAGGYVQPPPYASCAPNCPPQPPYAAPAQTYNGPQPYGGYGNVPGGFNTPGFQQPNGNPNGYPGGPPPPGQQAAGAAGGAAASGASFMGFSLPPGTLIP

SEQ ID NO: 22969 - DNA, 4797 bp, DROSOPHILA
tatcaatatagccaaattaataaaagtgagagcaacaaattatgtttagaccagcttttgcacttgatggcttataatgcttacaacacttatcgtatccgacattcatttaactcacgacatacttacacatattacaatgaaattaaaatattatttattacccaccacccactgatgtgggttcattgtgtaaatttattatgatttcctgcatatgcaacaatcaattctcacacttacaaaaataaacagacatttttcaattattcgcccgaacatccatccattcacactaagcattatgatctgagtcaacaggtttgcaattcgaaatccatagcacttgctttgagtatatactcggggagattaatatatttgggttctagactttaggctctagaacagctaaaatcaaaacgaaatcacaaagtaccctatacagtttatatagttctagatatatagtaattagtacagaggagtagtattgcctatagttagaatttgcgcttgctatcaattggaatcattgttcacatgttctttggtttttttttttttttttcttgagcattgtgtatatatactcggaaaatctgacattttacgtatttcattagccacatcaaagcgctagaaaattgatcatcattaaatgtgcattacttgatttgatttaaacggttttgttaagactttcagttggtttttactcatttaactagccaactagccaaaaacctattaactattgaaaattattgttcgcgggcatgaaaagacgaaagagtgaagttaataagtgtgtatgcaatcaatttcctgctttctagcaaccatttttcaaaatctaaatttctgccacttcttggagcatttaatttagattttaggatttgaaattgaagtcaacggaatcttgttaatgttagatatggctgtgtacaatgtgtcgcatggactctttccaagtcttaataaattcaaatatcgcttagatattttcgagcagtgcatctggcgtctgaggatctgtggtcatctcgtcgctgatatcgcccaccgaactgctgaccgtggacaggatcgatgatatggtggcattaatcacctcggcacttccgctggccaccgtactggcgagcgccagagctgtggttgtgataacggtggccagtgccggactggcggtgctggtggtggagctagagctactaagcgtagccagcgtggtgttgagcagtagtggcgccaatgtggtggcccccgtagttggtggactcattgtgctggtgctagtcagcggcagaggatgtggtagatggccatgtccatgcccgtgaccatggaactgttccagcatcgaggcgggcacatagggatatgtgggacacggattcaccagctgcggtcccagcatactctcgaaaacgtatccaatcagagagcccaccgtcagaccaacattatacgacagggtcattatattgccagtgacctccttgagtgttcccggcacctttgccggtgccaacatcatgggcaggctgcctgccaatccattcgtgatgcccagagcgatggtgaagacaaacggcgccgtctcgccggatatcacgggacgctggcggggagcacagcagaggagcaggagcggcaccagcacaatccttagtcccgacagcaggatcagttggcgacgcgaccatggatacggactggcggccagtatcttgccaaccacatccgacgtattaaagcagaacatcaacagcacgggcatccaggagcgaagggcacatgactgcacctcaacctcgatacccggatacagcgagagggtcacacaataggccaaggcgatgcacaccatgtgcgggtagatcacctgggccactcgccatcgggtcacgaatccctcgcggatgtcacccaacttgctgggccggcaacgacgtggcgtgataacgtgttccacctagaatattgggtttagtcaattgacatacttgatatgcgtaacaatgagattgcaccttgaaggccaccgtcgtgggcgttgtaggctcctgagctgggggcgtggccggaagttcgggcagctgtccgagggcttcaatgctactctcgccggcagtcgggttggatagctcgtagacgggattgctaaaactaagggtatttccagtgcctggaggtccaaccgatgtggtcgtggtgtgggtaccgtccatcgagagcacaccatatcgagtactacttggaactccatcaatctcctgctaaattgcacaaagaaatgcgtattttaattttcaagttgtattaaattttaagttgttttttttttgtttttgcgaaagtgcaacctccatcgatcttgtattacccacgtaacaattcacatgcaaccttttatccttaaggaagatacacgttttggttagcacactcacctcatccggccgcaaaacgatcttggagcaggcctccacatggaaccgcacaaacggcgagttaatggtggccacatgcaacaggtagctgaagagtatgtagagcgttgaggtcaaaaagaagatcaccgtggacacgcgatcgttgttaatcagcaatttggtaacgacccgattggaagacaccaggaaaccggcgatactctcgccggccatcaccgcctgggtatactgcttgggcagcatggaggcgaatccatagaagctcgactgctgcacagtacatccgatggcggtcagggcaacagctgacatattcaccaaataggcggtatttgtggcgaacatatgccaagccacctcgcacaccgcgacaaagatcagtgtggtgaaggatatcatgtagccaaagagcactcgcgactggaacggtgccaccgatagcacaatgttgttcatcaaaacggtgccgaaggcaacgaagatgtatgtcatcgacatgtccagggctaccgggcgacccgggaatcgtgcctgccagtagtccgccgcaataatgaaactgcaaggcagtaagatgattaaataagatttaagatagctaaaaacaataatgctttgtaaaaaaaatctttctttttagtcatgtattttaggaagatggatattaaaactataaagaatgtttaaaaaacgcacacaaaatgtatatattaatgaataataaaattaataatatgtactgctcacctattgtagggcaacacaaaaccaatgcccgctgccagtagggccaggtagacggagtgcctctgatccttgggtgcacggttatcgaactccggactgtccatgctgcctggacgcctcaggccggatccggttgtggaatgactgctcctcgaacgcccggaaccacgtccgtccagcggctcataggtggtttcctggccaccaacatccatgatgttgtactcttattttatgcgacgatttccgctggcaaatcctatttaattactccctgtggttcttggaccttggcattattttccactttggccaacttagtgggcgtgagttctgctctgttgttttgcctgccgtacttacatacatatgtacatatagggtgcaagttcgtcgttatacacaaatcgataaacaaaaaacaaaaaacagacacaagtggctgagcaattagccacttggcatttttttaacaccaactatcatctgatttggcggttacgccctttaattgaactgaattcaatagcacattcactatttacaagatatatttcaaccgcttttcaagagacatctgcttgccattccttgcctgtcaaagtcctggcaccgatttctcaccacgcccgccactgcgcatgtggcgtatgattgattttctacaactgaccaaatcagcctgttgttgtctagtagtcggctaactggaattgaagtctacttttgaatgaacatcttcttcatttttgttagcatgaccgcattcgaggtggccttaaatccaaagtggaaaatttatagcgaaatatatttttacattacaagaatcttgaatttttccgaaaattcatccttcttaaaaaatacagcaattcgtatttttaaaaatacagttgatttaatttaaattttaaaataagatttaaagtgtttacgtatattattgaatatacatagcagagcaaaccaaaagacgtggatacttctatacccaacgaggttacgaaaaaatcattgatttgaaaagaattgtctgatccctgatcaattctccgatgaaccccattaaagccagatactgaaattggattacttttatataataaattgtttatatattataacggataaaatagtactgtttttctcatataacaacaagttggttaatgttatgttcatatataaaataatacaatttatcaagccgaaagagcaaaattctaattttgtgaccagaaatcaaagcatatgaagaatatgctgcttatgaaagaatttaattagcaacaattccaagcaaatattccaaccaagcacatttgtaatgcccgaaaacaacaataatttcgtgtagagtttcatcaacggaatgagcagtaattacttagttatttagcatttcttcgtaagggaatatagtatgcagcttcttttagtgattttttttcgatgcatcatcataactgggtggcaagttctattagataagacacaaaaaagaagttagacattttttcaatacaatgttccacatcgcttacattataagaaggtggtaaatcattgttgcctgatccac

SEQ ID NO: 22970 - DNA, 2131 bp, DROSOPHILA
gcaagcagatgtctcttgaaaagcggttgaaatatatcttgtaaatagtgaatgtgctattgaattcagttcaattaaagggcgtaaccgccaaatcagatgatagttggtgttaaaaaaatgccaagtggctaattgctcagccacttgtgtctgttttttgttttttgtttatcgatttgtgtataacgacgaacttgcaccctatatgtacatatgtatgtaagtacggcaggcaaaacaacagagcagaactcacgcccactaagttggccaaagtggaaaataatgccaaggtccaagaaccacagggagtaattaaataggatttgccagcggaaatcgtcgcataaaataagagtacaacatcatggatgttggtggccaggaaaccacctatgagccgctggacggacgtggttccgggcgttcgaggagcagtcattccacaaccggatccggcctgaggcgtccaggcagcatggacagtccggagttcgataaccgtgcacccaaggatcagaggcactccgtctacctggccctactggcagcgggcattggttttgtgttgccctacaatagtttcattattgcggcggactactggcaggcacgattcccgggtcgcccggtagccctggacatgtcgatgacatacatcttcgttgccttcggcaccgttttgatgaacaacattgtgctatcggtggcaccgttccagtcgcgagtgctctttggctacatgatatccttcaccacactgatctttgtcgcggtgtgcgaggtggcttggcatatgttcgccacaaataccgcctatttggtgaatatgtcagctgttgccctgaccgccatcggatgtactgtgcagcagtcgagcttctatggattcgcctccatgctgcccaagcagtatacccaggcggtgatggccggcgagagtatcgccggtttcctggtgtcttccaatcgggtcgttaccaaattgctgattaacaacgatcgcgtgtccacggtgatcttctttttgacctcaacgctctacatactcttcagctacctgttgcatgtggccaccattaactcgccgtttgtgcggttccatgtggaggcctgctccaagatcgttttgcggccggatgaggtggaacacgttatcacgccacgtcgttgccggcccagcaagttgggtgacatccgcgagggattcgtgacccgatggcgagtggcccaggtgatctacccgcacatggtgtgcatcgccttggcctattgtgtgaccctctcgctgtatccgggtatcgaggttgaggtgcagtcatgtgcccttcgctcctggatgcccgtgctgttgatgttctgctttaatacgtcggatgtggttggcaagatactggccgccagtccgtatccatggtcgcgtcgccaactgatcctgctgtcgggactaaggattgtgctggtgccgctcctgctcctctgctgtgctccccgccagcgtcccgtgatatccggcgagacggcgccgtttgtcttcaccatcgctctgggcatcacgaatggattggcaggcagcctgcccatgatgttggcaccggcaaaggtgccgggaacactcaaggaggtcactggcaatataatgaccctgtcgtataatgttggtctgacggtgggctctctgattggatacgttttcgagagtatgctgggaccgcagctggtgaatccgtgtcccacatatccctatgtgcccgcctcgatgctggaacagttccatggtcacgggcatggacatggccatctaccacatcctctgccgctgactagcaccagcacaatgagtccaccaactacgggggccaccacattggcgccactactgctcaacaccacgctggctacgcttagtagctctagctccaccaccagcaccgccagtccggcactggccaccgttatcacaaccacagctctggcgctcgccagtacggtggccagcggaagtgccgaggtgattaatgccaccatatcatcgatcctgtccacggtcagcagttcggtgggcgatatcagcgacgagatgaccacagatcctcagacgccagatgcactgctcgaaaatatctaa

SEQ ID NO: 22971 - protein, 586 aa, DROSOPHILA
MDVGGQETTYEPLDGRGSGRSRSSHSTTGSGLRRPGSMDSPEFDNRAPKDQRHSVYLALLAAGIGFVLPYNSFIIAADYWQARFPGRPVALDMSMTYIFVAFGTVLMNNIVLSVAPFQSRVLFGYMISFTTLIFVAVCEVAWHMFATNTAYLVNMSAVALTAIGCTVQQSSFYGFASMLPKQYTQAVMAGESIAGFLVSSNRVVTKLLINNDRVSTVIFFLTSTLYILFSYLLHVATINSPFVRFHVEACSKIVLRPDEVEHVITPRRCRPSKLGDIREGFVTRWRVAQVIYPHMVCIALAYCVTLSLYPGIEVEVQSCALRSWMPVLLMFCFNTSDVVGKILAASPYPWSRRQLILLSGLRIVLVPLLLLCCAPRQRPVISGETAPFVFTIALGITNGLAGSLPMMLAPAKVPGTLKEVTGNIMTLSYNVGLTVGSLIGYVFESMLGPQLVNPCPTYPYVPASMLEQFHGHGHGHGHLPHPLPLTSTSTMSPPTTGATTLAPLLLNTTLATLSSSSSTTSTASPALATVITTTALALASTVASGSAEVINATISSILSTVSSSVGDISDEMTTDPQTPDALLENI

SEQ ID NO: 22972 - DNA, 3495 bp, DROSOPHILA
aacctgatagagacataacttgcatgcagcgatgcaggaaatcagcggaaggcaacaacagcaggtgcatatatcttggtgcactgaaaggtcataggaattattccacctacaacttttaaatctttattttcagggagacgtgtttccattccttatttctatttcgtatttttattgattttccgtaatgtattggatgttttttggaaagtgtcacactgattctcgcagtgcaaggccataaccagacttgcgtcttaactgtgtggtcatagcccaggcatttggatctgggcatggcacttccacttgttattctactgcggttctcctgcgcgcggtgcgtgaggggaatctcgtcgggaaatggaaaagaaaattaaccaaacatcaggtttttatttacgctaaattatgttcgaagcatctgtagttacactttatatagtcaccgcctaatggttatggccatgacgattcactgcgacattgtcgtgctctgtcgttctcgaattaaaagggcatttcgccggtgatgtaattaaggtatcaaagagttaaagacccgttttggtagagtaatttttgcacatatccataaccattcggagtttattcgcttgaactcgtttgaacttgtgggagaggcatgatattccaggattgaaactatgcatttctcgaacttcagcttattttcctgattaatttatatctggccgtatagatatatgtatcttggaccattactattatctaactcgaaatcgagcaatcattttcagtaggtaacgatattatatgtacagtataattcgcttagctgcatcgatagttagctgcatcggcaagatatctgcattatttttccatttttttgtgtgaatagaaaatagaaaatagaaaaaaaaaaattaagttagctgcatttttaagttacctgcatcgaggcattgtgcaaagtactcgaggcagctaagcgaattatactgtagtatcattgcttcttaaccttatttagctttgttcttagccttctgcaagtgatttgaaccacttttttcaacattaataaaagaccaattgaaatagccccgatcaaggcatatatatccaagttatttgcggctatgaagtccatgtgcaccaagggactctggagatgcgctgctccatggtggcgaatgacgtactccgtccagaagatcaacgattcccgggcacttgctgggcggtctcgatagagggaggagaacttgaccactcgttggctgtattttgggtttgacaagatctccagtacggcagctctaaagggttcctcctccaaagtgagcaggctgagtgtgagaccgaagccacttttcaccatggcatgagcattgccgggctggtctccaaaaaccggcaaagagagcatgggctttccgtggtactgagcctccgaaatacctccttttccggcgtgatttataaatagtttgacgctcggatgggccagtatgtcgtcctgtggcagccaacgggagtagagaatattgtcggacttcccgggcgtcttatcgagatcgtcccacttccagatgacccgctgcttcagattcgagagaacgctaaaaatctttttcactgtatccgccttgatgtggcttccctgaacattggaacccagactgaggagaatggctccatgggtagcgttgccaaggaacttctctaggttcttaggcaggggatctggcttatccttgatctgaatgcctccaatctcaatggcagctggcacactaggccgaatgggtccctcgctggctgcatgggaacagaagaaaactaatgatgtattccttaggatgtccgtgtactcgggcattgtggggtcatcaccaaaaatctcactaaatgggaaatcatttagactataagggattcaagtataaatctacttacttgtagtattgacgatttcgttggtcgatttggcgtagaaatattccgtacagaagactgcttatatagctatccaaacgctgtccaaaggtcatgcccttctccttctccactttatcatggggattgccaatcagagagttcagcatctggctgggtggactgggggccaggacaacgaccggagcattcacctttctagcgaatccaagttgatagtcgttcatgaaatagcccgatatcaccaaatcgaagtggttgtctttgtttaaatacagctcctttactctttggtccttcaggacatctgccatcttcctcaacatggagtccatttgacctgacatgttaagaatggaaatgaaccgattggagcttgtattcttttgtttggcgccaattgtttcgctcctttgctttatttcctccttggtcattggcactgtaaccaggtttatattcttgtgggtaattgttggctccaaaaccgtaacaaccgtcacattgtgtccctgctctgccaaaatcttggccactgacatcgaaattatcaaatgcgagggactcagactgggaaagagtcctaggatatttgcaccttgagctccgtagatcaacaaagtaagtgcaaggacaatcacaaaataacttttcgtacgcccaaccattttgatcatcgatttataactgactgccagtgaaaatcaacagcaggtctgtatatgggattagaaaattgaaatgacacaccactacgtactttgtagtgctaggttgcgataacccaagtgctaataaaatatcatccatgggagttcctgaaacctttcattacacacgtattgatagcacttgcactatcgtcttgaatatatttttaatctttggtgctttaagaagaacacctagaattcctatactaatcttatcaacaaattgcttgaccgagaatttttgttatgctcctaaaatgtacgtcatttatcaaaagattgtcaatgaattgcaatacgtgtttttagtataacttagcttgtcgaactaatcaaattaaatctgtcgacgacctttggccaaaactatctttaacctcataaccgcgaaaattcacccattttgagccgcaaacaattccccaaatcgacaccgatttctagccccccttcagcctccccaccccgcggaaaaccacacataattcataataacaatcattaaaaagtgcgactgtcattagcccagaatctgggttcggaaacaaaacagaaacgccagcacaaatgatggctaaaaacaatgagccgctcgagccggcgactgttccatttttgtggttctgccagatcacgattgcccaaaagataacccagatgttggctagttgttttgggccaaaaaggggagggcactagcatttgggtgcaatttgccggcagaatgcagatctggggatctgacacgaatatcgggttcagatcggagataattagacgtaagctgaagaaggaggtggcccagtaattacccctggaaaacgagcag

SEQ ID NO: 22973 - DNA, 1443 bp, DROSOPHILA
atgtcagtggccaagattttggcagagcagggacacaatgtgacggttgttacggttttggagccaacaattacccacaagaatataaacctggttacagtgccaatgaccaaggaggaaataaagcaaaggagcgaaacaattggcgccaaacaaaagaatacaagctccaatcggttcatttccattcttaacatgtcaggtcaaatggactccatgttgaggaagatggcagatgtcctgaaggaccaaagagtaaaggagctgtatttaaacaaagacaaccacttcgatttggtgatatcgggctatttcatgaacgactatcaacttggattcgctagaaaggtgaatgctccggtcgttgtcctggcccccagtccacccagccagatgctgaactctctgattggcaatccccatgataaagtggagaaggagaagggcatgacctttggacagcgtttggatagctatataagcagtcttctgtacggaatatttctacgccaaatcgaccaacgaaatcgtcaatactacaatgagatttttggtgatgaccccacaatgcccgagtacacggacatcctaaggaatacatcattagttttcttctgttcccatgcagccagcgagggacccattcggcctagtgtgccagctgccattgagattggaggcattcagatcaaggataagccagatcccctgcctaagaacctagagaagttccttggcaacgctacccatggagccattctcctcagtctgggttccaatgttcagggaagccacatcaaggcggatacagtgaaaaagatttttagcgttctctcgaatctgaagcagcgggtcatctggaagtgggacgatctcgataagacgcccgggaagtccgacaatattctctactcccgttggctgccacaggacgacatactggcccatccgagcgtcaaactatttataaatcacgccggaaaaggaggtatttcggaggctcagtaccacggaaagcccatgctctctttgccggtttttggagaccagcccggcaatgctcatgccatggtgaaaagtggcttcggtctcacactcagcctgctcactttggaggaggaaccctttagagctgccgtactggagatcttgtcaaacccaaaatacagccaacgagtggtcaagttctcctccctctatcgagaccgcccagcaagtgcccgggaatcgttgatcttctggacggagtacgtcattcgccaccatggagcagcgcatctccagagtcccttggtgcacatggacttcatagccgcaaataacttggatatatatgccttgatcggggctatttcaattggtcttttattaatgttgaaaaaagtggttcaaatcacttgcagaaggctaagaacaaagctaaataaggttaagaagcaatga

SEQ ID NO: 22974 - protein, 480 aa, DROSOPHILA
MSVAKILAEQGHNVTVVTVLEPTITHKNINLVTVPMTKEEIKQRSETIGAKQKNTSSNRFISILNMSGQMDSMLRKMADVLKDQRVKELYLNKDNHFDLVISGYFMNDYQLGFARKVNAPVVVLAPSPPSQMLNSLIGNPHDKVEKEKGMTFGQRLDSYISSLLYGIFLRQIDQRNRQYYNEIFGDDPTMPEYTDILRNTSLVFFCSHAASEGPIRPSVPAAIEIGGIQIKDKPDPLPKNLEKFLGNATHGAILLSLGSNVQGSHIKADTVKKIFSVLSNLKQRVIWKWDDLDKTPGKSDNILYSRWLPQDDILAHPSVKLFINHAGKGGISEAQYHGKPMLSLPVFGDQPGNAHAMVKSGFGLTLSLLTLEEEPFRAAVLEILSNPKYSQRVVKFSSLYRDRPASARESLIFWTEYVIRHHGAAHLQSPLVHMDFIAANNLDIYALIGAISIGLLLMLKKVVQITCRRLRTKLNKVKKQ

SEQ ID NO: 22975 - DNA, 3114 bp, DROSOPHILA
gcacgagtgttcggtctagtcacttcgcttaatcgaaacctttctttgaaaaagagaccataccgacattcgccattcaattttaaaactggagtgcccaatatcacttactcttgattttttgatttaattgatttgaagttgcgacgatgtggccaggatcttgagacacactttgcccagtgatgtgagattgaaacataactgcacaagatgcatcccaggatcgggaccttaggtggctcacaattagctggtcgtcgtttcgggattataggacaaactttacccagtgctggcttggaaattggcaaaaccgaacaaggtttgtcgtataattgctattccaaactttaagacttcgcttctcactgcgggatccttacactttgaagatgcgttggtaactgatgacttccttgccagcggctagatcttttatacccactttcttgtcctataaacacctacctgtgggtggcgggcgttgttacctgaaagggtcggggctgttccgcgaattcgcgtcccggatcgcgacgaccttagtgaaaattttgcaacttaatccgtggccataaacggattaatgctactcggtttcggggaaaaacgcgcagctgtgtcgcgtataattttcgcagaactgcaattaggttaggaccagaaaggacacgggatcgcagatcaccgtcgggttccccgtgtcgtcccacgaaatcctaggtatcacgcaggattagtcaagaaaatttcactaccttaaactgtataggtggcgactgtacacgatgtatttaaaatccttgagatattaatggctcttgaacaaaccacctgtttaaattgtagttaactcctttactgtatacagtaacataacgaacctccatgatacaatatatattttcaatattgactgtaaattttttaccattaccaactattatttgtatagatctttcccggcctagttagcaatcgaagtttctttgtaattgaagtcactatgggctccttgttgaaaacgcttatttcttacattcgtattgttgaatcacactttaaagacaagggatatacccctaaaatatcacatagaacactatgcattggtatgcaatcctccaaggattcctcctgggaatatcatcgataatcgtgagtgcgtcgagccaccaactgcagcacctatgtatattataatccattagattttatgggtacaaggagtcgttggcttgccattggctacaaccgatctggagtcacttccaatcgtcttggcagaggatgttccggtggagagagctccaaggcaagtaaaaccagatccgtcgacgttcgatattttcaaggtggatcaaagctccaataaccaaatgcagcagaaatccgacggcttcagagtgttcgcaaagaaactacaggatgattatcaccgtagagctggctacaatgaaactaatccgccaccaattactgtgacccgaggaagcactactgctcctaagaaaatccataaaagtggcattcgactatttgcttctccacaagatccacctccgcctgaagctgcggcgccagctgatggagctccagcggcggcaggagcggctgaaggaggtgccgccggaggaaaaggaactgaaccacccaaagagctgaccgtcagtattcaacaattcgttacaaaccaatatggggagaaggaatacaatgcttggggcgtcacttttggtagacatttcttcgacacccgtttcgccgtagctaggcatgaaatacctcgaataactgtggatccgaaaccggtccgtaattactatccaaaaatggacaatctgaccaccgtctgcttgaacagatcgaccatctacaatgagattaaagtcgaaaagtggctgatgcgccacgtctacagcataaagaagaaagtgcgccccttctttttctcccttcgccagcagctctacgagaaaggggattcggagcagtgccacaatgagtcctacactgactggttggagtaccaggagtgcgccattagacgcaaccagcgcatggagtactttatccccaagtatccgctacaccaacttgccattaactaaaggcaaccacatcttggactcactcaacctgtttaaatttcagttagacattgatcatgatcagtcttcgtacgagaaaattgatgggacaaggaatgattatcatatttgtgattcctcttcatttaaatgtaaattcaaaaattttcttgatttatgcttgcagaaataaatatattttattttcttaatttaagcttcttcggaacaaactactcatcctttattcgtcattagcaaaatagtacatttttctatagcaatttaattatatccaatagttcccaacattttcagtgcaaatattttgtattccaaatatattatccatcacacatctccaataaataattaaaacattgatacattggtgttttagcttgcgctttcatttttctggtttatttggtaaaattaaatcaatatcttcatttcatttatatgtttttgttattaccttttttcagatatcatttcttagaaaaacgaacataattgtttcaaattttcagcgttgtacaactagaagaagaagaaaacaaatattgaaaacaagatgaaaaattaaaaagaatcttcttagtttgtaaatagttttcaaagcgaatcttctccaggatcttgtcagtccgctgctgtcaatcatccattcatccatccatctttatccacatcctcctctccacacttctctcttctacgcactcctcaaaccagctgtggggaagtaaaaaagatgtacaacaatattattaagacaaatgttagagaaatgctttctctgccgctaaaaatcgcctcaagtcatgatgttttcttgtcttaacggcgattgttgatctccgaatgccaatttcgatttgacgatagggcgatgttaattggttgaacgaataatgtttaacacatgtttgtagaaggtgtatgatagaaacctgaaatgaatggaaaaccgaattataaacttcagtggccattaattcaaaattagtctcaccgt

SEQ ID NO: 22976 - DNA, 1061 bp, DROSOPHILA
gaagtcactatgggctccttgttgaaaacgcttatttcttacattcgtattgttgaatcacactttaaagacaagggatatacccctaaaatatcacatagaacactatgcattggtatgcaatcctccaaggattcctcctgggaatatcatcgataatcattttatgggtacaaggagtcgttggcttgccattggctacaaccgatctggagtcacttccaatcgtcttggcagaggatgttccggtggagagagctccaaggcaagtaaaaccagatccgtcgacgttcgatattttcaaggtggatcaaagctccaataaccaaatgcagcagaaatccgacggcttcagagtgttcgcaaagaaactacaggatgattatcaccgtagagctggctacaatgaaactaatccgccaccaattactgtgacccgaggaagcactactgctcctaagaaaatccataaaagtggcattcgactatttgcttctccacaagatccacctccgcctgaagctgcggcgccagctgatggagctccagcggcggcaggagcggctgaaggaggtgccgccggaggaaaaggaactgaaccacccaaagagctgaccgtcagtattcaacaattcgttacaaaccaatatggggagaaggaatacaatgcttggggcgtcacttttggtagacatttcttcgacacccgtttcgccgtagctaggcatgaaatacctcgaataactgtggatccgaaaccggtccgtaattactatccaaaaatggacaatctgaccaccgtctgcttgaacagatcgaccatctacaatgagattaaagtcgaaaagtggctgatgcgccacgtctacagcataaagaagaaagtgcgccccttctttttctcccttcgccagcagctctacgagaaaggggattcggagcagtgccacaatgagtcctacactgactggttggagtaccaggagtgcgccattagacgcaaccagcgcatggagtactttatccccaagtatccgctacaccaacttgccattaactaa

SEQ ID NO: 22977 - protein, 317 aa, DROSOPHILA
MHWYAILQGFLLGISSIIILWVQGVVGLPLATTDLESLPIVLAEDVPVERAPRQVKPDPSTFDIFKVDQSSNNQMQQKSDGFRVFAKKLQDDYHRRAGYNETNPPPITVTRGSTTAPKKIHKSGIRLFASPQDPPPPEAAAPADGAPAAAGAAEGGAAGGKGTEPPKELTVSIQQFVTNQYGEKEYNAWGVTFGRHFFDTRFAVARHEIPRITVDPKPVRNYYPKMDNLTTVCLNRSTIYNEIKVEKWLMRHVYSIKKKVRPFFFSLRQQLYEKGDSEQCHNESYTDWLEYQECAIRRNQRMEYFIPKYPLHQLAIN

SEQ ID NO: 22978 - DNA, 5631 bp, DROSOPHILA
taaaaatattaaactactactcaagttggacatgctatgcgattttatttggcctaatggactttggtgtagataatgtgttttttaagtattgctcttgattataagcgttttcatggttaaatgcttttaaacaattcgtttaatttgcaactgaactttaaaattaaaaataaatttacaattccactagtcaaacactggatttttcacttgatcttataccttagcttaatagcatgcaattttacgactaatttttgatggaatccactttaatttggaatacatttctgcggcaataacaagtttaaaataggcgtctagggcaattttctctgtatttcgcacttttcgcagagtggcgtcgaaccaagaaggctgttcgagtaatgtttgaatgaaaaacgtgaatgtactcttcgcttgtgttggtgtccacgaatggagaacgtgtgtgtatgggtatgacgtgacgtcacatcataggaagataattactgtaaaaattgtgtgttaaggcataaaaacaaaatattaaaaaagaaaatgcatactcttttaattatagtcaatatgatgcaaattatttttgaaatcgaaacaatttgtggaactgaaatcatttacgagaatataaaaatatttcctaattgaagttagcttgctgttaagtttcgttactaaactttagctaattaaaaataccgcacggcttacgatgtttaaattaaataccgaaaagattgtgaaaagcgcgcgaaggtgaatttcgtggtacggaccctatatctgtgctcctctaacgcaagcgtcgcttacgggcgacccaaacgagcagcatcgtgccgttgcctcgcacacttcacctcgggatccaatcagatgttcagtgccaactcgaacgaacgcgtcgaaccaaagtgacagcgctgtgtgttcgacgtcggatgtcgtgggctctataaagtttactctccccacaagtcagtgaatgcggttgaaatcagtcgtaaaatacaacaaaggcagcgcagcagtctcgcaaattaaatgtaattaagtgcatttaagttttatacctacgtgcttcgattcccaattttcctgtcaacaaagcgccgaaaaccccgtgctacccaaaatcgcggctgttctcgctcctcttgttttagggaatttcgcgtgtgctgtcatcggaatattcattgtgttgctgcgcgtgtgtttgtgcggagagcgtggtagaagctccaccacatttgttatgtcaataattagcagccccaaaaacgaagccagaaatgcgttgaggttgaggcgttgatcaaatgggaagcactcccggcttgccccgcttttcccgctctgtaaatcgccaaaaaaactgcgcttggccatcacgtggagaattgattttttgccaaaaaacgcgacgacttcatgtgttctttctttccttttgttgggaaatccaatgggagagcgggctctgttttccagtccaattggattatgcccggccgggctttgtccaattgccagattcttgttggcgctgctgtctcctctttttgaattacattaaatatttaaagcatatgcaaatttgaacagtggccccgtaaaaggaataaaggacctttacctggccgcgtcctcaacgtgcatcccccctcccccccgtggttcttgttcttcttcctcggctcctcctgtatctgtagttgttgtggttgttttagttgctgctgtgaaccagatgacacgccttcggtttcccagttccctgtttggtctgccagagatgagagcgaactaatctctttccaaatatattatatttaaaacccctttctatttaagacagtttattcttaaatatcaaaataaccatatgttatatattttaactggtagtttgattgcgaatcttgttcttttcagtttatattttaagtaaatacaaatcaaggcatctgaaccaaccaatgccacccgtcttctctggaatctaatttcaattcttttaacaaaaattctgaagaatgcctgccaaatcccgatatggtaacaacttagcttcgcccggggctcatctctatttggcggcctttcttcgggcttccagcgcctttagtgtcgtgcaaatcgtttttgtggtaaggggtaacccttcttttttcgggggtctgtgggcctgggccttttctttttgcacttcctcgtttttagtgttttactgcttacccaaatgccgacacccgaaatcactcacactcgtcgtggttttcctttgcagcagctgtggcttccatctccgtgctcccattttccacgccttctccgttttccccgattcaaatgcatttcgattgcttcgttatgtgagtgcactcaacttgggagctgcgtgtgtgtgagtgagtgtgtgtgtgtgtggaggaagagggattcgtaaacagtgttttccttgatgccatgtgtctgtaatgcaacggttgtctatcctgcgccgtctcgtgtcttttcctagctgctgtttccatttcgcacgaacgctttcccggcccaacagttccatgtccttgtcacccctcaaaagccgcccaaacacccaaccacccaactgccccttgccccgcccccttttggcccacttgggcgacacgtgctcattatgccgcttcaaattttactccactttccgactgtcgctgccgtgcgactccttctgcggatgttccttgaaacaacagtttgcttaagctatacgatccaaaatcaaaagggtgaattttttaagcctacatttagctacatttatccttgatcaacaggatataggcatgtccatctgttgtccgtccgtaagttcgtccgtttcaacgcaatcaagtctctccctcttaaaactacaatatcttaatgaaactttaccaaaaattgtttaaaaataaaaagaaaaaatcaaaaatgaattggattaaaatcggacgaatataacatatagctgctataggaagagtgggaatattaattgaaaatattagaaaataaatcatatcttcgttgtttttcaccataaatacttctctacttttggcttaaattattaacttacataaatacacattttgtttaatgtacaaaatgccagccaaatcaaccagccatttggagcaatacaatcaaagcacgctattatggcccgtgaccaaatgttggaagggtcacctctactacctctggctcattgataaccataacaatcttgtttgctgtttgcacttggcaattaaaaacttgttgattgtgggcgctccagtgctcgtactctgggtggtggtactctagtggcaactacccacaatatgggatgattccacacagccaaactgcagcagccgcccaagcactaatatttgatttatgtgagctagtccatggtctgtggagccataaaaggttgtttagggagatgagatgatcgcccttggggctgactggtcagtaaagaccactaagaccacttccatttagttgcttattaacgcttggatacttacaaccgtgtatgattaatagcacttgttcgccaaagacttgcacacttatttattttgatttttcaacccttttctgtacttaaaatagcttaactacttagaatagatatatatatatatttaagttctctttcgtaaactgctatgtgctttagtataagtattgtatgatgatacctgtccaataccatggtacaatatctaaccaataattctctatatatatctctctctcttttgttttgcagttgctgataacgtatacaagtggcaataacagaataaattaagccggaaaaaaggtcgaaaggccaaaagtgaaatccaatccggtgtgaaaaccagtgcaaaagtcaacaacttgtgggagtcgagcgttcgtcctcgagtccttgaatcctgccagtgtgctcagtgctttaagtgtgccaagtgtgcgtctgcgtgtgcgtgagcgtgagcctgtgagtgcgtccgggtagcggagaagccacaacgtcgtccacaaaaccatcgacgtccacagccgccgccgccgctgctgctgctgccgccgctgcaggttcgggatcgggacaaggttcgggagcgggtgcggtatcaggaactgctccaggccaccagaggagcggcggacgaagcggccagcgacgtcgcagtagcagcggtaatccacacgccggcacaacgaaagcgaccagtggcagcggtggagctggcagcgccggcggaggaggaggcggcggcggcggcagcggtggaggcggggtcaagcagagcgtcagccggaacagcaacatccggagcagcagctccaacagcaccatggcctctgccaaccatcgcggtggcggcggacgcggtggaggtggcgctgtcgccggtgccggagcggatggcaatgcaatcgtgggcctgcagatcggctccgcctggtttcagcgcaagatcaacctgaggccgcagcaccgcggcgtccacctggtcaccgaggagatactccgacagatgccggagctggcgcacttctcagtgggattatgtcacatgcaaagtgagtgatttcaatgattttctattacctcattgctatcgaaatgttcgagctaattatgtttggggcactgccttccttccaaaatcatatcggttaccaagttttcgctgctaaggttccactttggccatttagcatatcctggcacttttctggcggccctcacaagtgattatccggaatccgaggctcaaatgtcagttaatcgtggggtggcagctggaaaagcgctcttcaattttttttttagccaccacctcatttccatcgcatccatcttattccgctccctgtcgatttatacacttcgaaaagcgattcacaactaggaagcagagctggaagaagtatgctactttactcccacagaaaaagccacccataggggttttaagactctggcaatggaaaagtttccggacattacattttcttgtgcggattgtatttctcggggggaatctggctatggccaaggcgtttgcatttagctaaaagttcagtttgacaaacagcgaaatgtagaacttgcataccaaatcagcacaaattgtcgttgaattcggcagaggagctgccgaaacttgcaggatggcagcatttgaatgggcggctgctccggctaatttgtactagtcagtaactaggttaaactacccagataaactgactgacttcttggcccggtcacttctttgtgtccttcgctggagtcgcgaaaattgcgattgacattcgaaaatagtccgacttttggatgaccaaaacgtgtgcctgtgccgatgacccacattaagcaggtcttggcaacttaatgtgcttgaatcaattttaattctgcggacggagatgtcttgtagaaaaaattagttatgaatgaacaatttgagacgctttaggacaaacaatgattaaaagtgcatcacaatcgcatccgtaaatcaacggcatgtttaagcctcggacctaaagtgcaatatctcgctcgacaggatgtcttcacac

SEQ ID NO: 22979 - DNA, 869 bp, DROSOPHILA
ttgaaatcagtcgtaaaatacaacaaaggcagcgcagcagtctcgcaaattaaatttgctgataacgtatacaagtggcaataacagaataaattaagccggaaaaaaggtcgaaaggccaaaagtgaaatccaatccggtgtgaaaaccagtgcaaaagtcaacaacttgtgggagtcgagcgttcgtcctcgagtccttgaatcctgccagtgtgctcagtgctttaagtgtgccaagtgtgcgtctgcgtgtgcgtgagcgtgagcctgtgagtgcgtccgggtagcggagaagccacaacgtcgtccacaaaaccatcgacgtccacagccgccgccgccgctgctgctgctgccgccgctgcaggttcgggatcgggacaaggttcgggagcgggtgcggtatcaggaactgctccaggccaccagaggagcggcggacgaagcggccagcgacgtcgcagtagcagcggtaatccacacgccggcacaacgaaagcgaccagtggcagcggtggagctggcagcgccggcggaggaggaggcggcggcggcggcagcggtggaggcggggtcaagcagagcgtcagccggaacagcaacatccggagcagcagctccaacagcaccatggcctctgccaaccatcgcggtggcggcggacgcggtggaggtggcgctgtcgccggtgccggagcggatggcaatgcaatcgtgggcctgcagatcggctccgcctggtttcagcgcaagatcaacctgaggccgcagcaccgcggcgtccacctggtcaccgaggagatactccgacagatgccggagctggcgcacttctcagtgggattatgtcacatgcaaagtgagtga

SEQ ID NO: 22980 - protein, 78 aa, DROSOPHILA
MASANHRGGGGRGGGGAVAGAGADGNAIVGLQIGSAWFQRKINLRPQHRGVHLVTEEILRQMPELAHFSVGLCHMQSE

SEQ ID NO: 22981 - DNA, 2903 bp, DROSOPHILA
tgagatgctaactactaaggtctgggcgggatttggaggcgccggaatatggcctaatgactgtagaatgaaggaattggcgtccggtcttatgtgtgactgcaattactcaatcagactgaggggacgtggtccttttgtccctttatatacgtcttccagataaacaattgttatgaagccactgaggaaagtctgctggcttacttatagttgttttgtgatggcgaattttaataatattattaaatcttaagtaaataagagtaaatcacaattaaccgcaactttagcggatactgcaatcggatgtctggcaaaattgttcataattttcctgatcggatataaaacggagttcgatgatgcttctagatccattagcatccatgatgaggacgatatggtgtgcgagcaggccgagaagggtgcccacttgccagtaccatctacaccatctaccactttttttattcactgaatgagagttttcctggaagtaatcgtttgatcaaaacatttattgaggtgttaacttagcccattaggtacatacgtttcgaaactctaaacttagttttaaagaaccgcgtagtgcttatcgaaaggtggcgccacctggaaggacgaaactcgcgatggcattggccgaaccgttcacaatggaccccaaaatggcactcgctgggattgaggcgcttgcgcaggagcactcagtgtcgccccagcgagttggggcagcactcattcacctactcattcaacaaaatgtgtgctgtgtgctatcccgaatcagtttcagttcaggctctcgttcggtggcacatcggtggcgctcgtcgcagaaaaggcatgcagagaaaatttagaaagtagttgctgaaaaaagcagagcgcagccaacccaagcagaggaacactgggggaaaatcgaaaccgaggggcgattatattgcgaatcggatggatcatatatccgcgctgtggcattatccttcggatcgaatcgaggcgaaatcgaattgagtcgggctcgggccagtgccagtgtgtgtgtgctagtgagtgccagttccgagtgtgtgtgagtgtgcggagtacatatgtaatagggccatgaagttttattgaaaaacgaggcagagacaaggcgaaaggccataagaattgggcccgcagccccccggaagaccccgacacgccccttcgcaaggagtcgctgtgtagctgtgaaaaaagcgtgccccatgcagcagaactgtgcccatgtggctccgaatgggaggagtcgcccatttggtaacggtaacgtcgtgcagctgaaaaattcccaatcagaaatctgttgaacgaaaatcgaagagggtcgagtaaaaacctatatgtacatacatacatacatatatgcatatgcatatgcatatgcacctccaatagtcgcgtataaaataaatcagaaagtacaacaaattgctcaacttgctgtgtgcgaaaaatcgggccaaaatgtgcgagcgtgtgcgtaaagtgcgtgggtgtgtgtgaaaggtgtaaaaaatgtacattctgtgaattggccacataaaaaaaagaggaaaaagaaaaggaaaacgaatacgagtaacgagtgtaacgacagacgttatattcggaggcgattcgtagttcttgtttttgttgccacttcgttgtttgcccgcaagaggaaggcaacaacttaggccccaaaatgcccagagatctcgactccggctccagttccaagaccgattccataaccgattccgtctccgcttccggcaccaactccggcgaatccggggttggcaatagctatattcccgggcagcagcagcagcgtcagcacctccaccagcctacttcgcgcccacccacgctgtgaatccccacaaatctgactcagattcagatttagatagcgattcagattcagatacagattcagacaaagatcaaagtccaagaatctccagcacctacctgcaagcgccactgcaattagacgcatattatccacaaatcaatattaatcaccaaatcagcaaagtaagcaccgcttttcgtttgttcgagccacacacgccaaacataaagccaatcaaaacccatagaatgcacatacgagcgcttttgttttgaccgccaaacgttgcacgcctatcgccgccaaataatcgatattcgattggtagcgcttcgaaggggtgtagctagccatgcaatgcggtttcctcctcgtgaggtctaattattgagtatttaccattatttaagttgcattattttgatttttcttgaattttaaatgcattgcaaaattatcgcaaagtccacgatagtttcgataggtttttgcttatcagaaggccaacaaagttcggtttaaccagcagaaccaggcatataatatataatatccaactcttttatttgtaagtgcttgattacagtttatatgtgggcttaaaaatagaatactaaacctaaatgtaaattagaaaaatgtggtacctttttgttgcttaagctttctgattttgtaaatggaaataatcttctatattgttatagtatataatgtgttttaactaaagaattaagtagtagaagtgaaagattttatatttcattaattctgttcaataatgccacctatgctgatttcaactagggattacttaaaaatattaaactactactcaagttggacatgctatgcgattttatttggcctaatggactttggtgtagataatgtgttttttaagtattgctcttgattataagcgttttcatggttaaatgcttttaaacaattcgtttaatttgcaactgaactttaaaattaaaaataaatttacaattccactagtcaaacactg

SEQ ID NO: 22982 - DNA, 749 bp, DROSOPHILA
atcgaatcgaggcgaaatcgaattgagtcgggctcgggccagtgccagtgtgtgtgtgctagtgagtgccagttccgagtgtgtgtgagtgtgcggagtacatatgtaatagggccatgaagttttattgaaaaacgaggcagagacaaggcgaaaggccataagaattgggcccgcagccccccggaagaccccgacacgccccttcgcaaggagtcgctgtgtagctgtgaaaaaagcgtgccccatgcagcagaactgtgcccatgtggctccgaatgggaggagtcgcccatttggtaacggtaacgtcgtgcagctgaaaaattcccaatcagaaatctgttgaacgaaaatcgaagagggtcgagtaaaaacctatatgtacatacatacatacatatatgcatatgcatatgcatatgcacctccaatagtcgcgtataaaataaatcagaaagtacaacaaattgctcaacttgctgtgtgcgaaaaatcgggccaaaatgtgcgagcgtgtgcgtaaagtgcgtgggtgtgtgtgaaaggtgtaaaaaatgtacattctgtgaattatgcccagagatctcgactccggctccagttccaagaccgattccataaccgattccgtctccgcttccggcaccaactccggcgaatccggggttggcaatagctatattcccgggcagcagcagcagcgtcagcacctccaccagcctacttcgcgcccacccacgctgtga

SEQ ID NO: 22983 - protein, 57 aa, DROSOPHILA
MPRDLDSGSSSKTDSITDSVSASGTNSGESGVGNSYIPGQQQQRQHLHQPTSRPPTL

SEQ ID NO: 22984 - DNA, 11098 bp, DROSOPHILA
cagatagggataatggctccccgtcacgcccccctcttacgactcgcccccaaaaggtagttggttgcaagttggagcgccaaagttgcgaacttggctaaaaatagcgaaacatgttgccgttaacacttgaggctcgaattggctaattggatatttatgattatatgttcgcgagtgtgaatggatgtgtgttcgctgtccttatcttaattatattttatactatatataacctatctctaacctagcgtggcaaaataccattgctcctggccgtggagtcgggcaaccagtccatgtgcagggagctcctggctgcacaaacagcagagcagctcaaggtaagtaatctgtgaactagcagataagtttacccacttattttaaaacctaaaagtctagttgcagcttatattgatttaaatagaaacactgaatacatcatctagttaataaccaaaaatgtcaacagtatgagccattaaaagcataaaatgctaatttcttataccatctacgcatctaactgatttcctaactaggaccaagaaattgttgattttataatcgccacgatagtgtcaatcaaactgtccatctgagctgtcggaaaatgtccacaaggttcttaaagccttgaactgtccaataaccaagcgtgtaaataaatcaaaaatgcaaatttaccctgctcacctgtgcgtacaggtgcattgcaagtgcaacagtgcgcgacattggcaaagtttgtgcaattttcaatcagaagttgaagtgcaacacaccaagagcagtgcgtgttgattaaattaaccaaagggctacggctcgcttcaggccaagggttcaagcccaagttaaagttaaagttgcgcctgactttggccgctggctgagcacgcaatcagccggcaaaacagccgtaaactgggtcaaaactgaggcgaaaacgcagctaagatgggaagggaatctgatttgcatagcccaaaataaaatgtcgaaagtgaaatgcagcaacactaaggaaaaatttaagtaaattatttaaaaatatttaaacaatgaagctatgaagctctagcaaagataccaatttagttagggaatatcattataatttgtcacatagttaattaatttcaagcataggagcaattatgactttgcaattatataaaaacatttttgtgaagtgcaccctttcatgttaaattttggatttattttttcgcaggcaacgacggccaatggagacacggccttgcatttggccgccagacggcgggacgtggacatggtccgcatcctggttgattacggaacgaatgtggacacgcagaatggggagggccagacgccacttcatatcgcggccgccgaaggcgatgaggctctactcaagtacttctatggcgtgcgcgcctcagcgtccattgcggacaatcaaggtgagtctgtgggaatgtggagcaaggaaaagcatgttgcaaatcgtgtttgaccttgatataacacaataaaaatcatgaaattttcacttctcaatagaagctagtgattataaagtggaggtataaagtatatgtttgtggcgcccccggttggaccgagctccagacatacgaatgtccgtcttgatgattaaaatttatatatatatatatgtaataccctatagatcgcactccgatgcacttggccgccgagaatgggcacgcgcacgtcatcgagatactggccgacaagttcaaggcgagcatcttcgagcgcaccaaggatggcagcacgctgatgcacattgcgtcactcaacggtcatgctgagtgcgccacgatgctcttcaagaagggcgtctacctccatatgcccaacaaggatggagcccggagtattcacaccgccgccgcctatggtcacacgggaatcatcaacaccctgctacagaagggcgagaaagtggatgtgaccaccaatgtaggtgggataatgtattaagggataatcgtattaattccacactctttgcaggataactatacagcactgcacatagccgtggaatcggctaagcccgccgttgtggaaaccctgctgggatttggagcagatgtccatgtccgtggcggaaaactacgtgagaccccgctgcacattgcggcacgagtgaaggatggagataggtgtgccctcatgttgctgaagtcgggagccagtccaaatttgaccacggatgactgtctgacccccgtgcatgtggcggctcgtcatggcaatctggccacgttgatgcaactcctcgaggacgaaggagatccgctgtacaaatcgaatgtgagtagattattagaatagaatgataaacgcttgaattaaaacttccattttatagactggagagacaccgctgcacatggcctgtcgtgcttgccacccggatattgtgcgtcatctcatcgagacggtgaaggagaaacacggtccggataaggccaccacctatataaactcggtaaacgaggacggcgccacggcgttgcattacacctgccaaatcaccaaggaggaggttaagattcccgaatccgacaagcagatcgttcggatgctcctcgaaaatggtgcggatgtcacgttgcaaacgaaaactgccttggagaccgctttccactactgcgccgtggccggcaacaatgatgtgctgatggagatgatctcacatatgaatcccacagacatccaaaaggccatgaaccggcaatcatcggtgggctggactccactgctgattgcttgccatcgagggcacatggagctggtcaataatctactggcgaatcacgctcgagtggatgtcttcgatacggaaggacgatctgccttgcatttggctgctgagcgaggatacctgcatgtgtgtgatgccctgctgaccaataaggcttttattaactccaagtcccgcgtgggacgcactgcactacatctggcagccatgaatggatttacgcatctggtgaaattcctgatcaaggatcacaatgcagttatcgatattctaacgttgagaaagcaaacgccgctccatttggcggcagccagcgggcagatggaagtctgtcagctgctcctcgagctgggcgccaatatcgatgcgacggacgatctgggccagaagccaatccacgtcgccgcccagaacaactactctgaagtggccaaactcttcctgcagcagcatccatccctggtgaatgccaccagcaaggatggaaacacatgtgcccacattgccgccatgcagggatccgtcaaggtgatcgaggagctgatgaagttcgatcgatcgggtgtgatttcggcgcggaataaacttacggatgccacgccccttcagctggccgccgagggcggacatgcggatgtggtgaaggctcttgtgagagctggtgcctcctgcaccgaagagaacaaggcgggattcaccgccgttcatctggcggcacagaatggacatggtcaggtcttggatgtgctgaaaagcacaaactcactaaggatcaatagcaaaaagttgggtctgacgccgcttcatgtggctgcctattacggacaggcggataccgtgcgggaattgctgaccagtgttcccgccaccgtcaagtcggaaactccaacgggacaaagtttatttggggatctgggcacggagtccggaatgacaccactacacttggcggccttttccggcaacgagaacgtggtgcgactgctcctcaactctgcgggtgttcaagtggatgcggcgaccatcgagaacgtaagattacctgcatatctcttctgttcagaaaccattaacacaacaattgattctacagggctataatccactccatttggcttgcttcggtggtcacatgtcagtggtcggtttgctcctaagtcggtcggcggaactcctccaatcgcaggatcgtaacggcaggacgggcctgcatatcgccgccatgcatggccacatccagatggtggagattctgctcggccagggcgcggagatcaacgcaaccgatcggaacggttggacgccactgcattgtgctgccaaagctggccacttggaggtggtgaagttgctgtgcgaggcgggtgcctcgccaaaatcggagaccaactacggttgcgccgccatttggttcgccgcctccgagggacacaacgaggtcctgcggtatctgatgaacaaggagcacgacacctacggcctgatggaggacaagcgattcgtgtacaacctgatggtggtgtccaagaaccacaacaacaagcccattcaggagtttgtcctggtatcaccagcacccgtggatacagccgccaaactgtccaacatctacatagtactctcgacaaaggtgatttagctaaaggatctctatgcacttaactaaactaactaactaaaacattttgatctctttaggaaaaagagcgcgccaaggatctggtagcagctggcaaacagtgcgaggcaatggccacggagctcttggccctggcagctgggtcagattccgccggaaagatccttcaagccaccgataagcgaaacgtggagtttctcgacgttctcattgaaaatgagcagaaggaagtgattgcccacacggtagttcagcgatacttgcaagtgtgtgatattattgactagcttagatcttaacttattgagattctgatatgtatccttcttcctacttttaggaactctggcatggctccctgacgtgggcatcctggaaaatccttctgctgctcgtggccttcatagtctgcccaccagtgtggattggattcacattcccgatgggtcacaagttcaacaaggtgcccatcatcaagttcatgtcgtacctaacctctcacatttacctcatgatccacctgagcatcgtgggcataacgcccatttacccagtgctccgattgagtttggtgccctactggtacgaggtgggtcttctcatctggctgagtggattgctccttttcgagctgacgaatccgtcagataaatcgggactgggatcgataaaggtgctcgtgctgctgctcggcatggccggagtgggtgtccatgtctcagcatttctattcgtctccaaggagtactggccaactttggtgtattgtcgaaatcagtgcttcgcgttggccttcctgctggcctgtgtgcagatcctcgactttttgtccttccaccacctattcggtccctgggccatcatcattggggatctgctgaaggatctggctcggtttttggccgtcctggccatctttgtgtttggcttttccatgcacattgtggccctgaatcagagctttgccaatttctcaccggaggatctgcgcagcttcgagaagaagaaccgaaatagaggctacttcagtgacggtaagtcgaaacgtttgctttgctttctccagtctacttttcgaatttttgtttcgaactttttgttttcatttggaatgtttttgcaaacttcctcttttgaacgttcaatgtgtcttgataagtatctgtgtctgccttgaatgaaaagccatctaatcaatgtgcgctcgatgtttcacataagtaaaataaagcaaaaaagaaccaactacaaccacataatacaacaattgcatgctcaacaagtacaaacaacccgaacctccaaccttgatgtcgtaatccccgtccacccctccaccaaaagacctccactaataatgttctccctctgatcttaacccccaactgaatatcttaactgaattatccgaatggaacagatgacatgcccacaccccgacctccgccggtggagaattatgtcgatagtcgcttcagcgaattccgacgaaagcacaaggacgaccgtaagtctcctaccatccacaactaccaacccttactacccccgcatttgcatggcccccctttccgggggctgccccgcccccttaacccaacaatgccggaatccaaaccgttgcgttgccgccttcgatgttgtgcgtaaagtgttaatgtcgtttgttttctagttccctggaggaacatccacaagtccgcactcgctgctcgaaatcccctcgccttgctagtttcagttactttcgttttgaggcatgttcgcgggaaaatcccttttccgcatcctcgatgttgtggatctgtgtttatataggtatccatgcgccaagctttattacttagtttggagtatcgttttatacctttgcttggatcaattttaatttatatgtatttctttatgtatttttaagtgacatataaatacaaataaattattaagaatcagaatttaaaaccataatttattctcattaaattcaatcattattatttcaaaaaatcctagatctgtgtccgatattattttctttactatatttgttattctttttttaagttagattttttatcgatgtgtaaccagagcgatatccattagaactctgtacaaactaaaaattccagtaatgcatgttgatgtttttatccagtcaatccaaaccaaaatcaaacaatcaatcagcaatatcgatataaccaatgcccgcctgcctggggctttcagcttgcgccgcttgcccaccaccaaattctgcacaatcgaaacaatcgagaccgatcgaatcgaatcgataacgaaaaacgataacgctactgataccgattaccgatgctcgtattcgtgagtcattcgaaccgctcagctgcgaactgcgagatgctgcttttgacgtgtttaaccactcacccgcactctccaaaatccaaataaacccacccataaatatactcgtttatgtaaacttcaaaataaccaacaaataccaagtattaaactcgcacacacgcctgtgccaagccgacaatatatatacgtatatatacgctagctgcagcaatcgcaatgcaatagttcagttatctgattgtgagtaacgttccgttcggacccatgttaggacccatgacgccctttctggctttcgagcgcctcttcttcgcggtcttcggacagacgaccaccctggacatcaatcccatgcgacacttgcgtcccgagtggaccgaggtgctcttcaaatttgtctttggcatctacttgttggtgtctgtggttgtactcattaacctgctaattgccatgatgtcggatacttatcagcgcattcaggtttgtattgccaaggccactaatcagtattttctctctgctttccctcttcccccgtttatttgtttcaattttcatttaccggaatgctatttgtttgtgctttgattgtaacaaccccaaaactgaccgctccaaattgaaacacaattgggcatgaaccgaaactgggggttggtcgatcggacaaatcaacgaaacaaaaaaaaaaaaaaaaaccacataatcgaatcaaccaacccaacctgggcgtccgttatctttttatttttcaaaataatttccacgccggccaatatatgcgtgctgtccgggggtgtctatttgtatctgtatctgtatctggaaatgtatctatgggtctccgacacagtgcgcatgcatccgattaactcgttcgagttgttgttcttcgccgtgttcggacaaacgacgaccgagcaaacgcaagttgacaaaatcaaaaatgtagccacgcccactcaaccgtattgggttgagtacctgttcaaaattgtctttggcatttacatgttggtgtcggtggttgtgctcattaacctgctgattgctatgatgtcagacacctatcaacgcattcaggtagtattgctaaatgcgcttttatctaactcgactctatttattaactcgtactttaaccataagtatataaatttcatattgcattgtgtattaatcattctctatttcagcataagaagtaaatttacatatgaagatgatttatatttcttagatatataatagcggtagttaggaagtgagctgttttgggaacatattgagaaaatagttaattaatctggagaacttggcatgctctgtaaatccatcaactgcccagacttgcatcttccaggttttttcaggaaaataatgttagcaatctgagggatacaattttgtgaaagtgtatctcaaagatggaagcctgccgccttctagtgtagtacagtgcagagtagctttagtggattagccgccttgaagtgtgccctgcttttgtgaccagtgttgagcgaggccaaaccagaaagtgttggttaacgcatgcttacaaaaccttatatatagaaatcgttgctgcatgcttatatgtctgtgtttgtcattgtctaggacttaagtctgaagagatacaccaatatggtggttaggttttgtatggtaattttgtgattgccatccaaaacaggcctctgaatttgtgtatttctattattaacaacctgatttttgcagctcttaagttacgtattaacaaagtaaaaacctgtaaaatccgaggcttctgttcacgaaactcatcccgtttattcctttgttcttgttctctcctatatcatgtctcatccatccaacatcgcgcacctcgctaaccaataataaactgaacaaaaaaaaaaacctatgaaatactaggcccaatccgacatcgagtggaaatttggcttgtccaagcttatacgcaatatgcatcgcaccacaacagcgccatcgccgcttaatttagttaccacctggtttatgtggatcgtcgagaaggtcaaggtaaaatctcaggtgacgaaggtcgccttccagccgctgtcgctgtgtctctctctctctatccgtatcctgtatcctgtatcttatacctgtttccatatctgttgactatataaagtgcaactaccagaaccgatcctgaacgggtgtagtttgctgaccttttccccaacccatttaaagcaatttggcaacaaccgcaatgagtttgaacacagtgaatgctttaagtgtgttgcccacataagaaaatcaccttgtcaccttgcactttctctgtaacttcaaaataggagatcgaaatataggtatgtaaatgtttcgatcccctacactgtatggcactttatgtccagcacttggcacccgattgctttcgatgtaatgaacatttgctgactgcgtttatgttgtgtctcttgtcttgtatgtgatctatgtcccgtgtctaatgcgccttgatctaacccacaaaacctgcaaacaaatcctgcaaaccgcaattcaaaaaacacgcgcctcaggcacgcatgaagaaaaagaagcgtccaagtctggttcagatgatgggaatacgtcaggccagtccgcgtaccaaagccggcgccaagtggctgtcgaagatcaagaaaggtgagacatgtatgtatcgctgctgggctactccgaccaggatccgtccatatcctggaaaacacaacccatccatccgaggggttttgtagctaacagcgtgtcagcccaagtgtaactcctaactttccttcaactcaactcttttctctggaacaattggctcgctctagctcgaaattatttcctcaacctttcgcctttccagtgcacaaaggtagaaacgccatggatctctataaatccgacattatattgaatttgaggtagaagtcgtgatctttggcgtttgtacctcagtgcatcttgctgtatagtggaatccaaaagctaatgatattacctcgaattcccagactcagtggccctgtcgcaggtccatctatcgcctctgggatcacaggcgagcttctcgcaggccaatcagaatcgcatcgagaacgtggccgactgggaggcgattgccaaaaagtaccgggcactggttggcgacgaggagggtggatcgctcaaggactcggatgcggagagtggatcgcaggagggtagcggaggacaacagccaccggcacaggtgggcagacgagccatcaaggccaccctggcagacactacaaaatagacacacagaaatgacacagaaaaaacagaaaaacagcttcggatgcttaattaactacgttttgattgcaggtctaagcttcatctatctcttcaaactatccttcctgactatctctatctcttctcgactatccaagcgtctgtccttctgtaattctaagatctaactctaagaaactctatccgtaagctgcaccttgggtatggttttctcagactctggaacccacttcttttggttcaactggagtatgggaaaatcagactaaaatccttaagttaagccttcactttctaaactaattttagctagaatattgaaattgttttgagtaacctttaaagcgaaagctgattgtttattttgatatgattttccgttggagttttctacgattagcgaaacaacaaaaaaaagttttccatgttcgagatttttaaagtaagttaattcgtcctttttggactcaatttgccttacattttttgaaaccaactcctagcattttgtattaagctaatgattgcgaccatatcgttaataatgattgtcttagatgttaagtaaattgaactttagcttcaatcggagctaaaagtcaagcggttttatataaatctcgcataatctcattgttttccggtaattgtcaagtaacaacgttcactctacttactaagctttggttcattttttataacaaatgagcgcataaaattgttaactgtacttgattgtaaataaataagtcttattttaaaatattgtactattgcttcagcttgtaatcattgcatactttttggcggcactggcatataccgccatctatcggaggaaacaaaattttaaaattatgtttagcattattttttctaattaaactatttttgggttcatgcttataatacaattataattttataattataagtctgtatttttgaataaatggattgtttttgtgtttgttatttatatcgtacgttactcgcgt

SEQ ID NO: 22985 - DNA, 4362 bp, DROSOPHILA
atgtcgaaagcaacgacggccaatggagacacggccttgcatttggccgccagacggcgggacgtggacatggtccgcatcctggttgattacggaacgaatgtggacacgcagaatggggagggccagacgccacttcatatcgcggccgccgaaggcgatgaggctctactcaagtacttctatggcgtgcgcgcctcagcgtccattgcggacaatcaagatcgcactccgatgcacttggccgccgagaatgggcacgcgcacgtcatcgagatactggccgacaagttcaaggcgagcatcttcgagcgcaccaaggatggcagcacgctgatgcacattgcgtcactcaacggtcatgctgagtgcgccacgatgctcttcaagaagggcgtctacctccatatgcccaacaaggatggagcccggagtattcacaccgccgccgcctatggtcacacgggaatcatcaacaccctgctacagaagggcgagaaagtggatgtgaccaccaatgataactatacagcactgcacatagccgtggaatcggctaagcccgccgttgtggaaaccctgctgggatttggagcagatgtccatgtccgtggcggaaaactacgtgagaccccgctgcacattgcggcacgagtgaaggatggagataggtgtgccctcatgttgctgaagtcgggagccagtccaaatttgaccacggatgactgtctgacccccgtgcatgtggcggctcgtcatggcaatctggccacgttgatgcaactcctcgaggacgaaggagatccgctgtacaaatcgaatactggagagacaccgctgcacatggcctgtcgtgcttgccacccggatattgtgcgtcatctcatcgagacggtgaaggagaaacacggtccggataaggccaccacctatataaactcggtaaacgaggacggcgccacggcgttgcattacacctgccaaatcaccaaggaggaggttaagattcccgaatccgacaagcagatcgttcggatgctcctcgaaaatggtgcggatgtcacgttgcaaacgaaaactgccttggagaccgctttccactactgcgccgtggccggcaacaatgatgtgctgatggagatgatctcacatatgaatcccacagacatccaaaaggccatgaaccggcaatcatcggtgggctggactccactgctgattgcttgccatcgagggcacatggagctggtcaataatctactggcgaatcacgctcgagtggatgtcttcgatacggaaggacgatctgccttgcatttggctgctgagcgaggatacctgcatgtgtgtgatgccctgctgaccaataaggcttttattaactccaagtcccgcgtgggacgcactgcactacatctggcagccatgaatggatttacgcatctggtgaaattcctgatcaaggatcacaatgcagttatcgatattctaacgttgagaaagcaaacgccgctccatttggcggcagccagcgggcagatggaagtctgtcagctgctcctcgagctgggcgccaatatcgatgcgacggacgatctgggccagaagccaatccacgtcgccgcccagaacaactactctgaagtggccaaactcttcctgcagcagcatccatccctggtgaatgccaccagcaaggatggaaacacatgtgcccacattgccgccatgcagggatccgtcaaggtgatcgaggagctgatgaagttcgatcgatcgggtgtgatttcggcgcggaataaacttacggatgccacgccccttcagctggccgccgagggcggacatgcggatgtggtgaaggctcttgtgagagctggtgcctcctgcaccgaagagaacaaggcgggattcaccgccgttcatctggcggcacagaatggacatggtcaggtcttggatgtgctgaaaagcacaaactcactaaggatcaatagcaaaaagttgggtctgacgccgcttcatgtggctgcctattacggacaggcggataccgtgcgggaattgctgaccagtgttcccgccaccgtcaagtcggaaactccaacgggacaaagtttatttggggatctgggcacggagtccggaatgacaccactacacttggcggccttttccggcaacgagaacgtggtgcgactgctcctcaactctgcgggtgttcaagtggatgcggcgaccatcgagaacggctataatccactccatttggcttgcttcggtggtcacatgtcagtggtcggtttgctcctaagtcggtcggcggaactcctccaatcgcaggatcgtaacggcaggacgggcctgcatatcgccgccatgcatggccacatccagatggtggagattctgctcggccagggcgcggagatcaacgcaaccgatcggaacggttggacgccactgcattgtgctgccaaagctggccacttggaggtggtgaagttgctgtgcgaggcgggtgcctcgccaaaatcggagaccaactacggttgcgccgccatttggttcgccgcctccgagggacacaacgaggtcctgcggtatctgatgaacaaggagcacgacacctacggcctgatggaggacaagcgattcgtgtacaacctgatggtggtgtccaagaaccacaacaacaagcccattcaggagtttgtcctggtatcaccagcacccgtggatacagccgccaaactgtccaacatctacatagtactctcgacaaaggaaaaagagcgcgccaaggatctggtagcagctggcaaacagtgcgaggcaatggccacggagctcttggccctggcagctgggtcagattccgccggaaagatccttcaagccaccgataagcgaaacgtggagtttctcgacgttctcattgaaaatgagcagaaggaagtgattgcccacacggtagttcagcgatacttgcaagaactctggcatggctccctgacgtgggcatcctggaaaatccttctgctgctcgtggccttcatagtctgcccaccagtgtggattggattcacattcccgatgggtcacaagttcaacaaggtgcccatcatcaagttcatgtcgtacctaacctctcacatttacctcatgatccacctgagcatcgtgggcataacgcccatttacccagtgctccgattgagtttggtgccctactggtacgaggtgggtcttctcatctggctgagtggattgctccttttcgagctgacgaatccgtcagataaatcgggactgggatcgataaaggtgctcgtgctgctgctcggcatggccggagtgggtgtccatgtctcagcatttctattcgtctccaaggagtactggccaactttggtgtattgtcgaaatcagtgcttcgcgttggccttcctgctggcctgtgtgcagatcctcgactttttgtccttccaccacctattcggtccctgggccatcatcattggggatctgctgaaggatctggctcggtttttggccgtcctggccatctttgtgtttggcttttccatgcacattgtggccctgaatcagagctttgccaatttctcaccggaggatctgcgcagcttcgagaagaagaaccgaaatagaggctacttcagtgacgatgacatgcccacaccccgacctccgccggtggagaattatgtcgatagtcgcttcagcgaattccgacgaaagcacaaggacgaccgacccatgacgccctttctggctttcgagcgcctcttcttcgcggtcttcggacagacgaccaccctggacatcaatcccatgcgacacttgcgtcccgagtggaccgaggtgctcttcaaatttgtctttggcatctacttgttggtgtctgtggttgtactcattaacctgctaattgccatgatgtcggatacttatcagcgcattcaggcacgcatgaagaaaaagaagcgtccaagtctggttcagatgatgggaatacgtcaggccagtccgcgtaccaaagccggcgccaagtggctgtcgaagatcaagaaagactcagtggccctgtcgcaggtccatctatcgcctctgggatcacaggcgagcttctcgcaggccaatcagaatcgcatcgagaacgtggccgactgggaggcgattgccaaaaagtaccgggcactggttggcgacgaggagggtggatcgctcaaggactcggatgcggagagtggatcgcaggagggtagcggaggacaacagccaccggcacaggtgggcagacgagccatcaaggccaccctggcagacactacaaaatag

SEQ ID NO: 22986 - protein, 1453 aa, DROSOPHILA
MSKATTANGDTALHLAARRRDVDMVRILVDYGTNVDTQNGEGQTPLHIAAAEGDEALLKYFYGVRASASIADNQDRTPMHLAAENGHAHVIEILADKFKASIFERTKDGSTLMHIASLNGHAECATMLFKKGVYLHMPNKDGARSIHTAAAYGHTGIINTLLQKGEKVDVTTNDNYTALHIAVESAKPAVVETLLGFGADVHVRGGKLRETPLHIAARVKDGDRCALMLLKSGASPNLTTDDCLTPVHVAARHGNLATLMQLLEDEGDPLYKSNTGETPLHMACRACHPDIVRHLIETVKEKHGPDKATTYINSVNEDGATALHYTCQITKEEVKIPESDKQIVRMLLENGADVTLQTKTALETAFHYCAVAGNNDVLMEMISHMNPTDIQKAMNRQSSVGWTPLLIACHRGHMELVNNLLANHARVDVFDTEGRSALHLAAERGYLHVCDALLTNKAFINSKSRVGRTALHLAAMNGFTHLVKFLIKDHNAVIDILTLRKQTPLHLAAASGQMEVCQLLLELGANIDATDDLGQKPIHVAAQNNYSEVAKLFLQQHPSLVNATSKDGNTCAHIAAMQGSVKVIEELMKFDRSGVISARNKLTDATPLQLAAEGGHADVVKALVRAGASCTEENKAGFTAVHLAAQNGHGQVLDVLKSTNSLRINSKKLGLTPLHVAAYYGQADTVRELLTSVPATVKSETPTGQSLFGDLGTESGMTPLHLAAFSGNENVVRLLLNSAGVQVDAATIENGYNPLHLACFGGHMSVVGLLLSRSAELLQSQDRNGRTGLHIAAMHGHIQMVEILLGQGAEINATDRNGWTPLHCAAKAGHLEVVKLLCEAGASPKSETNYGCAAIWFAASEGHNEVLRYLMNKEHDTYGLMEDKRFVYNLMVVSKNHNNKPIQEFVLVSPAPVDTAAKLSNIYIVLSTKEKERAKDLVAAGKQCEAMATELLALAAGSDSAGKILQATDKRNVEFLDVLIENEQKEVIAHTVVQRYLQELWHGSLTWASWKILLLLVAFIVCPPVWIGFTFPMGHKFNKVPIIKFMSYLTSHIYLMIHLSIVGITPIYPVLRLSLVPYWYEVGLLIWLSGLLLFELTNPSDKSGLGSIKVLVLLLGMAGVGVHVSAFLFVSKEYWPTLVYCRNQCFALAFLLACVQILDFLSFHHLFGPWAIIIGDLLKDLARFLAVLAIFVFGFSMHIVALNQSFANFSPEDLRSFEKKNRNRGYFSDDDMPTPRPPPVENYVDSRFSEFRRKHKDDRPMTPFLAFERLFFAVFGQTTTLDINPMRHLRPEWTEVLFKFVFGIYLLVSVVVLINLLIAMMSDTYQRIQARMKKKKRPSLVQMMGIRQASPRTKAGAKWLSKIKKDSVALSQVHLSPLGSQASFSQANQNRIENVADWEAIAKKYRALVGDEEGGSLKDSDAESGSQEGSGGQQPPAQVGRRAIKATLADTTK

SEQ ID NO: 22987 - DNA, 4466 bp, DROSOPHILA
gacgggatcgacgctgtggcgtttagtgggcggcaaacatattttactaacttttaagcccctgcgcgttctagcaataattaaaatgtgtggcaatcgattggatgcttgtggcaatcgttatcgtttcttgcggcgcatagagatgagccaatgggagtagctagggatgggaagatttccatgctctctgcttacgtatgcctattgtgaatggacatttttagtgagaatttttaaatgatttttagcaaattggttttaaatataatgtgtatgagcaccattttatttcattatcaagcagattcgtttcgcaagtaataaaagtgagagtcatctgcaagcgataccgccttaagtaaaataagctgagggcataggatttactattggttcttttacagttgggacctaatctggccatctgcttatttgaaatctgcgacagatgtcactttttgcacctttggtgtaggtaaattcaaaacccaattttcttacctgaaatttgaaaacccatttcaaactgggatttcaagtatgtttgggttttatatgacgggtctaaccaggtaccaatttaccattaagacacttagattgtattactaatagtttttggaaaatgaattctttaattctattactatattcgggtaactactatttattgcagtaaagtaacaaaagtatttaaccccaatgttttcctgttattgttattggctaacgataaggaataacatagttttcttcatatatgtacatatcacgatatatttataaagttcagccacataacatattttaaaatagtttttcatgtcaaaatagccgttataaagattaggggtattccccatggatatggcctatctggcagcaccatcaaacagctgcttgctatcgactttacaaaaataaaaatcgttttttttttttttgcaataacgcatcgattctgtttacttgcgagaaatatgcaaaatagccatcgaaaagtgccgcaaaatgtaacaaacacctagctgcagacccaagatgataccctggatgcgggagaagttcaacgagaaacgggccaagtggttggcgcgtagcaagcgcagcggtggttctccggctgacgaaagccctcggagcagcagtcatagccacagccagcggacagacgccagcgatgcggagagcctgagcggatcctcgttgaatgtccacacggcggaatctgaaacgcagacggatggcgggatatccgcttccaattcgcggccccttgtgggcgggggcagttgcgtcctaaggactccatcgcccgctcgccgacgtcgcattcaccttgagctacagctgcagcgacgagaggaacgtgctgagcatcagaaggtggtgccacaggactcgcccacgcccactcaccaacagcaggctaatgcgtaagttatcaaaccgaacgaatatgcttatgtttttcaaagtgctcacccgaaacaaatatttgtctttcgaaattctccgttggtttgtcactacccatccaactaaaacaaactatgcaaaaactgcgcagtttgtttctcaggttagtaatgcttaggtattatgctaatcttttaattaagtccattcttaacggaatccacttaggaaatcagcccatacaaatcgcccaggtagctctacttctggcgaggcagacgatgccagcaggccaggtgaatctatcctggtgcgggtaatctgccccagctctcgggttcttatcttcaaaacggacgttaataagcgcctaaacgagctgaagagtgaggtgattctggaactgagcgacgatcccgactccatccagctatttgccccagatgtgcggcatcttaatccgcgataccgtctctatcgggcggaatacttcggcggcgagcttaacgagggcgacacgctggcccagctaaaagttcgcaacaatgagactttcatactctccccacgacgcaatactctgccgcagactgtttcacggatacgtgaggttcctggcccaaatgagcagctggtggagagcgccacccgatacgtgcccgtcaattgcaaccagctgcccaccatcgatattaatgaaatctttcagcagtcgaatgtgagtacaattcttggctactcctttgattattctaatcctattccgtttccagatccaatacgatgtgcgaaaggtgttgatctctttggctcaagcttctgcggcggttataggagctggcccttatgctccacgcctgatagctatgctaaagcaacgtttgatcaatcgccgaaatcagcaagcggatacgctgcaatgcctcgtggacatgggcttcaagcgggagctagccgcatttgccttaaaagcacacaatggcatttactcgaccacgatggagtggctaatacagaaccaaaacgaggaaaatccacaggaaccgccgggcatgaatatgcagcacagtctatcttccatctcaccctccacgattgtcaccaataatgtaagtaggaattagattatcgctttttaatgacaaccgttttcttttaaaggaaaccattgaaaacactgctgccttgattgagattgtacgaatctacagccaccgggattcccctcccagcgatgagattgtggaatcgcttacagaaatgggcttcgaggagacggcagtgctcgcggcactgaagaaaactggcaacaacaaggcgtccgcgtgcgaatggttgtgcgacaatcgatcgggtagcgttattgaactgcgtgaaggcttggcgcccgattcgcccatcctaaaggtgatcctggaaatgccacaagtccagatgaccctaagcaatccaaagacttttttgggtatgtccatctaattaagatagcaacagttgaaatcgaaactaattgcacatacgtttacagcatttctgggcatcctggaaaacgaacatgcgatacgcgtgtggcgtggcgacaacgacacaacctcggtcatcacacatatccttcaaaagtaccatgaggagaagcatgtgcttggcatcaatcagttctatacgaaccgctggtgaaagatgccgctaagtggctttactatgagattaaccaaattatatttatacatatacatacacaatcacacacccgaagtgcatggctgtagcttggtccattttggggctctaattatacattgtgtatgtgcccgtatgtaaagagtatttttgtagccaaaaaccatgaaagtaaactgcacaaagccaaaagatgcaatcgcttcgccaagagcacgcggctgcactctacaaacgcttaccgatcagtacgaattgcattttatacatacatatacatatatatacatacatacacatatatatacatacatacatatatatatatatatatatatatatataaatataaaatgtatctatatctagtcaggccttcatcctacaattgtattaggttaaacaataattactctattcatctagtttgctagctcatcttcagccgaatctcgcactacatttagaaaatgtcacatactgcatcccacagaaacaacccatcagtttataagcgctcgtacgtgtggtgatttaagtgcgttgtaatcccaggttgtttaaaccatcaacttgaactcaaagtattattttgtaaaccaaatattcaaatttgcatagttttaacaaaatgcaaataaatcaattagtttttgatacaaaacaaaagaattaatgtttcttttatatccagattatgtcggtactaaggtgtaagatgtaactttttatatagtttgtaagattggataaagttttcaatgacggtcgtcctcgtgtagcgaatagttattttgtgtttattgtcggacttcttcttaagtcaacagtaaaccagtagttcccaaaattgggggattctttgtgtttatagcaaatagataagttgactacgcatgactcaagctcctttgagttcaccacggcggatgagtaacatttacagacacttttaaacaaaatgaatcatcagtgataagttggtgtgtactcattcgtaatttagagcatatgtaaagctaaacattttccattactctttctagtaatttgtacaaatggaattgctttgttggcagagcaatttggatctttgctgaattattttgctattgctcttttaatgtacaattacaattaattttccatgcggccgcacatttttcatttcattattccagctgcaaacatgagagtaaacaaaaacagtgaaccaaaactattctattcaattgttgcattcttttttccacatataattaattgtattcagcctggacggggaaaatagttggatacattttaatttatgttaagcgcgtttattaagtggttgttgcagtggttgtgtatccatgaataaa

SEQ ID NO: 22988 - DNA, 2085 bp, DROSOPHILA
aaaagtgccgcaaaatgtaacaaacacctagctgcagacccaagatgataccctggatgcgggagaagttcaacgagaaacgggccaagtggttggcgcgtagcaagcgcagcggtggttctccggctgacgaaagccctcggagcagcagtcatagccacagccagcggacagacgccagcgatgcggagagcctgagcggatcctcgttgaatgtccacacggcggaatctgaaacgcagacggatggcgggatatccgcttccaattcgcggccccttgtgggcgggggcagttgcgtcctaaggactccatcgcccgctcgccgacgtcgcattcaccttgagctacagctgcagcgacgagaggaacgtgctgagcatcagaaggtggtgccacaggactcgcccacgcccactcaccaacagcaggctaatgcgaaatcagcccatacaaatcgcccaggtagctctacttctggcgaggcagacgatgccagcaggccaggtgaatctatcctggtgcgggtaatctgccccagctctcgggttcttatcttcaaaacggacgttaataagcgcctaaacgagctgaagagtgaggtgattctggaactgagcgacgatcccgactccatccagctatttgccccagatgtgcggcatcttaatccgcgataccgtctctatcgggcggaatacttcggcggcgagcttaacgagggcgacacgctggcccagctaaaagttcgcaacaatgagactttcatactctccccacgacgcaatactctgccgcagactgtttcacggatacgtgaggttcctggcccaaatgagcagctggtggagagcgccacccgatacgtgcccgtcaattgcaaccagctgcccaccatcgatattaatgaaatctttcagcagtcgaatatccaatacgatgtgcgaaaggtgttgatctctttggctcaagcttctgcggcggttataggagctggcccttatgctccacgcctgatagctatgctaaagcaacgtttgatcaatcgccgaaatcagcaagcggatacgctgcaatgcctcgtggacatgggcttcaagcgggagctagccgcatttgccttaaaagcacacaatggcatttactcgaccacgatggagtggctaatacagaaccaaaacgaggaaaatccacaggaaccgccgggcatgaatatgcagcacagtctatcttccatctcaccctccacgattgtcaccaataatgaaaccattgaaaacactgctgccttgattgagattgtacgaatctacagccaccgggattcccctcccagcgatgagattgtggaatcgcttacagaaatgggcttcgaggagacggcagtgctcgcggcactgaagaaaactggcaacaacaaggcgtccgcgtgcgaatggttgtgcgacaatcgatcgggtagcgttattgaactgcgtgaaggcttggcgcccgattcgcccatcctaaaggtgatcctggaaatgccacaagtccagatgaccctaagcaatccaaagacttttttggcatttctgggcatcctggaaaacgaacatgcgatacgcgtgtggcgtggcgacaacgacacaacctcggtcatcacacatatccttcaaaagtaccatgaggagaagcatgtgcttggcatcaatcagttctatacgaaccgctggtgaaagatgccgctaagtggctttactatgagattaaccaaattatatttatacatatacatacacaatcacacacccgaagtgcatggctgtagcttggtccattttggggctctaattatacattgtgtatgtgcccgtatgtaaagagtatttttgtagccaaaaaccatgaaagtaaactgcacaaagccaaaagatgcaatcgcttcgccaagagcacgcggctgcactctacaaacgcttaccgatcagtacgaattgcattttatacatacatatacatatatatacatacatacacatatatatacatacatacatatatatatatatatatatatatatataaatataaaatgtatctata

SEQ ID NO: 22989 - protein, 553 aa, DROSOPHILA
MREKFNEKRAKWLARSKRSGGSPADESPRSSSHSHSQRTDASDAESLSGSSLNVHTAESETQTDGGISASNSRPLVGGGSCVLRTPSPARRRRIHLELQLQRREERAEHQKVVPQDSPTPTHQQQANAKSAHTNRPGSSTSGEADDASRPGESILVRVICPSSRVLIFKTDVNKRLNELKSEVILELSDDPDSIQLFAPDVRHLNPRYRLYRAEYFGGELNEGDTLAQLKVRNNETFILSPRRNTLPQTVSRIREVPGPNEQLVESATRYVPVNCNQLPTIDINEIFQQSNIQYDVRKVLISLAQASAAVIGAGPYAPRLIAMLKQRLINRRNQQADTLQCLVDMGFKRELAAFALKAHNGIYSTTMEWLIQNQNEENPQEPPGMNMQHSLSSISPSTIVTNNETIENTAALIEIVRIYSHRDSPPSDEIVESLTEMGFEETAVLAALKKTGNNKASACEWLCDNRSGSVIELREGLAPDSPILKVILEMPQVQMTLSNPKTFLAFLGILENEHAIRVWRGDNDTTSVITHILQKYHEEKHVLGINQFYTNRW

SEQ ID NO: 22990 - DNA, 3113 bp, DROSOPHILA
ccgcatgtggggctttccattgcgctcgtagctcgagtgcgccacatgctgtctgcgaccgcgcctggatgtctcgccgaatcccttgatgggcgcaccaattgcatcctgtacccgcggatcttcgaccacacgtcttaacgcgtccgcgtatatattgttcgggctttcgctggagaatagctctcggaatatggcaaagaacatcacgcaggtcacccctaatccggcgattataatcgccgtataactggccgtcttagtgttctccttgatcttctcgccaatggggcgcacatccgtcgacacctgggtgttatcctgcgatcgttgaagggatccgccaccatctgcatgaataatatagtaaatatttcagatgtaacctgatgagaagtttgaggcacaaaccgcgcgacgcttcctgtcgcaaatgtggactccagtgcatcgccgccgcacattttaacctggcaaagttggtgggcaacaaattttgccgctgagtgaccaaattgcgcaataaagctagccgtgacatcgttcacgacgaaatcaatggtaaaaaacaaataaacgtactttacgaaaaaaagaattctaatcagctgtttagtttttcgatacaaatagtgttgcacattttcaccaattagcgggttatcgggctattcccgctaaaatggctatagccagctagaatggcgtttttattatttcgatatttactaaaaacaagaaattgttgaaagtaaattttatatgtttagggtacacagataatattacaaataaatcatatatattacaaataaatttcgaagtcaacgtatctgttcttatttatttccctttcatacgtttcaaaatctaagctcgtagctaaaaatctattattttcattggcttgaaaatggccatgtatcagtgcgctcgaaagctggtaaccctgccatctgtgatagtaagctttttttacgtcaaaaagtcagaaaacctgataaattaggagaagtccattcccctccagaagccagttactccaaagttcgccatcacgtcgcttccaacgcttttcggtcgcatactcagacgctactgcgcggtgaatactaatcccagcaagatcatggtggtcacacacaacgtcaagggatacgatgagttcaccaaaaagatggaggaactggagaacggcgacgagccggtccacgtcctcttcagtggcggcaaggacgagaaaggagagagctggtgcccctactgcgtcaagggtgagcatgccgtgatcccaatgcggctaaccgcaacctatccgattcccaaactcatttctcacgtttgcagcggagccggtgatacacgatgcgctgaagaaggccccgggcaactcgcacttcgtgcatgtggatgtgggcgagcgggcatagtaagttaataccgccaaactgaagaaaacagctgcgattagttagataagcaggaattaatatttcatgcactgcgagactgcgaacatctgctggtttctttggttcgaaatagccaaatagtttcaaaacacaggcttagtcatttagaatgacgtacatatatgcatatatcccacgtcattcagttgccaaaaccctttgtcattcgattatcaagttcaaaacattttggcaatgtgaaactagtcactcaaccccaactgtacgatgatgaaataagcactcgagtactttttcacacgccgagaacattcatgataaaaaaaaccattaaacaacgatagctttacaatgctcttgagttgtattcatgccgcctgttatcactgaaccgtggtaagcaataaattaacacttgtttttcactgcagctggaaggatttgaactgccccttccgcaaggatcccaacacgcatctgatcttcttgcccactctgttgcgctggaagcggccacagcgtctggatggcgagcgctgctccaatcaggatctcgtcgagatgatgttcgaggatgaggattaagtcgtataccttacatacatttattttggaactttactcaatttggaatacacagaagacacacacacagattcaattaaagcgtccctcagtaattgctcttgtacttcttgatctccaccatcacgacgtggatattggtcagctgggcgcgggcattgggcgtgaggagcttgtggaatcggtgatagtattgcaccaaactggccaacgcaagctgcagaagctgtgagcccgtcagcaatgagggaaatgagagaagcacctccctgtttagctcctccagagatttcttccaattggccgagaagctggcgaccaaggccagacttcttcgctcctgtttgcgcagctcatccatttgttccttctcgaagaagtgctcgcactccttgacgaactgaataatgcctccgaaatgaggggccaggatctcctcgacatattccgcactgcgggagttgagctgctctctgaatgcctccgcttctttggagttatctcgcgtgtgctccatcaacacgcccaaaaccaaatcgtagttgtttatcaggtagattagctgatcctttcgcgttggaaatattgcggccatgcgaaggataaagcactccacttcattttgcagttccagaagcagtcggctaaccaattcattaggaaaatgctccgagattcccacaatggccgcactgaactctgcgtagcgtcgtgttatctgtaaagtatacgtattatattatgacaaggcgttttgttcaaaagaaatggttaaaagttatctctattggccctctcttgacttttagaatgctatcaacatcgatttaagataatttgtaacccgtactaactttaaatcgtatacttacgtagtgcggtcccaattccttgttgaacttggttggatcacagtcatgtatgctctggatattcaagcggaatactagttcgaaacgtggccatattaccgcctgcagggagtcccagtatctgaaatcaaaacatataaatatccaattgtgaaccaaaatcatcaacgcccatgaatagactcacttatccaatgcgggaacacagcgcttgtggcacatt

SEQ ID NO: 22991 - DNA, 605 bp, DROSOPHILA
ataaattaggagaagtccattcccctccagaagccagttactccaaagttcgccatcacgtcgcttccaacgcttttcggtcgcatactcagacgctactgcgcggtgaatactaatcccagcaagatcatggtggtcacacacaacgtcaagggatacgatgagttcaccaaaaagatggaggaactggagaacggcgacgagccggtccacgtcctcttcagtggcggcaaggacgagaaaggagagagctggtgcccctactgcgtcaaggcggagccggtgatacacgatgcgctgaagaaggccccgggcaactcgcacttcgtgcatgtggatgtgggcgagcgggcatactggaaggatttgaactgccccttccgcaaggatcccaacacgcatctgatcttcttgcccactctgttgcgctggaagcggccacagcgtctggatggcgagcgctgctccaatcaggatctcgtcgagatgatgttcgaggatgaggattaagtcgtataccttacatacatttattttggaactttactcaatttggaatacacagaagacacacacacagattcaattaaagcgtccctcagtaa

SEQ ID NO: 22992 - protein, 126 aa, DROSOPHILA
MVVTHNVKGYDEFTKKMEELENGDEPVHVLFSGGKDEKGESWCPYCVKAEPVIHDALKKAPGNSHFVHVDVGERAYWKDLNCPFRKDPNTHLIFLPTLLRWKRPQRLDGERCSNQDLVEMMFEDED

SEQ ID NO: 22993 - DNA, 9489 bp, DROSOPHILA
agcaaaataagaaaatcagacaatatgatgctttttatcagtattagaaagattatcaagtataagtcagcaagtaaacatcatcacaaaagttctgaagttgtctacgcatggttggggtttttgatattgaaatcaaagaataaaaaattaattaatttaggtaacacgtttattgtaaaatatgatgtacattaaaaaatgtaacaaaataaaattatacatacattatattgtattgcaaactgtattatgttctttttgtattaactaattattatatgggtctttggtctaagtctggttggaaaaagtgacgttaccttttaataaaacttatcgatttaattcttgtcgtacttcagcggtaagctacgagcaacacaccccggagttaaacaattcaacgacactaagaacgtaaagcaaaccactttagctacgggctatttaaagaaccagcatgcggtgtcatattgttcggatctaattattggaaaccccaaggaggtacatacatttgtgacttctatttattaaacccgtaaaaaggtagattagatttttgaaaagtatgtaacatttagaaggaagcgttttcgcccaaataaagtatacatatttttgatcagttttaatagtagagcagatctgaccctgacccaaaagcacacgcttttgaaaaatattttcgtatttttattagtctagtaaatttctatcgatttgccaaaaaatgttttgtcacgcccacaagccgaccataactgctctgcccacacttttgaaaaatgattagatttttcttcgttttattgccaatgtacgtctttcaaggtctgagtcatgggagtcggtagtaacgctgactcgttgttgtgactctcaattcaatagtttagagtggtcgccggaagccactgcgtataagacattcttggaaaatgaaatttcttcaggatttatatgcgatccttcctttggttttcttttcgcttaccttatttcttccgaatcgaagatatccatcaccagccactgtgtaattccattccaggtgacagtgggatactttaaataattgtggtcgagtatcagctaactcgtgaacatgatgttcttcgtttggtatcatgagcactgaggagtctgcatcgccttcggaaatgaagaccgtagcagaaaccacatcggcaacgatatcaaatttccctagcttttagacaagtgcacagccatgctcctctcttctagattggttttattgattggtttaccgtaatagtgtatatgccgtacaaattgggtggaaagtttttaagtgatcaaactattgtaagcgactttcgtaacttaaaggaaaagaaaaattcggggagtgcacaacagactagagatgaaatattatttataacaataaatattactgcttaagagacattttgtcttattgtccagagatcggcagggtgtctttgtttaagctttcttctggtcagcgggctagtcaaggaggctgagaggtgtgccctcttatgcagacttccaagggatttcaacttataaagcccattaatgttcgtttttaaaagtcttcaatatgtctggacaactcgttgcgttattgtcttgaatattttagaaaatgtgggaagcttgctacccggtctgtataacaaggttattcaattttcttgctattgtttcatcgttatcacagcactcttgcattgaaggaaatggtagaaacgtagcattgagttaactaggagagcaggaagcaagaccagccaagaccagataaaaccaggtttggaatgtcagcccttaacttcgatgggagatgtggctgcttcctgcgctggacacgggaaggtgtaaacctctcttcgtgacggaagtggatatcaacggcttcgtcgcatcagataagggactggcttgtgcacttgcttctattcgcaactggcactcacagaaaaagaaaatacattaatctacaaatttttaaagtgtgggcgagacagtattgcgcagtttgtgagcactatagtatagtagcgtggcaatcatctgaaactataaattgtacgcctaaccctaggtatgtatcttttcaagcccaagctagttttctttcaaataaaaataataacatttttaaaattgcatattatttatatagtaataatgtcattacaaattgtagaaaaaactatatttgttttgtttgaataaacgtgttaaagcatggtaaaagttaattaaagtaattatagtaaacgcccacatttgacgtgctcacattactcggaacatatgttggtacagacgaacaattaaggcaacttcgttttcgcggtctatgtcttgattttgaaccatggcagtgcattgcaaaacgaagttcctctgccatttctgaacacagagattgattttcagtatttaaattttttctagaattccagcaaaactcaaatatggctacaacaactgcaagcgcaagtccacaaaggagaacaacaaacacgccacctggaatacagtattgattacatttttaagtataatattaaatattaataataccaatattttctactccaagtgcattggctttggactccttgctcttatcatctctgttgcaaacgtcacctgtatttttccaccatttgtcatataatatttgaataatacccttttcttgaagctctaaaatagcaagtgatattttatctctccatggagagcccttgggtgttgcgataccataacctttagaatcaagaaggcctcctatttgggtcagattacaatcacgttgaacagcatagtccagcattgtcgattccatcaaaaaagcatagcttccttccattactcgtttaattccgtcttcataggtttttacaaatacagctgttttacggttttccatataacgccacattttttgatatataccaatttttgaatccttaaatataaataacatttttattcaaagtatttaactgaagtcttcatcaatatatagagaatgtcttaaatatggtcgggtttagataaagttttgttttttttacagttttacaaaactgccacaccaaacatttattaaaaattgttagattttttcataattttatcagttttctaaatttatattgatatgccaaaaaaaacattgccgcgcccacttttacgcctacgaacggcgcagaactgccactccaacacttttgaacatgttttaaatgatttctcatttattcaccaatatctatccatatcccaggaaaattatgaaatttcgcgattgcatttccactagctcagtaacgggtatttgatggaagtcggaagtcttcctgaaatctcaggaagtcggtttggttggttggttacttttaaaggcttaataaacagagtcatttccttaaaaagaagaagagagaacccactcaactctgaatataaaaaattcattactcagttagtggacattttttggaatatcggtaggaatcggaaattggagagacggaaataacctgatcgactagactagtgatcctgaaaattgtttgaaagtgtgggcttgaccggcttggcggctttagggggtaagagtgggcgtggcaaaaagtttttactctacgaataacaggtataaaaatacatagctaaatttccgcattgccaagagcgacgcgaataaaaccatttaggcacacaattctttttgtacatttcgagtattacaaagttttaatacaatcttgtgtaccaccgccattttatactcagtatgttgaatctcccattctttgcctatttcagttttcgatttcttagcaagataagtttgactttgctagtcatatcattttttttaccagtttcacaatttattgtgctataacgttatgcaaaaatattattatgttgtgcaaataaaacttaaaatgcgtatgtcctttgtttgaaatatttaccctaaaaaatgtcattgtcgatccaccttccaaagttccatatgatatttcggtttgctctgccaaatcagaagcgctttcaatgggggaaatcatccgttcaactgttagaaatgcagctaagttggcagtgtatgaagatataatgattaggcaaaaaaagaaccagcatccgcccacaatacgcgtcgaggttgcctaaaaagacaaaaaagtattcggattgaaagcgtttgtaaatataattagttacagaaaaaaaaaacagtatcgttgaatatcgcgactatattacccttttactctacaaataactagtataatatactaatgactcctatacccgttactagtagaaaaagggtatacttaatttgttgaatagtatgtaataggtagaaggcgtttccgaccatattaagtacatattcttgatcagacgagtcgatctgggcctgtccaccgtttgtacgtccatgctaagatttgagatatgtatatgataaaatatctcgggaactgcgctagattgttaagagtcgactcagattcagtactaacttaaaagttcccgcacttcggaaaaccgttcttaaccgtttccttttccctaatgccacatgctgcgcgaacggacaacgaaaaattttaaaaaatgtattaattatacacgttcttctcagaataaaaggatttgctagattcgtgaaagtatgacaggcaaaacgggattatacaaggcatgtacatatgcatgtatatatattgcacacaattactatcattagtcgatgggtccatgttcgtctacttatgaacgcattcttctcaggaactatgaaaactaaataaacatagacgcagttaaagttgctacgccacaatctgcgtccacattattgaaatatgtttagatttttattatttgtcttgcccatttgtatcgcactgccacgcccacaatgaaaatggacaatagcgttctcactttgttaatggtttcattttatcatttttcattccagtttgtattgaaatgcaagaccaactcttacgcctaaaaattgtacttctcattattctgtctacttcgacaaatctcagcattcggacaaacgcacattgctagatcaactcgtctggtaaaaaaatatatattttatagagtcggaaataatcattcttacatattaaataacatagaactaatctaatcaaagttaaaccattacactgtacgagtaacggaatataaatataatcatgaacgaaacatagcaaccaaaatgtaacttttgtctttaaagtatacacagtttttcctgcaatttattttttttttttaattttacattgcatcaaaattgcatcaaattgcattttctgtaaatagttttgaccacaaatgtataaaattacttttcgttctgtctttaaattgttgttactcgttggtactctttttgtagtgacttttagatttaatgaatagtccgtaccctaggatataagtcagaaccttgttgcataagagccccaatggcaaaccaaaaactattttttaaagtaaaattgttttggattcgaactaaatccaccgtattatcatccgaggctccgtcattaacatcattaggtaggtgtaaaggtaaagtaccatgtccacaagtagtatcatgttcaacacaattgtttgacttttttattttatggtctgtacttaaatatacttcgttttctgaaattttttgtttgcttattagctccaggcgttcatcaaagtaattttctttttgaatttcgcgcaacatatggtcacaagccattgaacatggtggctttgaaataacccattcgatcggtgataatcgagccacaatccaaatggatactgatacaaaaatgtatccaaaagcaatataaaaccaaatttcaacagcgaatggagcaatgaaggagaaaaatttcgtttgagctcggtctgatatctgaaatatagcaaatattcattctattattcctttaaatagcgatcaattttaacaaatctttaaaataaattattttaatcttataattaataatctttacacatatgacgtaattatgtataccttcggattaagtccagatccttggcgtaagaatgttcctgttataaaccaaaaactgtttgatatggaaaactgattttccactatatccgtttccttgtagcatggatgggggtttttccactcatatggagaaaatcgagccattacaaagagcgcgaaagatactaatatgtatgcagctagcacataaagccatatctcgattgccaaagggttcataaaggagaacagtcgtgttggttgacttgtcggcacctattaaatttatccacatatatggaggggatttatataagtcatactacaatttgcgtaactacacataaaaaagtaataaaaaaaccaaaaaaaggtagccttaccttgaataatatgccaatgcccaagttcataaatggtttggtaaagtcgataacactttcccgagcataattaattgtcattgaggctacagcaagatcagcacgctaggaagtagtcattttggtaattataaagtatttgcaaaatgtaaataatgtacattatgggataattgaaatttaaagtttatacttgccctttccattaattcctgcacgattccattccatgaattagtctctggtatgtaaacaccgtacatattatcgggaactaattcaattttatattgaaacccaacttgtgtggcgattgcttttaaaagatcaatacaaaatccttcaaacctcaaatttccagttagatttttgtcttctttaaccataacatacggccgctcctaaaaaatgtttaaaaatcactaaggcaattgataggactgtctatacagatttatttctatatttctggcataacaaaataaaaaaacatagcttgctctcgacttcgatataatcaatgctcacacggagtgtgagaaaaaaaataactacataaaactaacacgcaaacagttttaaacatggcaagatcggagtcgtcagatatatacatagaagtatttattttttctcctatatcctgttcccgttaaatgtattaaatccgttactcttagagtaaacaacgtatactatgttcggtgaaaagaatttaatactggcaaaaaactaaatggcaaattgattttttgcaaatcgattacgaacttacaagactaaaaaatatatgataaaatatcaaaacatttttcaaaggtgtgggagttgagatcctgagatctcacgttcatacggacggccagagactattgatcaagatcaagaatatatatactttatttggtcggaagcgtttctacctgtaacatacttttaacgaatctaatatgtagtaaaataacgggtataattaagtataaataaaagacgattttaatgcgtacctctctagtcataacgaccaaggttatatttgcgatatttgaatcgtagaaagctgttggatccgaaatgttaacaccgtcgtcgggatgccaatatccaaccttttgtattttttcttgctttagtttaagaatatcaagcttaaatatgtttcgccgaccttccacaaattggacagtgccagtcagtccgtctgtgatggcctgaagcaaaaatgtaattgaatatttatttagaaaataatgaaatcgaaatctaactttgtctagataaacttttttgtgcaacttcatattaataaggcaagaaattcactaataaatattacaattattaaatcatatttaataattaataattattatttaataattattaaacttttatgtttaatatacgtactgcatttatttggttatacaatgaaattccatcattccaggtttggtcggaggtgcaggataggtttttgatataaaaattttggtgattatccaaatttagaaagtgtagtccattcgcaaacgcgtacaccgaatcaaacattaatgcggactccgtctaaaaattttgaacattaaaaattgtattctgttggagtaaaaggttttttgcgtgtgataaccacccagtgtcagcgatgctacttttaaacggatcataacgtggacattgaaaattttatagcggccctgagtccctatttaattgcgttaatgaaatgtatccattttaaatgtttaataagtattaggcacaagcactttatagccctttataacacaaatgtttgtgtgtgggcgttatgacactgagcgttatgatactgggccctactgggcgcccatatcatacctgtatataaggacttccatttatagtgtccaatccattgtgttgtaatttctgcatttgattaattacttcgagatatcttttgctatcgacatctaccagccgaaatgcagttatatttacgctgttatatctgaaatcttccagatcatatgtctccaagtcctgtacaaaattattaacaatatcacaatgaatagattttctcgagtcttgcaattttaatttaatatttaacttacgaatgttgtaaacatataatggtaacgatggtcattcatttgtagttgcaaaatctagaaataggatatttatatatttataccagttactcgtactcctactagatacgttgaaaagtatgtaatagtatataaagtataaagtatatattcttgatcattttcttcatctttattctgggcgtgtccatctgtccgcagatataaatgttcagatctcgaactataaaagttaatatgttgatattaagcacacagattttagtgacacagagcagtgcaaactttttgtaactcccactctaacgtcctataaatgcacaaaactgccacgcccacattttcaaatttttccacgcccactaaccgcccaaaactgccacgcccacacttttaaacaatttttaaatttctactcattttattcagtaatatttatcgatatcccacaaaaatcataaaacttaaagttcgtctttccactatctaagtgccgggtatctgatgatcggataagttgcctatagcatgctctcttgttttatgttacaaagtatattaatctcttattgacctgcccatattgcagaaaaatagtaatttttgttagcttaattagtatcccacaaaataacttctctgagctcgaattagtaagggaatgtccgcatagtacgtaactgattcacttgctgactacttttcaacaaatctaggagacccttaacccgttcacaaaatgtataaaatgattacgtaagcttttttaaggtttatagaagcaacaataaattaaatgcctaatgccgttaatatttagaaactgttcttacggatctaaaaaacgattttatatgggacggatttgtatccactattattttgtaaatttccttttgac

SEQ ID NO: 22994 - DNA, 2062 bp, DROSOPHILA
aagatttcagatataacagcgtaaatataactgcatttcggctggtagatgtcgatagcaaaagatatctcgaagtaattaatcaaatgcagaaattacaacacaatggattggacactataaatggaagtccttatatacagacggagtccgcattaatgtttgattcggtgtacgcgtttgcgaatggactacactttctaaatttggataatcaccaaaatttttatatcaaaaacctatcctgcacctccgaccaaacctggaatgatggaatttcattgtataaccaaataaatgcagccatcacagacggactgactggcactgtccaatttgtggaaggtcggcgaaacatatttaagcttgatattcttaaactaaagcaagaaaaaatacaaaaggttggatattggcatcccgacgacggtgttaacatttcggatccaacagctttctacgattcaaatatcgcaaatataaccttggtcgttatgactagagaggagcggccgtatgttatggttaaagaagacaaaaatctaactggaaatttgaggtttgaaggattttgtattgatcttttaaaagcaatcgccacacaagttgggtttcaatataaaattgaattagttcccgataatatgtacggtgtttacataccagagactaattcatggaatggaatcgtgcaggaattaatggaaagggcaacctcaatgacaattaattatgctcgggaaagtgttatcgactttaccaaaccatttatgaacttgggcattggcatattattcaaggtgccgacaagtcaaccaacacgactgttctcctttatgaaccctttggcaatcgagatatggctttatgtgctagctgcatacatattagtatctttcgcgctctttgtaatggctcgattttctccatatgagtggaaaaacccccatccatgctacaaggaaacggatatagtggaaaatcagttttccatatcaaacagtttttggtttataacaggaacattcttacgccaaggatctggacttaatccgaaggcaacctcgacgcgtattgtgggcggatgctggttctttttttgcctaatcattatatcttcatacactgccaacttagctgcatttctaacagttgaacggatgatttcccccattgaaagcgcttctgatttggcagagcaaaccgaaatatcatatggaactttggaaggtggatcgacaatgacattttttagggattcaaaaattggtatatatcaaaaaatgtggcgttatatggaaaaccgtaaaacagctgtatttgtaaaaacctatgaagacggaattaaacgagtaatggaaggaagctatgcttttttgatggaatcgacaatgctggactatgctgttcaacgtgattgtaatctgacccaaataggaggccttcttgattctaaaggttatggtatcgcaacacccaagggctctccatggagagataaaatatcacttgctattttagagcttcaagaaaagggtattattcaaatattatatgacaaatggtggaaaaatacaggtgacgtttgcaacagagatgataagagcaaggagtccaaagccaatgcacttggagtagaaaatattggtggcgtgtttgttgttctcctttgtggacttgcgcttgcagttgttgtagccatatttgagttttgctggaattctagaaaaaatttaaatactgaaaatcaatctctgtgttcagaaatggcagaggaacttcgttttgcaatgcactgccatggttcaaaatcaagacatagaccgcgaaaacgaagttgccttaactagggaaatttgatatcgttgccgatgtggtttctgctacggtcttcatttccgaaggcgatgcagactcctcagtgctcatgataccaaacgaagaacatcatgttcacgagttagctgatactcgaccacaattatttaaagtatcccactgtcacctggaatggaattacacagtggctggtgatggatatcttcgattcggaagaaataag

SEQ ID NO: 22995 - protein, 442 aa, DROSOPHILA
MVKEDKNLTGNLRFEGFCIDLLKAIATQVGFQYKIELVPDNMYGVYIPETNSWNGIVQELMERATSMTINYARESVIDFTKPFMNLGIGILFKVPTSQPTRLFSFMNPLAIEIWLYVLAAYILVSFALFVMARFSPYEWKNPHPCYKETDIVENQFSISNSFWFITGTFLRQGSGLNPKATSTRIVGGCWFFFCLIIISSYTANLAAFLTVERMISPIESASDLAEQTEISYGTLEGGSTMTFFRDSKIGIYQKMWRYMENRKTAVFVKTYEDGIKRVMEGSYAFLMESTMLDYAVQRDCNLTQIGGLLDSKGYGIATPKGSPWRDKISLAILELQEKGIIQILYDKWWKNTGDVCNRDDKSKESKANALGVENIGGVFVVLLCGLALAVVVAIFEFCWNSRKNLNTENQSLCSEMAEELRFAMHCHGSKSRHRPRKRSCLN

SEQ ID NO: 22996 - DNA, 2998 bp, DROSOPHILA
tagaagaagcgtttccgaacatccagccgagtcgatctggccaaagctattagtgtctttgatccggccatggatatctagacacctcacgaactataaaagctagaagattaagattaagcatacagattctagagacatagacgcagcgcaagtttgttggccgatgttgccaagccaattttgacgcaaacaaactggccaaaactgtccacacttttgaaatatgttttgatatttttattagtcttgtaaatttctatcgatttgccaaaaaaaattttggccactcgcactctaacgcaataaaaccacccaaaacggcctcgaccacatttttaaaaaactttcgatattttttcatagttttatattttgtcgaattctttctcgaattccacgagaatcagataccatttactcagcaggaagtgtgaaagatttcaataagaataaccaattttttaagaatgttcggcatgtttgagcgattttgggtggggggttttggggattttgggttacaagactaataaaaatattttaaaatatcaaaagttttctctccgtaaatacctctggaagctgcatgtctaatctcaattctctacctttaatagttctcttcatacggacatagaatctgcatgtctaatctcaattccctacctttaatagttcctgagaccgaggcgttcatacggacatgcccagatcaactcggatattggtcctgatcaggaatatatattctttctaaggtcggaaacgcttctgctaacagttacgtagttttcaacaaatctggtggctattaaaaactgaattaacataaatgagtacgaatcaaaaatatgtttatttgattgaattctggtaatggtattgaggcatactaataaaaaaacgaacatatattttcccgaataagtaagttaaaaatatatttttattagttatccgatcactaatttttaaaaatacaactaaggcaagtgcagttttctcaccaacacataaaacgtggacattttaaatttacaacaaagttccaaacgagtttatatacatttacaagtttatttaaaatctagttttcagcatacgagaacagcaattcctatcttacaatataaggaatatttttattttttagccaattcagctgatagccaatcaagtccttcataaagaccgtgcccttgggtagcacatgtagactgaataaaccactaaaaatgggtagatataagtaaacatttttgggacaattacccctaagacatacgtggcgattccttaattggttaaggcgcaacttgtccgtaagctcggcagctgtcattgcattcggtaggtcctgtttgttggcaaaaaccaaaagtaccgcgtccctaagttcatcctcctggagctgtgggaaaaataaacatggaattggttgacacgtatgtatatacttttaattaaataaaatgagtaccatgttctgtagttctctttcagcttcagttatacgatcgcggtcgttggaatccactacaaatataagaccctgtgtattttggaaatagtgtcgccacaacgggcgaattttgtcttggccaccaacatcccaaacggtaaaacatatattcttatattccacagtctcgacattgaagcctatggttggtatggtggttacaatttcacccagctttaatttgtacagaatagtcgtttttccagcagcatccaagccaactgcgtacaaaaatatttaaaattatgtgcacgttgattgcaagtacttaaaaattatgcgcgaactaaaggcttatatttagtgtatcgtattttgaacatacccataagaatacgcatttgtttttttccaaacaaacgtgtcaaaagactagatattgttagtcccatgtttaataagaaactattttatttcgtataggaaaaagcttgtcttcagtaacttcagtaaattgacgtgtaaactagtcattcgattaataatgctgtacttttcagaaaagttaaacgatggttaaaaatactgttttctataaaatactaataacagtatgttgactataccctaagcatggtctgatgaaaacaataaaaagaaacacaaaactacatcgataatacaatgttttgactgcgccattaagtcgaatgtcgataaaaccattttcgtgtacattttttaagtgaaatatttaaattgacctagaaaggctgcccccaaggggttagtgagcatataacttagactcggagttacacaatttttaaaaatcacaactgttttttacgaatgtgctctgtaggactatggtattattcgcgaattctaattgccaaaacaactttttcaaatcaaatttaaaaatcaaatttaaaaacgatgttacaaatttttcaaacactataaagctgcctgaaaacaaaaaacttaggttcttcctctctattaaccaaaaattaagacatttttattaatcaaaggtctgctattgccaatatgtcgatatcaggccaagataaatgacaatcactatattttggttgcgatttgcaatagttaacaacataaatattctgcctctgatcaaaaataaaaaaaaaatgttgagtcttgggatatcaaggaatcaaaatatctatatatgaaaatatcctacccaaaaattccagtcatttgtaaatcaaaacagcgtaagcaccccttaactttccttttaaacaaaccatggtatcacttaaaattcgattaaaatgttagagcatagtctccacagggccttatatgttgttttttttaatcacttttcaagtattaaccacttccacacaaggatctgaaaatgtcggataaacgtttccagtgtattgacttctgtatttaaacttacaactagtttttcaaacgtcacaagtaattattttgctgacaaaagtaagaaactatgtaatgaaacaaaaaaaattattttct

SEQ ID NO: 22997 - DNA, 769 bp, DROSOPHILA
tgactagtttacacgtcaatttactgaagttactgaagacaagctttttcctatacgaaataaaatagtttcttattaaacatgggactaacaatatctagtcttttgacacgtttgtttggaaaaaaacaaatgcgtattcttatggttggcttggatgctgctggaaaaacgactattctgtacaaattaaagctgggtgaaattgtaaccaccataccaaccataggcttcaatgtcgagactgtggaatataagaatatatgttttaccgtttgggatgttggtggccaagacaaaattcgcccgttgtggcgacactatttccaaaatacacagggtcttatatttgtagtggattccaacgaccgcgatcgtataactgaagctgaaagagaactacagaacatgctccaggaggatgaacttagggacgcggtacttttggtttttgccaacaaacaggacctaccgaatgcaatgacagctgccgagcttacggacaagttgcgccttaaccaattaaggaatcgccactggtttattcagtctacatgtgctacccaagggcacggtctttatgaaggacttgattggctatcagctgaattggctaaaaaataaaaatattccttatattgtaagataggaattgctgttctcgtatgctgaaaactagattttaaataaacttgtaaatgtatataaactcgtttggaactttgttgtaaatttaaaatgtccacgttttatgtgttggtgagaaaac

SEQ ID NO: 22998 - protein, 180 aa, DROSOPHILA
MGLTISSLLTRLFGKKQMRILMVGLDAAGKTTILYKLKLGEIVTTIPTIGFNVETVEYKNICFTVWDVGGQDKIRPLWRHYFQNTQGLIFVVDSNDRDRITEAERELQNMLQEDELRDAVLLVFANKQDLPNAMTAAELTDKLRLNQLRNRHWFIQSTCATQGHGLYEGLDWLSAELAKK

SEQ ID NO: 22999 - DNA, 4223 bp, DROSOPHILA
aaacttgtgaaaaacacgcccgactcaaagatgtagacgaaggtttttgcgagggagaagggatgtcttggccacagtacgcagtcccaatcagaaactccggatcccggccacgactttggatccgactccgactccggctcgattccatcagcctcagtctgagtctcagcatcagcattaccacccacacgcactgactttcctgcattcccgcattttctttttgtacatttcacacagcgtgaaattttctaaatgtcattttgctgtcatctcgtggataataagattacaactacgctgaaataataggattcaaatgaaaaaactttgccgtcgtcgtctgtctccttgcgcttctcaactttcaatacgcgcttggccacacctctccgcccagatacatagatatatatctgaatcagaatccgactggggcgttgtcggttggttattgtgcctttagcttgggatctgccacctggtatggggcagcagtggaaagtttttgatagagtgtagcgataatgagtgagcagccacaatttcaactccaactccagacggagtaacttgagcgacctacgatctggacaccacttgagccgtccctgtctgtaccatgtctgcgttctatctgtataattgattcgattccccaggttggacaggtagaaggcggtttaatgaaccatgctttcatagcgaccataacttcagattgtctacctggccgcgggccacaaatagacgaaagtactggccaagattgcaaaaaaaaagaacccagctagaccaaaggaaatgggaaagatagcaaacagaaatctaaaaccaaaaccaaaacaaaaatcaaaaagcaaagccatcagctgggcttagttggatcactgcccggggccataaagagaaaccggcttttattggcaaccaagccgggtataaaagccgcgatcccatcccatgtcggcatcagaacttccccaacgttctaacaagtcaaagtatttctcaacatgaactcctacttcgtgatcgctttgagtgctctttttgtgactctggctgttggatcggtgagtttgagaaaactaaacaatagaattatatgggttttaaagtcttgaaatattttattggactctaaccctataagatgtaatatttataagcatatatctacactgaagaccctgacttggctgtaaatataaagtctgaatcttcgagcctttggtgtgtgtttggaatatatgaagtaaacgacttggctaaatgtttttgttattaaaaccttaaattatcattttcttagtcccttaatctgagcgacgagcagaaggatctggccaagcagcatcgtgagcagtgcgccgaggaagtgaaacttaccgaggaggaaaaggccaaggtcaatgccaaggacttcaataaccccaccgagaacatcaagtgctttgccaactgcttcttcgagaaggtcggaaccctgaaggacggtgagctgcaggagtcagtggtgctggagaagctcggcgctctcattggcgaggagaagaccaaggcggctctggagaagtgcaggaccatcaagggcgagaacaagtgtgataccgcctccaagttgtacgattgcttcgagagcttcaagcccgcccccgaggctaaggcctaaagaagttagggatttaatgcttggcaaattgtgattcgggaaaaaatgtaacaaaatttaaataaattctttgtccaatgaaactatgctttgttttccatattaggtgttaatatgtcttcttggtttgtttgagtttgggttaatagaaatgcaacaatacgttaaatccttgttattattaaatcacccagtttactttgattcaatgcaatcatagaacaagtgcatcattctgaatcagaagggtgagtggcaaatttgccacagcttaattgatgctctcaagccctgtttcgcgtaagctgattataatccatattcatgtgtaagtcaggtgattcggcgttttcaatttgcataattaaatgtatgactgcattgaacacttaaactgctttattgttttaattttaggcactaatacccttaacaacacacttttcatagttgtagacaaagtcacaggtggcggctgactttgtggttccgcagctggtaagcaaactctttagcttatccaccggcagactgctgaaacggatctgggccaacttaacgatcttatcagtattgggctttccatcgtcacccaggagacccagtttcttgtagacgcagctgtgatagcacttcaccgactcagagggattcgccacctccttgtcggtggtcagcaaattagcatcactggcagcaatattcagctccttgatgcaggcctgttgaatttgcttgtaggctgccaattccgcagctgactggccctgttttaaaaatgcgaataaaatgatgaattatccctaaagcaacgtttcatccaacttaccgctactagttcgcttagagcgaaaattaggaatacaaccaacaagtagataagtttcatctttccaaagctacattcactgtcgaactgaatttcgttcacaataatatggcttaaatacgcgtaacatgcttaagttccagacttaattttgccaatcaagttattattttattaaaattcaattaataaaatttatcaattttaaactgggttatttttaattcagatccaattttcccattttaaccagtaggcgttaaatcatcgctgcctagatgatcattcgggtcagtgagctttgtttggactttggatttatttacttattgtgcgtgaaatagattttcttcttttaagattgattcttatgttttaagtgaaatggcttttgtgtttcttagtttctacaaacaatttttattcgacatacagctgcatataataacataatatgggtcttcttattagtgtattaatgattgggaaatggttacttacttattttaagtatgataaaattgcttacattcgttttcttctttttacattcaaatcaacacattagtttacttaacaatctgcccaaaactatgctatggaaccgttaaaaacatttagaaaaaagttaagcccaaaattgagccctataatatggtattcagcttttcaaacacatcagaaaatattaaagcttttaattaataaaaaaaaaactctagcaacttaaaattgtttaaactaattacgctgaaatgcaaaactcttgtttttattttattttatagctttaaaactctcaaacgctgaataagttacaatttaagtacttattcatacatacatttaaataataagtggattttctatatagcaaacaccgataagaaataagacctacaagtacacagctatttactccgacttagcggtggtcattgcttctccggaatgctggatgccgtcgataaagtcgctgccctccggaccgaatccctcgttctccgcctcggtccgctcaagtatctcacggatacgctgctccgcctccagagttttcaggtgattgtagcacaggtgcagcttgtaggctgcctcgcatcgtgttttgccctgaagatcactacactccttgatctccgccttctcatgctgtatgatcgtttgcacctgattcttaaaggcctcctccagcaggacattgtacctatccaaatccagggtctcatacagacagctcacaaagcactgcagcggctcattatgcttcagatcgagatatggcatctgcgagttgccattgaagtccagatcacccaggttatttacatcgccaatggattgaactggcgtaggggctatatcgttgtcattattgtagtcgctgttcatcaggctcatgtgaaagagtttcagttgcgacattgagatctcggtcctacgcatacaagccctcagcatctcctggctgagtttgttttctgttccatttggcggatctggaaccagggttcgtgtcatcgacatgttcagcgagacggaaagcgatcgggtctgtggatgaaatgtatttttgtaaaaattatatattgtctctatgtattccaatatgtctttttagttgtaagaaaatttgattcacttcccttttttaatatttaccttgtaaatataaaacatataattccaagtactacataagtcgaatttacaaaa

SEQ ID NO: 23000 - DNA, 531 bp, DROSOPHILA
agtcaaagtatttctcaacatgaactcctacttcgtgatcgctttgagtgctctttttgtgactctggctgttggatcgtcccttaatctgagcgacgagcagaaggatctggccaagcagcatcgtgagcagtgcgccgaggaagtgaaacttaccgaggaggaaaaggccaaggtcaatgccaaggacttcaataaccccaccgagaacatcaagtgctttgccaactgcttcttcgagaaggtcggaaccctgaaggacggtgagctgcaggagtcagtggtgctggagaagctcggcgctctcattggcgaggagaagaccaaggcggctctggagaagtgcaggaccatcaagggcgagaacaagtgtgataccgcctccaagttgtacgattgcttcgagagcttcaagcccgcccccgaggctaaggcctaaagaagttagggatttaatgcttggcaaattgtgattcgggaaaaaatgtaacaaaatttaaataaattctttgtccaatgaaaaaaaaaaaa

SEQ ID NO: 23001 - protein, 139 aa, DROSOPHILA
MNSYFVIALSALFVTLAVGSSLNLSDEQKDLAKQHREQCAEEVKLTEEEKAKVNAKDFNNPTENIKCFANCFFEKVGTLKDGELQESVVLEKLGALIGEEKTKAALEKCRTIKGENKCDTASKLYDCFESFKPAPEAKA

SEQ ID NO: 23002 - DNA, 5397 bp, DROSOPHILA
tgatatctttggagcgagagatcatggacattcgggaggagcacgtcctgcaaaaccatcgccagcgcatggagaacatcagtatcgtacgcagcctgatgctgagcctgaacgtggactccgattccctggcagtgcgtcaggagcccgctcccgcagctcagataaacagaccaagcggcccgcgtcgcagctccagggaaatctgcaaggacatgcgacggacgtgtgcgttggcccgcaccaccagaccaatctcgccaagaagatcttcctcagtgaccagtactgtatcgtccactagtcgccgctccagcgcagaagtgcagtccgaggtggtgaccactaggataccagaggatagaagagccaacaaggtaacttatacttaaatttgattatgcttttcttaacgattcattatcggcttgagtacagcctacaccaccgccacgaagaccagcggaattagtgtttgatgaggacgactcggacgatgatttcgacgaagcagtaagccccgtggaggagacacagactgagcaaaatgaagagaacaatcgtctgtttagcattatagaggaaaatggcagtgaaggggagtccacagactcgtcatcatcatgcgaggccatctattgcgacacaacgtttgaaagtagtccgccaaacgcccaagtcaccgtcacgcccagtggacgggctctgcgggaagtggacaccaatatccctgtagcagtgtccctcagtcggggaaaagagactgggaagggatcatggttggctatttccgtagctgtggaagattctccacaggagccaagcatacagtgcccacgactggcagtcaccaggcctagtcaatcgtctggaatatttcctgatgtcaacggattaacgccgcgaagaagcctgttcaatgggataggcaaaatggccggaagcaccagcactccgaaatcctttctcgtcgaggaaatgccatctataagaactagaagccgaactgcggctaataagaaatcagaaaatacggatatgtctagttctttctgcaacaacagcgcaaggccgagtagaagctgcaggcccaccagtttggtggagccaagtctgaagaacaagttgcgcaatggctcgaaaggcaaggccaaggccaaaaagtagatagacgaattttttaataggctttaatgttgtttctgtaatttcattggttttcaataccactttttaccatttttaatatgaataatatttttaaatcgtcaggccctgataagtttaatttatagactaaaagctgacatcggattactttttgcctgcaatagagggcatattcagttcatccagcgctatcggaaggaagacactccatcatcatcatcacccaaagatgccaataggaatttaaaagtacgtctaatttttacatgttcatttgtgaataaaacaacgtttcaattaattatttgttaatacgcttttaggggaactcattttatagattcctcttagatgcaaactacgtttattcgcacaaagttgttggaaacatttacaaaagactctgaagaacaaagtacaattacaattacaattaaatacagtagcaaaagggtaatgattatacgtaggtaggcgataattgcacttcttttagactacctcgaacttgcccatacaacagttgagatggtctcctgcatggttgtggcttggctgctccgtgttctccttgatctcgctgataatgtcctgtatcttgttgatgatctgttgcgagttttcaccttcgccaggagtgtgttcgctacctgcggccgcttctggttgctttgcctgggcggcatctgcgggtagctccacgcccaaactgaccaccagcttgtttagtgcctcaatcttctcgcgcagctgctctcgctccgcttgcaagagacgcatttgggcggccttctcgtactcacgctgctttagcatgcgcctctgcgtttgatagagggcaatgtactcgccaatcgtttcggtttcgctctgcagctggagcaccagatgctccaggctgtgcttctcctccgtcaagtcggcgacctggctgatcagtgtggtgaaacgcgattgcaagcgttccacggcctcggcggtgggcagcgtttcagctgcttgtctgtgggcgtggttctggccgtgatcatgtggatgatcatgctgatgatcgtgtggatggctatgtgaatgatcatgtgtgtgatcgtgcggatgatcatgtggatgaccatgatcaccagcattatgatggttatgttcatgggaatgatcgtggtcattatcatgacaatgaccgtcggaatgctgatgagagtgatcgtgcgaatgattatgcaaaagaccaacttccttcgcttcctctgcttcgttttccggtgcatctgctccattctctttttcggtttcctcaccggcgtgataagcttttgcctgaaagaaatgataatgggatataaagtcagttaaattttaatcccagtccaacccacctcataatgcctgagacggtccagctgctgttgcaacattaactgctgacgttgtagttccacgttctcgtgcgatagtctaatcatttcctcatccttgaacttaaagcgctcctcatttgcttgaagcttttgctccatgctgttgtagttctggcggatttctcggttggcaaactcttctgaatccaagcggatgaccagctcggctttgtcgtttgtcaactgaacaaatcgctgctgcagttcgtccaactggtttttcatctctacattctgggttagggcacgcgatgcggccactttgtctgactccatggtggccaacagcttggactgatcgggctgctcagcttgcaagcgttcgagttgcttttccaactcgtctaaagccgagttctttaactgcagctgatcgtcctgcgacttgatcttcagctggaattcgtggcgctcaaactcgaagttttcgatctgctctttcaagacagccagttcatcttttaaggctttctgaaattgaactaggagattaaacaggttttccatatttttttggcttacttacctgctcgctggtttcttccttggatggctgcacttgactggcctctttaaattgggcctgcaggctgatgttcttttgtatatcccgctccagggcgcccacgtgctccacaagctggcgttctcgctccctcagtgagttcagtacctctgagagttctgtgtttcgttcgttgagcttggcgatctcgccactctgatgctgcacatagttttgatactgaccagctgcctgctccttgtcctgcgttagttgacccaccatcgcttggaggtcgcgtatctgttgctcgtacatgtattgtgtttgcaccagcgactccactcggttgtctgtggtgacgctagactcgtctgagagctgccgcagcttcagctgcgccatctcgagttcgttcgatttttgggaaagctgttgctgcagttcctcttgatgctggttgctctgctttagctgggcctctagttcgttgagatgcgactgttggtccttgatttgtgcctgcgattgtagcagttgtgcctggagttgcgcgtactgctgtcgctgctgctcaccggtcgactgttgatcctggcagtgctgttgtagctgctccagacgcaattgattctgatccttgaggatgcgaagctcctccagctctagctcacgctcccggcaagccaggcgaaccttggtcagctccgcattgagctgggccttttcagcgatgatcacctggatggcctgcaagctagaggcatctgccagtccaccattgtgttccgactcgttttgggcaaaataagaagcggctgtgggcagggcagactgctccggcggctgcgtcccacctgctcctccaccgttcacatttatctcgctgtctgaccgttccgacagattgctggatatgctcacagtggacgagtgcgattgcgtggtggcagccaccggctcctctgctcccggctgcccattgttgttgctggcgcgctgctggtactccttcagctgtgtccacagaagcgtgttaaacaaaatcaatattagtcggccaatatgtgtccacgtcacaagagcaaaacaattgtgtgtggcactggttgtcgcacctttttccttgccgcggccaacttctgcgccttggcatcctgcgtgtcatcgggcatgtccttcggggtcagcagcggtacctttgccacacctggagtaagctcggttcggaaggcgagccaacaaatgtaaattaagctaggcaaaagtggaaatttctgaatgttgataacaggtctgaagttcagtatgaccgtacgcgtttagagccaaaatgccgcgcgaacgggtacactaggcggcagggaaagcacagttatatattggcgcgcatttttagcttttttttcatttttaaaatcgaacacgtatatatgcgtatccgttttcaataaacagagattatgtacaattaagaaatttcactctacttgcataaacgttcatgcgaggaggttttgagaaatactcttcaaattaaaaaaaaaaaacagtattatttatcgaaacaaccattagttcatcgtttcttatcacttcacttaagtcggcttcctaattcagtcgtagttaagccgctgtgaggagtagaagtccaggtcgatacgatgtacaaccttatcaagggctccttggcaacatactgctgcctgtgcctgctactgatattgattgacccagcggaatcgggacaactgtcaacgagattcaacgtgagcttcgcccagctggattcctgcgaaacctactccgttccgaatacgggctatggctaccggaggttctacatgctgcgcgagctgagcaacaacaacaggaaggccggagagcggctgcacttgaaattctacgtcctgaccgccatggatgcgcacatcctgctctcggtgacgaatcacccgcgcccaaatgatcgcgtttacgagatcggtgggtgaaatcaataatattcagttttaattccagcatttcaatgagctctttctagtggaaccctacctaaatattcaattgatatctttattccgcttgcagtgataggagccggcggaaatacgttttccgcaatccggaatgctatgggaatgaggcgggtggccacgaatcaagagccgaacttggtatcgctgtacgacccgacgccaattgagattgtccaaaaccagagtgagttcccccatcttatcgggtattccctgcccctccaacgcacagtatatttccagatggcgagctgtttgtttacat

SEQ ID NO: 23003 - DNA, 2980 bp, DROSOPHILA
ctgaacttcagacctgttatcaacattcagaaatttccacttttgcctagcttaatttacatttgttggctcgccttccgaaccgagcttactccaggtgtggcaaaggtaccgctgctgaccccgaaggacatgcccgatgacacgcaggatgccaaggcgcagaagttggccgcggcaaggaaaaagctgaaggagtaccagcagcgcgccagcaacaacaatgggcagccgggagcagaggagccggtggctgccaccacgcaatcgcactcgtccactgtgagcatatccagcaatctgtcggaacggtcagacagcgagataaatgtgaacggtggaggagcaggtgggacgcagccgccggagcagtctgccctgcccacagccgcttcttattttgcccaaaacgagtcggaacacaatggtggactggcagatgcctctagcttgcaggccatccaggtgatcatcgctgaaaaggcccagctcaatgcggagctgaccaaggttcgcctggcttgccgggagcgtgagctagagctggaggagcttcgcatcctcaaggatcagaatcaattgcgtctggagcagctacaacagcactgccaggatcaacagtcgaccggtgagcagcagcgacagcagtacgcgcaactccaggcacaactgctacaatcgcaggcacaaatcaaggaccaacagtcgcatctcaacgaactagaggcccagctaaagcagagcaaccagcatcaagaggaactgcagcaacagctttcccaaaaatcgaacgaactcgagatggcgcagctgaagctgcggcagctctcagacgagtctagcgtcaccacagacaaccgagtggagtcgctggtgcaaacacaatacatgtacgagcaacagatacgcgacctccaagcgatggtgggtcaactaacgcaggacaaggagcaggcagctggtcagtatcaaaactatgtgcagcatcagagtggcgagatcgccaagctcaacgaacgaaacacagaactctcagaggtactgaactcactgagggagcgagaacgccagcttgtggagcacgtgggcgccctggagcgggatatacaaaagaacatcagcctgcaggcccaatttaaagaggccagtcaagtgcagccatccaaggaagaaaccagcgagcagaaagccttaaaagatgaactggctgtcttgaaagagcagatcgaaaacttcgagtttgagcgccacgaattccagctgaagatcaagtcgcaggacgatcagctgcagttaaagaactcggctttagacgagttggaaaagcaactcgaacgcttgcaagctgagcagcccgatcagtccaagctgttggccaccatggagtcagacaaagtggccgcatcgcgtgccctaacccagaatgtagagatgaaaaaccagttggacgaactgcagcagcgatttgttcagttgacaaacgacaaagccgagctggtcatccgcttggattcagaagagtttgccaaccgagaaatccgccagaactacaacagcatggagcaaaagcttcaagcaaatgaggagcgctttaagttcaaggatgaggaaatgattagactatcgcacgagaacgtggaactacaacgtcagcagttaatgttgcaacagcagctggaccgtctcaggcattatgaggcaaaagcttatcacgccggtgaggaaaccgaaaaagagaatggagcagatgcaccggaaaacgaagcagaggaagcgaaggaagttggtcttttgcataatcattcgcacgatcactctcatcagcattccgacggtcattgtcatgataatgaccacgatcattcccatgaacataaccatcataatgctggtgatcatggtcatccacatgatcatccgcacgatcacacacatgatcattcacatagccatccacacgatcatcagcatgatcatccacatgatcacggccagaaccacgcccacagacaagcagctgaaacgctgcccaccgccgaggccgtggaacgcttgcaatcgcgtttcaccacactgatcagccaggtcgccgacttgacggaggagaagcacagcctggagcatctggtgctccagctgcagagcgaaaccgaaacgattggcgagtacattgccctctatcaaacgcagaggcgcatgctaaagcagcgtgagtacgagaaggccgcccaaatgcgtctcttgcaagcggagcgagagcagctgcgcgagaagattgaggcactaaacaagctggtggtcagtttgggcgtggagctacccgcagatgccgcccaggcaaagcaaccagaagcggccgcaggtagcgaacacactcctggcgaaggtgaaaactcgcaacagatcatcaacaagatacaggacattatcagcgagatcaaggagaacacggagcagccaagccacaaccatgcaggagaccatctcaactgttcgtattaacaaataattaattgaaacgttgttttattcacaaatgaacatgtaaaaattagacgtacttttaaattcctattggcatctttgggtgatgatgatgatggagtgtcttccttccgatagcgctggatgaactgaatatgccctctattgcaggcaaaaagtaatccgatgtcagcttttagtctataaattaaacttatcagggcctgacgatttaaaaatattattcatattaaaaatggtaaaaagtggtattgaaaaccaatgaaattacagaaacaacattaaagcctattaaaaaattcgtctatctactttttggccttggccttgcctttcgagccattgcgcaacttgttcttcagacttggctccaccaaactggtgggcctgcagcttctactcggccttgcgctgttgttgcagaaagaactagacatatccgtattttctgatttcttattagccgcagttcggc

SEQ ID NO: 23004 - protein, 789 aa, DROSOPHILA
MPDDTQDAKAQKLAAARKKLKEYQQRASNNNGQPGAEEPVAATTQSHSSTVSISSNLSERSDSEINVNGGGAGGTQPPEQSALPTAASYFAQNESEHNGGLADASSLQAIQVIIAEKAQLNAELTKVRLACRERELELEELRILKDQNQLRLEQLQQHCQDQQSTGEQQRQQYAQLQAQLLQSQAQIKDQQSHLNELEAQLKQSNQHQEELQQQLSQKSNELEMAQLKLRQLSDESSVTTDNRVESLVQTQYMYEQQIRDLQAMVGQLTQDKEQAAGQYQNYVQHQSGEIAKLNERNTELSEVLNSLRERERQLVEHVGALERDIQKNISLQAQFKEASQVQPSKEETSEQKALKDELAVLKEQIENFEFERHEFQLKIKSQDDQLQLKNSALDELEKQLERLQAEQPDQSKLLATMESDKVAASRALTQNVEMKNQLDELQQRFVQLTNDKAELVIRLDSEEFANREIRQNYNSMEQKLQANEERFKFKDEEMIRLSHENVELQRQQLMLQQQLDRLRHYEAKAYHAGEETEKENGADAPENEAEEAKEVGLLHNHSHDHSHQHSDGHCHDNDHDHSHEHNHHNAGDHGHPHDHPHDHTHDHSHSHPHDHQHDHPHDHGQNHAHRQAAETLPTAEAVERLQSRFTTLISQVADLTEEKHSLEHLVLQLQSETETIGEYIALYQTQRRMLKQREYEKAAQMRLLQAEREQLREKIEALNKLVVSLGVELPADAAQAKQPEAAAGSEHTPGEGENSQQIINKIQDIISEIKENTEQPSHNHAGDHLNCSY

SEQ ID NO: 23005 - DNA, 14023 bp, DROSOPHILA
atacgcatttgtttttttccaaacaaacgtgtcaaaagactagatattgttagtcccatgtttaataagaaactattttatttcgtataggaaaaagcttgtcttcagtaacttcagtaaattgacgtgtaaactagtcattcgattaataatgctgtacttttcagaaaagttaaacgatggttaaaaatactgttttctataaaatactaataacagtatgttgactataccctaagcatggtctgatgaaaacaataaaaagaaacacaaaactacatcgataatacaatgttttgactgcgccattaagtcgaatgtcgataaaaccattttcgtgtacattttttaagtgaaatatttaaattgacctagaaaggctgcccccaaggggttagtgagcatataacttagactcggagttacacaatttttaaaaatcacaactgttttttacgaatgtgctctgtaggactatggtattattcgcgaattctaattgccaaaacaactttttcaaatcaaatttaaaaatcaaatttaaaaacgatgttacaaatttttcaaacactataaagctgcctgaaaacaaaaaacttaggttcttcctctctattaaccaaaaattaagacatttttattaatcaaaggtctgctattgccaatatgtcgatatcaggccaagataaatgacaatcactatattttggttgcgatttgcaatagttaacaacataaatattctgcctctgatcaaaaataaaaaaaaaatgttgagtcttgggatatcaaggaatcaaaatatctatatatgaaaatatcctacccaaaaattccagtcatttgtaaatcaaaacagcgtaagcaccccttaactttccttttaaacaaaccatggtatcacttaaaattcgattaaaatgttagagcatagtctccacagggccttatatgttgttttttttaatcacttttcaagtattaaccacttccacacaaggatctgaaaatgtcggataaacgtttccagtgtattgacttctgtatttaaacttacaactagtttttcaaacgtcacaagtaattattttgctgacaaaagtaagaaactatgtaatgaaacaaaaaaaattattttctgagattttgttaatgtgccccgtctaattaacttgtactatttcatatttgagtcgatttaaatctatgcatatgtaaaagttataatcaaagtatttaggttacgcatgattcccttcggataggttcgctattcgttcagttaggcaatccaagttcattacagaatgtgtatctcttggatacaacacatacacaagattttctcatccatgcatattcatatatactaatgtaatacatatatgtaatccaacaatcagtttcactgtggtacattttataatgtttaatcatatatagtcacgggaactagagtttatacacggtcctcgaataaaatgtgttttggagctgtaagctaatcaacaaaaaatgagactaactaaaaaaaagtgctactaaaattcccagactttccactttctgtcctacatatatataattaaagaaaatccgaaccaatttgaataacttatctattttattctaacaccaacaacaactttaaaaagtttttgatttaacgtaaaaaattggccgtaattcttgttgctttggttacattctttctattgtattgtaccaacgaaaaaagtagagaagcaccgagacggtagtggaattattccggaacactttcgatactctttttcgagtggaagtggtttcatgaggaggaaatttggtgttcctttttgccgggctctttcatacttcccgtgctgtaggaactccgtgaaaagcttctgtaagcattccctaaatgtcttctggatatattccgagactatattacaatactttcgtaaacattactcaggattgttttctagatactttccagaataaattatcaggaaaatttatattgagtgctttgaaagaagaagtgtttccaaagtataaaacaaaatctcggcttaaccaatatttaattttttattattatgaactgaactctgtaatacttcttttccttgaacgtttctttttctctcaaaattcattcattgtttatcctttcataagagcccttgaagcgcaagactgtgtaatcttaaaaaaatgttcagaaataaatataattttatgtgtctgcaaaaaatttattaagcaacaaaaaaatttgtcgaatttcgttttcgcgttttcaacatattgtataaaaactgcgaaagggtgtagggcctacacacgacaaaactttgtcttattttaccacgtattagaaagaaaaactactctaaagtcgaatgtgtcatcacagagtataaaattgcaatgtattatattattattatttttatcttaaagaacggaaaataaacatctactaggtacatgatttttaaagatttattgatacgagttttgggaaaatataaaatataatcttcaatatatacacatatgtacaatatatttatgtaagttcatgtagttttaatgcttttaaaaataatagaaaggaagaacactaatttaagaaacaaaacaattgtggtatttttgcttaaatcggtgtttgcatttcaatatgaaaatcattttctttcagcaaaataaatatatttgggcttgattattaaagaacttcgaatagagccatgacgtttcacaaaacctttggttacggatgcattgtattaatatgttttgaactcctgtttgctggagttgaaacgtccagcgaaaatgatgatgaatatttaacacagaaaggtattgtatatccctttactttactgaaattacacctcagaatcgaaatatttatacatcttactcgtagagtaaaaggctatactagattcgtgtaaatgtatgtgccaatcagaaaaaagggtttccgactatataatgtatatacatatattcttgattaggatcaatagccgagtcgaactggccctgtctgtctgaccgtccgtatgaacgtcgagatctcagaaagtataaaagctagaaggttgaggttcagcatatagattctagagacaaagacgcagcgcaagtttgttgacccatgttgctaagcccactccgacttccgcgtaaaactgtcgcgccctcacttttgataaatgtgttaatatttttaaaaagttttattgcccaaaaactttgccacgctcattctaacgccctaaaaccgcccaaaaccgccacgcccatttttgaacaattttgaattttctcattttattccccactatctatcgatatcccagaaaaatgatgatatttcgccttcgcattcacacgggtatctgatagtcgggaaaatcgactatagcattctctcttgtttattttgtaacatccttggtttagaactttaaaataagagctgtattaaaattacttgttgtatttcagaaatcatattagaaaagtcatatcacggtttaattcgagaaaatgaaacacttgtagaaataactccccttattaaagtgaacgaagagaaaatttgtaacttccatattctcaaaaaaccgtatcacgaaattccatttaaggtaagttttaactactttttagtaatgtaataacttgcacttcatattttagattgaactggtaaataacctaggtattttaaaagcacgtcggacactaaattgcgagaatcgtaaaagttatcactttgaaatctgtgcaatctattgtgatggaacaccttcaaatacagccaatgttcatattactgttatcgacgtaaatgagtatgctccaacattcttagaaccgtcttacgtaattgaagtagacgagggaagactttataacgagatcctaagagtcgaagcttccgataaagactgcactccgctctttggtgatgtttgcaaatatgagattcttaacaatgatgaaccattttcaatagataacgaaggttcaattaaaaacactgaaccactttctcacaaagcttctcataaccacattctgtccgtggttgcctatgattgtgcaatgaaagaatctgcacccattatggtcagcattaaagttcgacgcgtttgtgaaacaaagtttgtaggcatgccagaacgcattgactacacggtgcgtatacatagccatattgaatgaaaaaaaattaaaatgttatcggtattttcagtctggaagcaccgaaagccttcaattgtttcccaatgctcgcctagacttatgtgacatttcttgcaaaaatgaagaagaccttaggattcattcttccatagcccttaaggtaagcacacatatttttgtaataataatattaattccaaatcacgatttgttctacaatttatgggaccattaaaatcaaaaacacctcttaccgagttgggttgggtaccggtgcagatagcatcttcaacacacgatataatagatatcaacttttcataaaccgtgtggttaacaataattttaaatattttttgtgggggtgataccccctaacagccgcatcaggacaaaattgtataatgtgtactttaagcttttcatatttttcctcctgaaccatatcatttattcaggcttggtatgcaatccctttagtattttcataaatttgggattaacagttttctgcggcttgtatgagttcgagttggcattccatttccatcgaaattggaaagacatgtaatatcatataatataatatcttataatattatataatataattatataatagatccaatcacttttcaaaagtgtgaacttgttagttttgggcagcttgtggcaaccatctaaaacagaagagttactataaactgcatgctcagtctcaactctctgactttgtagttcccgaggtcagcgttcatagacagacggacgtgaccagatcgtctcgggcccagatgaagaatatatatgtatacattctgactacttttcaactttttactcttggagaaaatgttttataaggtctttttaatgtttcaaataagtatctaatccgaaatatatatttaagaggataaatgttacatataccctgttttttaaaaaatgatctggcaagataccaactttgcggttatgttacttcacgtgtttgctttaggaaccattttcgtaaacctgtgcatcataatgaaccaaatatgagtataagttgttaatttcatttatattttcagacaaagcacatctcatttgggtgcgatcgggatatatctaattgcacttcaggccaaaaagtgaaagaccttttgccacatggggcagaatggactaaagagttaagttatgacgaaggtctagaacccatatttcactttgatgggtctactggagtagtagttcctgcaactgttattgatcattacgatttttcatcgcaaccttttagcattcttaccttatttcgacacaacagtcaggttgaaattaataaacatgtaaaggagcatattgtctgcagcgcggacgaccacaaaatgaaccgtcatcatatggcactattcgttcgcaattgtcgccttatttttttattaagaaaaaattttaacgaaggtgatttaaatatctttagtcctgctgaatggcgttggaaaataccggaggtctgtgacaacgaatggcatcactatgttctcaatgttgaagattcgtccaaagtagatttatttattgacggcgtacgtttcgaaaattctattgaaaatcgtcatagcaacccagaagtaattgacgattggcccttacacgcagcccacggagtaaatacttccttagctattggtgcctgttaccaaagcttggaaaatagacttaaacatggctttaatggagatatttcagaagtgaaggtctccctcaacagtgttttgacggcagaggacattaaatgtggaacaacttgtgccgagcatttattagctccaaagccgctgcaaagtaacaatgaaaaatcgtattctgataacagccagattaaagaaaacattgaaatgaacgaaatttatatttcggcgaaaaacaaacatgatattgaacaatttatgcgaaaagttcagtatattaatactaaacaaaagcccacggtaggacgtcgaaacatagaagtgcttacaacactgaattgtaaaaatgaaagttcccttcgcttaccgccaattgagacttatatcatggttaacgaaccgatagctccactcgggatcgatattgatgtcgtctcagcgtcggtaaataaaaaattataccgttattaagagatatcactaaaaaatgtatatcaatcttacagctggaaacctccgatctaactccgccatcgtattcccccaaaatagcaatatctggtacgtaaactacactatgataacattgcttagatggtagttttcagtcatatgaaacaattctaatttaaatttgtgacggccgtgtaacgtaccgtgttttattaatttttaaagccataggcactgttgccgttagggccgaaatcgcagtcggctactaataaaaatttaatttcctccatattacttttttgagagataaatcgtgcgcaagagagttggtacacgcatcgtgcacccaatgcagtcggctctacttgcgttaccgcctattttgtgatgtgtttcaacagcaatgaattgttgaactggaagtataaaacttaggctatagatgtaattaatggttaatttttatttcatattatattgtaaattattgcattacatgaatgagttttacatttatatatgtttatacgactctgatagttgttggaatcacgaattgcaaaataaaaaagcaatttgaaaataatacaaatggtctaaaaactgttgtaattggttggcgtggtcaaagtttactaacgcgtcaaaacaactaatacaaattatcattatatatactaatacaaatacacaatttattaattcattttgtaatgttatttcctgttgtatgatttttaggaacttcaaacaagcttgtatcatatcaagaaattaaattgggcgtacacattttggaaaaaacttgcattgactcggtatctaaaaacaatggaaaattagaagagaaaaatcatatcgactcatgcagcgtcgttgtatttccctctttgaatcccgatcatgaagacattaaaatagatggtgacgagtcattgtcatctagcatggacattaagactaatattaataaggatggagtcgaaatgattggaaaggataccattagcaattatataaatgtattacgatctcttgtatacagtaacaaaaaacctgcatattatcttaaccgtgtatttaagctttcttgtgcccaacaaagttcccagtacaaaagcggtgaatatacactaacacttactgtgttgcatcctaaacagacattgtttaagtctacaaatgtactcccttcatcgttatctaaagtaaactttattggcaacaccgataatgaaacatcatttcaccggaatagtggttcggtaaatggcaatgataataatcagccaacaggtgggtttccaatacttatatataaaaatatgtataatatatttaatcctaatctttttagagtctaaggtatattcatattcccttctgcataccaataatgtgcaagaaccaaaatctcacattcattctttcatacacaaaggtaaatggcactgtaaaataagtttataaaaatatatagaaaattaaatactttttagctgaagggtcacatgttacaatgcttataattcttgtaagtgtttttttggcggtcttactttgtggagtctcgattgcacgtttaaaaaacaaccaaaaatatattgaacaccatcaaccatgtccaaaagtaagtatatttacaacctgaaatttgaactcattttagtatacccttgccaatgatatattttcgttcagaagtttgaaatacaagacactcttgggtccatatagtgtataatgtgcttgatcaacagttatagccgatatagctatgtctgtcgttctgtccgtcctttcaaatatgtgcatcgtattatattttacattttttcatctggaattttcctactattgaatttatattttttagatttctgatgatggtttaatttgggatgactcagctttgactataactataaatcccatgcaagcagatgttacatcggacgcgagttctgaatcagaaaattctgaatctgaagatgaagaaggtatagaatatatttattaaatattatttaaattcttaagagatatctttggcattagtagctttaaaggacggattcactcacatcaatcaactcgaatgggataactctaatattttccaacagtaaataacataatgaatatttttctcaacactggtactaaaatatgtaaatgtgcttaaaaatataaaccactaaatcaacaaatatgcagaagttataaatgagttccaaagagtctgcatatatggctgcaggcataattgtaaagacgtgcatttatagttttttttgcaacaaaaaacatttttcttgcaattgtttaattgtaaaaactaagtcagtgaaagtgcataacacatcatatgaatgtacgtaaaataatagcgcaaacaaaaatatagctaaggtatagtacaattattatgtaaccagcgtcgctagatccataaataataaaagctataggcatacaaatatacacataagatctatttaatttatagtttgtcagccctcaccttaagatgtaaaatgcacatgtctaccaaatttcaactgaattctgtcgcaatgcataggaggaagtttctccgtcccaataatttaagcctaataataaaacataaaaaaaatttgaaatggatcgtaatacccaaacaatgttgacttatttaataaagctaaagttgtcattgatttattattttttcaagtatacaacttagattaaggaacatatcgaagctataaaaaatttattttcaaccgaccataaacttgtgaaattgtacttttaaaatagaatttttaattggtttatttaatggtactatttattgaaacataattagtttccattttgaatggcgacatatatacaaaggaagcaaaaaataaagctttttcgtcaaaggtaaaattccatatttagttttaataaatatgcaggagctattttgacttcaatgcaaagcaatcgatgagacatttccgacaaatggaaaatatattatagacgacatataattatacccgttactcgtagagtaaaagggtatactagatttgttgaaaagtatgcaacaggcagaaggaagcgtttccgtctatatatagtgtatatattcttgatcaggatcaatagccgaattgatctagccatgtccgtctgtccgtaagaacgtcgatatctcatgaactataaaagctagaaggtggagattcagcatacagattctagaggcgcagcgcaagttagtttacccttgttgatacgcccattttaaagcccacaaaccgcacaaatctgtcacgcccacacatttgagaaacgtgttgatatttttcgcgtttttattagacttgtaaatttctatcaatttggaaaaacaattttttgccacgaccactctaacgccgccaaaccggtcacgcccacactttggaaaattttaaaatttttttcgaattttattctccaatatcaattgatatccaagaaaaattataaattatatatcgactatagcattttgttctgttttgtttataatttggaaaaaatttgacgcttgttttgtcatatatatttgctgcagggtaaaaagcattagctcgttgaaaactttcttccttgttgaattgatcaaagttttgacactcagatttagttgacccgatcaacttgttgctgcagatgtttgatgcgaaagtagtggctcttcagtactaattccaagacgcagagaaaaaccattttcaacgatatcgatctgaatattttcgaactcaaaatttttgacaatcgatcatttctttatcgataatgagaaaatgtctacttgctagacctgatcttgatttcaaatgccaatccaaaattacatataaattttctacaaaatcttatagtgggtttaggatttgtaaatttattgtaaatcaaatttacttagtctaaatactcagcaaaaaaaaaaaacacattgctgttgaaatttaattttataaaaagaaatgttcaaaacaaaggtaggtcacatacttgattgatgttgcgcatgattggcttgttaaacttctgatgaagtttgatctttttaagacccccggcaactatagaaatttttttctacttcactgcgtacaaacatatgtttgactattaaattaggataacataaaatgcacacacacaaaataaagcaaagctttaaatagggtataaaaattgcatattgaatatgaatatatgaacacattcccacaaccaacatcacaaatatagtaatacttacttgcggtgcgaatgggtttttacacttatatttttcacttttcggacaaagataacaatacgtttatctacgatcgaacagccgacatgtagaagttctaatattaatttttgtgtcgaaacatgatttcgcgtgtacactataaaaatgtaatcattcagcctaaaaataggcctggagaaatcgaattcaaagggaatggaaggaaaaaacgaaaccgaaaaatctacctggcgcgtgtaagggtatatccgaccataacgatgccttgtaattagaaattaatagaacataaactttttaacaataaaacaaagcatattgcagcagtttttgaaagggtattcagagctacactttatttcttataaaaaacttttttcaaagtctggaggggaatataatcagctacttgcttttaacagacaacaaatgactaacaacgagctctgaacagaaattgttaagttatcaaaacctacacgaccatgagcgacaatgcccattaacatttaagttaaaccctaaaaccacactacactacatcacattaaccatccgtaagtcactttagctttgaaccggaaaaaccatttagcggtgttccactcaagtagatgatttgttttaggctgcttcgtttagcttcaaaattcagcaggagttcgctgctgctatattgtttgaatctattttttgaacccagagtaagagatgacatacgtataattcctggtttcattcccttctgttttagctgctcacacgacttcgaattccccaactgtaatgtccacaaaaggcagagtgttgggttgtaataggtaacgtacttaactacagcgctcttaatacagcaagcagggtaaaaaataaattataaataaataaataaatgttgtttttaccctgggctgcctcccctgatcgttgtataatagagcaataaagctaaaaattatttatataatttgcttaacttatcaatttattaagatatatgtagatgtttatgtctaaatacataaaaatttggtttgtgctttcctatataaacatttatatatttttaatctagttggttgggcattatgtcttgaaacaatgttacaggtttttgatttttgatgtgtatcttacaaaggccaagaaaaccacgcattgtgtacgcacaaggcttctacggtagccgaattaccatgccacttagatattttttgaagaataaaaaatgccaagctatattttcagctaaagttattttagaaaagaagaattgcttgcaataaagccgtgtgtgataaggtttacacaaaatttctattcgccttagttatttttattttattttaacaatcaaagtatttcaccttttttttttaaaataagtataatagaaataaagtgaaaatatgttattgcagttcatggattaattgactccatgttcattttatattatagttaataacatagtttttagtatgcgcaccgagtataaattatgtaggctttcaagtttgcgcgtttattgactcaaaaatattttataattgtcatttatttatttacatttttatattaattcttatacttttgtagcttaacaatattaagctaaaaatatattttggaagttttttaaacttttgttctaacatttttggttgattttgccgtaatggacattttggtttcataggtatgtagttgagtggtttactatttttgtaatatttcatattccttgctcttataaatatacctgcttatattgtaacctaaatttattaataaatgcgaatctttttgcacagattttgtttttcacatgtagtgatgtttgttcttgttatatacttaaatattctctagtctcgtttttattggacagagaaagaaaaactggttataaagtatacaaatcattctaattaaaattcttataaatgcatttttctagaaaaattataaattcttctcattcaatcttgaattttaatcaaagtgtactttattttaagatttggtataatttgattcattataaatcatactggtgtgagtatttacagcaaacagaaacactgagaaatactttaacaaaattgtaatatttcaacatgaatcaattatgtaaatgttaataaaatttgatgtattatttgtgttgtgatactcactatttatattaagcttaattaagcaagaaaaatatccgatgattcggattttgtgcacgcacttccgcttccgggtgatgcagctgatgctagagagttcgcgcgtgttgctactaaaggtgaacgcagatcgtgtgttaatggtgattgtgtttgtccgctctcgtagtagtaggacgaatctgggataattatataatttcggcgttaacttaattggtacacaaggatcacaaaaacaagtttaaagaaaatagtagttgatagtacccaatgttgggacgttttttgaagggtaggtcaatgtcttattttggaatgcagtcatatgcaaagaaatatgactgcctttaagccattccatagttttagtgcagcacattgcagaataatgctgtcctcagactagtgataattagtttcaataaacataatgttttattaacactaaaattcaaatctaataacgatttcaaattcttttgtaattgaaatatatttcagcgtcattcatttcttacccataaaggtgctataaatctattgtatttcaagaaaacgtatttaataaaattaattacttatcaagccactgccagtgccgtaaccatatgatccgtaagctccaccatactgggtatatgcaggattgtaggcgtaatctgaaccgggtacaactgagctgcagcctgaaaatagagaaaaccttttgttgatgtcatcatataataaataattaataatactaattataataataaatagacatttaaaatcatgttttaagttcagtttataaattataaagtatatcaacattaaaatatattgattaattatttaattaaaaaaaagttaaagtataattgaacagtagatggcttaagtacatataatttattgctagtcaataactggtaaatagtattacttgtttactagaatcgttgaaaggtatgaaaagggcagaaactgtaatctagtagatcgagcactgattgtctgcccgtccgttttgtctcttcgttcatgtaaacattgagaccatgggaactattaaaatcaaaattgggaactattaaaaaaccggtgccacgttacctctaactgtgttataaatatatacatttttgtcactgtgagtgattttatataagatgtacagtagc

SEQ ID NO: 23006 - DNA, 3165 bp, DROSOPHILA
gatctgaaaatgtcggataaacgtttccagtgtattgacttctgtatttaaacttacaactagtttttcaaacgtcacaagtaattattttgctgacaaaacaaaataaatatatttgggcttgattattaaagaacttcgaatagagccatgacgtttcacaaaacctttggttacggatgcattgtattaatatgttttgaactcctgtttgctggagttgaaacgtccagcgaaaatgatgatgaatatttaacacagaaagaaatcatattagaaaagtcatatcacggtttaattcgagaaaatgaaacacttgtagaaataactccccttattaaagtgaacgaagagaaaatttgtaacttccatattctcaaaaaaccgtatcacgaaattccatttaagattgaactggtaaataacctaggtattttaaaagcacgtcggacactaaattgcgagaatcgtaaaagttatcactttgaaatctgtgcaatctattgtgatggaacaccttcaaatacagccaatgttcatattactgttatcgacgtaaatgagtatgctccaacattcttagaaccgtcttacgtaattgaagtagacgagggaagactttataacgagatcctaagagtcgaagcttccgataaagactgcactccgctctttggtgatgtttgcaaatatgagattcttaacaatgatgaaccattttcaatagataacgaaggttcaattaaaaacactgaaccactttctcacaaagcttctcataaccacattctgtccgtggttgcctatgattgtgcaatgaaagaatctgcacccattatggtcagcattaaagttcgacgcgtttgtgaaacaaagtttgtaggcatgccagaacgcattgactacacgtctggaagcaccgaaagccttcaattgtttcccaatgctcgcctagacttatgtgacatttcttgcaaaaatgaagaagaccttaggattcattcttccatagcccttaagacaaagcacatctcatttgggtgcgatcgggatatatctaattgcacttcaggccaaaaagtgaaagaccttttgccacatggggcagaatggactaaagagttaagttatgacgaaggtctagaacccatatttcactttgatgggtctactggagtagtagttcctgcaactgttattgatcattacgatttttcatcgcaaccttttagcattcttaccttatttcgacacaacagtcaggttgaaattaataaacatgtaaaggagcatattgtctgcagcgcggacgaccacaaaatgaaccgtcatcatatggcactattcgttcgcaattgtcgccttatttttttattaagaaaaaattttaacgaaggtgatttaaatatctttagtcctgctgaatggcgttggaaaataccggaggtctgtgacaacgaatggcatcactatgttctcaatgttgaagattcgtccaaagtagatttatttattgacggcgtacgtttcgaaaattctattgaaaatcgtcatagcaacccagaagtaattgacgattggcccttacacgcagcccacggagtaaatacttccttagctattggtgcctgttaccaaagcttggaaaatagacttaaacatggctttaatggagatatttcagaagtgaaggtctccctcaacagtgttttgacggcagaggacattaaatgtggaacaacttgtgccgagcatttattagctccaaagccgctgcaaagtaacaatgaaaaatcgtattctgataacagccagattaaagaaaacattgaaatgaacgaaatttatatttcggcgaaaaacaaacatgatattgaacaatttatgcgaaaagttcagtatattaatactaaacaaaagcccacggtaggacgtcgaaacatagaagtgcttacaacactgaattgtaaaaatgaaagttcccttcgcttaccgccaattgagacttatatcatggttaacgaaccgatagctccactcgggatcgatattgatgtcgtctcagcgtcgctggaaacctccgatctaactccgccatcgtattcccccaaaatagcaatatctggaacttcaaacaagcttgtatcatatcaagaaattaaattgggcgtacacattttggaaaaaacttgcattgactcggtatctaaaaacaatggaaaattagaagagaaaaatcatatcgactcatgcagcgtcgttgtatttccctctttgaatcccgatcatgaagacattaaaatagatggtgacgagtcattgtcatctagcatggacattaagactaatattaataaggatggagtcgaaatgattggaaaggataccattagcaattatataaatgtattacgatctcttgtatacagtaacaaaaaacctgcatattatcttaaccgtgtatttaagctttcttgtgcccaacaaagttcccagtacaaaagcggtgaatatacactaacacttactgtgttgcatcctaaacagacattgtttaagtctacaaatgtactcccttcatcgttatctaaagtaaactttattggcaacaccgataatgaaacatcatttcaccggaatagtggttcggtaaatggcaatgataataatcagccaacagagtctaaggtatattcatattcccttctgcataccaataatgtgcaagaaccaaaatctcacattcattctttcatacacaaagctgaagggtcacatgttacaatgcttataattcttgtaagtgtttttttggcggtcttactttgtggagtctcgattgcacgtttaaaaaacaaccaaaaatatattgaacaccatcaaccatgtccaaaaatttctgatgatggtttaatttgggatgactcagctttgactataactataaatcccatgcaagcagatgttacatcggacgcgagttctgaatcagaaaattctgaatctgaagatgaagaagcaagaaaaatatccgatgattcggattttgtgcacgcacttccgcttccgggtgatgcagctgatgctagagagttcgcgcgtgttgctactaaaggtgaacgcagatcgtgtgttaatggtgattgtgtttgtccgctctcgtag

SEQ ID NO: 23007 - protein, 1004 aa, DROSOPHILA
MTFHKTFGYGCIVLICFELLFAGVETSSENDDEYLTQKEIILEKSYHGLIRENETLVEITPLIKVNEEKICNFHILKKPYHEIPFKIELVNNLGILKARRTLNCENRKSYHFEICAIYCDGTPSNTANVHITVIDVNEYAPTFLEPSYVIEVDEGRLYNEILRVEASDKDCTPLFGDVCKYEILNNDEPFSIDNEGSIKNTEPLSHKASHNHILSVVAYDCAMKESAPIMVSIKVRRVCETKFVGMPERIDYTSGSTESLQLFPNARLDLCDISCKNEEDLRIHSSIALKTKHISFGCDRDISNCTSGQKVKDLLPHGAEWTKELSYDEGLEPIFHFDGSTGVVVPATVIDHYDFSSQPFSILTLFRHNSQVEINKHVKEHIVCSADDHKMNRHHMALFVRNCRLIFLLRKNFNEGDLNIFSPAEWRWKIPEVCDNEWHHYVLNVEDSSKVDLFIDGVRFENSIENRHSNPEVIDDWPLHAAHGVNTSLAIGACYQSLENRLKHGFNGDISEVKVSLNSVLTAEDIKCGTTCAEHLLAPKPLQSNNEKSYSDNSQIKENIEMNEIYISAKNKHDIEQFMRKVQYINTKQKPTVGRRNIEVLTTLNCKNESSLRLPPIETYIMVNEPIAPLGIDIDVVSASLETSDLTPPSYSPKIAISGTSNKLVSYQEIKLGVHILEKTCIDSVSKNNGKLEEKNHIDSCSVVVFPSLNPDHEDIKIDGDESLSSSMDIKTNINKDGVEMIGKDTISNYINVLRSLVYSNKKPAYYLNRVFKLSCAQQSSQYKSGEYTLTLTVLHPKQTLFKSTNVLPSSLSKVNFIGNTDNETSFHRNSGSVNGNDNNQPTESKVYSYSLLHTNNVQEPKSHIHSFIHKAEGSHVTMLIILVSVFLAVLLCGVSIARLKNNQKYIEHHQPCPKISDDGLIWDDSALTITINPMQADVTSDASSESENSESEDEEARKISDDSDFVHALPLPGDAADAREFARVATKGERRSCVNGDCVCPLS

SEQ ID NO: 23008 - DNA, 3344 bp, DROSOPHILA
ttgcgatgctttgttatacccctcaactcacaatatataaaaggcatattacacatattaaaaaatgtaaatcatcgagaatgctgcatctctatcctaatgaagtgtactctttttacctaaatttcaaggggttattaaggatggatggagctattcggtctgcagaattatttgtttttttaatacgaacaataatatgattaaatatatttgttcgagtggccagaaagcagacggtatcccatagtcgagctacccgactgcaactttatatttgctgttatttatattttatattttaatttctgcgtttggtggaaagtgggcggtgccgggactgcgactggaaggaggcaggtaatgagcaggcgacgctgtcacgcgttgagtagaatgagaggggggagggggggtcatcaaggatggtgttcactgtaagccggagcattttttctgccgcataagcaagaaatgttttaatgaatttttattccggatggggatgtgtttttaattaattaaaaatataaattaaaaattgcataatactttaattgaaatggaaatgggtttgggaaagagttgtggaaactgtacgcatacgaaaggtaaaacccctttgccagtaagataaaatttcaattaattcatcatttaatctttttaggtttttgacatcttgacaaatatatttttatttatttgcaatgtcaaagatcaaattttattttgtgaacaaaatccttcgagtttcctttgcactatccaatgcattccgcaaagagatttgcggaagtggaagtggattgtttatatattatggttataaataataataatttattatgaattatgaagagtacctagacttctataatttgatatgcgaataaaaagcaatttttctctgtgcacaccagactgcggttacgccaagaaaagggtaaccagacagccaaaccaagtaacttaacccgttcccgatcttgggagaccctcaacttggcctgaccacaaggtagggctgctccgcagtggggcaaacgacccgctcgaacagctcgggcaccaccgaaggtcgtggcttctggtcgtccggcaggagcatgctgttccacaacaggttcgagatgatcgcgtggccgcgctggctaaaatggaagcagtcgtgagagaagaacctccagtccgtgctcccatcgggcaaagtgggagcagttagtttggtcagcatcggatgggcgacgatggcgaagtcctggcgacggaactccggcagccgggcgatctccatgtccagctgctgccaacgcgtcagggtgtccatgcgctcattgaactcggtgcggttcaggcggtcgttgatcagacagtggcaccccacacgatgcaccacgaagcactgcagcggcactttggtcatggtgctcaacaccagcgggatgtttggcaccacaattaaattgataagcaggcgcggcacatggtcgcgcagcagccggaatgcctggcgcagatcgcgggcgtgctgatcgaggaagctctgcggcgtgtcccagtgacacaggtcggagcagatgtcgttgtttcccacatacactgtcaacagcttccagtgccgcttcatgtccacatggcgatcgcgtcgcagcagatcgatgagtacgcgagcctggaagggcagatcccgcgacatgatcatcggctcggcgatgttaagtcgcgacgatcggtggttgatcaccaggctgttgctcaccgcgaaaccgtacagtttgggattaaagatcttcaggatgttcggcagggtgacgaatcttcgccagttggccagaccgccaccggagaaggtcagaccacggaactcgttgatcatgtcgatggcattgttggaaagtattccgttgcctgcggacagggagtcgccaaaggcagctatgatgtcaatatcacccggcctgaggtgctctatggaagtgggcggactcggggagcgtgtgttgttagtgggacacaggaagggcaccttcttggacaccggagcctggagctttccctcgcgtctgccgcgactgctcagcgcctcgatgttgttaagggcccatttcagcgtggtctgcctggtgttcaggaacagatggcgcagatcctggtcgatgtcggtgtactgctgaatgccattttccggcacacggggatcgtaggactgggcacgtactccgatgtcggccagcaggcgatcggatcgattttgtcgccggacacgccgattcgcggacacaagaggcgagaataatataaacaacgagcacagacacaatgcataggtaatgctagccatatcggatatattttgttttttatcgaaaatcaagagatttagtttgagttcttatccattcggatatactttcgcaagctcatacccgatgaacttctgaacgcgttctcatccgacaggcaaatgtgtcgatcgtttttaatgcccgccacaaactatatgaattcacaggccggatcccctcctcgcaactccatccgctccgaccgctggctctcaaactcatttctttccattaaagccaacaacaagccacagacgatcgtggaggatggggacgggattgggacggggctcagaacttgacttaaaagcgttgaccgagacattaacaatcataaaaatgacagagcggcctgatagcagcaccagcctctggtttcagctcgaaaaaatacacacaaagtgccctgcggttcaaaagcaccaacgaaatgccctaaacaaaatgctgtttagtgtacgaaataattaccttgtggcaaaacatggatgctaccaaaacacgccgagaaaacgcacatttgtttgtgttcagaaaaaatgaaacaataaatataattaatttgaagctatagagacagtggcgtagactttgagcttgggatcttgaggtgagcccaaaaatcacccaacccgaccaacatttaaaatcggggcattaagttaaaaactcgggtaaaaatttggtttcttgccgccaattaaaataatattttgttgtgttgtcccttaaaacattatttaacgtttttattataatcttccgtctgtcaatatttaacacctttcagtgatataaagttcgtaattaaatagtcaccggcataaagaatgaagtttgttcctaagaacaatggacatatacctggcaatggtaattaaaccttttagtatataatttgagtgaccccatgaaaatgtaattcactttaagatgttgaaagttcaatgtgttccacgtctctggctaaaattgaatcttatctgccttagatct

SEQ ID NO: 23009 - DNA, 1344 bp, DROSOPHILA
atggctagcattacctatgcattgtgtctgtgctcgttgtttatattattctcgcctcttgtgtccgcgaatcggcgtgtccggcgacaaaatcgatccgatcgcctgctggccgacatcggagtacgtgcccagtcctacgatccccgtgtgccggaaaatggcattcagcagtacaccgacatcgaccaggatctgcgccatctgttcctgaacaccaggcagaccacgctgaaatgggcccttaacaacatcgaggcgctgagcagtcgcggcagacgcgagggaaagctccaggctccggtgtccaagaaggtgcccttcctgtgtcccactaacaacacacgctccccgagtccgcccacttccatagagcacctcaggccgggtgatattgacatcatagctgcctttggcgactccctgtccgcaggcaacggaatactttccaacaatgccatcgacatgatcaacgagttccgtggtctgaccttctccggtggcggtctggccaactggcgaagattcgtcaccctgccgaacatcctgaagatctttaatcccaaactgtacggtttcgcggtgagcaacagcctggtgatcaaccaccgatcgtcgcgacttaacatcgccgagccgatgatcatgtcgcgggatctgcccttccaggctcgcgtactcatcgatctgctgcgacgcgatcgccatgtggacatgaagcggcactggaagctgttgacagtgtatgtgggaaacaacgacatctgctccgacctgtgtcactgggacacgccgcagagcttcctcgatcagcacgcccgcgatctgcgccaggcattccggctgctgcgcgaccatgtgccgcgcctgcttatcaatttaattgtggtgccaaacatcccgctggtgttgagcaccatgaccaaagtgccgctgcagtgcttcgtggtgcatcgtgtggggtgccactgtctgatcaacgaccgcctgaaccgcaccgagttcaatgagcgcatggacaccctgacgcgttggcagcagctggacatggagatcgcccggctgccggagttccgtcgccaggacttcgccatcgtcgcccatccgatgctgaccaaactaactgctcccactttgcccgatgggagcacggactggaggttcttctctcacgactgcttccattttagccagcgcggccacgcgatcatctcgaacctgttgtggaacagcatgctcctgccggacgaccagaagccacgaccttcggtggtgcccgagctgttcgagcgggtcgtttgccccactgcggagcagccctaccttgtggtcaggccaagttga

SEQ ID NO: 23010 - protein, 447 aa, DROSOPHILA
MASITYALCLCSLFILFSPLVSANRRVRRQNRSDRLLADIGVRAQSYDPRVPENGIQQYTDIDQDLRHLFLNTRQTTLKWALNNIEALSSRGRREGKLQAPVSKKVPFLCPTNNTRSPSPPTSIEHLRPGDIDIIAAFGDSLSAGNGILSNNAIDMINEFRGLTFSGGGLANWRRFVTLPNILKIFNPKLYGFAVSNSLVINHRSSRLNIAEPMIMSRDLPFQARVLIDLLRRDRHVDMKRHWKLLTVYVGNNDICSDLCHWDTPQSFLDQHARDLRQAFRLLRDHVPRLLINLIVVPNIPLVLSTMTKVPLQCFVVHRVGCHCLINDRLNRTEFNERMDTLTRWQQLDMEIARLPEFRRQDFAIVAHPMLTKLTAPTLPDGSTDWRFFSHDCFHFSQRGHAIISNLLWNSMLLPDDQKPRPSVVPELFERVVCPTAEQPYLVVRPS

SEQ ID NO: 23011 - DNA, 3492 bp, DROSOPHILA
ttatcaaatactctccgtttaattaaaactttttttattttcttggtttttgggtggggcttaagttattatagttttatatagtctttccatcgatcattgctttaatatacgtcaactcaaaagttttctaaatttgttctcgtttcgctcgtttcttactgtgtaaaccggtctcttgttaaggcatctgcattttgtcactgaagttgtgttttttcttttgtttctagttttggttttgcatttttacagcatgttttagctgcattggatttggttttatttttaaatttcgaaacaagacttgccaaaatataatattaatttgcgtttgcccaaagtttttaaatttttttcattgactcctaaaaacaacgaaatacggttttgttctttatgattaattttgctgtgccttaagatacaatttcgtttttttttttcaaaattttcgttcactttgtagtactgtaatggacaaagtttcccgtttccctttgtaatgaaatgggttttattcgttaaagttttgttaatttcgaattaaatttaggtctctgaataaacttaaactattaattttgtggcctaactttacaatgcgcattaagtaattttagtatgtttcttaaaaatatttattttttgcacgcagataagcgcgtcgctggataaccatgcttaattggtaagctgaaataatttgaatttctaatataaaatccttaaaaaaataaaaaaaaaacacaatttcatttttcataatataagaacattttaataaaaattcatttaaacataaattggaaaaacttaacattaagcaataaaatataaatgtttaagaatcaaaagtatatgacaatcagaatcaaaatgaaggggaaacttaactttttaaagcaatttaaaacatatagaacggcattaaaacgcctacactttatttataacctaaaaaatgttcttacttaaataggatattttgtgccaccaattaatggaattttcgctttttaccgccacgtttctttcccttcccctttttggccagtttgcgctttttgcttccatctccacgcagggctgattcccgactgatctccccaagaatttcatcgccaagtgtgcctgcggatagatgagtcggtttaagttaagcatattaagtgagtagtaatggaaacatacccaaggtggtcagttttcgctggcgatgcttctccgccttggtcaccggcagacgcatcaagtaggtctcctcgtactcctgcttctccttctgagcttgagaaagcatctgctgagcacgcgaaccagatgaaatctctgtaggagcatccaagtactcctctttgaggtcctgcagcatggaagacctggttggaaaaattagatactttgctattaaatggacactagtgggaaacggttgtcaaactcacgtaatggcccgcttcttggcccgatccagtgcctttttctccttgtcggcatcgcgttcatcgccatcgtaataaacgggcttgatgcgcggtggcacgtacactccggactttccggctgtggccgctttccggggcattttcgctgcgccggcctcgtcctcatcctcctcatcgtcgtcctcgtcctcctcatcgctgtcatcttctccatcatcctcatctcggcctgctccgcctgcgctgctcatcatatcatctgggttgggtttgtaaagtatgggatccgtactgcttgagacgccagtggtggctgtctttaccagtttgtcaatctgatagcgtagcttgtggtctatgggccgaatcttctccagcacagtgcgaatctcgatcagacgttcgatggagggatcaccctcaatggtctcgccggagcatttgcgcagcaccacatatgtcagattgatcaagtagtccagtagcatgtggtacttcacttccagaaagctcaggccgtactctgtggttagctcgcctcgcttgactcgctgcagcatgccctccaccaagtcagtcacctgtttcacattgctgttcatctccccgagcaactgaatcgcctgcgggatgtcctggccctgtgcctcgcaatcgtagtccagtgccttcaaggaagcgttaaaatgagaagggtagtgagtacaggagtcataagaatgactgacttaagtgcattaagtactaagctatgggtttttactaatttcgtgctgcatcagcttaccatgcttgattccagatgtgttctaagccagtagtcggctattttggtcgattcaatgtgccaccatatatgcaaacactttaccacgtctgccgccctttgccccgtcgagtgtcgcgcaactcatttgcatattttattggttgccatttaattatttgcattttacaacatttttggcagcacacacaccaccttaccgcccacacctcaccacatggccatctgctttttgaccgacccggcttatgctgcatttattttcaattaatattaataaagcaggcggctggaggcagtggggctgggagtatagaataaatggcgtagactggggactgggggttgcatgttttggatattaattgcaaaatagtatgaaaagctcatttttcatatatttgcttttgtcatttgcggtctgcatattttgcctgcagtttacaatgcaatttaccaaataattatttcgacagccaaattgctggtcaagtgcagaacaacccgcagcatttatttcatatgctatgtatatccttattagcgaattattttaattgtattttgtgggcgaaatacaaagtgcggtttgaacaaaaggatttggcgcaaaaataattaatattttgtcttttgaaatatttattacatttggcatttaaaacagaacgtaggcatgttatccttcctatttacttaattgctttaaaaatgcagatcgaatctataccaatatttatgtttaacatttaaaatatagtatatggtaaaacggaataaaaaaatagctaaatttttattcaccatgtaagatgtcatctgcaattgcactggttgaaactaattacgctttggcaaacttgactatcatagcgagtagtcactgtcggacaaacaaagcgttagataaaacgcaggcatattttagcggcgaaaacggcactagccaattgcagaaactcaaaccaacacgtccagatggccaaaatgagatgagatgggcataacgaggcttccattatcaactggcgaccgaatagagcaacgtctatatgggacctgccaaagaaaaataaaccaaattgcaaactgcggacagatagacaaaacacccgaatggccccatgcccaccaccccaaaatgatttaaatttcgggctggcttttgtgtcatttgcaaatgcagcagccaaacaatgcagtttttgcaattattgcagttgttgcaatgctgtcgatgttaagcattaacagtta

SEQ ID NO: 23012 - DNA, 1047 bp, DROSOPHILA
atgcagcataagccgggtcggtcaaaaagcagatggccatgtggtgaggtgtgggcggcactggactacgattgcgaggcacagggccaggacatcccgcaggcgattcagttgctcggggagatgaacagcaatgtgaaacaggtgactgacttggtggagggcatgctgcagcgagtcaagcgaggcgagctaaccacagagtacggcctgagctttctggaagtgaagtaccacatgctactggactacttgatcaatctgacatatgtggtgctgcgcaaatgctccggcgagaccattgagggtgatccctccatcgaacgtctgatcgagattcgcactgtgctggagaagattcggcccatagaccacaagctacgctatcagattgacaaactggtaaagacagccaccactggcgtctcaagcagtacggatcccatactttacaaacccaacccagatgatatgatgagcagcgcaggcggagcaggccgagatgaggatgatggagaagatgacagcgatgaggaggacgaggacgacgatgaggaggatgaggacgaggccggcgcagcgaaaatgccccggaaagcggccacagccggaaagtccggagtgtacgtgccaccgcgcatcaagcccgtttattacgatggcgatgaacgcgatgccgacaaggagaaaaaggcactggatcgggccaagaagcgggccattacgtcttccatgctgcaggacctcaaagaggagtacttggatgctcctacagagatttcatctggttcgcgtgctcagcagatgctttctcaagctcagaaggagaagcaggagtacgaggagacctacttgatgcgtctgccggtgaccaaggcggagaagcatcgccagcgaaaactgaccaccttgggcacacttggcgatgaaattcttggggagatcagtcgggaatcagccctgcgtggagatggaagcaaaaagcgcaaactggccaaaaaggggaagggaaagaaacgtggcggtaaaaagcgaaaattccattaa

SEQ ID NO: 23013 - protein, 348 aa, DROSOPHILA
MQHKPGRSKSRWPCGEVWAALDYDCEAQGQDIPQAIQLLGEMNSNVKQVTDLVEGMLQRVKRGELTTEYGLSFLEVKYHMLLDYLINLTYVVLRKCSGETIEGDPSIERLIEIRTVLEKIRPIDHKLRYQIDKLVKTATTGVSSSTDPILYKPNPDDMMSSAGGAGRDEDDGEDDSDEEDEDDDEEDEDEAGAAKMPRKAATAGKSGVYVPPRIKPVYYDGDERDADKEKKALDRAKKRAITSSMLQDLKEEYLDAPTEISSGSRAQQMLSQAQKEKQEYEETYLMRLPVTKAEKHRQRKLTTLGTLGDEILGEISRESALRGDGSKKRKLAKKGKGKKRGGKKRKFH

SEQ ID NO: 23014 - DNA, 11687 bp, DROSOPHILA
ccacgtccctgcaccgccttggtcccttggcagccttcgccactgcagatgccgatgccgatgccggaagtcaagatggtgtcgccccaaatagtggcacccatggctgcggcaccggcggtccaggagctggatgactacgatgacgatctggagttcttcgagaacaacaacacgtgcagcgtgaatcttaacaagtctgagcaggagcacatggacgaagacctgtagcgatagccatataaaaccctaaaccataagcattaaagtgtagatttgtatgtccgtaaccgtaagaacccagttgatagcatgcaagaatactccgcctccttatttttttattactattgaaaatagatagatgtatgtgattcaatctggaatgttccggaatattcgttatttgaagcaagtgagtcgagaacagataactttcgagagacgcaacggcggacgtcaaacgaacacctgacttaagaaaagtttttctaagatgaactaattcattttactttttacatcaatttataagcactttttacagtatatgagtttctgcagtaaagtggatcgaacgagctgaatctaccatattgtttaaaatatactttacattgcgtttttggaatcgacctttctttgctggctactaaaattagaaagatacgtattttttgcaattgataaagaataaagaataaaactgtaagcaaaactttgtatgatcttatatatataacaaataacgcaaaatgttaaatagacataaaattatgaatgcttaagtccgatattgtaagaacctctttgcatttataacatttatatattttttaattttgccgagctagttttccgttaaattaactggttgattgtttaaatgactgtttaaaatgatttaatattgaactttggtatttggtatttttggacagggcggtcccactgaaacattggtgttggccaactgccgtcatattgaaaaaaccagcagagaggtcggatcgcagcgctgctggatttttcagcgattcgcgtacggaaaaaatcgagtacgtccgagtgcggattgcccagaaatccgtttaaataagtgtttatttggtaattattatttaaaatacacacttgtataagagtgtgtgcgtttttggtgctgtgaaaagtttagtgaacggcccccacattgacagcgtatgaattataattataatttacttcatggcgcaagcgaaaagattgtaattcggagaatgagaagacgaatcagaacaaaagcaaggcgaacggcagagccaccaccacatatagcactcaaatcgcatccgcagcggcggaaatctgacaaaaactagatacgaggcgaagtgcaaatttagaattcttattacaagttcatgggaaagtggcgaatatacgtggagcgtgataagtgagcgttttttgtgtgttgaatggcaaaacatcacgttgaccgatgcacgaatgagagggagtatttcgagtacgcgtcgccggagtcgaactcaccactctagtttgtttttccgctttcttcgcggctctccctctcatcgctctcattgcagtgcagtggtggagcctctgggcagcggcacacgcgttgggggccacccccctccggccggtgagccactgtacttgccgcgtggtgagtttgccggctgggcctctgctgctgcttcagcttctgctggtgggtttcttgtgctccgagctcttgggctccaacctcttgtgctccctctcattggtcggccaatcgtgtgtgagtgagcttgtgcctgtgcgctgctccgcgtcgcgtgtcggaccgtttgtgtgtgggagtgtgtgcgtgtgctggccgttcaatttgtgtgaagtaataagcgtaattagtttgttggtgcggcgtcggattgcaattcagcttaaaaacgccactaaatgtaaatgtaaacgtaaacgtctgacgcatcatctacatctacgattttgtgattttccagctctagtctggccaatagagtccgtcgagtggaaccagaaacgagctgcaactataaagcgttaacaaaaaagtataaaatagaaggcagcgatgtccaccgccgttgaaacggggtcgtcgcctgccaagagcaatagcaacaacagtagcagtggcggcaacaacaacaacggcaacggcaatctcagtccaaatgcaaaaggcgtgcagcggcgtcaactggtaagtaccgccgcacccccacttttacctttcaccccccgccccctcccttcctcactatcaataaccgataaagccacgacaacctacagtcgtacttccctagggtgcatttgttaagtttcactcgataaatcgaactaacaggaccagctgtgtaagaccgaaaaataggtggaaatttattttgtttgttgccgccagatgttcaaatttattaattcagtgctctgataacccggaataatcgagttaactaacacctcccattaggaaagatatgtatagttgacttaaataagtcaaaagaagctgctcaattacgtacgttttcctaagttacaagccggctctacttagccgcccatgtgggtggttcgccatacggaaattcacctgtaagcatgaacgataagcccgccgtgccgagccctaataacttgatgatcagcgaaggcaaggagtgcgagcgagagatagcaaataggttgtggaagcgaacgtaaaactcatcattaatcggtggaaataaaatgcattctcacccaaccgccccgccctctgcctctctcgcccactattcttgttttatttttcttttccgctgcctctttaattttcatttgcgcccgttgagcattggagctcaactgaggccgcatgaccgaaagcaatgagctttatttgccatattcgctgtttgttattctcttcttctggctattattgccattgttgttgtttgactcgcatttcgttttcaatttgccgctggtgtgtgtgcgtgtgtgtgcttgcgagcgagcatatgtgttggctagggtgctggtgggtttgtgtgtggtgtgtttctgcttcggtttctattccatatcgtagataacagggcattgttgcgttgttgttgcccaacatatttacatacggagtggaagaggaagcgagagaggaagagcgggagtagtgctgacgttgacacacagagaacaaaaagtcaaaccaaaagcctttcgaatatatcaatttatatctgaaatataatatatagaatgcaatgcaatttcttgtgttgaacattaaacctcagccccacatcgcgtctgtatagttttgtttcagtgctgaaaagtgatacgtgggcgtgggtatccgtggcgggggttttgcgtcaggggggtgcctcagtgatttcatatcgtcagccaacttgcaaagttcacgttcacagttccctcggcctgcgcatttgattagcaccaaaattggatcaacagctgctggggctcgtcgccttgccatccgttcgctgtgagcggtgacgaagaattcccgcccggcacttgtcgacggaatcttgcgtccccccctgccgcacgcaattataccctaccatcaaggggtatctatgtgcatcactcttctgggagtaacatgttcatactcacttgatcataacctcatgtaacacgtgaccatctcaacagaatcatgaattctgaaaaaaactagtgaatttcactcaaacgtggcgcgctgggtatcttttttcttatcctatctctttcggaagcaatctaaccaaatatcaaccttacgattatctcctgggacaggaaagtaattaattcacactgcagggtatctaagcagtcgctagtgcagcctatttcccactaacttgggtatctatgcatactgaagtggagcgcagggaagcaggcgggaggagtgagctcctattaaaaatgtagggattgctggggagtggaaaggcgaactctcattatggtgactaacgtggagaattatagggggctagcggaacgaggagcacgctgagcacatggcagataagggtccgcaattagcaccttaaatagaatacattagggtgcccaggtggccacctgatgggtgggggttggggtggtgtggcgaaggtgacgccaccacagcaagaatccgaaaccacttgactggatttggattttggttttctgtcttacacgcaactttttatgtggtcgcggctgtcgttgttgttgttgattcctctcttacacggaaagaaaaatctgatttaatagatcatttgaaatgccaagtgaaaatattgtcatctaaaagtataatttcgataatacccaaacgtattatattacataagtaaatatcttaaaataatttgaatgcttaaatgtgtgcgcgaaaaaatgaacaattatttaaacctgctgttttttcagtgtgctttttcgactgtcgttgtttttgttgcttctcttacctgccgattgttaatcggccagacaccaaaacaagcttttgagccgaggaaaaaacaaaaacaatcgcgcggcagcaacagcgtggccacaatgaaaagtcactaaaaatcgtttagaacatgccaaacaagtttcaacatttctgtggggcaagccgcttaaaaaggatatgccacacacacacacacactcgcgcggatacaaacaagcacaaacacaaacgagggcaggcgcatccatgtttatagatttttcgttgcaaaaccgtcgctcgaaccgcccatcaccccctggctaacccaacccctctccacctgcccctgccaccttactcgcagcggccaaaataaactcaaagcaggagacatggcaataaattccgtatttcgtattccgaatttgttgttccttggagcaacagtctctcatctcaatccccattgcatttctcaatctcttagattctttgcctctctgccggcactctcgatgcaccaccaccagtgcagaaaataaagcaagaaaaagaatcaacaaagcattcgcatgcaaagtgcatgcgcactggagggagatagcaacagcaacaggggagcgagcgagagaccaagagcggagcaggtcgtggtggacaacgcgaatcccgttgccctctgtcaagcaggcctgccaccctttgggtgatacggaaaagcctaccctaccgagactattattgaaggaaatatatatggggcggaaaggcataattgaaagcattgaagcaagtgtttaccttaagaatcccatttatataagtaagcaccaactacttgtatgttacttaaataatcaagaaatataagccgcatggtttgctgggtaaatagtgaaaccaaatggttaccgtgcaataattgcctatgtatgtatgtacatatgtaaactgccgggaaacgcaagtaagacgtccgaatcaatggaaaacggacatacctttggtaaaaactcatcaactattgtcaaaaatctgtgaaaacattaattcgatcctaagacaatcaacatattttcgaattttcaagtacccccaaaaagatatgcgtattatttttgaattttattttgaaatcgaacgtactagcggcgtggccgaaaattgccgattgaaaaaatgtgggcatagcatgttgcttaaatagatttttgtttgctcgctcttgtcatcgatgctctcccatttagtcgctctctctgaatttgtttgactctccgtatctctctcgagatactccctctctaattaggttcgtcggttgtagccgttaggaaatctcacgctcacaaatttgaatccatttggccccaccaggtgatgaatatataaatcaatcaaaataagcttgtctgttcaatctatttattctctttgagtctcgaacgaatttcgttgtcttataaacaataaaattttaaactaatttctaaaataaaataaaaccatttagtcattttttttacttataataggataataggataaaatataaatggatatggtgtatatttgaaaatacattttttccaaaactaaacgatagttttcaaaatattgacatccctatcggcgagcaaatgaaatcgaaattacagaggcgagagagtcatccaagcgactggagaaagtgaaggcgagggtcgcagggagagtgagcgggtgggtctaaagagcaaatcaccgtggtgaagagagtgacaagtgaatcatatcgatggcgtcagcagagtcgctggcggaggcagcggcagaggcagcgccttccgttttgacggtgtatttttagtacttcactcactcaaacacaacatcaaccgaatctgactctcttctttctttttgcagcgcgagaggaagcagcgcaagctctacctggaggaatggtcgctgggcgacgaggatggcgaggggacgcggggattcagcgttgccgagaagctcgaatcttcaaagttcgcgcaggcgggaatggtgcgcgagatgcgcggatgcgatctcaccgtagcgtaagtatctcaagcttttgcagtatttatcgcttgctaatcggcggtgattatcggtttgccatttaacggatatgtttcgcgttgttttatgacctacattaaacgacggatatagtatacctacgagaaagagagattaatttgtttatgtctattttaaatagcttttatgtacatacagatttatgttgctagttaatcctaaacttatattgggtttttgttgcttcatgcagtttcctccaacagcacggctttaacatcccgctgttattccgggacaaagcgggcttaggtttacgaatgcccgatccgcaggagttcaccgtgaacgatgtgcgactgtgcgtgggatccaggcgactcctcgatgtcatggacgtgaacacgcagaagaacctgcagatgaccatgaaggagtggcagcagtactatgacagtccgcagaaagaccgtctgctaaacgtgatctctctggagttctcgcacacccgcctggacagattcgttcagagtccggagatcgtgcgccagatcgactgggtggatgtggtctggcccaagcagcttaaggacgcccagcgggagggcaccaatctgctaggcggcatgatgtacccaaaggtgcagaaatactgcctgatgtcagtgaagaactgctacacggattttcacattgacttcggtgggacttccgtttggtatcacatcttaagaggaagcaaagtattttggctaattccacccacggaccgtaatctgcagttgtatgaaaagtgggttctctctggcaaacaggcagacattttcttcggagatacagtggagaaatgtgccagggtttatttaaccgcggggaacaccttcttcatacccaccggctggatacacgcagtctacacgcccacccaatccctcgtctttggaggaaatttcctgcactccttcgggatagtgaagcaacttaaaaccgccagtgttgaggatagcacgaaagtgccgcagaagttccgatatcccttcttcacggagatgctgtggtacgttcttgctcgctatgttcacacgctactgggccactcacatctggaaggtgaggcctcgttgagcgaggatgaaatggctgcccgtccgcatacccatcttacgcaccacgagctctttggactgaaggagatcgttatgtatttgtacgatctgccgccgcagaagaaaaatgtgcccagcctggttctggatcctgtggccctgatcaaagacgtccgatcgttggtcgagcgtcactgcaaggatcagcaagatctcgcgattactggcgtgtcagtgttaaagtcgccaccaggatcgcagccccccttcttgttgtatgatcgcacacgcgtgaaacaggagataaagcaggaaattgcacgcaagaatgcagaggtaatacgggaacaacagcaattggaggcgggcagggccagggaggccgaatcggatacatctcaatccactggagtgggatcagtcatcggaatgggggccggagtcgagtacagtaacggagttatgaagaaggagcaattggagaacggtagcggagtaacagttggcgggcacggatcacagccaggtgcgttgtaaaatgtttatttattttgcacagtaagagtaatactgttcttattttacagaggccacctttgccctgcccaccgatacgcttaagtatcgcccacccaagaaaatgcatttggccacggcgttggtggcagccgctgcaagcagcagctctggaggaggcggaccagttgcaggagtgggaggatccgcggtggtgggaagcagccatagtcctaccggcggaggagtgggcccagtcacaggagcaggcggtgctattagtgtgattgccaccagctccagctacattgaaggaggacaagttggaggaattctcaacatggacaattgtcattctccagaagggggtggcgctaaactgtctccaaatcttaccggtactggacaaccaagacgtcgcaggacgcgctgcaagaactgtgccgcctgccagcgctccgactgcggcacctgtcccttctgtatggatatggttaagtttggtggacctggtcgggccaagcaaacgtgcatgatgcgacaatgtctatcgccaatgctgccggttacagcgcagtgtgtttactgtcatctggatgggtggcgtcagacaccagtctctccgcagaccaagcaactggcttccgccgatgggccctccgctctaatggagtgttccgtgtgctacgagatcgcccacccggactgtgctctctcgcagttagatggcacagaggatgcggcggacgccaagggaatcgtaaatgaagatctgccaaacagttgggagtgtcccagctgctgccgctctggcaaaaactatgactataaggtacgattaccatcaacacatgtttctttagtcttagtgcaacttactaatccaacctttattgtacagcctcgccattttcgagcacggcaaaagtcctccgaagtgcgtcgcgtttctgtttcccatggtcaaggaggcgccgaaggccacgcggatggaaatacattgctgccgcccccggtgggccagtataatgactttgtcttcaccagtgagtcggaaatggaatcgggtactgtcagtggccacatgacacattggaaacacggaatgaagcgccaccatcagctggaggttaaaacggagcgaaataatagctgcgacaccccatctcccggcatttcaccaaatgccattggcggcgactccaaagtaggaaagcggcgtaagagcgacgacggaacgagcgttagtagcagcatgcacgagagtaatgacgccccatgtggctcttcggcggagggagcaggtggagcgggaaatgcaaatgtatccactaatcagtggagtggcagtggcggcggaggtggttcccgcaagaagaactcaatacgatcacagctggcccagcaaatgctgaactcgtcgacccgagtcctcaagaaaccccaatatgtcgtgcggccagcaagtggaaccggttcgtcttcgtccagtggaaatggaggtagcgcatccgccaccaacggaatcagcaatggcagcaatcaaagcggtgcaaactcctgtggagctggcaacggcgagcgaggaaccaataacggaggattgagcggctcaaacggcttgggcaatcagcattacagttcatcacaaaatctggcgttggacccaactgtgctgaagatcatatttcgttaccttccgcaggacacgctggttacctgttgctcagtatgtaaggtatggtcgaacgcagcggtcgatcccgatttgtggaagaaaatgaattgctcggagcacaagatgtcagcatcacttttgacagcgattgtgcgcaggcagccggagcatcttattttggactggacgcagattgccaagaggcagttggcgtggctggtggctcgcctcccggcgctcaagaatctctcgctgcaaaactgtcccatccaggcagtgttggcactgcacacctgcctttgtccaccgcttcaaactctggatctcagctttgtgagaggattgaacgatgctgcaataagggacatcctttcacctccaaaggattcgcgacctggcttaagtgactcgaagacgcgtctaagggatcttaaagtaatgaagctggccggaacagatatctccgatgtggctgtgcgctatatcacgcagtcgttaccgtatctgcggcatctggatctctcctcctgccaacgaatcacggatgcgggcgtggcacaaataggaacctccaccacagccaccgctcgtctcacggagcttaatctgagcgcctgcaggcttgtgtctgagaacgctctggagcacctggccaagtgcgaaggtctcatctggctggacctgcgccatgtgccccaggtcagcacccagtcggtgattcgctttgcaagcaactccaagcatgatctttgcgtcagagacatcaagctggtagagcgaaggcggaggaactcgacgacagcaaaccgaagctggcaccacgactgagccactggcagctggaggagggccaatacatcttaatcatatgcattaagacaccaaactttctaagccccaatccagtaccatgtactccgaatccctcgccggaatgcaagccaaagagtgtcgtcgggccctttgcattgcgtgtggttatattcttaaatgctaagctagtcaggatagggctcaggtcatattcaggttcaggtctgtttttccgataccttttgagaatctcaaaaatgtcttcttatcgaagatcaatccatttttacggttttaatacttttataaattctaatgacatgtttaggtgggaaatcgctgcaatattttcaagctaggtaaccagaaacaaattctactatttaatcatttccggctttgttttccccatttcctcaaaccactcttggcagtgtaaagggctgagcttcggttttccgaagctgaaagatacaaactttaccgatacccattttatacaagtcgccccaccatcctcacactcggacttagcgtagtgattaagaatagcattcccgcgaaggtaattacatttaatcagtgtcatatttctaagcatgcaggaaacgttacatgttagagagcagcactaggtgcacccatccagcttaagtagatgcagctcgcacaccaactgagaatcacaagcagtgcgtttcgggactgtaagagcaatgcaatgcaaaataaagagatcgattttatttgattgtcgaacccgttttaaagttccccaacatttggccttactcgatggaaattaaactcgcgttgcgccagcggtcttacagttctgaatcccactgtaccagcgctattgccgcacatagtcgataagtcaacctgccaagctccctaaggaccctccccttagttcccaactccagtagcagttaaattagtgataacgttgctaaaatatatttgagagcatgtaagattaatacaagtacgagcatacttatatttaatg

SEQ ID NO: 23015 - DNA, 4309 bp, DROSOPHILA
agaggtcggatcgcagcgctgctggatttttcagcgattcgcgtacggaaaaaatcgagtacgtccgagtgcggattgcccagaaatccgtttaaataagtgtttatttgctctagtctggccaatagagtccgtcgagtggaaccagaaacgagctgcaactataaagcgttaacaaaaaagtataaaatagaaggcagcgatgtccaccgccgttgaaacggggtcgtcgcctgccaagagcaatagcaacaacagtagcagtggcggcaacaacaacaacggcaacggcaatctcagtccaaatgcaaaaggcgtgcagcggcgtcaactgcgcgagaggaagcagcgcaagctctacctggaggaatggtcgctgggcgacgaggatggcgaggggacgcggggattcagcgttgccgagaagctcgaatcttcaaagttcgcgcaggcgggaatggtgcgcgagatgcgcggatgcgatctcaccgtagctttcctccaacagcacggctttaacatcccgctgttattccgggacaaagcgggcttaggtttacgaatgcccgatccgcaggagttcaccgtgaacgatgtgcgactgtgcgtgggatccaggcgactcctcgatgtcatggacgtgaacacgcagaagaacctgcagatgaccatgaaggagtggcagcagtactatgacagtccgcagaaagaccgtctgctaaacgtgatctctctggagttctcgcacacccgcctggacagattcgttcagagtccggagatcgtgcgccagatcgactgggtggatgtggtctggcccaagcagcttaaggacgcccagcgggagggcaccaatctgctaggcggcatgatgtacccaaaggtgcagaaatactgcctgatgtcagtgaagaactgctacacggattttcacattgacttcggtgggacttccgtttggtatcacatcttaagaggaagcaaagtattttggctaattccacccacggaccgtaatctgcagttgtatgaaaagtgggttctctctggcaaacaggcagacattttcttcggagatacagtggagaaatgtgccagggtttatttaaccgcggggaacaccttcttcatacccaccggctggatacacgcagtctacacgcccacccaatccctcgtctttggaggaaatttcctgcactccttcgggatagtgaagcaacttaaaaccgccagtgttgaggatagcacgaaagtgccgcagaagttccgatatcccttcttcacggagatgctgtggtacgttcttgctcgctatgttcacacgctactgggccactcacatctggaaggtgaggcctcgttgagcgaggatgaaatggctgcccgtccgcatacccatcttacgcaccacgagctctttggactgaaggagatcgttatgtatttgtacgatctgccgccgcagaagaaaaatgtgcccagcctggttctggatcctgtggccctgatcaaagacgtccgatcgttggtcgagcgtcactgcaaggatcagcaagatctcgcgattactggcgtgtcagtgttaaagtcgccaccaggatcgcagccccccttcttgttgtatgatcgcacacgcgtgaaacaggagataaagcaggaaattgcacgcaagaatgcagaggtaatacgggaacaacagcaattggaggcgggcagggccagggaggccgaatcggatacatctcaatccactggagtgggatcagtcatcggaatgggggccggagtcgagtacagtaacggagttatgaagaaggagcaattggagaacggtagcggagtaacagttggcgggcacggatcacagccagaggccacctttgccctgcccaccgatacgcttaagtatcgcccacccaagaaaatgcatttggccacggcgttggtggcagccgctgcaagcagcagctctggaggaggcggaccagttgcaggagtgggaggatccgcggtggtgggaagcagccatagtcctaccggcggaggagtgggcccagtcacaggagcaggcggtgctattagtgtgattgccaccagctccagctacattgaaggaggacaagttggaggaattctcaacatggacaattgtcattctccagaagggggtggcgctaaactgtctccaaatcttaccggtactggacaaccaagacgtcgcaggacgcgctgcaagaactgtgccgcctgccagcgctccgactgcggcacctgtcccttctgtatggatatggttaagtttggtggacctggtcgggccaagcaaacgtgcatgatgcgacaatgtctatcgccaatgctgccggttacagcgcagtgtgtttactgtcatctggatgggtggcgtcagacaccagtctctccgcagaccaagcaactggcttccgccgatgggccctccgctctaatggagtgttccgtgtgctacgagatcgcccacccggactgtgctctctcgcagttagatggcacagaggatgcggcggacgccaagggaatcgtaaatgaagatctgccaaacagttgggagtgtcccagctgctgccgctctggcaaaaactatgactataaggtacgattaccatcaacacatgtttctttagtcttagtgcaacttactaatccaacctttattgtacagcctcgccattttcgagcacggcaaaagtcctccgaagtgcgtcgcgtttctgtttcccatggtcaaggaggcgccgaaggccacgcggatggaaatacattgctgccgcccccggtgggccagtataatgactttgtcttcaccagtgagtcggaaatggaatcgggtactgtcagtggccacatgacacattggaaacacggaatgaagcgccaccatcagctggaggttaaaacggagcgaaataatagctgcgacaccccatctcccggcatttcaccaaatgccattggcggcgactccaaagtaggaaagcggcgtaagagcgacgacggaacgagcgttagtagcagcatgcacgagagtaatgacgccccatgtggctcttcggcggagggagcaggtggagcgggaaatgcaaatgtatccactaatcagtggagtggcagtggcggcggaggtggttcccgcaagaagaactcaatacgatcacagctggcccagcaaatgctgaactcgtcgacccgagtcctcaagaaaccccaatatgtcgtgcggccagcaagtggaaccggttcgtcttcgtccagtggaaatggaggtagcgcatccgccaccaacggaatcagcaatggcagcaatcaaagcggtgcaaactcctgtggagctggcaacggcgagcgaggaaccaataacggaggattgagcggctcaaacggcttgggcaatcagcattacagttcatcacaaaatctggcgttggacccaactgtgctgaagatcatatttcgttaccttccgcaggacacgctggttacctgttgctcagtatgtaaggtatggtcgaacgcagcggtcgatcccgatttgtggaagaaaatgaattgctcggagcacaagatgtcagcatcacttttgacagcgattgtgcgcaggcagccggagcatcttattttggactggacgcagattgccaagaggcagttggcgtggctggtggctcgcctcccggcgctcaagaatctctcgctgcaaaactgtcccatccaggcagtgttggcactgcacacctgcctttgtccaccgcttcaaactctggatctcagctttgtgagaggattgaacgatgctgcaataagggacatcctttcacctccaaaggattcgcgacctggcttaagtgactcgaagacgcgtctaagggatcttaaagtaatgaagctggccggaacagatatctccgatgtggctgtgcgctatatcacgcagtcgttaccgtatctgcggcatctggatctctcctcctgccaacgaatcacggatgcgggcgtggcacaaataggaacctccaccacagccaccgctcgtctcacggagcttaatctgagcgcctgcaggcttgtgtctgagaacgctctggagcacctggccaagtgcgaaggtctcatctggctggacctgcgccatgtgccccaggtcagcacccagtcggtgattcgctttgcaagcaactccaagcatgatctttgcgtcagagacatcaagctggtagagcgaaggcggaggaactcgacgacagcaaaccgaagctggcaccacgactga

SEQ ID NO: 23016 - protein, 1368 aa, DROSOPHILA
MSTAVETGSSPAKSNSNNSSSGGNNNNGNGNLSPNAKGVQRRQLRERKQRKLYLEEWSLGDEDGEGTRGFSVAEKLESSKFAQAGMVREMRGCDLTVAFLQQHGFNIPLLFRDKAGLGLRMPDPQEFTVNDVRLCVGSRRLLDVMDVNTQKNLQMTMKEWQQYYDSPQKDRLLNVISLEFSHTRLDRFVQSPEIVRQIDWVDVVWPKQLKDAQREGTNLLGGMMYPKVQKYCLMSVKNCYTDFHIDFGGTSVWYHILRGSKVFWLIPPTDRNLQLYEKWVLSGKQADIFFGDTVEKCARVYLTAGNTFFIPTGWIHAVYTPTQSLVFGGNFLHSFGIVKQLKTASVEDSTKVPQKFRYPFFTEMLWYVLARYVHTLLGHSHLEGEASLSEDEMAARPHTHLTHHELFGLKEIVMYLYDLPPQKKNVPSLVLDPVALIKDVRSLVERHCKDQQDLAITGVSVLKSPPGSQPPFLLYDRTRVKQEIKQEIARKNAEVIREQQQLEAGRAREAESDTSQSTGVGSVIGMGAGVEYSNGVMKKEQLENGSGVTVGGHGSQPEATFALPTDTLKYRPPKKMHLATALVAAAASSSSGGGGPVAGVGGSAVVGSSHSPTGGGVGPVTGAGGAISVIATSSSYIEGGQVGGILNMDNCHSPEGGGAKLSPNLTGTGQPRRRRTRCKNCAACQRSDCGTCPFCMDMVKFGGPGRAKQTCMMRQCLSPMLPVTAQCVYCHLDGWRQTPVSPQTKQLASADGPSALMECSVCYEIAHPDCALSQLDGTEDAADAKGIVNEDLPNSWECPSCCRSGKNYDYKVRLPSTHVSLVLVQLTNPTFIVQPRHFRARQKSSEVRRVSVSHGQGGAEGHADGNTLLPPPVGQYNDFVFTSESEMESGTVSGHMTHWKHGMKRHHQLEVKTERNNSCDTPSPGISPNAIGGDSKVGKRRKSDDGTSVSSSMHESNDAPCGSSAEGAGGAGNANVSTNQWSGSGGGGGSRKKNSIRSQLAQQMLNSSTRVLKKPQYVVRPASGTGSSSSSGNGGSASATNGISNGSNQSGANSCGAGNGERGTNNGGLSGSNGLGNQHYSSSQNLALDPTVLKIIFRYLPQDTLVTCCSVCKVWSNAAVDPDLWKKMNCSEHKMSASLLTAIVRRQPEHLILDWTQIAKRQLAWLVARLPALKNLSLQNCPIQAVLALHTCLCPPLQTLDLSFVRGLNDAAIRDILSPPKDSRPGLSDSKTRLRDLKVMKLAGTDISDVAVRYITQSLPYLRHLDLSSCQRITDAGVAQIGTSTTATARLTELNLSACRLVSENALEHLAKCEGLIWLDLRHVPQVSTQSVIRFASNSKHDLCVRDIKLVERRRRNSTTANRSWHHD

SEQ ID NO: 23017 - DNA, 5380 bp, DROSOPHILA
aagcaattcaactttccacaaattaattaattgattttcacaaactaaactcaacggcttctggcatttttgctcataattagtgtttctttcaaagtgcggttttgattcattctgaatgtgtatttataattagggttataaaatgcgataaaattgactagttaaccagaggataacttgaatgtcttctaaagaatatagagcttttgttttatatttaaaaatgactaaacaatctgcgaaacgaaatgaaatttcatgctcggccaatcgagagactttaaaactttgcctcgttttcatgacatctccactgggcgtgcggatcgccacaatacgcaattagttgggcacttaatccgaggagcaaacaccaacagtgcagaatgacaccccgattagcgccggctgtgatggggatttatcccatcccaaatgctccgctcccggatggcttagcttgaatgctcggaaattatttgagagcttgttttcgctttaaagtgcagacgggaatcccctctttttgctggtccttgttgctgattaatgaatatccttaagagtgtttttagatacctggcaaatccgaaaccgaatcgcattaatcagttgacgcaaacaaagcaaaattcaaggtcgtctgggtctgatgtgtagacaatggttaccttttctggcttctaggtgccttctaactaaagtacaaccattatcgatatataaattattctattaacccaaatggttacacattatcgagtttatatacattatataggtactctttttatttttggctcaattgttatttagggaaaacatttatatataacataaacaactttcagaagaagaaattaatatttctttaatttcttcaactgacatttggtactttaaacctttaatatttctaggggaacttggatataaaagtacacgaggacaattttcaaacatttctatttgactagactgacgacaatagctttcactatgcagagtcttcgtagacatccaggttgaggcagttggtccagaaggcatcaatggtatggtacaaatggggcagagcattgccgatgccgtggttctcatcggtgtaggtctgtaaaatgtggcaaaaactttagatttgtggatgaataaaagtgctgggttgtaggacctgttcctcgaactgaatgtcctgtctctgcagcaatttggccaagagcagggagtgctggtagtggacattgtcatcgccggaaccgtgaatcaacagaaagtcgtggcttttgaagttctccaagttgccgaacacgctgctctcgttgtatttcttcaagttgtcatcgtcagtgggaagtcccatatagcgctcggtataaatcgtatctataatagaacattgaacatggtaaaaccccaataaaatcaaaaggcaaggtagacaaaccatagtacagccatgaggtaactggagccaccgaaactccgcactgaaagacccgatcgtcatccttctcaatggtcttggctgtcatatagccaccatagctccatccccaaatgccgcaacgctcggcatccacgaaggccagattttgttgcatccaacgagtgacgaacagttgatcctcgacctcgtgatcacccagatcattgttgaccgagaagagcagatccttgcccttattacccgtacctcggccatcaatatacgcataaatcgtatcccgcgaggtcgtgacaaacgcctcgtagcccagggtgaacccgttggtcactcgcaccgagttgggtccctggtacacaaccacgatcagtgggtacttcttcgtctccacgaaattgggaggaagggctagcttggcgtaaccaatacttccatcggccagggtgacgttcatgaagcgatagctgggacgcagcttttcttctatttgcttgcggtacgctgtattcggctcccagtccacctggagtgtcttcgtggaggcctcgaaaatcctggtgtagcttggattgggaccggtgcaggagagcgtgtagtaggagaaggacttgctgaatgtgcccgaagcggagcgacaggccgcaccatccgcatcaatttggccgcagctgaggcactcatcgttgctgaacacatggtacaccgagggatctccgggcaaagtggcctggtagtagctgcaaatgaattgtttcatttggaatcgcatctaaaaaatgactaccttaacttacagtttgtccctggcttcgtcatagccatacacgctcaaaactgtaaagttgccgcgcgactgccaactgttgagtcccgtctccaggtccaggttccacacctggtgccaattgtctatgaagtagccgaagatgcagctcttgccagtggagaggcacttgggcgtgctaatgtccacccagccctggggctcctccagccgtttcacctccacacagtcaccctcgtagctgcagctctgaatggaggtgagattctggcgtcgattcatccaggtaataagcaggtgcgtcgagttcgaccaaacaacgctctgcaggatgtgatcgtctccgacgatatccacgggcgccacgatggtgtgcatggtggggtcattgtcggacacatcgtagacgcgtaggctcaccacggggttcttggagcctgacttcggatacttgagctgctcctcgtgcggatactgatagaaagtggtggcgccgtcgccgtaaaggaagtaggtgaaagtctccacctcggtgtcgttaaagaagcccacggccagcctgcttccatccgatgaccaccagatcgcgctgccgctgctcagtacctcctcttcgtagacccagtcgggtactccgttgtagaccaccccgtccacgccgtcgtccgtgatgctgatctccaagctctcgctgaagtggatgaacacattgttcaggtagacgtaagccaagcgatcccgcagcggtgaccatccgcagtactgcagcttctcgcccttgtggatttggacggtcgtgttggtctcgatgtcgaagacgtcgtactgcgctatatacgagtgccggaacttctccgtaaggttgtgccggatcaggattttcgtgttgtccggcgacagtgagaaggtggcgcccacatagttgttctgaaaacaacgttagtgtatgccaatcattttagctagtaagctaagtacattaccagaaatgaggaattttggaagatcacatctgtcttggtggccgcattgaatttgtggatggatcggtcggttgcagtgtagtaggttcctcatctgcaatagtgcatttgaccaaaatcaaagaaccgtttatagggtatctgactttctatcattctttagattttacgttggttagataacaaatacaaatacaaataccctaactaactatttaagtgtatacaagttcgaagtgcagctgtttgaagttaagcgtgtgattgcatctggaattacgccagaaaagaggcaactagaaatttggtacgtcggaagttaagttggagaaatgtgacatcgcaccagtttcaaaactgtcttcaaaaagaaccgtggattattaatcctactttaagttccaacattgtcaaagaaatcatcgaattcgatcaaattcgtattacttagctcttgcaatgatataacttagaagtttcaaatgaaagcaaatcttagatttttccattatctgaacactgccattatggttaaccaaacgtcgcagataagaaacacacaataatcatactatcgagcttcaaaatgatgatcgtaattcatttaagataagattaaatgtaataaactagccaaaacttaagctccatatgtaagttttgccagtttttttgatatcaaagtgttaagtattataggtttaagtttattcttttcttcggtggtctactatatagggggaatgaatggcccagccgtaatatacgtaaattagcccattgataagggtcggagcacccgcggtaggaattccccggatgttaattcccaattccaaaaagatgataattcaccgcgggtgatgctctaggtgatagccgcctcaaaataaaaacaaatacaaattggtggtgcgatggaagaagaacaacaacaaacagtgggtcgtcgaaccgatgggattgatgagcaacgaacctgttatccaggtgccattgaaactccgtagccccgatgtgccgtacagagcttccgttagttcccacgccgtcttgttgccctccgcaccatccacccgcccaatgaccgccgccgccgtcgacggacgaggacaaacggtgatgaagaggccaaaggctgtgatcagcagcggattaattggcatgttgaatgccgccagagaaacgtagatcgtttatcgcaacttgtcactccgcgaagtccgcaacacgcaacagtcggcggcgcggctagaatgcaactgagccggagtcgtcggagtagagatcagaaatcaattacaatcacaaagagcgggagagaggcacctgttgagcgcggaacggcgttgccagatgccgttagttttatagcgctcttaagaacctacacttgacaacaaagatcacacttatacgtagaatgttcagagggattgccttataaagtatttagacttgtactatttacataaatcccgttcaacttaattctttatcagtaataattttaggaggcttacccgtttgccagctaccattaaaagctaataatcgcctgcccaagccgtagattgactgctttaatttccacgggcttttcactcgcgctccgtacttcgcatcatctgctgaggaaacagatcctaacgctaattggagcaacagcaacgaggcactcaagctaaatccaccgagcatagctgaagggaccacgcttaatctgaatctgatgttggaaacaagtgcggagtgctcggcatctccaaagcgagtgaactttgctgagcgtaaatgattgtattaaattagcggccaatgaagggaaaaccatagcgaaagaccccatttaacaagtggaagcgacactcattagtactaattctcataaagacttcggagccctgagaactagctaatacctctttgcgatgaaactatgttcgctttttaaactattttattttttatttatcacgattttgatggcacaaaacaagtcgttttatttgagtgtgtagtgagtatcttacagtcgaatccctctaattcagcttcttaaatagatttcatacttgaatgtagaatattttgccattaggagggcgtctaccttcacggctttaaaagtaaagataacaaagatttttactttcgatttctaac

SEQ ID NO: 23018 - DNA, 2238 bp, DROSOPHILA
atgccaattaatccgctgctgatcacagcctttggcctcttcatcaccgtttgtcctcgtccgtcgacggcggcggcggtcattgggcgggtggatggtgcggagggcaacaagacggcgtgggaactaacggaagctctgtacggcacatcggggctacggagtttcaatggcacctggataacaggcggctatcacctagagcatcacccgcgatgcaatcacacgcttaacttcaaacagctgcacttcgaacttaacaactatgtgggcgccaccttctcactgtcgccggacaacacgaaaatcctgatccggcacaaccttacggagaagttccggcactcgtatatagcgcagtacgacgtcttcgacatcgagaccaacacgaccgtccaaatccacaagggcgagaagctgcagtactgcggatggtcaccgctgcgggatcgcttggcttacgtctacctgaacaatgtgttcatccacttcagcgagagcttggagatcagcatcacggacgacggcgtggacggggtggtctacaacggagtacccgactgggtctacgaagaggaggtactgagcagcggcagcgcgatctggtggtcatcggatggaagcaggctggccgtgggcttctttaacgacaccgaggtggagactttcacctacttcctttacggcgacggcgccaccactttctatcagtatccgcacgaggagcagctcaagtatccgaagtcaggctccaagaaccccgtggtgagcctacgcgtctacgatgtgtccgacaatgaccccaccatgcacaccatcgtggcgcccgtggatatcgtcggagacgatcacatcctgcagagcgttgtttggtcgaactcgacgcacctgcttattacctggatgaatcgacgccagaatctcacctccattcagagctgcagctacgagggtgactgtgtggaggtgaaacggctggaggagccccagggctgggtggacattagcacgcccaagtgcctctccactggcaagagctgcatcttcggctacttcatagacaattggcaccaggtgtggaacctggacctggagacgggactcaacagttggcagtcgcgcggcaactttacagttttgagcgtgtatggctatgacgaagccagggacaaactctactaccaggccactttgcccggagatccctcggtgtaccatgtgttcagcaacgatgagtgcctcagctgcggccaaattgatgcggatggtgcggcctgtcgctccgcttcgggcacattcagcaagtccttctcctactacacgctctcctgcaccggtcccaatccaagctacaccaggattttcgaggcctccacgaagacactccaggtggactgggagccgaatacagcgtaccgcaagcaaatagaagaaaagctgcgtcccagctatcgcttcatgaacgtcaccctggccgatggaagtattggttacgccaagctagcccttcctcccaatttcgtggagacgaagaagtacccactgatcgtggttgtgtaccagggacccaactcggtgcgagtgaccaacgggttcaccctgggctacgaggcgtttgtcacgacctcgcgggatacgatttatgcgtatattgatggccgaggtacgggtaataagggcaaggatctgctcttctcggtcaacaatgatctgggtgatcacgaggtcgaggatcaactgttcgtcactcgttggatgcaacaaaatctggccttcgtggatgccgagcgttgcggcatttggggatggagctatggtggctatatgacagccaagaccattgagaaggatgacgatcgggtctttcagtgcggagtttcggtggctccagttacctcatggctgtactatgatacgatttataccgagcgctatatgggacttcccactgacgatgacaacttgaagaaatacaacgagagcagcgtgttcggcaacttggagaacttcaaaagccacgactttctgttgattcacggttccggcgatgacaatgtccactaccagcactccctgctcttggccaaattgctgcagagacaggacattcagttcgaggaacagacctacaccgatgagaaccacggcatcggcaatgctctgccccatttgtaccataccattgatgccttctggaccaactgcctcaacctggatgtctacgaagactctgcatag

SEQ ID NO: 23019 - protein, 745 aa, DROSOPHILA
MPINPLLITAFGLFITVCPRPSTAAAVIGRVDGAEGNKTAWELTEALYGTSGLRSFNGTWITGGYHLEHHPRCNHTLNFKQLHFELNNYVGATFSLSPDNTKILIRHNLTEKFRHSYIAQYDVFDIETNTTVQIHKGEKLQYCGWSPLRDRLAYVYLNNVFIHFSESLEISITDDGVDGVVYNGVPDWVYEEEVLSSGSAIWWSSDGSRLAVGFFNDTEVETFTYFLYGDGATTFYQYPHEEQLKYPKSGSKNPVVSLRVYDVSDNDPTMHTIVAPVDIVGDDHILQSVVWSNSTHLLITWMNRRQNLTSIQSCSYEGDCVEVKRLEEPQGWVDISTPKCLSTGKSCIFGYFIDNWHQVWNLDLETGLNSWQSRGNFTVLSVYGYDEARDKLYYQATLPGDPSVYHVFSNDECLSCGQIDADGAACRSASGTFSKSFSYYTLSCTGPNPSYTRIFEASTKTLQVDWEPNTAYRKQIEEKLRPSYRFMNVTLADGSIGYAKLALPPNFVETKKYPLIVVVYQGPNSVRVTNGFTLGYEAFVTTSRDTIYAYIDGRGTGNKGKDLLFSVNNDLGDHEVEDQLFVTRWMQQNLAFVDAERCGIWGWSYGGYMTAKTIEKDDDRVFQCGVSVAPVTSWLYYDTIYTERYMGLPTDDDNLKKYNESSVFGNLENFKSHDFLLIHGSGDDNVHYQHSLLLAKLLQRQDIQFEEQTYTDENHGIGNALPHLYHTIDAFWTNCLNLDVYEDSA

SEQ ID NO: 23020 - DNA, 3083 bp, DROSOPHILA
tggccccagaaaggcactgcgaattgattcaagcgaatcagcagctccccagagaggctccaccaaactttgacagtttgttcggcagttttaaatctttttacgatccccagcttccagactgactgactactgtcagatgttccgggctacttggccttgttttttagtctaattcttcaatatgattgcactttaagaaatattcttctgaattcgaacaacttcttatatgaaaactgtgtttttgttttagaagcgtttcttttcaagcacgaatccagagaattccttcgaatttgtttgttcaagcgcaagtatcataagaactcttaaaaccaaaaaatgtattagaagtccttttgtaataaaacttgaaaacaacgattatttctaaagctctttcagcataaaaaaatctccgttcttttcctctaagtgcagggtcatcaaatggtaaaggaaaagcaaatctaatatctgctttatgcagttggcatcctctttatgactctgacaatcaggttcgccagttcggtcggcgtaattcaaaaacgaaatttttacaagttgtaaagattaaaagtccattaggccgcagccgcagtcgcagtggaagctgcacgtagaacttgtttggaccaacccagcatccatttaaatgcgcgcaatgcaatcactcaaattggccaaagcgccagaacgtgcaaatggtcgggacggagcggggattacatgaaatattttaatccataagatgcagttaagtgcatccatcagcgcgtatttagaatttaataaatacggaagcgagaacacgacttcgaacacgactccctagcaaatgcacttcgagagctagctattttaatttatttaaatttccagccgctctcgcacataaccaactgcaatttagactgcagttcagcggcgaggaggtgagcaccagcacacgacttggactccaggtaagaaaagtgaacatccattagttgtgctaatgatgcgcaacccactttgcagcgttccgccccaagtagaactcccgatgcagcggctcctcctctgccacatccagatccacatccccattcccatccatatccgaaaccaaagccaaaagccagtgtcctgtgccggggactttgccggctaccttgcaacgcatttggccagtttggttagttagctccgctcctctgtgtgtgcagctaatgtaagtggccaagaaagggagtggaaagtggcaagagatttgcttagtgaaatagtcagaatagcaaatgcgctgagtgctaaaaactctccgttgactagtgtaattttgggactttattgaactcaactgcacttctagaactgcctcatgttaataaagatgggaactggatttggaatagctagacttaaattggaatctttattaaagcactctgtttcccttacagatagacctgcaaattaaaatacataccacatttaatgaaagctgattaagagtattaatttaattaccatgagctgattcaggtagaactcatagggtatgtgtccgctaattgggtctatggccactggccacatttcgtccatttcctcttgggtgaaaggctcgccctcctccatcatcagtttgccaaagctctccttggtgagatagcccttgttctccggatccaagatcttaaaggcctggagaattttctctggcggagcaggctccattctgttgtatgtatgatatgatgtatgaactataattactaagcattgctacccactttctttccatgagcagttgcgagacgtgtggcaaaaatttagtcaaatgcacttcgccactggtctcctccgattctgtagccgaaattacttcgttcacctcctcctcggtgggaacacagcccaggagtctcagcacagtgcccacttctctaacgtcgatgaacttgtcgccatgatgatcgaacacacaaaaggcatccgaaatgcgtttctccaagtcgttattcactaaaagaaaaagattatttaattactaagtcctggcattttctggccacttacaatccatatccatgttaaaggcttgaggttttcttaccaactgagactcgtagtgggtggaaagtattaaatcaatatcccactaaaacaaacactgttgctaggggtgatttgaatagatgcggaaaatcattactattttttcttgtttttgatacatgcgtttttaagtagctatttcttatggcattctttgatttcattacaaagagaacaacctgtcgtttacgtttggatcgaccacatccaaatccacaaaaggctgtggctgccgccgaggcgggcccataatgctacagtaaaaacctccgtagagcggcccattaggcagctcatggaggccatcatattggcccattaccatttcgccgatccaccggctgtctggtaaggaacacggaagtattcctctgccttactgggtgcctggccagcagcaacaagtgcattttcggagctgtgcccactttaatggaaattactgcagagctcgccattaattttccctcacatttgtctggccagtttgaggcccggctctcaacgcattcgattcgattaaaaaaatggcaaaggcaagtacaagaactgctccattcacgctaatgcgtgtcgtgtacaacacgcttgccacttgagctgtttgccgcatcgcatctcctagaatatatgtgtatactcgtatatatatatggctatgcatgtagtacatatatatgccctgcgtaccgctcagatttcccgcagctcccatcatcaccatcatcgaatccacgtacacacttgcctatctaccgccatctcctttgctgtttgtggacctggctttggatctccacttggccctctgcctgggcccgggctactgccataaacactaaaagtgttcgtcatttgctgttccagatccaattaaccattttgatgcatttgcctccattaactctttctctctctctcattcggacccttttgcaagggcataggcccagtctgctacacagagagaaaac

SEQ ID NO: 23021 - DNA, 615 bp, DROSOPHILA
atggatatggatttgaataacgacttggagaaacgcatttcggatgccttttgtgtgttcgatcatcatggcgacaagttcatcgacgttagagaagtgggcactgtgctgagactcctgggctgtgttcccaccgaggaggaggtgaacgaagtaatttcggctacagaatcggaggagaccagtggcgaagtgcatttgactaaatttttgccacacgtctcgcaactgctcatggaaagaaaaatggagcctgctccgccagagaaaattctccaggcctttaagatcttggatccggagaacaagggctatctcaccaaggagagctttggcaaactgatgatggaggagggcgagcctttcacccaagaggaaatggacgaaatgtggccagtggccatagacccaattagcggacacataccctatgagttctacctgaatcagctcatggtagccggcaaagtccccggcacaggacactggcttttggctttggtttcggatatggatgggaatggggatgtggatctggatgtggcagaggaggagccgctgcatcgggagttctacttggggcggaacgctgcaaagtgggttgcgcatcattag

SEQ ID NO: 23022 - protein, 204 aa, DROSOPHILA
MDMDLNNDLEKRISDAFCVFDHHGDKFIDVREVGTVLRLLGCVPTEEEVNEVISATESEETSGEVHLTKFLPHVSQLLMERKMEPAPPEKILQAFKILDPENKGYLTKESFGKLMMEEGEPFTQEEMDEMWPVAIDPISGHIPYEFYLNQLMVAGKVPGTGHWLLALVSDMDGNGDVDLDVAEEEPLHREFYLGRNAAKWVAHH

SEQ ID NO: 23023 - DNA, 2955 bp, DROSOPHILA
tgaaaatggaatgcatcatggatctggtggaattaattgtcgaggagccgtttttcaaccaattaaggactcaggagcaattgggctacagcttgggaattcatcaacgaattggatatggtgtgttggcctttcttatcaccataaatactcaggagacaaaacatcgagcagattatgtggagcaacgtattgaagcctttaggtctcgaatggctgaacttgtctcccagatgagtgatacagagtttaagaacatacgagaaactctaattaatggaaaaaagctgggcgacacaagtttggatgaggaagttttgagaaattggagtgagattgtcacaaaagaatacttctttaatcggatagaaacgcaaatacaaatgctgagccatttaacgaaggaggacgtattgaacttccttaatgataatgataaaaacaatttaagaaaactttctgtccaagtggtgggaaaccataatcaaacatcaaattcaacagcccaagccagtcgatccggatctttgagtgacttattagacgatgtacaggacaatatggcaaatgaaacagattcagctaagccaatgaccgataagatcagacttgagtttttgggagagagcgatgatccttcaagcattaaggatatttatgctttcaaaaaggatctatatgtctttcccctgttcaacaccaatcccaatcttgcaaataaatcgtaaaaatataccgtgcaataaatttgattagcactattatttttgctcagcatgttcaactttaagttgtgcctccctcctgagaattgttatgaagccagtacaattacgcggtatatgtccatgcaatgttaccagtggagtcttaccgatcaaaatacgatgtatttctatctcggtatgcctataattaagcaagccaaatccgaaagagcgagaccaaatgagaccagaacatattttataaatgatttctaagtgtagaaagcttttatttatcgttttgctagcaaagctttaatgcttttctcgataaaaggcttcacgtacataacatccgtgtagacgccaggataacggttgctagcacatccaatgccaaaggacactatgccacacacctgctttttgaacaccaacggcccacctgagtcaaaggtgcacgcatccttacgtcccagcactgcagcacatatcatactgtcggttattttagctgttaaagcaaataaaataaacagtacaagaccgtcgtgtggagtaagccctatttaagttccatacgaacttacccgtgggctgataggcagcgcgacagttctttttgtgaataattggcactgtcaccgtacgtagtaagttgtggggcccacgtcctcggggagcggtcatgccccatccggaaaccaccagttctacgcctggcttaaggctcaccgaacataagctcagtgttccgatgtttttagccttcaatggagttttcagcagtaccactgctacatccatattcatgtcgtcctctcgaaattgctcggacaggatgaagtccttaacatggcgtcgaatacccttttgattgagattcgaaatgccggcagccacaatccattcgctcgccttcattcgacccagaaaacagtgagccgccgtcaggacgatgttttcgttgagcaatgtaccgccacaaacaaaatcgtcttcataaagcaaggctgttaggtatcctcccaacttggcatttgtggtcacatggccgccaattacgcgagtttcatgtggtgatggaagaactatcttggccagctgtgccacatcgagagtgagatttttgcccggttgaccactttcatccggcagggaaagcacaattttctcctgttcttggccatatacttgggtcgaaactaaagtgcaagccagcacgcagcaaacgagatgccattccattgttcacagggagtggagtggaatggcacttgcccaatagaccttccacccaagtcattttacaatataagcgtggcgaatgcagctaatccgagacaaataccacttacatattacatacatgcgacacagtccaataagtatcagataatctctttctttaattttgaaatttaatcatcgttttgccagcaacaccttaatgctctgctcgataaagggcttcacatacattatgtccgtgtagacaccgtagtatctcttactggcacatcctatgccaaaggacacgatgccacatacttgattcttgtacaccaagggaccgccggagtcaaaggtgcatgcatctttttttcccagcactccggcgcaaaacatactgtctgttaaatgaactgaaaacaaataatgtgttttcggaaaggttcttaagacaaaagtagtgtatgctaaataccttttaaaaataaatcaaagtgcttatgactttcccaatctaaagttaccaaagttattaaccccatattgccgtgcaatattccactcacccgtcggcagataggaagcacgacactttttcttatccacgactggcactgtcaccgtacgcaatagtttctgtgggccaaactcactgttctcggtgagaccccaaccggaaacgcggagttccgtgcctggcattagctgttttttgcacaatatcagctgtccgagagacttgcccttcatgggtttctttagccgtaatatggccacatccatgttcatgtcatcctcgcgaaattcggccgacttgataacttccttgacttgacgctggatacctctatcattgagcttggaggcgccgccgacggccaaccaatcgctgatcttcacccgtcccagaaagcaatgcgctgccgtcaggacgataaggtcgtgaagcagggtgcctccgcaaacgaagttcatttcgtagcgcagtgcgattagatagccaccgagctgtgca

SEQ ID NO: 23024 - DNA, 846 bp, DROSOPHILA
atggaatggcatctcgtttgctgcgtgctggcttgcactttagtttcgacccaagtatatggccaagaacaggagaaaattgtgctttccctgccggatgaaagtggtcaaccgggcaaaaatctcactctcgatgtggcacagctggccaagatagttcttccatcaccacatgaaactcgcgtaattggcggccatgtgaccacaaatgccaagttgggaggatacctaacagccttgctttatgaagacgattttgtttgtggcggtacattgctcaacgaaaacatcgtcctgacggcggctcactgttttctgggtcgaatgaaggcgagcgaatggattgtggctgccggcatttcgaatctcaatcaaaagggtattcgacgccatgttaaggacttcatcctgtccgagcaatttcgagaggacgacatgaatatggatgtagcagtggtactgctgaaaactccattgaaggctaaaaacatcggaacactgagcttatgttcggtgagccttaagccaggcgtagaactggtggtttccggatggggcatgaccgctccccgaggacgtgggccccacaacttactacgtacggtgacagtgccaattattcacaaaaagaactgtcgcgctgcctatcagcccacggtgctgggacgtaaggatgcgtgcacctttgactcaggtgggccgttggtgttcaaaaagcaggtgtgtggcatagtgtcctttggcattggatgtgctagcaaccgttatcctggcgtctacacggatgttatgtacgtgaagccttttatcgagaaaagcattaaagctttgctagcaaaacgataa

SEQ ID NO: 23025 - protein, 281 aa, DROSOPHILA
MEWHLVCCVLACTLVSTQVYGQEQEKIVLSLPDESGQPGKNLTLDVAQLAKIVLPSPHETRVIGGHVTTNAKLGGYLTALLYEDDFVCGGTLLNENIVLTAAHCFLGRMKASEWIVAAGISNLNQKGIRRHVKDFILSEQFREDDMNMDVAVVLLKTPLKAKNIGTLSLCSVSLKPGVELVVSGWGMTAPRGRGPHNLLRTVTVPIIHKKNCRAAYQPTVLGRKDACTFDSGGPLVFKKQVCGIVSFGIGCASNRYPGVYTDVMYVKPFIEKSIKALLAKR

SEQ ID NO: 23026 - DNA, 3396 bp, DROSOPHILA; identical to SEQ ID NO: 22048

SEQ ID NO: 23027 - DNA, 1329 bp, DROSOPHILA; identical to SEQ ID NO: 22049

SEQ ID NO: 23028 - protein, 442 aa, DROSOPHILA; identical to SEQ ID NO: 22050

SEQ ID NO: 23029 - DNA, 2453 bp, DROSOPHILA
acacacgcacgcaccgagattaacacacgtaaacaaagcaaatgacgtttggtttcgatttttggagtcaactgtaccatcgccacctatcccgcccgctcgtacacactattcccgtctcgctttcgcagaaaatacaattcgttggtgttgggtttttttggtttcttctatagaaaaaaccgtttattttttattttcttttttttttttgctgatgtttccagttatttttgctgttgctgtcactgatttgttgttgtaaattgtttttgtgttttgtgggggattcgttttttgttttctgttttcatattggttcttgtaagctacgacgatacgaatagacacatatttagtccgatttgtttaaatgttcaatgtgaaactagttatcgacaccaatttacagctatatgtatatttatatatatatatatgcatgttttatgggcgtttacaattgattattttgcatgtgtttcaaactacatataaatattgggaaatattcaatgctctgctcggcgcttttgcttttattttgtattgttatgtgatttctgtcttggttatttttattcgatgctcttccaaatctatagatgtgtaagttaatctgattgctgaatcatctttatatctttttttcatctcccgaagaagaatcatcttctatcgtccgcctaaacgtataaaatgcatgtaaatctaaaatcttatttaatcaactaactctgtcacgcccatcccttcgttatgtgtatatatatatatataacttctatatatatatatatataatgctctgattatgatttgcagtaacgaaaagtgaccagaagaaagagtattaatatctagttctttttccttccgcataggtttatatttatatttatatatatatatatatttatatatatatgtatttatgtatatatatgcatatacgtaagtgtaaagttaagtgtactcgattcggtcttcggtgttatatatggatattatcttcataaaagccgcgtgccgtcagtggcatcgccagacggccatgccctcgccgcccatccagagatccgggaatcaccgccaggcggtccgcaaccgtctgtccgccttgccacgtccagccgacgttagattggccccgatctccaggctccgcacatcccggcagccagatggtgaacctctcctcgatcgaagcgataaaggcgaggcaggcgccttaaagatcacggattacctggaaaccgaagcccgccagctggacagttgttggagtggttggtggcggatgttgcaggcggacaggcgacaacggccgcccggtggtattccctccttccaaaacgaagaggtggacccggatttggagaagaaggagcacggcgcaacgtacacggtgacaccgacgacgcacaggcgagaaaaaaaacttaaaaactaattgataatagtaataataagagttataaaataatttttaagcattacagtaatgttgtgtgttgttttgtgtgtggtgtttttcttatcgacaacgtcatgctgacgattcgattgaacaacaaaaggatgataaatgtatacatgtaaatatgaatgatagattggatcaatgtgtcgctggtatagctccttggcgtgcacctctcctacaacggtacgtgaatggtctactgttcgggaatggacgacagtgatcgaatctggcgttcctgctgatccaccttaagcacgctcgccacggatgcggcgcgccaactggatgtccttaggcatgattgtcacgcgcttggcgtggatagcgcacaagttggtgtcctcgaagagacccaccaggtacgcctcagatgcttcctgtaagtcaagagaaattcatatgagttggataaccaagttccttttagatattagtagcccccccttcataatcccatgaatcctgtcatttttagttaagttaagccactctgattctttggagcataattctcacctgcaaggcaccgatggcagccgactggaaacgcagatcggtcttgaaatcctgagcgatttcacgaaccagacgctggaagggcagcttgcggatgagcaactcggtcgacttctggtaacgacggatctcacgaagagccacagttccgggacgataacgatggggcttcttcactccgccggtggatggcgccgatttacgggcagccttggtggctagctgcttacgaggagcctttcctccggtcgacttacgggcagtctgcttagtacgagccatgttttcttagcttttttttttaaactgcaattaagagaatgggaaatgcaaatgttagattttgcgcgttccagattgacacagattaaataaacacttctacaatcattgtttggttggtacccaaaataaacacgctgatcctcgccagatgagaaagacaact

SEQ ID NO: 23030 - DNA, 453 bp, DROSOPHILA
atggatattatcttcataaaagccgcgtgccgtcagtggcatcgccagacggccatgccctcgccgcccatccagagatccgggaatcaccgccaggcggtccgcaaccgtctgtccgccttgccacgtccagccgacgttagattggccccgatctccaggctccgcacatcccggcagccagatggtgaacctctcctcgatcgaagcgataaaggcgaggcaggcgccttaaagatcacggattacctggaaaccgaagcccgccagctggacagttgttggagtggttggtggcggatgttgcaggcggacaggcgacaacggccgcccggtggtattccctccttccaaaacgaagaggtggacccggatttggagaagaaggagcacggcgcaacgtacacggtgacaccgacgacgcacaggcgagaaaaaaaacttaaaaactaa

SEQ ID NO: 23031 - protein, 150 aa, DROSOPHILA
MDIIFIKAACRQWHRQTAMPSPPIQRSGNHRQAVRNRLSALPRPADVRLAPISRLRTSRQPDGEPLLDRSDKGEAGALKITDYLETEARQLDSCWSGWWRMLQADRRQRPPGGIPSFQNEEVDPDLEKKEHGATYTVTPTTHRREKKLKN

SEQ ID NO: 23032 - DNA, 4594 bp, DROSOPHILA
atatccatagtttccataaccgtagtcatagccatatccatgattatgatgatggtgatggtgatgtggatacgaatagtatccgtacgacggaggtggaggctgtggtattccgaatcccacgccaattggcagcggaagaggcagtccaacaacaacaggtgtacccatcgctccagcaatggcgaacagcacgattccgataagagcgactatagctttcatgtttcttggcaagatttcgcaaacgactgacaaatctgcggagaggctatcggcttttaagcattatgatggtggcgttacgattttgggaatttcaatcgcagcgtggacaaacagaataaattgaatttcacctgccgaaaggtgcgaattgctccatgatatgtatttcccccgcaatgttattcaccgaattgttggctttattttgcagatgacttttttggatagtttagtagataacttttatctagcccttattgaatactaaaagttgatttttgttttgatagtttttattgtatttttacattgttgaataacatgttttactttttactaatgatgatcgtcgtggtgatgcggatcgtagtgaggatcagcatgaggatcgtggtgctgatagtaatgatgaacttggtgcggatcgtgatgggaaacgtagttgggatcgacttcaaaatgtggttttgcaaaagtggcaacaaagatgagtaaaagcacaatgagagcgaatactgcattcatgattcaggttgggcgattcaacgaactgatgcacttacctcgaatgcactagcttttaaatcattcgggcatctgctttttggaaatcacccaccatgatcgataaacagagtcaaaagtaaagtaaatatcaataatccctttgcaagcggttaattggtctcaatatttggtttatttattaaagctctacaacgtttatcacaagtcttaataggcatacaaaaattcgttgaatccttggcatctaggctcctgacttgacattcacagtcagctgcttgaagtctcgatcgctaagaaggcgccacttgtagcccaagatttgtgagatctcccgctcgacggcttcataggatcgggaatttcgcttcaaccaggcatagaactcattgctccactccggatgccttggccaatcgcatcgcaaaatcacagcaaatcgccgcacgtgaagatgctgcagattcttggccgtttttgcaatgagtaaaagcgtcgaggtggaaactttttcgcgtatgatctgtgagataggatgccaaggtgttaagtaagtgtcaatataattaagtaatatccccattactaatcgaattagaagatttttgatcccaattggatattatattggtgcaccaatacatagcctctattatgccacttaagggatttcccactgagatgtggtatgaatatgacagaactcaccaaagtgtcaacattaaagcactgccggcacatcagcaacatcaagctgtcgatgcgactgtgaaaaggcttggggcttgaaaagcgcggcagaagctcgtggccatagacggccagggtgctcttatagtggtccaccattcggacgagtagctcggcccgtatccgggtctggggtgcacagtacgtgatgctgtggacaggcgcctccggctgcaacaccacctcgccgtccgtcagattctctaatcggagatgaacgcgcaggcgcggattggtcttcttcacatttcgccaggccttcacgccgcaagcacttattgtcaggtggctgggggtgtagcagttttgtagcaggtgcaggtggcgcaacttggtgtccgccagcagggacaaaacgtcatcgtctatgttctggggggatatggtgagcacctggatcaagatatttggattagtgctgaagcaagaaatgaaattgaatcgctgtcacctgcagattgagaaacagacccacatgcataatggggcaatgcattgtggtcacattcaccagattgagcaccctcattttggtgcagcagctgcagacgacctcgtccagcaagtgattcgcctcgtatcgttccaatacaaagtccaccagcttgagagtgtgaagatctgtcaatcgcaggagcagctccttcagaacccttagcagttgtcctccagtgccgaagagctttattccttcaggatcattcggctgcgacatattgcacggaaagtggtagaccagagttcgtatacgactaccgatgccaatgaactgtgtatctggattcacctctctgccctaaagaagttttacattataaggttgattctttaataaggtgaatattcccataccttgtcaatgttccacgttaacatggtcatgaactgaaagatattattgaaactgtgccacggtcgaaactcgattccccgcacatatcttccgatcctcgaaaggcagaactgggttcgcatgtgatcgagacaaaactgccagccggaatagtagttgaacttcggtttggtcagagtgcgatcatccaccaaaaagttattccaaacagttggtaaatagaaggccctataccactgccgacagacctggaaaagttcacaaagtgaagtttcatactttagttatggaacctgtaggaatgtggatgtagatttcttagattttatatacatattgaataataatatgtatgaaacaaacaagctaaaaactttaatgttttggaataccgagcagctgcttctaatatatgatcatattttgttttgcttttcaaaggtcaggttgagctaaagaaatgtaaacaaatcaaacatgttgctaaatatttggttaaataccatatctggctatctcgagctataaaattgctattttaaattataaaaaatcgatgtttaaaataattaaggtttataaatccagatagttagacaaaaaaagttcgtatgcatcggccgggaatcgaacccgggccgcccgcgtggcaggcgagcattctaccactgaaccaccgatgcttggtgaaggggttgcttgcaaaataactctaattatgagtaatcaggctttaaagttaattgaatccttattaatagaaatttgttctatatattgcgttcgcttattaaggaacttattaaaagaacgatctcttattatgacctctattttgtgcgatactagagatatgttatatatatatataagactttgacttacgattatagtgtttaatatgtgattaaagaaatttacttaaaactattttgataattaccagtccggcataatagcgctctttgggggtgaggtaggtaaagatctgttcgagtaccagatcaggcagataccgccaattggactctatcatgttttcggtgtcctggtcctcatcctcgtccacatctatgtagcaggctggttgattaagtggggaaaactcagattattccggtgactgacatgggagtctgtggcctacccttctcgtctccatcgatcttccagccagccttttgcataacctccagctgggcgctgctcttccgcctcaggcccaattcactcatgtttgtggaggtattgttattattattttacgaattttcgaaatatttacaacgcttgcgacggcacagaactatatgtactctaattttgaaattttttttttggcacagcctgcgctgacagcttcttcttgctgtcggtttatttttatatagttggaccgaccgactgtccgctgcactcgcagttgcgtcgcgtttggccagcgactgtctcccgaatagattgggattctttcagatgttcaaatcgcactgttggctattttcgataaactgaaaaacgtttttcagttctcgcgctcgaaattgttaggtactcgtcttctcttcgcagcgcttccaatttattttggttattatttctttgttgatttctgttgatgcttggaactgcgctcgagatgatatggcaactgttgtgattccgatttctcgtttgttttcgttttccgattttaaaattagacaccggcactttgggcaaggtcttagggccttcgttgcgtggcacggaattggagcaacttgttgatgccaccgctggctgttgaggtgtaaattataaataaacactagaactgttttgaactgtggtgatctgatcgatccgtatttcgttgcatgtgcagctaagtgtgcgttaacgcacgtgctgtaataacattagtgcatagagagaaatttataacattatgcaaaaatattaaataaaatcaccttcttgtgcatatgtattatgatttttctaagcagtggtctaaaagtacaatagtcgccacttagtagtacaggagaaaaactgctgtaagctacttaccaattctgacgttatcttattcttcttctttgacacttgacctcactttgccgttcagtgggatggcggaagaaaattccatcggccaccaaacggtgccatcgtcgtttccttgacgatgccaccaactgagccagctgttatcccgttttccgattttccgctgtccacttgtgcatt

SEQ ID NO: 23033 - DNA, 1536 bp, DROSOPHILA
atgagtgaattgggcctgaggcggaagagcagcgcccagctggaggttatgcaaaaggctggctggaagatcgatggagacgagaaggcctgctacatagatgtggacgaggatgaggaccaggacaccgaaaacatgatagagtccaattggcggtatctgcctgatctggtactcgaacagatctttacctacctcacccccaaagagcgctattatgccggactggtctgtcggcagtggtatagggccttctatttaccaactgtttggaataactttttggtggatgatcgcactctgaccaaaccgaagttcaactactattccggctggcagttttgtctcgatcacatgcgaacccagttctgcctttcgaggatcggaagatatgtgcggggaatcgagtttcgaccgtggcacagtttcaataatatctttcagttcatgaccatgttaacgtggaacattgacaagggcagagaggtgaatccagatacacagttcattggcatcggtagtcgtatacgaactctggtctaccactttccgtgcaatatgtcgcagccgaatgatcctgaaggaataaagctcttcggcactggaggacaactgctaagggttctgaaggagctgctcctgcgattgacagatcttcacactctcaagctggtggactttgtattggaacgatacgaggcgaatcacttgctggacgaggtcgtctgcagctgctgcaccaaaatgagggtgctcaatctggtgaatgtgaccacaatgcattgccccattatgcatgtgggtctgtttctcaatctgcaggtgctcaccatatccccccagaacatagacgatgacgttttgtccctgctggcggacaccaagttgcgccacctgcacctgctacaaaactgctacacccccagccacctgacaataagtgcttgcggcgtgaaggcctggcgaaatgtgaagaagaccaatccgcgcctgcgcgttcatctccgattagagaatctgacggacggcgaggtggtgttgcagccggaggcgcctgtccacagcatcacgtactgtgcaccccagacccggatacgggccgagctactcgtccgaatggtggaccactataagagcaccctggccgtctatggccacgagcttctgccgcgcttttcaagccccaagccttttcacagtcgcatcgacagcttgatgttgctgatgtgccggcagtgctttaatgttgacactttgatcatacgcgaaaaagtttccacctcgacgcttttactcattgcaaaaacggccaagaatctgcagcatcttcacgtgcggcgatttgctgtgattttgcgatgcgattggccaaggcatccggagtggagcaatgagttctatgcctggttgaagcgaaattcccgatcctatgaagccgtcgagcgggagatctcacaaatcttgggctacaagtggcgccttcttagcgatcgagacttcaagcagctgactgtgaatgtcaagtcaggagcctag

SEQ ID NO: 23034 - protein, 511 aa, DROSOPHILA
MSELGLRRKSSAQLEVMQKAGWKIDGDEKACYIDVDEDEDQDTENMIESNWRYLPDLVLEQIFTYLTPKERYYAGLVCRQWYRAFYLPTVWNNFLVDDRTLTKPKFNYYSGWQFCLDHMRTQFCLSRIGRYVRGIEFRPWHSFNNIFQFMTMLTWNIDKGREVNPDTQFIGIGSRIRTLVYHFPCNMSQPNDPEGIKLFGTGGQLLRVLKELLLRLTDLHTLKLVDFVLERYEANHLLDEVVCSCCTKMRVLNLVNVTTMHCPIMHVGLFLNLQVLTISPQNIDDDVLSLLADTKLRHLHLLQNCYTPSHLTISACGVKAWRNVKKTNPRLRVHLRLENLTDGEVVLQPEAPVHSITYCAPQTRIRAELLVRMVDHYKSTLAVYGHELLPRFSSPKPFHSRIDSLMLLMCRQCFNVDTLIIREKVSTSTLLLIAKTAKNLQHLHVRRFAVILRCDWPRHPEWSNEFYAWLKRNSRSYEAVEREISQILGYKWRLLSDRDFKQLTVNVKSGA

SEQ ID NO: 23035 - DNA, 4784 bp, DROSOPHILA
atcctgaggagctgcataactcggttgtggcttcggtggccatccaggcggacatccgtccattcgccgagcaattgtttgagcaaatgaacgctgttaacttccgcttcggctacgagcaggattggtggaagcagttggccgtcaagtgcaagcagaaccgcgacaccgtgcaaaagatgtctttgaacacggagacgccgctgaactactacgcggtgttccaccatctccgtgagctgctgcccaaggacacgatcattgttagtgagggagccaacaccatggatattggtcgctccatgctgctgaacgagcagccccgtcatcgcctggatgccggtacctttggcaccatgggcgtgggtcctggattcgccgtggccgccgcgcttttctgccgcgactttgcgcccggaaagcgagtcctgtgcgtggagggagacagcgcctttggattctcgggcatggaaattgagactatggtgcgctataagctgcccgtcaccattgtgattgtgaacaacaatggcatctatggcggcttcgacaaggacacttttgaggccattcgcagtgagggcgatcttacccaaatgtgagtgctagtagcttatcggtttatctggtacaactacttacggctaatcttatcttgcagcacaccaccatcggcattgggagttcaggtgcgctacgaggagatgatgaaaatgttcggcatgaagggctacttctgcacagagatcgaacagctgcaggcggctgtcaaggcggccaatcagctcaccgacaggccaaccatcattaatgtggccatcagcccgtcatccgatcgcaagccgcagtccttcaactggctcacagagtcaaaactgtagaataccattaaggtttaggtcttaagcacgatgttcaccattccgaaagttatattgccacgaatttttctgtatatacatgcaatttttgatacgccctcattattgttggctactcattaattgttggctcgctttagttcttcctctattccaaggtagtctaggaaccaggtgaagtccaccaggcgccctttgtgcaggaagggcaacttggggcagagctcaaaggcaatgttgagaggagcaatgtcgggcacttggtcgttgcgcatgttgaagaaggcgagaaagtcgcgcacctcgatttcgttctgtccgttgcgctgcagcaccatcagtatgtcctccaccagctccaagctgaagggcagccggcagcctcgcaaagtagacctcacttgaccttcactgatgtacggcttgcacgccggattaatgtggctcagatgatcgttcagctgatccatgccgttccacaaagctcgcttcagctccagttgggcggcagctcgcactcgattcctatcgcagctgggaggcattgcctgctcagccgagaaaaagcgacacacggtcacaatctcatggttgagcaggcaatccttggacagataggacaggagagtcgagcgcaacgtttcgaagctaacggcggtatagtcgccgaggtcaccatccggtttgcagcgcagcacaaactgcttgtaatccggacgcactgcctcgcgtatcttctgcatgattttttgaatgtccgctacggggaactgaaaatagaatgtatgcaaattattatagaattgcaactataacgatatatggatgatatttgattaaatagacattaagtaatttaattggttcagaacactgtcgataaattatacttacctcgctgggatgttgctccatgtacatcagcgtgaactcatcagcggaaacaatgtggaaaatgtgatccttaagagtcattgtgcgtcctatatagaagtcattggccctgtagtattcaggtcttgatgagctgtacatatcctgacccggcagtggcacacgtgcccttttaagaaattcgccgcccaggaagcccgagtttcgacgtgacgtctcatagatttgcaacgtgtcatcggccaggaaatagctgatgacaaagtcacgctctccattatcccgaatggccgagatcagcttggctccgaagcgcaggatgcatccgtcgtacttgaagagcttcttgaaatcggcctgtggcggtttgggctccacggtgatacagttgccttcggaatcctcgtggctaccccagccattgtagggtggcaatcggcgggatcccatgccaccctgagtgtacggtcgaatatcacttcgttctggaatcggctgagggctgaattcctggatgccgtacttaaaaacataataggaggtcaacttaatgtatgatatataaattataagattaagtgtactttactttttctctgtagtagctctgtgtgaactgatcgcagcttgtaagtacgacactcctcccaaaaacatttagcactgcgcctatttgcagatcctgatcggtgtaatgttgaacctctttttgaccagtgttcaacgggtcggctacgtaacgcacatcgcgcatactgtttcccagcacattaagcaacgtcatggccgtttgttgcccaggcaaaggaagaccagaaaactcctttggcaacttgcctcgttttagaaaagtcgtgggaccttctcgcccagaatttcgtggaaatttctcctttatgtcaattgtgtcatcggccaggtagtagcagacttcaagctttcgcacatcaccaaactcactacgatcgttccaatatccctgaaacttaaggactcgcctgtcgaactccaggaactgggcaaacgcatgttttttgggcaaagccgaagtggcggtattacccgtttgcttcaagcctgatcgctttcgaatttctgttgtgggatcactaagtaagaaataaaagtaggcattgattcattcaattcatcattacttagcaatattcattaaatgtgtcttcatgaaattaaaatacttgaatgtggaaagaggaatacttgacttaccatggctcctgctgggcctcaggcacgaagatgccagctcgattgaggaactgcctcgtgaagacgtcacatccgctgatgtgatacacccgatcgaagatctgcacatccgtgtccacgttcaggtcgaagatggagatgaactcgcggtcggtgggtggagcttttgggatgcgctggcggtgaactagacagccttgcggtatgcctgagttctccactttcggctcggtgacctgcatggtgccatcctcgaggtagaagaagatcttcaccttgcgcacctggtagggagcgtgatagatctccgtcaggttctccttgaagtaggcgttgaagcacagcacctgcttgtcgtaggccaaccagggtggcaacttggtggtggccttcggagcccacaggctattgagctgggcgggcacgggcggacacttgggatcggccacaatgccattgggctccaccagttccggctcccggcggtccgaaagcatctgaatgccctggtagtgcatcagcgtttgctgccgcggatggcgacgctttccacgctgtcgggaaatcgtaggttaataattggaggacaccccaccgccaacacttacatcgtagaactgcgcacctggtagcatgggcattcccggtagtcgcatcatttgcacagataatttcgtactcttttgtctaaaccaaaataaaaattttgctgcacttcctgcgccaaatcgttgtggttacatttgccttgaagccaaaagcagttatatggcagttaacgccacgcaattgatttttggactggactgcttgagtgttccgacatttacgctgctattcgataaatggaacaaacggaactatggtaatgccacctcaccatggcagccccaaaaagtcaactggacaacaagtcaacgcgactaactgcaactggtagcggttaccaagcaaagtatggttatgattataatgtatatgactatgtaaatgttctttaccttaacatgctctagtttgtagtcacatacaaccgtcaagtgccagtccaacctgtagttgactcacgtcacgcagcgatgtttccgttgaacctgaaagcatttcaatcactgcaatcggtccaatgactttctgaagtcatggccaccgtttaaagtagtctggtggctcagacgcagtgtttgctaattagtcggacaggcaaaagtagggaacccatatgatcacgtgctttttctcacctctctttaacaccatacacacacccatctagacggcttacaaactgtcgtagaacgatgccatgactgcgaagctgtaagaatcgaggcggtaaacgttgccaagagctcgagcggacaacatgaaccttttgtgagttaataagccatgaagtgttatttttagtttccactgacatatcatctactctaatatagggcgaaaatcatactgttccttttcactctcgaggctgtgagtgctttagaggccaatctcacttcgtggcgacatcacagaaggcaaaagcggttcctgatttatcagaatggcggtgtaatcaaggttggacatcaaatatttattgagtattgatcgatatacaataatacatatgtgtcactacagttcgtttcgggatgtgcatttccggctccgtttatggagaaaaaggcatggcgccagttggtttggctgatgaactttcactatcagttcaatgagccgcaaactccaatctactggtggaaactttgggatggctcccgaaatctc

SEQ ID NO: 23036 - DNA, 2262 bp, DROSOPHILA
ttaactgccatataactgcttttggcttcaaggcaaatgtaaccacaacgatttggcgcaggaagtgcagcaaaatttttattttggtttagacaaaagagtacgaaattatctgtgcaaatgatgcgactaccgggaatgcccatgctaccaggtgcgcagttctacgatcgtggaaagcgtcgccatccgcggcagcaaacgctgatgcactaccagggcattcagatgctttcggaccgccgggagccggaactggtggagcccaatggcattgtggccgatcccaagtgtccgcccgtgcccgcccagctcaatagcctgtgggctccgaaggccaccaccaagttgccaccctggttggcctacgacaagcaggtgctgtgcttcaacgcctacttcaaggagaacctgacggagatctatcacgctccctaccaggtgcgcaaggtgaagatcttcttctacctcgaggatggcaccatgcaggtcaccgagccgaaagtggagaactcaggcataccgcaaggctgtctagttcaccgccagcgcatcccaaaagctccacccaccgaccgcgagttcatctccatcttcgacctgaacgtggacacggatgtgcagatcttcgatcgggtgtatcacatcagcggatgtgacgtcttcacgaggcagttcctcaatcgagctggcatcttcgtgcctgaggcccagcaggagccatgtgatcccacaacagaaattcgaaagcgatcaggcttgaagcaaacgggtaataccgccacttcggctttgcccaaaaaacatgcgtttgcccagttcctggagttcgacaggcgagtccttaagtttcagggatattggaacgatcgtagtgagtttggtgatgtgcgaaagcttgaagtctgctactacctggccgatgacacaattgacataaaggagaaatttccacgaaattctgggcgagaaggtcccacgacttttctaaaacgaggcaagttgccaaaggagttttctggtcttcctttgcctgggcaacaaacggccatgacgttgcttaatgtgctgggaaacagtatgcgcgattacggcatccaggaattcagccctcagccgattccagaacgaagtgatattcgaccgtacactcagggtggcatgggatcccgccgattgccaccctacaatggctggggtagccacgaggattccgaaggcaactgtatcaccgtggagcccaaaccgccacaggccgatttcaagaagctcttcaagtacgacggatgcatcctgcgcttcggagccaagctgatctcggccattcgggataatggagagcgtgactttgtcatcagctatttcctggccgatgacacgttgcaaatctatgagacgtcacgtcgaaactcgggcttcctgggcggcgaatttcttaaaagggcacgtgtgccactgccgggtcaggatatgtacagctcatcaagacctgaatactacagggccaatgacttctatataggacgcacaatgactcttaaggatcacattttccacattgtttccgctgatgagttcacgctgatgtacatggagcaacatcccagcgagttccccgtagcggacattcaaaaaatcatgcagaagatacgcgaggcagtgcgtccggattacaagcagtttgtgctgcgctgcaaaccggatggtgacctcggcgactataccgccgttagcttcgaaacgttgcgctcgactctcctgtcctatctgtccaaggattgcctgctcaaccatgagattgtgaccgtgtgtcgctttttctcggctgagcaggcaatgcctcccagctgcgataggaatcgagtgcgagctgccgcccaactggagctgaagcgagctttgtggaacggcatggatcagctgaacgatcatctgagccacattaatccggcgtgcaagccgtacatcagtgaaggtcaagtgaggtctactttgcgaggctgccggctgcccttcagcttggagctggtggaggacatactgatggtgctgcagcgcaacggacagaacgaaatcgaggtgcgcgactttctcgccttcttcaacatgcgcaacgaccaagtgcccgacattgctcctctcaacattgcctttgagctctgccccaagttgcccttcctgcacaaagggcgcctggtggacttcacctggttcctagactaccttggaatagaggaagaactaaagcgagccaacaattaa

SEQ ID NO: 23037 - protein, 713 aa, DROSOPHILA
MMRLPGMPMLPGAQFYDRGKRRHPRQQTLMHYQGIQMLSDRREPELVEPNGIVADPKCPPVPAQLNSLWAPKATTKLPPWLAYDKQVLCFNAYFKENLTEIYHAPYQVRKVKIFFYLEDGTMQVTEPKVENSGIPQGCLVHRQRIPKAPPTDREFISIFDLNVDTDVQIFDRVYHISGCDVFTRQFLNRAGIFVPEAQQEPCDPTTEIRKRSGLKQTGNTATSALPKKHAFAQFLEFDRRVLKFQGYWNDRSEFGDVRKLEVCYYLADDTIDIKEKFPRNSGREGPTTFLKRGKLPKEFSGLPLPGQQTAMTLLNVLGNSMRDYGIQEFSPQPIPERSDIRPYTQGGMGSRRLPPYNGWGSHEDSEGNCITVEPKPPQADFKKLFKYDGCILRFGAKLISAIRDNGERDFVISYFLADDTLQIYETSRRNSGFLGGEFLKRARVPLPGQDMYSSSRPEYYRANDFYIGRTMTLKDHIFHIVSADEFTLMYMEQHPSEFPVADIQKIMQKIREAVRPDYKQFVLRCKPDGDLGDYTAVSFETLRSTLLSYLSKDCLLNHEIVTVCRFFSAEQAMPPSCDRNRVRAAAQLELKRALWNGMDQLNDHLSHINPACKPYISEGQVRSTLRGCRLPFSLELVEDILMVLQRNGQNEIEVRDFLAFFNMRNDQVPDIAPLNIAFELCPKLPFLHKGRLVDFTWFLDYLGIEEELKRANN

SEQ ID NO: 23038 - DNA, 2683 bp, DROSOPHILA
atagataaataattaaaaaacgaactaaaagcactaaaaaataaactcctacttttctgaacggtttagttttaagaacatatttcatatttcattcatttcacaaattttgacaattcaccattccattcacagttcgaatcgttgagtaaaccagtaactcacggcgggtttgaataagacaaccttctagaagtgaaacaaaaacatttataaatttcacgcaacaatgccatagaaattggacaaggatgtccgttgatgggagcacacaggtaagcacgactacataatatatgtctaagcaacaatttggcaatatccgcctttgcaaacttccgtttgtgcaacccacatttttggcccaaagctcgatacgaaatcccttggaagaagcaaaaatccactttggtattatgcaatcgtgcgcggcgatgaagttagattgggcgatcggaggggattccccgagatgcgatgccgtacaaatgccaatacattattcatggtttcgaaagccctcacatttcgtcctccattccccgagttggctgcgccaaacaggtgtgcaaaatagctgacaaatatttcacgcgtgctaccgtttcaaagccagttgttcttacgaaactcaaatcatggcaataatttttgattttctgcaattttcttcgaagaagagcgagatcagcactcttcagcatctaaaatctttaataacacagtgaaaacggtatagaaaagttccataacttagcttgtaggaagtgcaattaaccattttcggtggccgtactaataaaaattggcataattataataattttatcctaaccaagtcaaattcatgcgtggaagcatattttctcagaataaaagaaatataaataaaaaaatcatctttcaatctaaacatctcaattttaccaattttaaggtaataaaatagctattctagaaagtggaatggaaaaattttttaaagtaataggcaaatatatgtttttgtgctaaaaacaattaacgttttaatttcattttttagttttcatgtatgtaacaactaaagttaaagttaaaacatttattggagtcgttttcaatgtaatgatatatggccatccaacaacgtcttaggtggatgcggctggtgcctgaagaaatgtttcgttaagtttttgcagaccctcctgcacggtatttaatccatccttgaagagaccctacacagagagaaaagttgttagttagaaattcgtaaatactttatggaaaatacgtatgtagtggatagaatgagttttaagcgtctccacgaaaaatgactattaattacttagaactcgctttatttttgatatgattgctttataattacctcaaccttcttcgcgtccaacgccttcaacttttcaatgaattcgttgaaatcaccctgggccttggtaagaaattcttgggcaggattggattcctcacgggggacgcgggcggacagagccaactgaaatcaaagtgccacattgtagtttatctctgaaaataggtcctgcatctgtgtgccaggactttgagcattttacttacggcgaacagggcgaacacgaggatgcaaattgcgagcttggccatttttgtgttggttttttgtaactgctgcggaactctgaactagagaacgatgacttgagtactgattgaacctctgccaaactactcataacgacacctcgttttgcgccgcagccggccgaatttgagaccggcttatcggcactaggaaggccgagcgtttagagctacggagctgacccgtgataagcgtacttttttccgtagcatgctggaatagattgcttcgcataacagctgagcgtttgcttggctcaagaatgtctacatttgtttagtcacagaagataaccgctttatgcaaccgccaaatagttaatctctgtaggacttaatggtattgccctatcctcgaatccagtattctagcacttggcccgtaacaaagatttaaatatataatttaagaatatttttaatttgaatttcaacaagaaataattatggaattaccactgtataaatttggaatatacatatcctacaatgtgtgcttatcatttcaatggctcgcatagctaagctgttctgaaggcctttcgatccagcaatcggaattgtttatctacttttatttgtttttttcattaaagaccaaatattttaatatttctgtaagcattttttttagttaaatatatatttatatatagttaaagtgaagagataacgctatagtcgactttctgtacgagtaacaggtatatagtcaattttattttatactataatttccattttaccggctatcaatgcaaagcacgtggcacgtgataaggttttttttaaatgcttttgataaggcgccctacattcgaaattatgtaattgcgcaaaataaatatttataataccgagtattagaaaatttgacgaagcaacccggaaatttccaacgcgaagctaagttggagaaatgcaaatgcgattggacttgggcaaaccaaacaacgctttcagaatatttagacagagctactcttgtagactttggatatcaaaaacgtaaatttagcatggtgaactcatcttaaaaggcgaatagaaataa

SEQ ID NO: 23039 - DNA, 445 bp, DROSOPHILA
atcgttctctagttcagagttccgcagcagttacaaaaaaccaacacaaaaatggccaagctcgcaatttgcatcctcgtgttcgccctgttcgccttggctctgtccgcccgcgtcccccgtgaggaatccaatcctgcccaagaatttcttaccaaggcccagggtgatttcaacgaattcattgaaaagttgaaggcgttggacgcgaagaaggttgagggtctcttcaaggatggattaaataccgtgcaggagggtctgcaaaaacttaacgaaacatttcttcaggcaccagccgcatccacctaagacgttgttggatggccatatatcattacattgaaaacgactccaataaatgttttaactttaactttagttgttacatacatgaaaactaaaaaatgaaattaaaacgttaattgtttttagcacaaaaaca

SEQ ID NO: 23040 - protein, 86 aa, DROSOPHILA
MAKLAICILVFALFALALSARVPREESNPAQEFLTKAQGDFNEFIEKLKALDAKKVEGLFKDGLNTVQEGLQKLNETFLQAPAAST

SEQ ID NO: 23041 - DNA, 7550 bp, DROSOPHILA
attcgaatcaattatgaaatttgcgcaaaagattacaccaatttaattgcataccgccgataaaataaatgttaatacattttccattgaggatttccacaaacgcagttacaaaaaaaaatacaaataagcctgcactttgactgctagttgacccataaataaatcatttccgcaagcaaagcgctgttgcataatagatgcaacggatttatgtgcggtaatgttgtctaaaatatgcataagtcgtaaccgtcgatttaaatttattcataatccgcatcgcccaaccggaagccgtccaaattatcgcccagtcccccaaaaacgcgactgccaacgtgacagttggctggaatcaattaaattggcttgtggtcgcactgccctccagatccattggatccattttgggcttagtggttgacgttttgacagttttagtctaactcattccgcgcttaactgccttagaagcgacttatttggcgacctatttctgtcagaaagcgattgcaatataatctggaaagtaaataattataacaaagtagctacacaagaaagcggtttaatacagagcttgaatcatgaaatattaataaaaaacagatacacagtgggtattgcttgggttaaatctcttaagtatttcgaaggatatttaatccttcaagctatatgttgctgatgcgaaatctttgcgaattcaataaatcatcacaaatgttacttctttttaatgatttaagccataaccatttttgccctttaaccctttaactttacttattttactcactcctcctttttgttgcagtgttaaatgcagggcgctgccagactgccagaaaatgttttcatccaagtttatcaccaatacagtaaggctcggagtgaaaccacgaatttcggtttacccagccctgatgactcaagcaagcagctgaccgccgctgctcgatggcattttgccgtgacctggtcacaccgacgccaacagctgctcgcggtcagaataacgaaaagtgtaaccgaaaaaagacaattgtgcaattgctgcgaaaagccaacacaattgaataaaagagcgcgcaacattgtttatttgcccgtcggcgggcgagagatcgagtggattggtgtattaaattaaaaatattcatcgcagcacgatgcacagcgcttggtgatgcagaatgcagattgttgagctgttgcataaattccgttagtaattctaactatttcgttttgttgttgtagttgtgcgcgtgtgcgatgtgtgtgtgtgtgggtgtgcgatggtatctaattacaagcgctgtggccgcggcggtcgcgttgccgaatcaaaagaaagcatttcagtttctcatcggcgggcgcagctcatagtcgtcaacattgcaacgaactaacggtgcttacgtgccacacgacgcacacaacgtaccgccacgaattccccctccccgcgatcgaacgccttcaccttgagctgcctgtcaattctcggcatcgcttcctatttattcgctgcccctgttctaacggaacttcttgcacccaggtagccgaactacacacacacacacacacacgtgcatcagagaaacagctgcggcggtaaaatagtgcgcaaaatttgaagtcgattgtgtgtttcagccatttccattccataggcacatacataggtgcaaacaaactttaatttcaaacggttccattcatgtataaattatttaattatttcactttagttttgtatatcataatttactgcaaactaagatttaaaactcttgtgattgcttggaattcctgttaaatcctttgtaatattttagtgttattgttttgaaccgaactgtaccaacatacatataaacatacattttcatgtttatgtttatatgagagactgggaagaaaagtgccgacagctgataagaaactaattatttttgcccatcgattgcactttggacgacctataaaatttaaaaagcaatatcattttcgacattgtgttttgcaataaataaataatttttaattgcctcagttcgttttgtgtttttgcgaaaagtgactggttgtgtgcataatatacattgcatcagcctattgaagtggaaatatcattaaagtattaatactttaaatttttaaaaatatattacttgtctcgcattttttgttgttaattagtgtgaaattacagatcaagtgctttcaattcgtttttaagtagattttaattatgcctaaatatgcatatttccataaatcaacagaaacgtagataacagtttatcccatgacactttatttctcattttctcagtcaaattaatcgcatgcaataaaactgttccgaattgttgctcatgacaacaacacttacgattatgtatttccctccctttctcacctacagacgccacttgcacatcacgtgtttgactcaggctacaaatttgtggcccacgatctgaatttgatctcatctgtggtcgcgatgttctcactacaactacagcagttgctccgagcgacagcaagcggcgtgacgtcgggagccacaaagacactggtaaaaataattagtttaacgtataattaaaatcaatttgcatgcatatttgcttaaaattaatacaagattagattttgtattgcttttatcatttagttttacaacgctagatttgaataacccacatattttttcagtgcacagccacagcgtctgccgccacaaagcactctagtcaagcgaagttcggcgacaacagcagtcacggttcgccatcgcacacggacggtcgcagtcacggtgaatcagagtcggatttggagtcggcgcacggccagaatttcacatcacaccacttagccagacggatacttcagcagcgcagccaggacatccagcgccacatccacacgcagtcagccaagggacagaccagtgccaagtcctcgcagcaacagcagcatcagcagaccgccaccaagttcgccatgtcatcgctagcagctgagcctctgcagtcgcagaaatcggatgaaatcacggccagcacgggcggcggagatgtggagacgcccggactgggcgcatcctgccacgaggtggccgccgcatcggccagtgccggcaagaagccctgcttcagctcgggcctcggcgagatacttcagttcatggagctcatcggcaacctgaaggtatgtggaactggtttgcctgcgttttttcccgctccacttgcgggtcatatgctcgcatcgatttttcccgatgtcctgcgtgttttgattttgccaccaagtaactggttgctacagaaccttactcttcaaagagataacattttgttattgtttatttggcttttaatgctaataacttatattagagctatttagtgatcagaaaaatggaaaaagtttatttatttagtatgttgtttatttatgtataggtgttagcaatttcacgtgttattgtttatttggcttttaatgctaataacttatattagagctatttagtgatcagaaaaatggaaaaagtttatttatttagtatgttgtttatttatgtataggtgttagcaatttcacatttgctttgcctttggaatttgtaaattgaaatccgactcaacctttccatccgcattagaattttattacgaaaccctctggtaataaacaaattgcttatcaaattatttctgcaaaaccgcgatctcaagtaaaaccagatagcaaacagaaaataaacaaaagaacgcaagccaacgcaaatagaacgcaaagatgtatttatttacgttttgtataatcaattctgtttcgcctgcactctttcgtttttcgtttttcacttttctattttgtttagtatatctgcgaaagtattgtataataccagcgacaacctcgctcttgtcccccttgaacggatttctatagtcggtttccaaaaaaaaaaaatatatatatatatatttaatgtataggtgtatttgcgtatatgcagtcaaaaatgttctgctttaattcattttgaattaaaattcattttttgctattttctgtcaattgtataacctatcttatatgtgcgacagaagctcagacaaatcgcaaagtctagccatataaaaaggtatctttatatctgtggcataagcaaaacaaacagctcaaaagtccagtttcgcacgttctggaacctttagctcaacttttatctaatcgggacagttcaacccatccacaaaatgacgaaaatcccctggcacggggcttgatttcctatcgacaagctgcagaaagtgaatcgttttgtaatttgagcagctgccccgtcgtcgtccatgggtgaaaatgtcacttaagtgagctgattgtgtgagtcgtctaatctccgcaacaaaattgcactaggtatacgaagcactcgagctaaattttcaaattgctcacgtgaaaggcatattttgcttggttttttttccccctaaatgttttggattcgctgtgaattttcagctcgagccccatgaacaatattgtatcgtcagcattgacgtaaggcgggcgaggaacttgaataagccacaacgaatctttcggaacgtcaggttcctaaatcttctattatatatccgattgcatatagagcgtgcaaaggcagcgaaaaagtaggcaacccgtgactttgatcttggccttcaaattatagacgctatcttgtagagctgacggatcgccacaagggcggttggatggtttggaggggacaacaatatattctagatgttttccaaactgagcaaagtgatgcgatacatttccatattcaatatatactgctttgttttgttttcgacaaaggattagtcgctttgttattagtttacacgaaacactaataaatacttttcttaacgaggtttttacgattttagttaaacggttgacattcttatatatttatatatattctatgaaagtcggcctatcttacatttacctgcaacattttaattaagcaacgtatcactataactcacattctctttatagctttattactaataaagttaatatgaacttatatataccaataataataactgcagtgtgagctcatagaaaaagcaaagcaatcagataaggtgcttaattcattacgtgcctacaaattgatcagctaatcaataagcccgataagacacgaccgatgcgattgcagcgaaattgtggcttcttgcagttttatgaagcaataatatcataagtaaggcaacttttagcattagcaactacgaaaatgaacgaatgtcagtggcaatgggcctgctatgtcttttggaccttgttctcccaaccacgcgtgtctataaatacaacctttattgatcaaatagcaacagtctcaaaccaccctcgctggcaggcttgtgttgaaggtctgggacatggggccacaaccttgatgtgtgcaacgagcccagccggcaacgatgtcaccgaattcgtgtcgtgtttttaattaatcaaagtggcaggagggatattatgtgagactgagcacaggaacaagcaatctaagaaacgagaaatgaaaacaatagcttaaatattaaagaaactctgtttttcttgaattacacaagaaggtattgagtagaaaaagcattgcactttgttagaacgtatctggtctagtctaagaatagtaactttatattataaactcactaacccgctgtgtttccatttctcttgcagcacacaaaacgcaccggatgggtgctgcgtgatgtcaacgactgcgaatcgatttcgggtcacatgtacaggatgagcatgctaacctttctgctcgacggcagtgagggactcaaccagatacgctgcatggaactggcgctggtacacgatttggcagagagtttggtgggtgacataacgccattctgcgggatatccaaagacgataagcgagccatggagttcaaggcgatggaagatatctgcaagctgatcgagcctcgtggcaaacgcattatggagctgtttgaggtgcgttacgaagccaagtttactctttgtgggaagcgtatttatgtaattcgaattgcaggaatacgagcatggacagactgccgagagcaagttcgtcaaggatttggatcgtctggatatggttatgcaggcgttcgagtacgagaagcgggacaattgccttctgaagcaccaggagttcttcgactcaacggagggcaagttcaaccatccgtttgttaagaagctggtcaacgagatctacgagcagagggatgtcctggccaaggcaaagggcgccacaccaccgccggccatcgaggtgcctagcatggagagatcttcgaaacttgctaacgggcatgacggctcgagttgagcgttattctagaaacccgtcttaggctagcacatgaacacatgaacacatcctcacatacaaaccaacacgctcttaatttgtaagccaatccaactaacaaactgttaagcctacctcgacacgctcatagctagatctaattcttaactcactaatttattgcgaaagaaacggaacagatgcaaccgatgggaagtagctaaatattaatgtttaaatattaacacacctgttgaacacgtctccttagttcgatttcctctaagttaagcgtaaagttgcggatcgaattctatcgatatattcaattgatctgactaaggaatccaattgtaaataacttaaacgaattgtagactatttagaaaaaaattattgtaaatgttgtcctaaagcaattttattcagtcaaccgaacgtaaaaatcaaaacaaaagatcagaatcaaaatcaaattaattgatttttttttaatagtttgctcacacgtgcgttacttttacccttgaatcgaacaattgtcaccaaaattattattaatataacattgtgaattaggcaatataaagatgaagtcactcattagacgtggccaaaagacaaagcacacattgtttgattgctcacaaaagtgacactttattgacgaaacatagaaacattatccaaagcggttggaaactgcagctcttatcagacatatttgcgatgtattctgcaataagatttagctagttatctttatcgcgactctatttattgtagaacaaacaaaccttcgatgacaatgaactgactttcgcgggaggaagtttgatgcgagtgctgtccatgcttcttggccttatctggtggtcaacatttgttacatctaagggattaagtaaccgaaatataatctcacttacggtgcacggttataatccgatctgtctgacccatcgcattctttgccctgcatatgtactctccgaaatctcttttcgttattggacgcagggtgatccgcatcacgatccggaagacgtggtccactgagaccgactcgtaggaacctccttgcagcaattgc

SEQ ID NO: 23042 - DNA, 1553 bp, DROSOPHILA
cagctgctcgcggtcagaataacgaaaagtgtaaccgaaaaaagacaattgtgcaattgctgcgaaaagccaacacaattgaataaaagagcgcgcaacattgtttatttgcccgtcggcgggcgagagatcgagtggattggtgtattaaattaaaaatattcatcgcagcacgatgcacagcgcttggtgatgcagaatgcagattgttgagctgttgcataaattccacgccacttgcacatcacgtgtttgactcaggctacaaatttgtggcccacgatctgaatttgatctcatctgtggtcgcgatgttctcactacaactacagcagttgctccgagcgacagcaagcggcgtgacgtcgggagccacaaagacactgtgcacagccacagcgtctgccgccacaaagcactctagtcaagcgaagttcggcgacaacagcagtcacggttcgccatcgcacacggacggtcgcagtcacggtgaatcagagtcggatttggagtcggcgcacggccagaatttcacatcacaccacttagccagacggatacttcagcagcgcagccaggacatccagcgccacatccacacgcagtcagccaagggacagaccagtgccaagtcctcgcagcaacagcagcatcagcagaccgccaccaagttcgccatgtcatcgctagcagctgagcctctgcagtcgcagaaatcggatgaaatcacggccagcacgggcggcggagatgtggagacgcccggactgggcgcatcctgccacgaggtggccgccgcatcggccagtgccggcaagaagccctgcttcagctcgggcctcggcgagatacttcagttcatggagctcatcggcaacctgaagcacacaaaacgcaccggatgggtgctgcgtgatgtcaacgactgcgaatcgatttcgggtcacatgtacaggatgagcatgctaacctttctgctcgacggcagtgagggactcaaccagatacgctgcatggaactggcgctggtacacgatttggcagagagtttggtgggtgacataacgccattctgcgggatatccaaagacgataagcgagccatggagttcaaggcgatggaagatatctgcaagctgatcgagcctcgtggcaaacgcattatggagctgtttgaggaatacgagcatggacagactgccgagagcaagttcgtcaaggatttggatcgtctggatatggttatgcaggcgttcgagtacgagaagcgggacaattgccttctgaagcaccaggagttcttcgactcaacggagggcaagttcaaccatccgtttgttaagaagctggtcaacgagatctacgagcagagggatgtcctggccaaggcaaagggcgccacaccaccgccggccatcgaggtgcctagcatggagagatcttcgaaacttgctaacgggcatgacggctcgagttgagcgttattctagaaacccgtcttaggctagcacatgaacacatgaacacatcctcacatacaaaccaacacgctc

SEQ ID NO: 23043 - protein, 388 aa, DROSOPHILA
MFSLQLQQLLRATASGVTSGATKTLCTATASAATKHSSQAKFGDNSSHGSPSHTDGRSHGESESDLESAHGQNFTSHHLARRILQQRSQDIQRHIHTQSAKGQTSAKSSQQQQHQQTATKFAMSSLAAEPLQSQKSDEITASTGGGDVETPGLGASCHEVAAASASAGKKPCFSSGLGEILQFMELIGNLKHTKRTGWVLRDVNDCESISGHMYRMSMLTFLLDGSEGLNQIRCMELALVHDLAESLVGDITPFCGISKDDKRAMEFKAMEDICKLIEPRGKRIMELFEEYEHGQTAESKFVKDLDRLDMVMQAFEYEKRDNCLLKHQEFFDSTEGKFNHPFVKKLVNEIYEQRDVLAKAKGATPPPAIEVPSMERSSKLANGHDGSS

SEQ ID NO: 23044 - DNA, 26500 bp, DROSOPHILA
cttgttgaattgatcaaagttttgacactcagatttagttgacccgatcaacttgttgctgcagatgtttgatgcgaaagtagtggctcttcagtactaattccaagacgcagagaaaaaccattttcaacgatatcgatctgaatattttcgaactcaaaatttttgacaatcgatcatttctttatcgataatgagaaaatgtctacttgctagacctgatcttgatttcaaatgccaatccaaaattacatataaattttctacaaaatcttatagtgggtttaggatttgtaaatttattgtaaatcaaatttacttagtctaaatactcagcaaaaaaaaaaaacacattgctgttgaaatttaattttataaaaagaaatgttcaaaacaaaggtaggtcacatacttgattgatgttgcgcatgattggcttgttaaacttctgatgaagtttgatctttttaagacccccggcaactatagaaatttttttctacttcactgcgtacaaacatatgtttgactattaaattaggataacataaaatgcacacacacaaaataaagcaaagctttaaatagggtataaaaattgcatattgaatatgaatatatgaacacattcccacaaccaacatcacaaatatagtaatacttacttgcggtgcgaatgggtttttacacttatatttttcacttttcggacaaagataacaatacgtttatctacgatcgaacagccgacatgtagaagttctaatattaatttttgtgtcgaaacatgatttcgcgtgtacactataaaaatgtaatcattcagcctaaaaataggcctggagaaatcgaattcaaagggaatggaaggaaaaaacgaaaccgaaaaatctacctggcgcgtgtaagggtatatccgaccataacgatgccttgtaattagaaattaatagaacataaactttttaacaataaaacaaagcatattgcagcagtttttgaaagggtattcagagctacactttatttcttataaaaaacttttttcaaagtctggaggggaatataatcagctacttgcttttaacagacaacaaatgactaacaacgagctctgaacagaaattgttaagttatcaaaacctacacgaccatgagcgacaatgcccattaacatttaagttaaaccctaaaaccacactacactacatcacattaaccatccgtaagtcactttagctttgaaccggaaaaaccatttagcggtgttccactcaagtagatgatttgttttaggctgcttcgtttagcttcaaaattcagcaggagttcgctgctgctatattgtttgaatctattttttgaacccagagtaagagatgacatacgtataattcctggtttcattcccttctgttttagctgctcacacgacttcgaattccccaactgtaatgtccacaaaaggcagagtgttgggttgtaataggtaacgtacttaactacagcgctcttaatacagcaagcagggtaaaaaataaattataaataaataaataaatgttgtttttaccctgggctgcctcccctgatcgttgtataatagagcaataaagctaaaaattatttatataatttgcttaacttatcaatttattaagatatatgtagatgtttatgtctaaatacataaaaatttggtttgtgctttcctatataaacatttatatatttttaatctagttggttgggcattatgtcttgaaacaatgttacaggtttttgatttttgatgtgtatcttacaaaggccaagaaaaccacgcattgtgtacgcacaaggcttctacggtagccgaattaccatgccacttagatattttttgaagaataaaaaatgccaagctatattttcagctaaagttattttagaaaagaagaattgcttgcaataaagccgtgtgtgataaggtttacacaaaatttctattcgccttagttatttttattttattttaacaatcaaagtatttcaccttttttttttaaaataagtataatagaaataaagtgaaaatatgttattgcagttcatggattaattgactccatgttcattttatattatagttaataacatagtttttagtatgcgcaccgagtataaattatgtaggctttcaagtttgcgcgtttattgactcaaaaatattttataattgtcatttatttatttacatttttatattaattcttatacttttgtagcttaacaatattaagctaaaaatatattttggaagttttttaaacttttgttctaacatttttggttgattttgccgtaatggacattttggtttcataggtatgtagttgagtggtttactatttttgtaatatttcatattccttgctcttataaatatacctgcttatattgtaacctaaatttattaataaatgcgaatctttttgcacagattttgtttttcacatgtagtgatgtttgttcttgttatatacttaaatattctctagtctcgtttttattggacagagaaagaaaaactggttataaagtatacaaatcattctaattaaaattcttataaatgcatttttctagaaaaattataaattcttctcattcaatcttgaattttaatcaaagtgtactttattttaagatttggtataatttgattcattataaatcatactggtgtgagtatttacagcaaacagaaacactgagaaatactttaacaaaattgtaatatttcaacatgaatcaattatgtaaatgttaataaaatttgatgtattatttgtgttgtgatactcactatttatattaagcttaattaagcaagaaaaatatccgatgattcggattttgtgcacgcacttccgcttccgggtgatgcagctgatgctagagagttcgcgcgtgttgctactaaaggtgaacgcagatcgtgtgttaatggtgattgtgtttgtccgctctcgtagtagtaggacgaatctgggataattatataatttcggcgttaacttaattggtacacaaggatcacaaaaacaagtttaaagaaaatagtagttgatagtacccaatgttgggacgttttttgaagggtaggtcaatgtcttattttggaatgcagtcatatgcaaagaaatatgactgcctttaagccattccatagttttagtgcagcacattgcagaataatgctgtcctcagactagtgataattagtttcaataaacataatgttttattaacactaaaattcaaatctaataacgatttcaaattcttttgtaattgaaatatatttcagcgtcattcatttcttacccataaaggtgctataaatctattgtatttcaagaaaacgtatttaataaaattaattacttatcaagccactgccagtgccgtaaccatatgatccgtaagctccaccatactgggtatatgcaggattgtaggcgtaatctgaaccgggtacaactgagctgcagcctgaaaatagagaaaaccttttgttgatgtcatcatataataaataattaataatactaattataataataaatagacatttaaaatcatgttttaagttcagtttataaattataaagtatatcaacattaaaatatattgattaattatttaattaaaaaaaagttaaagtataattgaacagtagatggcttaagtacatataatttattgctagtcaataactggtaaatagtattacttgtttactagaatcgttgaaaggtatgaaaagggcagaaactgtaatctagtagatcgagcactgattgtctgcccgtccgttttgtctcttcgttcatgtaaacattgagaccatgggaactattaaaatcaaaattgggaactattaaaaaaccggtgccacgttacctctaactgtgttataaatatatacatttttgtcactgtgagtgattttatataagatgtacagtagcaaagcaaagtttctacagtaatgtgactaattctttggtggttaataagtcaacatcttttaaacttacattattatggaaactattaagaaactcattgataaacttaatgataaatgacgtcggaaagctatgagcattttatgtaaccgccgttaggtggagatgcagtacaagctcggaagctcggtcgctttgctatattgttatatattgctttattgctattgcttgtattgtattgtgtatattcagtgtctgctagtcgaggtcattgactatatcattctccttagctaatcctatagtttgcagggtgaaaaaaatgtaattcctttttcaatgtgtgtagacctcatacaaatatatatattcttgatctcggtcaccaaccgaaccgatttgtttagttgtttgctatcggtttgataaaatatattgtaacgctcacacattatacaaagctatctaatttattacttctcttgccaatcaatagtccaaaaaatatgtcgtatatgtctaaaccactagcggagtaacgggtatctgatagttaaataatgttgtttaagatattatttagatttaattgtaattatcccaacaccgggtttgtgcaatggaagaaaggtgctcatatgaaaaagtcatgggataatcttctaaattgcgttgtgcgcatatattttgaacttgcctgcggagtagtgattaaaacttggtagcactgttggtgttgaataaaggcctacgttattacttagattgagctcaacatctgatcgattttcagacgggttgatatttagtaacgatgatcctccgctcggctgcagaggtattagagaagatggatgcgtgcttgcgtttaagtttgatcgtctatttcctctcaattgctcttctcctatatgatgtagatgtggcgaggcaatatgatcactggattgcgaagagttagacttttcaggttccttattattatcttcgctgcatccatcactattcgtcaggggttccttaacacgagtactattagtttccgtaatgtctggcactatcctagtactaatcgggcaaagggtattcgaatccgagctttctggcattacaatgtgttcttgcccgactaaggatgaacaattttccaaactggtcattgatgtgtagtttccgtcaaatgctagagctaatgtatatgcaatggaattaaaagatatctaatcttggaatacttttttagtaaaactcgcactaccactgattatatgatttcctcgtatttgtgcaacacatttccttttaaaaaaaaacagagggaaagctaatgttaggcaattttgaagtttttgatactcttttaaaggaaacaggaaaagttaccgatttaagaaaatatttctatgttacttcctagaagacgtattttctttgttactttaaaaaaggaatttgaaaagttctcttatatgcatttattattatttaacctttgatatcgatcgttttataaaaaaaaatcgaatacaaagagtgaatttggttcacacccttcctttttttgcgggttaattttaattaacttctctttccggtgtaacaggtaaccttgtcagagtgctgactaaatatagcctagtataattaaaactaataaaaataggctatgcgtattcaaaaataggaggagtagccgaaaaacgcagaaaatgttttgtttcttacctgtgtaaaagggagggactgtttgttcctgaattgaatttgcgctaagcttcatttcatgcatactaataggaactaacggggtaagcgaacctgttccttcatcggttacatttacaaagaaaatatataaataaatacaaaaaaattggaaattaaattaaaaataaattgaacaaataaaaaaaaaaattttaaagtgtggaaacgccgggcagtataacttaccaatggaaggtccgattgctggtgtataaatggaactttgagtttgcgaaatcgttgtaatactgtcgtaaagcatagacgtatcgttgccagatgctgtggcaccagatcctgatatcggggttgttgaaaatccgttcgatgcctcatagtaggttgcgggacaatttccggtgcttgctgtcaaattgcctagctcggcaagtagcttatggtcatcttttatacaccattttcctgaccaaatctatattgcataaataagatttagatttattttatgcctttagtattataatcttagaatattgtagttcattttgtttgatcatgttgctgtttttgtctagactagcatcgaaacggctcggaaaaaagatgaaaatatgcaagcgggaaatctattttaaaaattgttaggcatatttacggacgtacagagagacatagttagatcgaaacaactattggtagtaatatttttaaaggactgctttttacctgttacataatatgaatgggtataaaaaacaaacatttatttcaacacttacattggtataaagttgatcgccactgtacgttgacatacgttgccgttttccatcatcattatcggaatgtatatttgtgtcatggttctcatctaagatttggttaaacattaatcaattatgtttgtttatactatggtgtaaaaaaaagtctttttcttatgcacgtgccgcctaagtgcgtttgtaagttaatggacacttttccttggtggtaatgcgtgggtgcataagcacccttataaaaatgttttatatatttagattgtgtaatgggtagtagtccagaagacgtttcatacccccgaaaatgaactcaacctaatgaagataatttaaataatgaaatttcttggcggtcagttatgaatatttattctaaaatcgcctgctttcgatttactatgaaataatttcaatttttaaaagtcacgcacaaatttatttatttattttctaataagtacatgagagataaggtacttacgagtactacagagtttcatttttttccgggttacccacaatagttttttcttttttattattaccaaaaaacacaagaacataacccaaaaatgcaacgttgcttttcgattaaaattatcatttttttaacaaccctttattgcatttaattgaaccactttttcctcgatctgttttatttgaacaaattggccacaaatgaacagcagctatttcccaaaggggaaaaaaaatagacttacaatttttatatgctacccttgtaatgacaatactttacagtcctgctaaaatctgataacgttgatggacattggtattatagtacctttctatgaaaagctagggtgttatacactaacgggtgtttattaaatctgacaagggctagatattttgaacagcttgggattattatcagcaaccctcacaatcatattcgattaaatcttttggcttgcccaccaagcgttgtatgatatctgaagtaacgataccgcaagacaatttgcttctgcaatgtaattcttgattaaaatcaaaatcatctgtttcttggttcgcttctaaatatgtgagcataatgaaaaatttatattctttacagtaaaatgttccacttttggctttccttttttttttacatagtaagtaattgtttttaaaagttatttaacccctttttaattataggtagaactcaccatgtgcttcaattcttttgcgtttacaacttgattccgtattattgttattgtttacgctactgttgttattgttgttgtgagaatggtgtccatgttgtattcctaatattccatttatgctatatccagtcgttctttgttcagccgttgagtttatatgggtggtttcattgctattggcattgatatgaccgactgaaacttggacagaatcagtgccagacgttggaatagatgcgtgtacactcgccgacgccgatacgtttgtgtttacagaattagcactgctattactagttggtggctgcggttctccgattgttcctgtgctgctgtcaacactttccgtggcaatatgccccccacccagactctgagaaacatgatgctgctggtgatgatgtacgtgtttggctttctcggcggctttattccttacaattctgaaattaagtgaaaagattttaagtgacttagttaaataaaatcaacgctcttcacggttagaagggaaatggtaaattttatttaagcctactaaaaaataataggaaccgcaatagttcctagtctctatcagatcccccttacccaatttcaacattttgttagcgaaggatcagaaatagtcttgtaataaagttagaaaagaattatatatttaacagttttggacatggccacaatcactcggcaagtgatcctaaccaagattataagaactttattgggtcagaacgttttcttctactttttacatacttatcaacaaatcaattgtacacaactaactacaataaacaatcagttgtacatacatataatatttaaaagaggatagaccactatggttccccttgcacttcttgcaaggaagatggagatatccaagaagtgactgttccccaggttagccatgaacactttaacgttcatattacttaaaatcacctacccatgagggtaggtaggtaaatcattgttatttataatctctaattatgacttcagtacttatacttaaagttttggtggctctactaagtcttacaggccttttgtggtcaaaatatataaatcaaaactatgtaataagtttttaaagatcgtactaatcgtaatcgtaatattatcgtattattattttatactaatacgataataaaatgttatagaaagtaaaattcgttgtaacaagtaaaaaagcgttcccgaggcaatatagatatataaataatattggtcagtccatacatggacatggcttgtccttctgtccagcacacaccctgcatattcaagagatgccaaacgtgtcgtgttagtatttgtgtacaattttgcaataaactttaataattacaaaatgcggtacccaaatacacctattaaaactcataggacctccgggatagcattgatttaagtatcttttaggttttttttacagattgttaaggttaccatatgctacagggggttgtaagggcagaagttaactctgcctagtttgtgcccttaagacaacagtttcaggttttatatatttttgagtaccagcttgaaacgggatgagcaattggatatttcgacagtgcacacaattgagacatatgtttgggatgcgcgaaaagtacatcccgcttcatggacatttcaatgtatttgagtggagggctgaaaactaaaattggttgagtgctatgaaagtcactttattaagtgacagtctcctgggaatcagtataaggggagtcctggcaccgccgtacgcacaatttttattcgattgaatcaccgccaccctaatcatcgttcaagtgccatcacatcacacattgtcgcattatgaaatttttcttcctccttgattataccatgaattacccttgtccgtcgcaacttttgcattaccagcggccacatgccaatctagacgtttgttactttttgcgggacccggcggtaacacgaatcgaattgattataactgcacgtgttgagatcggttaaaaattaaaattaaaattacattttctagcatgcagaatagagatgagacttgacatttgaaatactcgatcaacagataatgacttgtatgctttttgttaaatataaagaacattttgtaacattattcttcgaaaaaattttataataagggtccatattcgttcctaaccaaactagtcttgtttgaaagccataacaggtacgagtaacacgggacaaccatattccatagttccaaaacgactaatcgtaagattgaagaaaaaccttcgtaattacatgtttttaggacgttcggctatttgggctttaacatttttaaaatttcataaaatttacatttaaacagggttcagctaatttcaaataaaacatgggattaaaggttttccagctgctctcgttggcctcgttgactgctaccaacataaattatggtcaaagtggatgcgcgtaaataatagcaatgtgggacagtgtcgacttaggaactgccacgtggcacggccaaaattctacgatgatgttgtcagcaataaagccacaccggatgctagaagggaaagtggcttgtgttgtggtcgtgtgtcaagcattgtgccacaattatgaacgctaaaaactacttagatatttttattagatgaaaggtttggtgtaatatacttagtactgcatgaagttgacttcttttcaagcttagtttttaaggaaacggatacggatgttagcagcatgacagcaaacaaacttcagatcacatccgcatcgcggatgtgcgcatatacgttctaaactgttttgagacttcattgggagtgaaactcttttctagtattttcttaccggtttatcgaagaaacgctgggaacattatcttgggagcatatagcttctgccaaaagtcgatctcgtatctcccaagcaaacattgtgggattttcgcgtttatagtttgctattgcatctacaaccgggggagtggccactttaggtttggacccgccaataacaccagctttaaaactaccagtctcataatatctgaaagtaaaggattggatagattaaaaatcaaaaacaaggtaatatgctaaagaagtcggatttcccgactatcagatacccgttactcagctggaagtgtgaactataaatcataaattttttggaatatcggtggaaattgggattctgaccttattaggtcggaaacgcttacttctatttgttacattttgtaactgtttttggactaaagagaaacgggtataatgaacgaaaatgaaattaatgaaaaattcaaacatttttattaaacatataaaaatgtggattcttgatcagtattaacaaccaaatcgacacagctatgtccgtctgtccgccagtacgactctaaattattatttcagttttaaagataaatgcataaaaattcttcttttaattgcggtagtataaaaatcggggcttttttattgttttctacgtttttgtccataaagttttctaattgggtataatacagtttttcgacaatataaaataatgtatctgcagaagaaacagtcgcaaaataactagttaattaatgaaaaaggaattctagcttcaaagatttagatcacgaagcaatttaatttggtatacaatagatgcttgacaatatataattatatccgttattcgtagagtaaaagtgcatactagattctttgaaagtatgtaacaggcagaagaaagcctttccgactatataatgtatatatattcttgatgaggatcaatagccgagtcgatctagtcatgcccgtctgtccgtgtggacacgcccacatttttgaagaattgttggatatattttcataattatattagtcgtgtaaatttctatcgatttctatcgaaaaaacttgttgccacacccactctaacaaataaggtatatataatataccttaagagtatatcgtacatataagagtattaagagtatatcgtatattttcttatctatttattttattttttgtttattttctattaaatatatgtatataaatttgtgccgagattgcagttttccttaaatggtatgggagtacgattcttatgtcattatacaagaattaaatatttccgttactattaggtaaaaggccataacagatgcgtttaaaagtacgtaacagatagaagggagttaaaaaaatttgagagcactaattgttaccgcagctgtccagtctggaaaagtcgtcgagatcttgaggtgcatatggacagacacacggacggatatactaatatcaagaatattaaataattgtttataaacttcatatggttgaaaatccttccttaaacctactacttctcaacaaatttagcgaaggaaaaaagtacatgcattcttgtattaaattaagttattattaacctacaataaagtcgtttgacttaaatgctttattaccttgaaagtattttagacacacaaccgtgactaacacgtaattgacgtgatatgtcacatgggcggaccccattatgggccagctccacaatacgctgacgaacgacatcgggaagtgggcgaccattaacgaatacgccaccaagttgattaacgcctccatgacctaattaagagaaatcaaataaagctatggtaaagtttgataatcaattgccgttaaaaattgcaacttaggaattaaaaattaacttaacttaacttaacatccagctaaaaactaaagagattgctatagtcgagttccctgatactcaactagtggaagtagaaataggaaaaatataataaattaaaaaacaacatccaaaaatattttgcaatttgatagaaatttacaagacttataaaaaaatatcaataatgtttgggcatggcaacgcatgagctgcgtctatgatttaagaagatgcttgcttaatcttttcagctttaacatttcctgagatctcggattctgactctgatcaagaatataagcgggaaacgcttcctactgcctgttactcgtagagtaaaggggtatactagattcattgaaaagtatgtaacaggcagaacgaatccgcttccgaccatataaagagatatattccgtatccgtattatcctacttgtcttgtaaatttctatcgattcgacacaaaactttatcgctataccaagaacgctgtgcccacacccctccttttacctacaaaacgggcaaaacacttttgaacaattttgaaattttttctcattttatttcccataatctttcgatatcctagaaaaaatatgaaaatgttcccaaaatattggcatgatgatgcgtaattacgcacaacttgcgctgcaaatgcatatatgtacctatgtacatatatacctccatttacaaaccaaaaggacacgggaaagggtatggtttataaatattcatgaatagccaagtcgaattaataaaactcacattcgcgcgagtgatttgatgagttgataaaaaacatacgttttttaatttaaaatttaaaaaacatttttttaaaattcaattaaaattcaataacatctgaggcaacaattcatcatcacaataagctaaaaaagattccaatgtattgtctgattgaattagaatagaattattttataatatttcttagccctaaaaacttcttaaaagtgagcaaactcatttaagaaagagccttacatatttttagagcttttttgtatgtatttttatgagcgctgcattatgaaatttcatatttgcccttcaattatatataattggtttggatcagaatacatatcagacttccaatttaatggcactatgaaattttaattacatctaagtagtaaagctatctgcatgaaattttcatatattgatatgtcggaaagggctgaatcggtccactataatataaacgtacccgttactcagatagtggtagtgcggccttgaaatttccacacttctggcatatcgataaaaaaatttaaaaatgtttgtggtatgccgctacgttttttggtatggcaaatagatttttttcgaattcataaaaatttagaaaagtaataaaaaaaaacacaaaaacaatcctgcggggtgtacgagtctgcatatctaatttatcaagattttattgtttttgatggtaatttttcatttaatgttgaaaatgatgtatcaggatgcgtttccgaccatttaaataaaaaatatatacatacttgattaggataaccaggaaggtgagattgggcttgtagagtatgtagaattttttgtattgtcttatttttcttgataacatatcgatcgatatgccaaaacaatgtcgcaatttatcttttgcactaccagtagctgagtaacggttatctgatagttcaagtactctactatagagttgtctcttgctattcttaagacttaggtttgttaatatatattgttattgattttctaatacaattttatacaatatacaataaataatacaattgacttttttttttgtctttaatctcatcatatcttttgccaatttctatcgatttgccaagcaaaattttaaatatctcgttggcactctctctttggcaatggatatctgatagtcgataaactcgcctataacattctctcttgttgttgcctgtataatcttttttagttcgtgaaatacaaccgattcgctaccaatgtaaaacaaaagaagccgcaaaatgaaagcaaaaggcttaatgacaaacatactgcaaaggaacacaaaaaaaattcacgtgtcatttaaatttaaaatacatgactatatgattctcagtttttcactaatttgcttttttcagtgcttactgccccagattatgcacaagagtaatttctgattttaatgagttggtgagaaagaaaattaatatcaataaaaaccttaaggtttttgctaaatcctaaaataagtcagaaacacttttctggaccgtacagatacatctttatacataaacactaatcaacaaaattttctcttttgtgggctaaacgaaaacgttgttacgttctggaacaaacttgctcaacgtaatagaatctgcatgctttatctcaactttctcgcttttcatagtgcagaccgacagacgaacatgccaaatcgattcgaatctagaatatatatacatatatattttataggttcgaaaactattacatgcaactcaaaggatcttgtacacccttttactctacgagtaacaggtatacattttggtactttacagatgtaccaaatgtgccgctagatttgaagacatttaaataataattggtaatactctagattaaaccactctcttccacactatatatagttagaatgaaacactctataaaactgtgacatttttgtttgccggagataggtttcttttgtgctttgatattttaaaaagattaagaagttaaatacgcaaatactaattttaataacaatttcttcataataatcagatcttaatcgatatttttgtataaaaatgttatacttatatctaattattttttatatagagtattacatgtgtagtattccatcatgttctggttgtagcgatatgctgtagataggtccatcgtagagtaatcaagataataatgaagtagtattttattttctttctcgaaccaaaaatttagacacaatcacgttattgtattcactttgatcaccattttattaaaagtttgttcaagggtgggatttaactgcaagcgtgacatacgtatcgcaccgcaaccgcaaaccgtaacggtaaaccgaacctgtaatcgatgccggaacggctagaagtgctccgattgcaactccgatgttctgattgacgttctagaaaagcactgtccatcggcaggctgttgaagatgaagtttgattttcgtttgtctacttctttgcataagtaaagtggaccgagcactctcgttgctgtggcttattttgtaggtatggtcttctttagtcaagccattgacattatttttcttttatttaaaagcgtgttttctctttcgttttgtgtaccgtaaaatattgctaaccattttttccggactgtttgctgccagccgcagagattctgcgcacgatttccttattcttatctacttctacaatttttgattgtccctatctctacttcacgtggagatgcgcgggcgtatgcatgtccttggcaatacatcgttctctttacacttacagcgacaccgctccgcccattcgtatcggttggcgttttcatcttagtgcagtcagccaatgaagacggtctaatgccggggaacggtcaaggcgtagtatcgccaaacgacaatactgggtgtctgctcttgtagtggccaatcgaatcgctcaaagcatgccagcatttgtgtggacggaataaggtttatttttaggcaattttaggttttgtgctggcataatttgggctttcaacatataacaattaatttataatactctctataaattaattgtattatgttgaaaagccaaaaaaacactaaactcccattttgaaataccaagaacatttatagaatttttagtttcctcgtcttggactgaaatgtacagatttcggattggaatgagcaagcgagcggcctcgaaatcaaccaatagccacaaagaaggtctgtcatcgtgcgcaacggcaccaatcacagcacaacttcatgcctacttcattaacgtgtagccactgagcttatcgacatctctttctcactcttgaataccacgcagccgcttctttgcatcaatcccgtaccaacccattagaatttaaaaaatattttcatctctgcaaaattttcaacaagggctaatatgtttcaagactgtatttagaaatgtgatcagtttaatagtgaactgatttacttcagggaaataacgtaataaatgtaacttatttccaggtatttttcttttaaatataataatttcaaagtcaagcctaaaaaagcatcaattcgtatgtaaatagacaatgctttcccgtccaataaaatcccccttcacttctatttaaatatcgggatttgtaattttatttgtaaattatgtttatagcaatgatatcaaggaaactacttcgcgtttgtttagcaaacctaaaccacctacgttgcaaaaaaattaaagaaatctgactattggagcctattcaaaaacacgtacattgaaaaaaacgttccatcgcaattttattagctcaacaatttcaacaatttttcgccatatctattaaaattgtaaaaataacaaaataacaacaattttgaaaagattatccatgtccgttgttacacgcgttagttgtacagtaaatgccgacattagagtaataatatgcttaacgccatacgattttttgcccacgactttcatgtgcaggaaggaatttatttctcatttgtgaatttctgtagatttgccaaagaagtttttgctccgcagaaaaactgcaaaaaagctttcgcgaccacaattttgaaacatgttttgattattttccgttttattatttgtcttgctaagctcagtatacgaaagcattaaagccgcggcccttctacttttgaaaattttcttgatttatttcatttaattatttttttccaatttctatcgatatactatattaacatttattgttcgctttcccactagttgagtactcgagtagttatcaatatataaaaggcttacgcgagctacttaaggtcatagtatcaatgtatatttaaacatacagtggaaaaaattttgatttctgctaactttactataactacaatgtatacatatactctttcgggacccttaaatagaaagtggccggttaaaaatttaaatattttgtataggctaatgagaatactttattttcgtcagaaaaaattgtttactcaacggacttttgaaatttaacttttggtttctataaatccaacccgccctatttaagaattttttagaatattcatgtttttgaaagttattgcctagcattgatcattagttttgtacacattatatatgattaagacttttttgcacataaattgaaaattgttacttaaattaaaaagtcctttagcaccggaagtagatacctaagctaccggaaaacaacttgatttgtggtttctggcttcacccgacttacgttgtactcacggagtaatctgtgttcccatatatttgtggttacaaagtcgtgctgaattactatcaccttttttttatatcctgataatgtgagcgttgtaatcgtacaccaatagtgcttcaatttcaatgtgaataagatcttgaggttgtacgatcattaacttagtgagaagacagggacagcgtccagttccaatgaccatttacatcccacaaccaaagcaaaaaaaactatgtcatagtcaggaaacagctttgcggtcatagtaaattttttcaattaggcacccagttacttgatacaattccaactaagccgcaaaaaatttatcggatggtggttatatagctttgtgagaaatctttactgatgcgaaaatcagtgtgaatgattaggtaggagataggtcacacgttactagtaagtatacatatatgtatatctatagaaatatcttaccatcacccgaaatactgccctgcgaactgtgtgagtcttctgaaaagatatattaataatattttgcatttaaatataggtaaaaatatgtataatcatgaatatgtgtgtggtacctgccccgttttgaatatcattcatggctgttatccactctattccttgggattgtgttatgaaattgtttgcagatggcgtcgtattggcatccgaaatgttgctcagtgtccggcttgaatactcatcatacttgttcgctagattttagtatttaaagaaattaacaaattgtttagctgatattgctgatattttactttcttcactaatcatcacttaaaaacaagatataacggtatagtcgagttgttcgatatttgttactcagctagtagtagtgcgaataagaaatgttaaagctttttaggcatatcgatagaaattgtcaaataatttaaaaatcaaacaagaaaaaaatgagaaaaactttaaaaattggtctaaagtgtgggtgtgacctgctttagggtgttagagtgggtatcgatttacaagactaataaaattatgaaaaaatctcgaaaaatggttcaaacatttctttttgcaaatcgatagaaatttacaagactgtgcaaatatattaatacattttgcaaaagtgtgggcgtggcagtttttgggcgttagagtgggcgtggcaacatgggtcaacaatcttgtgctgcttctttgtctctagaatctatatgctgaatctcaaccttctagcttttatagttcctgagatctcagaaagacggacatggctagatcgactcggttattgaacttgatcaagaatatatatactttatgtagtcggaagtgcttccttcagcctgttacatactatgcctatggaatccgtttgctcaaatctcaactttctagtttttgtagtttagtttatagttttatagtttattgggatctcgaccttcggacggacagacagacggacatggccaaatagactcggctagcaatcctgataaaaaataaatataccttatagggtggaaaatcctttctcttacctgtttaatacttttcaacgggtatagcacactctttcaccaaagacattcgaataatgcctagtgtgttgtactctacgaataacgggtataaaataaccacggccaaaatatttttgatgtatcgatagaaaatggtaaacaaataataaaataaaaacacgagagaatgtaataatcgagtttcccgttgttgagctagcggaagtgagaacccgaaattttatagtttttctatttctaaataatcaataataaataatcaatcaataaataaaatgcgaaaaaaacaaaattaaatattgtaaagtgtgggcgtgacggttttggagttttgtaggtgtaatgggggacgtttctaaagtgttataggtataccaatagaaactaacaagagtaataaaaatataacaaaatattttgttttcaattatgatgcgttcatataccaattagaacgcaggtttgccagctaacaccagttatcggcgaatacacaatttcagttataaatttataaaactgagactacttattatgaaactgctaagaaagtgttggaaaattatttgctaattttttgaaaagaaataacagctttgttgtgttctatcaacaagcggcccagttcagcacacatgttttttatgtttatatggttttggttcaaatttgatcaaagtcgttcgacttattaatatagctgtcattgaaacaatcgaagaattttttgagaattaaaaaagacataatagtttcgctgaactttaattcatttctttttttcattgaaagcgcaaaagagaaaatttaaatataagctcacttggagctggagggagacaactccactcacaaaaaatctttacaaatatttcgttaaaaacaagcatcgatttttatgagaatgctatagtcaagttccccgactaacagataccagttactcatctactggaaatgcaaacgcgaaaattatctttacaggcatatcgaaagatattggaaaataaaatgagaaaaaattttaaaaatttccagatccccgactatcagatactcgttacctagccagtagaaatttcattatttttctggtatatcgttgggtatcggggaataaaattagaaaaaatacaacatttttataaaacaaactgaatgactaaattgtatcttaacataaataacggaaaggaacaaatttctataattttttttagtgtacaaaaggaaaacatatgtgtgtatattatttgttgtttaagaactcggggatgaaaatcgtggagcattccaatgggaacatggtaaatttccccttaccgaaaatccgtgacttgaagtaaacaccttttaattttttgtcccttaggctttcatacaacttgaatatgaattcactagcaaaatcttggaaggggatataaaaggttttcaatcgcggcccaagtgcattgcacttgtgaacttgtttaaaatgttcccttctcttctttctgcaattgctattgttctttagttttggaaggttgcaactggaattaccatctttttctttctccgatcatcatttatcccctacaaatgttaatggcatgaaaatttaatcttttgttttagtctaatcgttacagtaaacaggaatatatcaatctaagcatttctcgtcataaaatcaattatttaacgttcgttcttaagaattcaaagttaaaaagtttacagtacaaaactcaaggtttatgcgtcagctttaaaacaaaaatctgaacatgaaagagagctagcgttgaaaagccgatatgagctatgatttactgttttatattttcatatatattttgtttattttaaacggataacataccatgttgtcaaaaaactgttgtatactgaactagaacgttttatgatccaaaaaacgaagctagtatttcatttccattaattcgactgatattttccgattgtttcacgtacagctgtacaatacagtagatcttatcttacagtagagcttatatatagcacctatattatatagtgatctgatctgggcagctccgatatcaggcattaaattaagatattagtttgacttcttcaatggtattttggttaccttttgacttatcttccatttgagacgaggtatacatgttacttccggaaagatgttgatgaccatgttgattttgatttgtattaatagtagtgctcaggctatcaccagtgcgggtgttttgtaaattgtgcaaagtcggtgaaacgtcctgttgctgatgatgagtgaggtgatgttgttgcagatgttgggaatcgtgctctagctggcctgtacttgtattaagggtttcttcttgagttgaatgtagaatgtgtggatgtaaaatacgatgttggagctcatgtgttccgagcccatggatatgatgtgtcgatgtctgtatatccattataagcatcaaagattcaacaaaatgtataagttcctggaatacagaaaattgtgggttcttttattatgaaagcaacgagatattagcgtagccaaagcagttgacctatgcagttatgcaaggaatggatatgtctgcacaaaacaattgttggttagttcatcaaattcttctgcttaaagtgtaattaacaacaaatgttatgtattttattcggcaatgacattcaaactgttttaaaggcaagcaggaaatgctatagtcgaatggctcgactatcagatatttcacttatcgtcgcggtttgtgggtgatagagtgggcgtagtcaaaatgtttggtaacacaactagtaaaatgacaaaaaataattttctttttttaatgtgtcataacgcttctgaaagtttataggcgttgggtggcggacgccttcattatctaaaataatcttgccgtatgactacaactagaatctgtagatcgactcgtctagacagttatgaatatatattttataagatcgaaaacacttctgcttttcaacgaatcaacacgtaatggctttaataaatgaactaaatcaaccgagctatatataaagaaagttttaaagtgatacattcaaataagagcattttatgatggaaaacgcgaaactatgaactaaattaatgtatttttatataaatggtatatcccgatttggcatatttatgaataactagaaattttaaagttgatttcctcgactatcaaaaactcgttactcagctagtgtgagtgctgggaaaaaaatcatacagcgaaggtggctctaaaatttgcttgttaatcttaatcgtttctttctattagagttacctagatcactgcgttcagaccatggccagattgttgatcctgatcaagaatgtatgtatttcatacggtaggaaacgatccgttctgcctgttacatacttttcaactaattttactctacgagtaacagaccaaattatgatatttttatacccgttactcgtagagtgaaagggtatacaagattttgtgaaaagtgtgtaacagacagaaggaagcgtctccgactatatatagtgtatatattcttgatcaggatcaatagccgagccgatctggccttgccagtctgtccctatgaacgtcgagatctcaggaactataaaagctagaaggttgagattcagcatacagattctagagacatacccccctgttgccacgcccacaaacaaaattgcctcgattacatttttgaagaatttttggatattttttcataattttattaattttattataacaaagagcttagacttataagcatttttttaatttttagtaattttattccacaatatttatcgcttagccaaaatttatgaaattttctctttggcatttccactagctgcgtaacgggtatctaatagtcggccaacttgactatagcaatctttcttgtgattcgtacctttcaatggcacacatatatttcactatttcactatccgctcttgttatccagggcaaggtgcactttcttcccgccgaatgaagccttaacccgcgcaaacgtggttgctagcacttattcacctgttgttaattgacctttttgggactgacactcccctaagggtcaatatagctaaatgatcgagtcagctacgtgtatgggtatgggaataaatgtgttcgtttaggccatctgctttctttctacatttattgtttcctaaatagcctaaaatgaaagagcgctaaagtcgagttccccgactatcagatacctattaatcagctagtagcagcaatgtttaataacattggagccatttttttatgagaacattttggggttcgtcgataaaaattagaatgacaaaaaaataaaatcaataaaaaatcaaaatacatatagtgcctgcgtggcacaggtatgaaacaagcttgcaccgcttttataattcacgaggaaaattaatttaaaaaacaagagagaatcctacagtcgacttccgcgactatcagatacccgttactcagctaacgcatttcttatttttttaatgataaaaatgagaaaaaatttaaaatttggtcaaaaatgtggtcgtagcagtcttgggcggcttgtaggcgtaacagcgggcgttgcaaaaagaaaatgtagatataaatttacaaaaactaaagaaaatatgaaaaaatatcattttgcaaatatgtgggcgtggcagttctaaacggtttgtacgcgtaagagtgggcatggcaaatcgatagaaatttaggaaacaaatatgaacaaatttcaaaatatatttcaatggcgtggcagttttgggcgtaacagttggcgtggcaataccttgtgctgcgtgtatgtctctagaatctgtatgcttaatctcaaccttctagcttttgtagttcctgagatctcgacgttcatacggacggacagactgtcagacggacacacggacatacggacaaggtcagatcgattcggctattgattctgatcaagaatatatatactttatatggtcggaaacacttccatctacctttcaacttttcaacgaatctggtgtacccttttactctattagtaacaggtagtagttagttagtacaagtttagtagtacaagttttgtagttttgttgttgtgttcgaattcgaataaagggctcgaattcgatatacacattttcttgttgataataataataataaataaaaaattaattaattttaaattttttttataaattaattttaaatgaatttggaagtatatagttaaaagtcacggtcgggcacagcggtcctgttacgaggtcattggagcttctacaatttgttattttcattaccaactggtattcaggcagaataaaacccatacttcattcaattcaacaaaattaaaagtgggaaaaataattgtattttcacacactccagccgaataatagctatggggagccagaatttttagttaagacagtcgaggaaaacaaagaaaacaagtattccaaggtcaggagcgtgggtaaatataagctgttcaaattcggagtatatttaaagccgagctcaagcgccttaagtgtttaatgttatataacttggatgattaaggaattatttttaccttaatatatttaaaactatgcattagtttactcactgaatattttcgttttataaagattggttaacatataattgttttaaagaatttcaataaattattagttatttagcgtcactcagttaaggtagtgaaaacgttcaaatacgaatttatacactaacaacatcactgagtcaaggaatctaagccttgaaaggtaaaaaagacagcgcgaaccacctgttggctaaaaatccacgaagcaacacgatttccaggtggatcttgaagcgtacgccaagagatctcgagcgaaactaaattgttgaatggcaatggacgacggaagcagtttacatcgctcaaactcagccgaccacttttttgagtgtgtttatgatggcttatatgtttgagtcgctctcaaaacttggcccaaggcggctttacggttggtcggctacattcgcactcaactggcggtcgactaatcgggagacatagcgtgttgttcggatgcaaaagctgggtttgaaatacgatcgccgcttcaaacagaacgagtgatagagaaaaggaaagagaacaaattagttaaagtcactgaatgagaagggatgagatggtattcttgttttcccctgtttggtcttaatgatcagagtgttggagtgcttatacccgttactcgtataggaaatgggtattctaaattcgttgtaaggaagaagaaagcgcttcgaagcgtttggtatatccctgattatgatcgttcttttttatatctgtcaaacctcaatctcataaccctacagtcctgactgcttaaagtttcctaaggtccagctgacccatatttgtctaattgttttccactaaaggcctatatttattggttccggtttaatattcctattattagatacatataaaggtgttatcttttggcatttaacaacaggctctcgaaaagtgaacgcaagactatgtattaaatttgaagtaactacattttgttgaacggaagctaagtcagtttatatacataagtaatcaacccccttttaaccgtctggatcgcgtattgttacattgagtgacctgcattctacaggttgacaagcgaacaaatatttatacatacatatttgaaaatgtgtaatatacgtttgtaaataaatcgtttaatatacataggtgtactaggagtacagtcggcactaccttatgatatacacatacatatattgtttctatgcttccatgcatacaaaaataatccacattttcgtcagagta

SEQ ID NO: 23045 - DNA, 4673 bp, DROSOPHILA
ggcgtacgcttcaagatccacctggaaatcgtgttgcttcgtggatttttagccaacaggtggttcgcgctgtcttttttacctttcaaggcttagattccttgactcagtgatgttgttagtgtataaattcgtatttgaacgttttcactaccttaactgagtgacgctaaataactaataatttattgaaattctttaaaacaattatatgttaaccaatctttataaaacgaaaatattcagaacttatacattttgttgaatctttgatgcttataatggatatacagacatcgacacatcatatccatgggctcggaacacatgagctccaacatcgtattttacatccacacattctacattcaactcaagaagaaacccttaatacaagtacaggccagctagagcacgattcccaacatctgcaacaacatcacctcactcatcatcagcaacaggacgtttcaccgactttgcacaatttacaaaacacccgcactggtgatagcctgagcactactattaatacaaatcaaaatcaacatggtcatcaacatctttccggaagtaacatgtatacctcgtctcaaatggaagataagtcaaaagcgaacaagtatgatgagtattcaagccggacactgagcaacatttcggatgccaatacgacgccatctgcaaacaatttcataacacaatcccaaggaatagagtggataacagccatgaatgatattcaaaacggggcagaagactcacacagttcgcagggcagtatttcgggtgatggtcatggaggcgttaatcaacttggtggcgtattcgttaatggtcgcccacttcccgatgtcgttcgtcagcgtattgtggagctggcccataatggggtccgcccatgtgacatatcacgtcaattacgtgttagtcacggttgtgtgtctaaaatactttcaagatattatgagactggtagttttaaagctggtgttattggcgggtccaaacctaaagtggccactcccccggttgtagatgcaatagcaaactataaacgcgaaaatcccacaatgtttgcttgggagatacgagatcgacttttggcagaagctatatgctcccaagataatgttcccagcgtttcttcgataaaccgaattgtaaggaataaagccgccgagaaagccaaacacgtacatcatcaccagcagcatcatgtttctcagagtctgggtggggggcatattgccacggaaagtgttgacagcagcacaggaacaatcggagaaccgcagccaccaactagtaatagcagtgctaattctgtaaacacaaacgtatcggcgtcggcgagtgtacacgcatctattccaacgtctggcactgattctgtccaagtttcagtcggtcatatcaatgccaatagcaatgaaaccacccatataaactcaacggctgaacaaagaacgactggatatagcataaatggaatattaggaatacaacatggacaccattctcacaacaacaataacaacagtagcgtaaacaataacaataatacggaatcaagttgtaaacgcaaaagaattgaagcacatgatgagaaccatgacacaaatatacattccgataatgatgatggaaaacggcaacgtatgtcaacgtacagtggcgatcaactttataccaatatttggtcaggaaaatggtgtataaaagatgaccataagctacttgccgagctaggcaatttgacagcaagcaccggaaattgtcccgcaacctactatgaggcatcgaacggattttcaacaaccccgatatcaggatctggtgccacagcatctggcaacgatacgtctatgctttacgacagtattacaacgatttcgcaaactcaaagttccatttatacaccagcaatcggaccttccattggaacaggttcgcttaccccgttagttcctattagtatgcatgaaatgaagcttagcgcaaattcaattcaggaacaaacagtccctcccttttacacagctctagcatttgacggaaactacacatcaatgaccagtttggaaaattgttcatccttagtcgggcaagaacacattgtaatgccagaaagctcggattcgaataccctttgcccgattagtactaggatagtgccagacattacggaaactaatagtactcgtgttaaggaacccctgacgaatagtgatggatgcagcgaagataataataaggaacctgaaaagtctaactcttcgcaatccagtgatcatattgcctcgccacatctacatcatataggagaagagcaattgagaggaaatagacgatcaaacttaaacgcaagcacgcatccatcttctctaatacctctgcagccgagcggaggatcatcgttactaaatatcaacccgtctgaaaatcgatcagatgttgagctcaatctaagtaataacgtaggcctttattcaacaccaacagtgctaccaagttttaatcactactccgcaggctgcagctcagttgtacccggttcagattacgcctacaatcctgcatatacccagtatggtggagcttacggatcatatggttacggcactggcagtggcttgataaattcgtcctactactacgagagcggacaaacacaatcaccattaacacacgatctgcgttcacctttagtagcaacacgcgcgaactctctagcatcagctgcatcacccggaagcggaagtgcgtgcacaaaatccgaatcatcggatatttttcttgcttaattaagcttaatataaatagtgagtatcacaacacaaataatacatcaaattttattaacatttacataattgattcatgttgaaatattacaattttgttaaagtatttctcagtgtttctgtttgctgtaaatactcacaccagtatgatttataatgaatcaaattataccaaatcttaaaataaagtacactttgattaaaattcaagattgaatgagaagaatttataatttttctagaaaaatgcatttataagaattttaattagaatgatttgtatactttataaccagtttttctttctctgtccaataaaaacgagactagagaatatttaagtatataacaagaacaaacatcactacatgtgaaaaacaaaatctgtgcaaaaagattcgcatttattaataaatttaggttacaatataagcaggtatatttataagagcaaggaatatgaaatattacaaaaatagtaaaccactcaactacatacctatgaaaccaaaatgtccattacggcaaaatcaaccaaaaatgttagaacaaaagtttaaaaaacttccaaaatatatttttagcttaatattgttaagctacaaaagtataagaattaatataaaaatgtaaataaataaatgacaattataaaatatttttgagtcaataaacgcgcaaacttgaaagcctacataatttatactcggtgcgcatactaaaaactatgttattaactataatataaaatgaacatggagtcaattaatccatgaactgcaataacatattttcactttatttctattatacttattttaaaaaaaaaaggtgaaatactttgattgttaaaataaaataaaaataactaaggcgaatagaaattttgtgtaaaccttatcacacacggctttattgcaagcaattcttcttttctaaaataactttagctgaaaatatagcttggcattttttattcttcaaaaaatatctaagtggcatggtaattcggctaccgtagaagccttgtgcgtacacaatgcgtggttttcttggcctttgtaagatacacatcaaaaatcaaaaacctgtaacattgtttcaagacataatgcccaaccaactagattaaaaatatataaatgtttatataggaaagcacaaaccaaatttttatgtatttagacataaacatctacatatatcttaataaattgataagttaagcaaattatataaataatttttagctttattgctctattatacaacgatcaggggaggcagcccagggtaaaaacaacatttatttatttatttataatttattttttaccctgcttgctgtattaagagcgctgtagttaagtacgttacctattacaacccaacactctgccttttgtggacattacagttggggaattcgaagtcgtgtgagcagctaaaacagaagggaatgaaaccaggaattatacgtatgtcatctcttactctgggttcaaaaaatagattcaaacaatatagcagcagcgaactcctgctgaattttgaagctaaacgaagcagcctaaaacaaatcatctacttgagtggaacaccgctaaatggtttttccggttcaaagctaaagtgacttacggatggttaatgtgatgtagtgtagtgtggttttagggtttaacttaaatgttaatgggcattgtcgctcatggtcgtgtaggttttgataacttaacaatttctgttcagagctcgttgttagtcatttgttgtctgttaaaagcaagtagctgattatattcccctccagactttgaaaaaagttttttataagaaataaagtgtagctctgaataccctttc

SEQ ID NO: 23046 - protein, 844 aa, DROSOPHILA
MLIMDIQTSTHHIHGLGTHELQHRILHPHILHSTQEETLNTSTGQLEHDSQHLQQHHLTHHQQQDVSPTLHNLQNTRTGDSLSTTINTNQNQHGHQHLSGSNMYTSSQMEDKSKANKYDEYSSRTLSNISDANTTPSANNFITQSQGIEWITAMNDIQNGAEDSHSSQGSISGDGHGGVNQLGGVFVNGRPLPDVVRQRIVELAHNGVRPCDISRQLRVSHGCVSKILSRYYETGSFKAGVIGGSKPKVATPPVVDAIANYKRENPTMFAWEIRDRLLAEAICSQDNVPSVSSINRIVRNKAAEKAKHVHHHQQHHVSQSLGGGHIATESVDSSTGTIGEPQPPTSNSSANSVNTNVSASASVHASIPTSGTDSVQVSVGHINANSNETTHINSTAEQRTTGYSINGILGIQHGHHSHNNNNNSSVNNNNNTESSCKRKRIEAHDENHDTNIHSDNDDGKRQRMSTYSGDQLYTNIWSGKWCIKDDHKLLAELGNLTASTGNCPATYYEASNGFSTTPISGSGATASGNDTSMLYDSITTISQTQSSIYTPAIGPSIGTGSLTPLVPISMHEMKLSANSIQEQTVPPFYTALAFDGNYTSMTSLENCSSLVGQEHIVMPESSDSNTLCPISTRIVPDITETNSTRVKEPLTNSDGCSEDNNKEPEKSNSSQSSDHIASPHLHHIGEEQLRGNRRSNLNASTHPSSLIPLQPSGGSSLLNINPSENRSDVELNLSNNVGLYSTPTVLPSFNHYSAGCSSVVPGSDYAYNPAYTQYGGAYGSYGYGTGSGLINSSYYYESGQTQSPLTHDLRSPLVATRANSLASAASPGSGSACTKSESSDIFLA

SEQ ID NO: 23047 - DNA, 5307 bp, DROSOPHILA
ctggtagtcgagtatgcgatcaaggatctgggtcacattcgctactacctggcacccaagatcgaggacaacgagacataagtcagctgtgttcctcatatttatgtccccgcatcgtcaccactcatcttcccacgttcacttcattcctaacttttaagtaaatccgcattttttgatcaataaaagctatactgtgtaatgttaactggctgagttgtacaattgattttagggcgtaataaccatttattcgcattccatatataacactgggtatcgtttaaggagagagagattgcaaacatatacatattaagagtagtggtttatcaaacaccttggcgtgggatagacaaaaaaccttggcatatctccgacattgaagtttgttagcctccgcagctgcagaaaatctggacataccattggggagttctaaatcaagggtaataatgggcgattattctattcactgtgtataagtactcgttccgtatgaggcacatagtcgggagttttgcaacaaagagctttaagcgagtgtgtgcctgcattcaagagcattaatcgtatgtaaatacatgtaataaataatgcgtgtttacacgcttccaatacttgcatacttggcttgcttatgctagaagctacatacatacgtatcctatacttagtttgtgagtatataaaacatagaaagctgtgtcatataaaattgtataaaaaaaacctttgagattacatatacgtagtaataaaaagcaagaaagtgcgtataacaatgaacaattcaaattgttcctgcgcataacaaaattcgatttacacgcctatgtgagtggagaaatggccaatgggggtataaatgcaggtgacaaaattttacagtgattgtgaaatcccattgccacttacaatctgccattggttaatattgttcattgtcggggtctcagttctccagtccaataggcatatagaccgatggaaattcatcctatgaagcggctagacttgcactgggactggaggactcctcctcgtccatcgagttggctttgtcaatgttcttggtcttcgaatcggtttgaagcaacgtctgtagagatttgatgcacttctttgagccctccatggcttcgttggataactgaaagttaaaacaatgttattatttttcctaagcttctgttgccagcgcatttcataccattgtgaaatttaggaatccgtgcggcaacccctcaagtatttccaagtcaacttgtcgcccaagccgcttcagtttcttggcaaacataacgcaatcatccagacaggggtccatgttaagtgtctgtacggaaaataaataaaaatatttaataccaatacttctttaagcttcataaacttacaagtattttggtctccggcagttgggaaagccactcatcactggcccagtacggcgacaggaatggatccttaggcacatcgaatgcaaactcctcgctgggactccgtgctatcagtgcgtccatgttgcgcacatcctgttgagccatcacgttgcttccgtgaatctcgtaggactgcgtgcagcgcgtcaaggtgttggttatgttgttgacggcttcctgcaggcggccttgcagcgtatctattgcaacaagatcccgaccagtctccactagaatatcatcatcggaactgatcttcgcatgtccatttgcctgcgcttgcaccgcttcgggagctgtctcttcggttacctccattgtggccgtgtcaatgagatacttgtccagaaaattgtcaatataggctgcagaggcggtatccttaggtgggtcggctgatatttcgattgggtagtgcacaatgggctgtgaatcatcctcgaacgagacgcacgagctgttgtcgccttcggtgtgggggagatcggtacgctccaccgtctggctgtggtaagaggctgaggcactggcaaaggtgtcgctgctttcgtcatctgggttcatgctggcttccagcggcgaaagcggacttctggccatcgaggtgcggcgactggagttcaagcttcccacgttcgacttggggacattgcgtatctgggcggcatcctcgacttgcttggcattctgctgaagtgtctcctgggcgggagcggcataggcacgaaggcagcgcatcatgaagccgaaaggcagcaggggatccatcaaacagagaaggcgggccggactgggcacaaagctgacgagagttgggcagtaggccagaaacagaccatctggcactcgaactccctgctcaatgcacttgagggctactccaattgacagatttgccccagccgagtcacctgcgcatacaactcgctcagctgttgtgcctaggagttcggtattgttcagaagccagcagtaagcgtagtaaacttcttgcagggcgcgtggaaatggcgcctcaggagctaggctgtaatccaccgagagaataggacagtccagtgccacggcccagtcgcgcaaatacagttcgtgggacttggacgattgggccacaaagccaccgccatggcagtgaaacagaatcgaaggacttggcggaatgggcttgtgccagccgcgatagcgaccctcgcccagcattcccgaacgtcgtctcgcgctcagcaagcgaacagagaccggtaaaccaggtcccaaatgtgccgtgggcacgggaatctccacaaaatcaccatcgccttggttttggttaacgtcactgctgagattgtccgatgccttgaaattctttcggcgaggcagctttagcggctcggctggcaattcgatgagccggtttaccttaatggagctgcccacaatgctgggcagcttgtgcatcatctcggactcggccagaaaccaaaaggatttgcaaaagtctatcttagcattctgcgagatgttaacgatgcgacgggcgcgcagttccggattcataagatacttgccgctggtccacaggctgcgtgtggtcttaacgatggggccgtcgccctcttgcgaatagtacgactccgagtagctggccatgctgatgccgaggaatcggagaactccgcgtatcgagtcgccatactgaaagcccaggcagcgtccgtaaaagcaatactggttgatggtgtcgcccagctcgaagagctgctcggcagtgtgatttccgcatgcgaacagatcacccgtgctagccgaccactggcgaaggatcagcaggtactgcagacatgtgcacagcgacgacaacagctgggaacaggcctcaacctccttcatgtagaacttcttgcggaagaatatggtggaacgggtggctgtcagctgctggcagatgctaatgccatgcgcgatgcaggcgttggtcacgtagatgaagctcctgtatccattgcccggcgtctgctcgtcaaaatcgtactcgtgggcgaaggcatcgatctgctggaccagtcggttggccaagacaatgaagtcctgccaggcaatgtgggcggcatgcaggcgctggccgaattcggtgtggtcccgggcaaagaaggcggcgtgatcctggcaggcggcgtacaaggttccataggtcgcctccaggtcggcgggtacgtgctggtgggtgtcctttccattgactgcctgtgggccgtcgtcctcgtggcccagtttcagattgtcattgaagagggcaataaactgggggcttgcccgctcggcggaagccgcgtcaatcattgtgttctgcagaggaagccaatttggttatgcacctattgcaagcaaacaaagacaatcgcactagcacagctgcagcgacaggtgataaccatgtccgatgcactgcttctccggattggagtgactaactttgtgggtatgaaggtcgcattgagactgaaaccagttattgttgctctcaaaatagggaactttatacttgatgtatatataaatatattgtttgctttttacctatatgcaaataaatgccactctgaattttgttgaaacttattgaattaggattttcttgcagtgtagttgcaatgcaattacaatgtaagccattaaaaactttcactaaacaactacgcacttaaacgatttgtctgaagtatcgaattgtcagtgcgacgtgtttctgcacagtggcttttattgacaaatttacttacagattcttaactcgttgcttttagctcaatgcatttttaattggtccacctattgcggctccaaacattactattcttataggacttagcaccgatttaaccgatttggccagtgtgaccgttttgaggcacaataggggcattcccataattttttaagcttaaacatatttttacaatgattcaattcaatataacatttaatataattttaaatatatattagagaataactttataaatccaaatatgctagaaactttatctcttagatgagatatgaatgtaatttctaattacagtgtacatggcctattaccatttatggcgccagtattttttaatcggcgagcactggtcacactgcttgcatataaaatttcgcaacagagcggcttgcagctttaatattttagtcgtaattaaatgcaatatgtttgtactataaacgccgtcggaagagcttaataatgagcttgagcattgtgagttactatggcagccagcagagcaagtgcggctactgcgcgggagcgaactgcagcctgtcgcacggtgagaacatgcaaaaccagtccaaaaaccaggtgcaatgtaccaattattgtggattcgtcataaatgacaggtatgcacgcgtatcagctggactgccgggactatcaggacctcatcgatcgcggctggcggcggtgcggctactactgctacaagctgcgcaaccaggagacctgctgcccctgctacacaatcaaatgtaatggcctggagttcaagctctccaagtcgaacaagcgcatacttcgccgcataaatcgatttttgcgcgacggcaagcgagagtccaaaccggaagccggcgacggtgacggggaagccgatgccgattacgccatagtggctcccgaggtcacggccagcgaaccgcaaccccagctgccagataagagtccccctgttatcaatgtcgagcaagttgcatcactggcaacggctcagaggaagccgacgaagcaggcaactgctgccgcggtggaagctcctacgttggggtccaacaaatgtgcgtatgctccttaatgccttaatgccacagtaat

SEQ ID NO: 23048 - DNA, 2752 bp, DROSOPHILA
ttaaatcggtgctaagtcctataagaatagtaatgtttggagccgcaataggtggaccaattaaaaatgcattgagctaaaagcaacgagttaagaatctaacacaatgattgacgcggcttccgccgagcgggcaagcccccagtttattgccctcttcaatgacaatctgaaactgggccacgaggacgacggcccacaggcagtcaatggaaaggacacccaccagcacgtacccgccgacctggaggcgacctatggaaccttgtacgccgcctgccaggatcacgccgccttctttgcccgggaccacaccgaattcggccagcgcctgcatgccgcccacattgcctggcaggacttcattgtcttggccaaccgactggtccagcagatcgatgccttcgcccacgagtacgattttgacgagcagacgccgggcaatggatacaggagcttcatctacgtgaccaacgcctgcatcgcgcatggcattagcatctgccagcagctgacagccacccgttccaccatattcttccgcaagaagttctacatgaaggaggttgaggcctgttcccagctgttgtcgtcgctgtgcacatgtctgcagtacctgctgatccttcgccagtggtcggctagcacgggtgatctgttcgcatgcggaaatcacactgccgagcagctcttcgagctgggcgacaccatcaaccagtattgcttttacggacgctgcctgggctttcagtatggcgactcgatacgcggagttctccgattcctcggcatcagcatggccagctactcggagtcgtactattcgcaagagggcgacggccccatcgttaagaccacacgcagcctgtggaccagcggcaagtatcttatgaatccggaactgcgcgcccgtcgcatcgttaacatctcgcagaatgctaagatagacttttgcaaatccttttggtttctggccgagtccgagatgatgcacaagctgcccagcattgtgggcagctccattaaggtaaaccggctcatcgaattgccagccgagccgctaaagctgcctcgccgaaagaatttcaaggcatcggacaatctcagcagtgacgttaaccaaaaccaaggcgatggtgattttgtggagattcccgtgcccacggcacatttgggacctggtttaccggtctctgttcgcttgctgagcgcgagacgacgttcgggaatgctgggcgagggtcgctatcgcggctggcacaagcccattccgccaagtccttcgattctgtttcactgccatggcggtggctttgtggcccaatcgtccaagtcccacgaactgtatttgcgcgactgggccgtggcactggactgtcctattctctcggtggattacagcctagctcctgaggcgccatttccacgcgccctgcaagaagtttactacgcttactgctggcttctgaacaataccgaactcctaggcacaacagctgagcgagttgtatgcgcaggtgactcggctggggcaaatctgtcaattggagtagccctcaagtgcattgagcagggagttcgagtgccagatggtctgtttctggcctactgcccaactctcgtcagctttgtgcccagtccggcccgccttctctgtttgatggatcccctgctgcctttcggcttcatgatgcgctgccttcgtgcctatgccgctcccgcccaggagacacttcagcagaatgccaagcaagtcgaggatgccgcccagatacgcaatgtccccaagtcgaacgtgggaagcttgaactccagtcgccgcacctcgatggccagaagtccgctttcgccgctggaagccagcatgaacccagatgacgaaagcagcgacacctttgccagtgcctcagcctcttaccacagccagacggtggagcgtaccgatctcccccacaccgaaggcgacaacagctcgtgcgtctcgttcgaggatgattcacagcccattgtgcactacccaatcgaaatatcagccgacccacctaaggataccgcctctgcagcctatattgacaattttctggacaagtatctcattgacacggccacaatggaggtaaccgaagagacagctcccgaagcggtgcaagcgcaggcaaatggacatgcgaagatcagttccgatgatgatattctagtggagactggtcgggatcttgttgcaatagatacgctgcaaggccgcctgcaggaagccgtcaacaacataaccaacaccttgacgcgctgcacgcagtcctacgagattcacggaagcaacgtgatggctcaacaggatgtgcgcaacatggacgcactgatagcacggagtcccagcgaggagtttgcattcgatgtgcctaaggatccattcctgtcgccgtactgggccagtgatgagtggctttcccaactgccggagaccaaaatacttacacttaacatggacccctgtctggatgattgcgttatgtttgccaagaaactgaagcggcttgggcgacaagttgacttggaaatacttgaggggttgccgcacggattcctaaatttcacaatgttatccaacgaagccatggagggctcaaagaagtgcatcaaatctctacagacgttgcttcaaaccgattcgaagaccaagaacattgacaaagccaactcgatggacgaggaggagtcctccagtcccagtgcaagtctagccgcttcatag

SEQ ID NO: 23049 - protein, 881 aa, DROSOPHILA
MIDAASAERASPQFIALFNDNLKLGHEDDGPQAVNGKDTHQHVPADLEATYGTLYAACQDHAAFFARDHTEFGQRLHAAHIAWQDFIVLANRLVQQIDAFAHEYDFDEQTPGNGYRSFIYVTNACIAHGISICQQLTATRSTIFFRKKFYMKEVEACSQLLSSLCTCLQYLLILRQWSASTGDLFACGNHTAEQLFELGDTINQYCFYGRCLGFQYGDSIRGVLRFLGISMASYSESYYSQEGDGPIVKTTRSLWTSGKYLMNPELRARRIVNISQNAKIDFCKSFWFLAESEMMHKLPSIVGSSIKVNRLIELPAEPLKLPRRKNFKASDNLSSDVNQNQGDGDFVEIPVPTAHLGPGLPVSVRLLSARRRSGMLGEGRYRGWHKPIPPSPSILFHCHGGGFVAQSSKSHELYLRDWAVALDCPILSVDYSLAPEAPFPRALQEVYYAYCWLLNNTELLGTTAERVVCAGDSAGANLSIGVALKCIEQGVRVPDGLFLAYCPTLVSFVPSPARLLCLMDPLLPFGFMMRCLRAYAAPAQETLQQNAKQVEDAAQIRNVPKSNVGSLNSSRRTSMARSPLSPLEASMNPDDESSDTFASASASYHSQTVERTDLPHTEGDNSSCVSFEDDSQPIVHYPIEISADPPKDTASAAYIDNFLDKYLIDTATMEVTEETAPEAVQAQANGHAKISSDDDILVETGRDLVAIDTLQGRLQEAVNNITNTLTRCTQSYEIHGSNVMAQQDVRNMDALIARSPSEEFAFDVPKDPFLSPYWASDEWLSQLPETKILTLNMDPCLDDCVMFAKKLKRLGRQVDLEILEGLPHGFLNFTMLSNEAMEGSKKCIKSLQTLLQTDSKTKNIDKANSMDEEESSSPSASLAAS

SEQ ID NO: 23050 - DNA, 5133 bp, DROSOPHILA
ctggtagtcgagtatgcgatcaaggatctgggtcacattcgctactacctggcacccaagatcgaggacaacgagacataagtcagctgtgttcctcatatttatgtccccgcatcgtcaccactcatcttcccacgttcacttcattcctaacttttaagtaaatccgcattttttgatcaataaaagctatactgtgtaatgttaactggctgagttgtacaattgattttagggcgtaataaccatttattcgcattccatatataacactgggtatcgtttaaggagagagagattgcaaacatatacatattaagagtagtggtttatcaaacaccttggcgtgggatagacaaaaaaccttggcatatctccgacattgaagtttgttagcctccgcagctgcagaaaatctggacataccattggggagttctaaatcaagggtaataatgggcgattattctattcactgtgtataagtactcgttccgtatgaggcacatagtcgggagttttgcaacaaagagctttaagcgagtgtgtgcctgcattcaagagcattaatcgtatgtaaatacatgtaataaataatgcgtgtttacacgcttccaatacttgcatacttggcttgcttatgctagaagctacatacatacgtatcctatacttagtttgtgagtatataaaacatagaaagctgtgtcatataaaattgtataaaaaaaacctttgagattacatatacgtagtaataaaaagcaagaaagtgcgtataacaatgaacaattcaaattgttcctgcgcataacaaaattcgatttacacgcctatgtgagtggagaaatggccaatgggggtataaatgcaggtgacaaaattttacagtgattgtgaaatcccattgccacttacaatctgccattggttaatattgttcattgtcggggtctcagttctccagtccaataggcatatagaccgatggaaattcatcctatgaagcggctagacttgcactgggactggaggactcctcctcgtccatcgagttggctttgtcaatgttcttggtcttcgaatcggtttgaagcaacgtctgtagagatttgatgcacttctttgagccctccatggcttcgttggataactgaaagttaaaacaatgttattatttttcctaagcttctgttgccagcgcatttcataccattgtgaaatttaggaatccgtgcggcaacccctcaagtatttccaagtcaacttgtcgcccaagccgcttcagtttcttggcaaacataacgcaatcatccagacaggggtccatgttaagtgtctgtacggaaaataaataaaaatatttaataccaatacttctttaagcttcataaacttacaagtattttggtctccggcagttgggaaagccactcatcactggcccagtacggcgacaggaatggatccttaggcacatcgaatgcaaactcctcgctgggactccgtgctatcagtgcgtccatgttgcgcacatcctgttgagccatcacgttgcttccgtgaatctcgtaggactgcgtgcagcgcgtcaaggtgttggttatgttgttgacggcttcctgcaggcggccttgcagcgtatctattgcaacaagatcccgaccagtctccactagaatatcatcatcggaactgatcttcgcatgtccatttgcctgcgcttgcaccgcttcgggagctgtctcttcggttacctccattgtggccgtgtcaatgagatacttgtccagaaaattgtcaatataggctgcagaggcggtatccttaggtgggtcggctgatatttcgattgggtagtgcacaatgggctgtgaatcatcctcgaacgagacgcacgagctgttgtcgccttcggtgtgggggagatcggtacgctccaccgtctggctgtggtaagaggctgaggcactggcaaaggtgtcgctgctttcgtcatctgggttcatgctggcttccagcggcgaaagcggacttctggccatcgaggtgcggcgactggagttcaagcttcccacgttcgacttggggacattgcgtatctgggcggcatcctcgacttgcttggcattctgctgaagtgtctcctgggcgggagcggcataggcacgaaggcagcgcatcatgaagccgaaaggcagcaggggatccatcaaacagagaaggcgggccggactgggcacaaagctgacgagagttgggcagtaggccagaaacagaccatctggcactcgaactccctgctcaatgcacttgagggctactccaattgacagatttgccccagccgagtcacctgcgcatacaactcgctcagctgttgtgcctaggagttcggtattgttcagaagccagcagtaagcgtagtaaacttcttgcagggcgcgtggaaatggcgcctcaggagctaggctgtaatccaccgagagaataggacagtccagtgccacggcccagtcgcgcaaatacagttcgtgggacttggacgattgggccacaaagccaccgccatggcagtgaaacagaatcgaaggacttggcggaatgggcttgtgccagccgcgatagcgaccctcgcccagcattcccgaacgtcgtctcgcgctcagcaagcgaacagagaccggtaaaccaggtcccaaatgtgccgtgggcacgggaatctccacaaaatcaccatcgccttggttttggttaacgtcactgctgagattgtccgatgccttgaaattctttcggcgaggcagctttagcggctcggctggcaattcgatgagccggtttaccttaatggagctgcccacaatgctgggcagcttgtgcatcatctcggactcggccagaaaccaaaaggatttgcaaaagtctatcttagcattctgcgagatgttaacgatgcgacgggcgcgcagttccggattcataagatacttgccgctggtccacaggctgcgtgtggtcttaacgatggggccgtcgccctcttgcgaatagtacgactccgagtagctggccatgctgatgccgaggaatcggagaactccgcgtatcgagtcgccatactgaaagcccaggcagcgtccgtaaaagcaatactggttgatggtgtcgcccagctcgaagagctgctcggcagtgtgatttccgcatgcgaacagatcacccgtgctagccgaccactggcgaaggatcagcaggtactgcagacatgtgcacagcgacgacaacagctgggaacaggcctcaacctccttcatgtagaacttcttgcggaagaatatggtggaacgggtggctgtcagctgctggcagatgctaatgccatgcgcgatgcaggcgttggtcacgtagatgaagctcctgtatccattgcccggcgtctgctcgtcaaaatcgtactcgtgggcgaaggcatcgatctgctggaccagtcggttggccaagacaatgaagtcctgccaggcaatgtgggcggcatgcaggcgctggccgaattcggtgtggtcccgggcaaagaaggcggcgtgatcctggcaggcggcgtacaaggttccataggtcgcctccaggtcggcgggtacgtgctggtgggtgtcctttccattgactgcctgtgggccgtcgtcctcgtggcccagtttcagattgtcattgaagagggcaataaactgggggcttgcccgctcggcggaagccgcgtcaatcattgtgttctgcagaggaagccaatttggttatgcacctattgcaagcaaacaaagacaatcgcactagcacagctgcagcgacaggtgataaccatgtccgatgcactgcttctccggattggagtgactaactttgtgggtatgaaggtcgcattgagactgaaaccagttattgttgctctcaaaatagggaactttatacttgatgtatatataaatatattgtttgctttttacctatatgcaaataaatgccactctgaattttgttgaaacttattgaattaggattttcttgcagtgtagttgcaatgcaattacaatgtaagccattaaaaactttcactaaacaactacgcacttaaacgatttgtctgaagtatcgaattgtcagtgcgacgtgtttctgcacagtggcttttattgacaaatttacttacagattcttaactcgttgcttttagctcaatgcatttttaattggtccacctattgcggctccaaacattactattcttataggacttagcaccgatttaaccgatttggccagtgtgaccgttttgaggcacaataggggcattcccataattttttaagcttaaacatatttttacaatgattcaattcaatataacatttaatataattttaaatatatattagagaataactttataaatccaaatatgctagaaactttatctcttagatgagatatgaatgtaatttctaattacagtgtacatggcctattaccatttatggcgccagtattttttaatcggcgagcactggtcacactgcttgcatataaaatttcgcaacagagcggcttgcagctttaatattttagtcgtaattaaatgcaatatgtttgtactataaacgccgtcggaagagcttaataatgagcttgagcattgtgagttactatggcagccagcagagcaagtgcggctactgcgcgggagcgaactgcagcctgtcgcacggtgagaacatgcaaaaccagtccaaaaaccaggtgcaatgtaccaattattgtggattcgtcataaatgacaggtatgcacgcgtatcagctggactgccgggactatcaggacctcatcgatcgcggctggcggcggtgcggctactactgctacaagctgcgcaaccaggagacctgctgcccctgctacacaatcaaatgtaatggcctggagttcaagctctccaagtcgaacaagcgcatacttcgccgcataaatcgatttttgcgcgacggcaagcgagagtccaaaccggaagccggcgacggtgacggggaagccgatgccgattacgccatagtggctcccgaggtcacggccagcgaacc

SEQ ID NO: 23051 - DNA, 2781 bp, DROSOPHILA
tttaagtgcgtagttgtttagtgaaagtttttaatggcttacattgtaattgcattgcaactacactgcaagaaaatcctaattcaataagtttcaacaaaattcagagtggcatttatttgcatatagaacacaatgattgacgcggcttccgccgagcgggcaagcccccagtttattgccctcttcaatgacaatctgaaactgggccacgaggacgacggcccacaggcagtcaatggaaaggacacccaccagcacgtacccgccgacctggaggcgacctatggaaccttgtacgccgcctgccaggatcacgccgccttctttgcccgggaccacaccgaattcggccagcgcctgcatgccgcccacattgcctggcaggacttcattgtcttggccaaccgactggtccagcagatcgatgccttcgcccacgagtacgattttgacgagcagacgccgggcaatggatacaggagcttcatctacgtgaccaacgcctgcatcgcgcatggcattagcatctgccagcagctgacagccacccgttccaccatattcttccgcaagaagttctacatgaaggaggttgaggcctgttcccagctgttgtcgtcgctgtgcacatgtctgcagtacctgctgatccttcgccagtggtcggctagcacgggtgatctgttcgcatgcggaaatcacactgccgagcagctcttcgagctgggcgacaccatcaaccagtattgcttttacggacgctgcctgggctttcagtatggcgactcgatacgcggagttctccgattcctcggcatcagcatggccagctactcggagtcgtactattcgcaagagggcgacggccccatcgttaagaccacacgcagcctgtggaccagcggcaagtatcttatgaatccggaactgcgcgcccgtcgcatcgttaacatctcgcagaatgctaagatagacttttgcaaatccttttggtttctggccgagtccgagatgatgcacaagctgcccagcattgtgggcagctccattaaggtaaaccggctcatcgaattgccagccgagccgctaaagctgcctcgccgaaagaatttcaaggcatcggacaatctcagcagtgacgttaaccaaaaccaaggcgatggtgattttgtggagattcccgtgcccacggcacatttgggacctggtttaccggtctctgttcgcttgctgagcgcgagacgacgttcgggaatgctgggcgagggtcgctatcgcggctggcacaagcccattccgccaagtccttcgattctgtttcactgccatggcggtggctttgtggcccaatcgtccaagtcccacgaactgtatttgcgcgactgggccgtggcactggactgtcctattctctcggtggattacagcctagctcctgaggcgccatttccacgcgccctgcaagaagtttactacgcttactgctggcttctgaacaataccgaactcctaggcacaacagctgagcgagttgtatgcgcaggtgactcggctggggcaaatctgtcaattggagtagccctcaagtgcattgagcagggagttcgagtgccagatggtctgtttctggcctactgcccaactctcgtcagctttgtgcccagtccggcccgccttctctgtttgatggatcccctgctgcctttcggcttcatgatgcgctgccttcgtgcctatgccgctcccgcccaggagacacttcagcagaatgccaagcaagtcgaggatgccgcccagatacgcaatgtccccaagtcgaacgtgggaagcttgaactccagtcgccgcacctcgatggccagaagtccgctttcgccgctggaagccagcatgaacccagatgacgaaagcagcgacacctttgccagtgcctcagcctcttaccacagccagacggtggagcgtaccgatctcccccacaccgaaggcgacaacagctcgtgcgtctcgttcgaggatgattcacagcccattgtgcactacccaatcgaaatatcagccgacccacctaaggataccgcctctgcagcctatattgacaattttctggacaagtatctcattgacacggccacaatggaggtaaccgaagagacagctcccgaagcggtgcaagcgcaggcaaatggacatgcgaagatcagttccgatgatgatattctagtggagactggtcgggatcttgttgcaatagatacgctgcaaggccgcctgcaggaagccgtcaacaacataaccaacaccttgacgcgctgcacgcagtcctacgagattcacggaagcaacgtgatggctcaacaggatgtgcgcaacatggacgcactgatagcacggagtcccagcgaggagtttgcattcgatgtgcctaaggatccattcctgtcgccgtactgggccagtgatgagtggctttcccaactgccggagaccaaaatacttacacttaacatggacccctgtctggatgattgcgttatgtttgccaagaaactgaagcggcttgggcgacaagttgacttggaaatacttgaggggttgccgcacggattcctaaatttcacaatgttatccaacgaagccatggagggctcaaagaagtgcatcaaatctctacagacgttgcttcaaaccgattcgaagaccaagaacattgacaaagccaactcgatggacgaggaggagtcctccagtcccagtgcaagtctagccgcttcatag

SEQ ID NO: 23052 - protein, 881 aa, DROSOPHILA; identical to SEQ ID NO: 23049

SEQ ID NO: 23053 - DNA, 3955 bp, DROSOPHILA
agggtctatttggtggtggcgccaaactcctggatcgcgaggagctatgtgagtagatctgcatcagatctgcatgtcgttaccatcgatcatttcaataatccgtacaattcctatccctatccttgcagttggcgagcagagcgggaaaccgaatcgatcggtggcacggcacatacccggccccaatttggagcagctcggccagagggcttccaccgccgcatcggagatcagccgggcgcaccagctggccatggagcgcggcgagaagctaaatttgctggaggagcgcgccgagcgcatggccaacactgctcaagatttcagcggcactgcgcatcaattaatgcttaaatataaagacaagaagtggtatcagttgtaaaatatctattttaggagccaattctaccacagttattgtaatattgcttttataacactttctactacattacgagtaaagtacacttatttaatttctgttttcaagtcgtcacgttatttacaaaaaccgaaaaccaacaaaaaaaaacaacaaaaaccgaaaattcacaaaaacaaaaaaactgaaagagaaaacccaaccaaaaaaaaactgtttttaataaaaatatatagaccaaaaaacaggcactgtggagtcttaatgtattcatgaatattgtgggttattaaagtatttttaatttgatttctttgtttcacatgttttatacgctcgaacaaagtgggtgctgctttcaatcgttctttatagtaacatcaactctgagtagactttagtatcagattcgaacataacagcagcacacgagtgaaaagtgttttctgttccccatttgaattatccgcgcagtgttgtgtcagtgctgaaaatcgccgcagagtcgcgaagtcaatttcaatccgatagtttagcagtgtgccacggtgaagtatcgtttctcgttcatacctatctgagcgtatcgttccacgatatcaggtggcagtgtttggttgaacctatcgggccctatcgatataagcaaaagcatttttgctggatctaccattttattttagttaataaaatacatatatttcctctctttttgttccgtttgtgcgcgtacaaaactagctgcgaactcgtgcaatatttcataaactgaatgggaaaacaacgataacgacgaaagaaaacgaaaacggatctgcgacgaaattttccccgttccgtttttttttctccaccagcagcagaagcagcagagcaaaagcagcgaatatatttgtaaaagagagccccaaccttgagaaaaaacaaccagcagggcaataattagttgaatttatcgtctgctggtaagaaatgaacccaaatgtgaacttagaccgtttgatttccgcgaggatccatcattttttcacccatttcgtccagtttcaaatgcgtgctaaatatgctaacgtgtgtgtgtgtgtgatgggtcttcgatggtgtgcgtgtctcgctgtgcgcttcaatgtgttggtctgcttctcacactctgcgttcgtgtgtgtgtgtatatgtgtgccttcgaaattttcttttgtgtaaaacatttgtaaggtgcaactgcagctgtgtgcgtgtgtgtgtatcgctttgactgccgttgttgtttttgttgttgtgcgtcatagcaatgagtgtgtgtgtgtgtgtaatatgcattccaacggggtaagaaagaagaggaagcagtacctgtcgccaataaatatcgtatatcgatgtctgtctgtgtttatttagaatttcccttcagcccgcccccgtgcaaaaggaaatattgctcctccttcacctccatcacctcaagtagggatcaagtgtaatcgataatgcagacatatcgattggtccgttgagaaacatcagaaaaacacgtaaagtgcaagctggaaaagaaaagcaaaacaaattccggagagcagaaagagaggtggaaaagaaagtgttgagaaagggatgacagcaaaaagaggctctggtgatattagttaaatgtcagctggtctgtaaatcgtcgcgacattttgtgttggggcaactattcaaaactttcccaaaaacactgtgaaacaactctagagaagataccactcatttttcttaaggttaaaatataaaacagtacacgattacattttctgggatccgcaaaactgttcgttttgtaataggtccctttgtagtattagagtaatatagttgtttagatgaagggtgttcaagtgtcagaatgataattagtaactcctagcgtttagttcttaacttaatatatacaaaacatataatgttcccaacccatgcagtttttcaagtgaacgcgtccaactgtttttgaagcgaagcgcttaggcggaggagcagctagccaggatggacaagatgcggatattgaaggaaagtcgccccgagataatcgtcggtggcaaatatcgggtgatcaggaagattggtaattcagccgtgcgattttatccccacaatattctctaatctctgaaaattattcacaggaagcggatcgtttggcgacatttacctgggcatgagcatccagagcggcgaagaagtggccatcaagatggagagcgcccacgcccgccatccgcagctgttgtacgaggccaagctgtaccgcattctgagcggcggcgttggattccctcgtatacgtcaccatggcaaggaaaagaacttcaacaccctggtcatggacctgctgggaccctcgctggaggatctgttcaatttctgtacgcgccatttcacaatcaaaacggttctgatgctcgtcgaccagatgatcggacgcttggagtacatccatctcaagtgcttcatccatcgcgacatcaagccggataacttcctaatgggcattggtcggcactgcaataagctgttcctgatcgatttcggtctggccaagaagttccgcgatccgcacacgcgccatcacatcgtttaccgcgaggacaagaacctcaccggcactgcccgctatgcctcgatcaatgcccatctgggcatcgagcagtcgcggcgtgacgacatggaatcgcttggatacgtgatgatgtacttcaatcgcggcgtactgccatggcaaggcatgaaggccaacaccaagcagcagaaatacgagaagatctccgaaaagaagatgtccacgcccatcgaggtcctctgcaagggctcgccggccgagttctccatgtatctgaactattgtcgtagcctgcgcttcgaggagcagccagattacatgtacctacgtcaattgttccggtgagtacgattaaatcatatattgcatacgaatcttaagattacacccgattgtttttgtgataatgtttgtggtgataatcattgtggaggctgtattcgatatgtgtttaggtcatagttttcttgttttttttttttaattcgaaatgatgtaaccccaactttctctttaatacagcatactgttcagaacgctgaaccatcagtatgactacatctacgactggacaatgctgaagcagaagacccatcagggtcaacccaatccagctatactcttggagcaattggacaaggacaaggagaagcagaacggcaagcccctgatcgcggactaagagctgcagcgcattcagacgaatggggggagtgcatcagagaaggagaacgtggatgcgtggatgtaaatgacgttgatgtgggcgaaaggcccggcaaggagcggagcaaatatgaaacagacgcaaccgtaaaattgagtaacaccagcggtcgtccgaatgtttcttaatattaatttaaattcaatactaaacaaataaggaaccacaaacaagcaagcaacggcatcatcagcagggcatataaaatgataccccagcaaatgtgattcac

SEQ ID NO: 23054 - DNA, 1661 bp, DROSOPHILA
tttggttgaacctatcgggccctatcgatataagcaaaagcatttttgctggatctaccattttattttagttaataaaatacatatatttcctctctttttgttccgtttgtgcgcgtacaaaactagctgcgaactcgtgcaatatttcataaactgaatgggaaaacaacgataacgacgaaagaaaacgaaaacggatctgcgacgaaattttccccgttccgtttttttttctccaccagcagcagaagcagcagagcaaaagcagcgaatatatttgtaaaagagagccccaaccttgagaaaaaacaaccagcagggcaataattagttgaatttatcgtctgctgtttttcaagtgaacgcgtccaactgtttttgaagcgaagcgcttaggcggaggagcagctagccaggatggacaagatgcggatattgaaggaaagtcgccccgagataatcgtcggtggcaaatatcgggtgatcaggaagattggaagcggatcgtttggcgacatttacctgggcatgagcatccagagcggcgaagaagtggccatcaagatggagagcgcccacgcccgccatccgcagctgttgtacgaggccaagctgtaccgcattctgagcggcggcgttggattccctcgtatacgtcaccatggcaaggaaaagaacttcaacaccctggtcatggacctgctgggaccctcgctggaggatctgttcaatttctgtacgcgccatttcacaatcaaaacggttctgatgctcgtcgaccagatgatcggacgcttggagtacatccatctcaagtgcttcatccatcgcgacatcaagccggataacttcctaatgggcattggtcggcactgcaataagctgttcctgatcgatttcggtctggccaagaagttccgcgatccgcacacgcgccatcacatcgtttaccgcgaggacaagaacctcaccggcactgcccgctatgcctcgatcaatgcccatctgggcatcgagcagtcgcggcgtgacgacatggaatcgcttggatacgtgatgatgtacttcaatcgcggcgtactgccatggcaaggcatgaaggccaacaccaagcagcagaaatacgagaagatctccgaaaagaagatgtccacgcccatcgaggtcctctgcaagggctcgccggccgagttctccatgtatctgaactattgtcgtagcctgcgcttcgaggagcagccagattacatgtacctacgtcaattgttccgcatactgttcagaacgctgaaccatcagtatgactacatctacgactggacaatgctgaagcagaagacccatcagggtcaacccaatccagctatactcttggagcaattggacaaggacaaggagaagcagaacggcaagcccctgatcgcggactaagagctgcagcgcattcagacgaatggggggagtgcatcagagaaggagaacgtggatgcgtggatgtaaatgacgttgatgtgggcgaaaggcccggcaaggagcggagcaaatatgaaacagacgcaaccgtaaaattgagtaacaccagcggtcgtccgaatgtttcttaatattaatttaaattcaatactaaacaaataaggaaccacaaacaagcaagcaac

SEQ ID NO: 23055 - protein, 337 aa, DROSOPHILA; identical to SEQ ID NO: 3132

SEQ ID NO: 23056 - DNA, 2504 bp, DROSOPHILA
ttgtatatatattgattataggatttgcataatctacactacccgaaaatcttcaaactcgatttacaacgatatttattctcccgtgaccagagaaagtccagtccaccagtggatatgaatggtggtttattgtttgtttttgaaaaccggtctaaagtcccccagcaccaaccaaattgttgattgcatcggaatcggaatttcaagagatttaaatgacgtgtcagcgatttgttgaggtcattaataagttgaaacaatagtattaagattcgaatatctactatccatttaaccacttacaagcaatctatgaaattacagaattaacgtgattataaatacctgccaggtgccgatgccaatcacgggcatcttctctccattgttgaacgttaagaacttggtgttgaccattttgtattgatttttgataacttgtacactaaaacagacttgagtaacagattaaatggaaaagatgcggcacaacctgttgcttcgaggattgaattgaaattaaacaagaagctacgacccagtcaccggcccacttatctcacccaatccaatgagattctgccttttgcaaagcgcggtcttactagtcgatatttgtttaacaaaacaatcgaatttaaaaataaatgtacttaccataaatggtttaaggctcgtttactataaaatatcggactaatttatttgcattttagttagatttaatattataacaatagaaaaatttgtagctcatatccaaatactgtataagtgtgtgtaagaaaaattcaattccgtttctaaatgattttaagcttttagagaacaactaatccaccactatggagaagttagtgaacgtgaattctgaaagttctgtagtctcactgaaaatgcatttgtcaattcgactggtggggctgccggtgtgctttagccagaggcgcctgtaaaagaacggcttgataattaaacgttgaatggaaaaaatcactcacatggactcaaaggaatgtcggtgtgcttgaatttcgcccttcaccgtattctcgttggtgtttttgcaccaaccccggactcccagcttttgagctcttcgcaaggtgtactaaaacatggtaattggattacagtaaagagatttcacatatacaataagaggtagcagaaaatccatagctcaaaggggttttgaagatcccatttcccagcaagctcttaccattcgaaatgaaacgcctgttggtgccagataactaattattgcgactatacgatttgtgaataccctaccttgcacaatgccgaacacttcgaattggcagctgaagaccggctcatcgcttctgtccgatgttactcttttttggaactctgtgttcgaaattcggttgggctcctcgctgccttttttggatggtgtacctttatctggtgtcgaagatggaagagttaccctcctacgttcaccctcagtctgcgtttcttgggaggtcattttacaactcgtatatttaacatatttggagcggaaactgtcaaaaatcgataggtcgatagggattgagggttttattttgggtcaccttgaatttcaatggctttaaaaacagtacattttaaatgaaatgacttgaacaaggtaaaacaaaaacaatagcaaaagttacgttttcttattgtcaacaaatgaacacttatgttgaaaattcgacagcaatcctagagcggtatttttagatctagcttttttagccttttttaaatcgtcggtcgacccgatcagtctggttcgggctatcggggcatgtaagggtcaccctgtgttcaaggcggttcgttggaaccagttccgaactgtctttgaacaaaacaaaatcacccagacaaaatagtgaattacaaatattacgcagattctacatcaacgcactatgcataccgtgtacgcgcttctgaagaacaagctgagcgatgtgcatcccctacacaacatcgatctgacgcgggatgtggcctacctaaaggcggtggtgaccaaagagatgcacttgcaattcgacgccagcgagttgggtgagtgaccctcgggattcaaatcgctgtccattgtctctattgtgtcaagtcatttgctgcgcacttgcagagatcatccaccacggacgcgtgctggaggacgcagacaccctcaaccgaacgctgcagcccaacgccgtgatccactgctttcagaagattaaacgttactcgccgtatgtgccgccagccgccgccgaaatcaacacgaagcatattcaagagctgttttcgttgacctcgcacctgcaaatcagcgttacctcgcggttcaacattctgcagaagatactcgctgagtatccggaatttaggcgaaatctgggcgcccaggcccttattcgcgactccgtactgttcaacatgctgcacgagccggaagtggtccaaaatctcgttaaagattatcccctcatctg

SEQ ID NO: 23057 - DNA, 336 bp, DROSOPHILA
atgacctcccaagaaacgcagactgagggtgaacgtaggagggtaactcttccatcttcgacaccagataaaggtacaccatccaaaaaaggcagcgaggagcccaaccgaatttcgaacacagagttccaaaaaagagtaacatcggacagaagcgatgagccggtcttcagctgccaattcgaagtgttcggcattgtgcaaggcgtttcatttcgaatgtacaccttgcgaagagctcaaaagctgggagtccggggttggtgcaaaaacaccaacgagaatacggtgaagggcgaaattcaagcacaccgacattcctttgagtccatgtga

SEQ ID NO: 23058 - protein, 111 aa, DROSOPHILA
MTSQETQTEGERRRVTLPSSTPDKGTPSKKGSEEPNRISNTEFQKRVTSDRSDEPVFSCQFEVFGIVQGVSFRMYTLRRAQKLGVRGWCKNTNENTVKGEIQAHRHSFESM

SEQ ID NO: 23059 - DNA, 3110 bp, DROSOPHILA
cgaatttacaactattttttgaaacaagaatcactcatgaaatatgttctatgaggcttgttagggaaatactaaattatattaagctaaatatacaaacagtgtatatgtgtaacttaagtgtatcaatcaccgcagcatttaaaataggcctgacgaataagcgatataaatcaatttaaaatgtagtatcttcgttaggaaatgaaaaaatatagttttcgcagcagaatgttgctaagatcatttcattatattctgctgaactggattttattattcctattcacagtttgcaaagcaaagaaagccgaaaatgatgtagtacaggaagtaatatactcaaattccattcgagccctgtctgaacttcgcgagattgagaattcctatatggagcatttaaacaactatgttagctttctgcaacaaaaaatcaaaactctcagaatgtatgatatatattttaattcctctcttaaaactagaattacactttaactttcacatagttttattaattctttaactccgaattatttggatcacaaggtggatcgatataaatatgtgtccaatcccctaaattcctttggacttttaaggcgggctcatcaagattggcccaagttgattgcttacttaaaggatcaaggaaatataaaaggtgtggattatatacaatgtttgcacgttttctcaatttcaagggaagctaaaagtacatttttgtattttatcacttaaatatgaaacaacaggctattggtttatttaaatattttacagttgacatcgaggaaatgaataagctaatcaatcgtacaccccacgcaaatgatatggaagaggccctaatgggaatggatagaatagaacacttctacgacctgaagtcatcggatatggcccagggtcttgtggcaggtcaacagctaaggtaagataacttagttttaacactattagataataatgataacaattctatagttcgcgaatgtcagcttccgactgcttggctttagcagactatatgtacaaacgatcagaatttagacgtgcggctgaatggtatcgaatagctttaagtgtcttcaccaaaccaaaaaataatattgcatttaagttctatgctccaaaacgaaaagagctcgaaaaaatgtttgtcataagtcggcttcaagaaggcaagttcaaagaagcaataatattggtgtttataaataattatttaccatcaggttccgttgaaaacttaactgactgtctgaaggaactttctcaagacccgaacaattcattggtgcatctaaggccaaggaaatcgcccactatgattgaacagggctgccagggaaagtttccaccaggacctcaactagtgtgtcgctataatagcaccaccactccatttatgcgaatagctcctctaaaggaggaggagatcagcagagacccacttatctggttatatcacgacgtgatctatgacagtgagatagctcagttgacgaatgtgacccgagaggagatgattctgggcaccaccacaaactatacgactccagatcgggtgaatcgtctctttcacattaaagtcaccgacgacgatggcggaaagttggacaaaacgttggtaaatcgtatggcagacatatctggcctggatgtgggcaataccaccacactggccagaatcaattatggacttggtggttatttccaagaacacagtgattacatggacattaagctttatccggcaagtaacctgattcatttaagtgtatattattcattatatcgctagatcatacacaactattaggaactgactgaggaaggtgatcgattaatgacattcttgttctacgtaagttcaaaaccaacactctatagaaaatgtactatttaaccaatttaacacttccagatgaccgatgttccagtgggtggcaccacaatctttcccggcgcccaacttgctattcagccaaagaagggatccgccctcttttggtacaacctccacaataatggtgacccaaatctgctgaccaggcacgccgtttgtcccacaattgtaggcagccgatggggttggtaatatctcagttcttaaaattaatatcacaataaaatattcattttttagtgctagtcaagagcatgttgaactacgagcagatgttcaagaagccctgctacaagtaaactataaaacttaaaaacatttcacttttctaaatctacacagatagcttttattgttgttttaagtgcaaatgatattgtgataagcttacgtaatatcttaagtggcattatgagctgaatcttttataagattcgcattggtaaagttaaaatacttcttaggttcatagctaatcgaataaaaatgctagccagcttatgatgagccacaatatgagccaaatggctggctggatcattataattataagtttcagttcgatggttattatctcctcaattaacatcttcctttccatttgcattcaatggcttactgggtggcacataaaaccaccaggcgcaagcaaaaaagaccacggatcccagtttgcagatcaacgccagtagccacatatatctgtaggaattatgggattatatacattaaattatagtactttatacttttatggaagtaagaacataccggctgatatagaaattatcgtagactagacaagctcctccggcgtccttgtcgcaggactcttgccacaaaatgcaggattcgtcgatcagggctccgaaaatcaatggagctggtatggtgcccagtagtcgcacttttatccactgcaaacccaacgcaaatgatcgctgatcatcctgaacgcatctgcaaacaagaagatatgcatatttgattattattaattaatttataaataataattgatacctcagtgtagccgacagcgcgggcatggtggcgagaaacgtgaagaccatcaggatgaagcagagcgccacgaagagcggcagggtctggcacgtggagtcgcactttcggttggtggcatctggccggaaatggggggcttccgaggacgggttgccatcgtccacaa

SEQ ID NO: 23060 - DNA, 963 bp, DROSOPHILA
atgtcagcttccgactgcttggctttagcagactatatgtacaaacgatcagaatttagacgtgcggctgaatggtatcgaatagctttaagtgtcttcaccaaaccaaaaaataatattgcatttaagttctatgctccaaaacgaaaagagctcgaaaaaatgtttgtcataagtcggcttcaagaaggcaagttcaaagaagcaataatattggtgtttataaataattatttaccatcaggttccgttgaaaacttaactgactgtctgaaggaactttctcaagacccgaacaattcattggtgcatctaaggccaaggaaatcgcccactatgattgaacagggctgccagggaaagtttccaccaggacctcaactagtgtgtcgctataatagcaccaccactccatttatgcgaatagctcctctaaaggaggaggagatcagcagagacccacttatctggttatatcacgacgtgatctatgacagtgagatagctcagttgacgaatgtgacccgagaggagatgattctgggcaccaccacaaactatacgactccagatcgggtgaatcgtctctttcacattaaagtcaccgacgacgatggcggaaagttggacaaaacgttggtaaatcgtatggcagacatatctggcctggatgtgggcaataccaccacactggccagaatcaattatggacttggtggttatttccaagaacacagtgattacatggacattaagctttatccggcaagtaacctgattcatttaagtatgaccgatgttccagtgggtggcaccacaatctttcccggcgcccaacttgctattcagccaaagaagggatccgccctcttttggtacaacctccacaataatggtgacccaaatctgctgaccaggcacgccgtttgtcccacaattgtaggcagccgatggggttggtaa

SEQ ID NO: 23061 - protein, 320 aa, DROSOPHILA
MSASDCLALADYMYKRSEFRRAAEWYRIALSVFTKPKNNIAFKFYAPKRKELEKMFVISRLQEGKFKEAIILVFINNYLPSGSVENLTDCLKELSQDPNNSLVHLRPRKSPTMIEQGCQGKFPPGPQLVCRYNSTTTPFMRIAPLKEEEISRDPLIWLYHDVIYDSEIAQLTNVTREEMILGTTTNYTTPDRVNRLFHIKVTDDDGGKLDKTLVNRMADISGLDVGNTTTLARINYGLGGYFQEHSDYMDIKLYPASNLIHLSMTDVPVGGTTIFPGAQLAIQPKKGSALFWYNLHNNGDPNLLTRHAVCPTIVGSRWGW

SEQ ID NO: 23062 - DNA, 3373 bp, DROSOPHILA
agccacgtgtctacctctcgctctaacccgagacccaccaacgtttattcgctctatatacatatctgtctaatctctctctctctctctctttctgctcgctcgtattttttgtacttacatctcaaatcatatcatatgtttttccaaagtattttaatcaaatgttattcttgctatgatcaccttaataattataatcgtgttctcgtgttttaattgtatcctatgtttatcactgtcaatcaatgtcacccacccaccaccactgcaacgacgcctccgtttctcgctgtgtactcgtatttgtgttgtaatcgaatactcgattattcgataacttgttaaaggaatattaaatgttaacacatataacttgcactgattaccgacatcaaattgtcatccaacgcttttgtatttgtcacatctcaattaaaaaaccctacctcttgtttgttatgcaccattaaaagaaccgattaacgacaaacgattcacgatcagcggacaacactgtaaattgatcaaactacagtgatcgcttgctagtgaggacgaattacactaatttttttaattttattttatttaaatacactcatgcttatgtatctttaatttttcttacctagaaaagctttgtgtcaaataagaaacgagttaaaaagactgattttctaattaaatggaaaagtaagtttttgatttcaatataatttcaacaccaacagctttaaaatcaacggcgtaaaacaagttttatttacatacatacttcaatgcttttaattaaaaaaaaaagttttgtttggtttgaaaaacaaattggttttatgaaacacattttttgtgattaattagaaaggcgttgaattctgtagaatggttgacaattgtttaaactcatgagatcaaaacatttttgttgggaataagaaaaaatgcatagaaatcgggatataaaatctaaagtgcactacaaacatataggctaaaaatgaaacttcacaacaacaaagtaaaaattagatttagttgattaactaactttaaaagttagccagcgccttcactgtacataaaagctcactgaaatttgtctttgtttgcacactagttttgctaacccttttgttgagtgtctctgaaaagtatgcaacactctcatcaccaacgcgcacaccaacacagattacacctacacaaccacacccactcggcacaaaaatagaacaacagagaaattgcaaaaaaaaaaacgaaaacaaaactcgaaaaagtaaccaaaccaacgaaatgtgaaagagatggccattcaatcatttagtgcatttatctctctgtctctctctctctctgtcttcctctctatctatctctctctatctctgactatgtgtgtgaatctctctatctctctctcccatgtctcccacaattattgtttatgtatattttgcaattgctcagatcaacggcagcggagttgcaactgcagcaccgcagcagcaacagcagcagcagcaacagttgcagcaatcacagcaacaacagcagcagcagctacagcagcaacagcagcagcagcaacaacaacagcagcagcagcaacaacaacaacaatcgttaggtggtgatcctggtgatcatgcaacatcgacgtcagcgggagcagcaacattggcgggatcctccatttacggtgcagatgatgcaggtgcgggtgttgctagtggcggtgttggtgttggtggtattagcagtgcgattagcggtggatttggtggtgcggctgagccgcaacagcagcaacaggtgtcgcaacagttgcatcaattacagcaactacagcagcaatcgcagcagcagcagcaatcgtttgaggcgtcttgtgatccatggggcggcgagtgcggcggtggtggtgctggcggcagcggcggcggcggtggtgcaagcggtggtggtggtgctagcggtgcaggtgcgcaacaacatcaatatcagcatccgcatccgtatccgcatccgcatccgtatccgcatcaaacatccgttatacagcaacagcagtcagtgacatcgtacgaatccctaaaaaagtccaaatcacaaggtgggagcacaacagagcactacagtaaacaacagctaacagcaaccactacaacaactacaacaacaacaatagcaaccaaatataacagcaagcaatacaagcaacaacaacagcaaaacaacaacctaaacagcaaccaaccaaataatcagattgcacctctagtcatgaaaaaaaaaaacaattcgcatatttttttttaccagtataccacgcacacacacacgaacacacactttaagtgcagttgaacttctctatcgcgaccaacgagtgtttttgacagagtagcatatatatgcgtatatgcgggcaatagtctgcaatgcaatggcagtttagaagttcgactgtgtctctgtctgtctctttctttttcgcgcacacacacggtcacaccgcatacgcacacaaccaagcaaacgcacacgcacgcacacacgcacacatgaatatggacagcagacgatgcacgttgcttgtggccccgccccctttctctgtatatgtgcgtgtctgtctgcgtattttggtgtgtatgtgtgtgtgcgtgttaaatttgaaatttttggaaaattattggtatattccgttttgattatatttatgtttcagtatatatatatatatacatttgtttcatggggtttttgtgagggggggcgatggctggagctgtctgtctctttttctcgctcgttcgctcgctcgctcgctcgctctctatttctctctctctctctctctctctgtctttctctagccctagaaaacaatctagttataacagtgcatatgaatatgttctctcgatctgtctcgctcgctcgttcgctctctgctcgctgtctcttttttccttactcttactatctcactttatcctttacctcttgctactgtctccaactatgtctgtctctttcgctctgtgacactttctctctctatattctctctcggtatttgttcttgcatttgaaaccgaataactaaacgaagaataagacttaccggatttctataaagatacatttggaaaagagtacaacaagatctgattttgtattggcaaaaaaaaaatatttaacttacgcatagtcctcacacacatgcacactaacacacccacacacacatccatacaataacgcctagctaagcacacatgcaagcaactttcactcgtactttttttttgagattttttttttcttttacctagtcaacgcgcctgctgctttcaaaatt

SEQ ID NO: 23063 - DNA, 921 bp, DROSOPHILA
atgaaacttcacaacaacaaaatcaacggcagcggagttgcaactgcagcaccgcagcagcaacagcagcagcagcaacagttgcagcaatcacagcaacaacagcagcagcagctacagcagcaacagcagcagcagcaacaacaacagcagcagcagcaacaacaacaacaatcgttaggtggtgatcctggtgatcatgcaacatcgacgtcagcgggagcagcaacattggcgggatcctccatttacggtgcagatgatgcaggtgcgggtgttgctagtggcggtgttggtgttggtggtattagcagtgcgattagcggtggatttggtggtgcggctgagccgcaacagcagcaacaggtgtcgcaacagttgcatcaattacagcaactacagcagcaatcgcagcagcagcagcaatcgtttgaggcgtcttgtgatccatggggcggcgagtgcggcggtggtggtgctggcggcagcggcggcggcggtggtgcaagcggtggtggtggtgctagcggtgcaggtgcgcaacaacatcaatatcagcatccgcatccgtatccgcatccgcatccgtatccgcatcaaacatccgttatacagcaacagcagtcagtgacatcgtacgaatccctaaaaaagtccaaatcacaaggtgggagcacaacagagcactacagtaaacaacagctaacagcaaccactacaacaactacaacaacaacaatagcaaccaaatataacagcaagcaatacaagcaacaacaacagcaaaacaacaacctaaacagcaaccaaccaaataatcagattgcacctctagtcatgaaaaaaaaaaacaattcgcatatttttttttaccagtataccacgcacacacacacgaacacacactttaagtgcagttga

SEQ ID NO: 23064 - protein, 306 aa, DROSOPHILA
MKLHNNKINGSGVATAAPQQQQQQQQQLQQSQQQQQQQLQQQQQQQQQQQQQQQQQQQSLGGDPGDHATSTSAGAATLAGSSIYGADDAGAGVASGGVGVGGISSAISGGFGGAAEPQQQQQVSQQLHQLQQLQQQSQQQQQSFEASCDPWGGECGGGGAGGSGGGGGASGGGGASGAGAQQHQYQHPHPYPHPHPYPHQTSVIQQQQSVTSYESLKKSKSQGGSTTEHYSKQQLTATTTTTTTTTIATKYNSKQYKQQQQQNNNLNSNQPNNQIAPLVMKKKNNSHIFFYQYTTHTHTNTHFKCS

SEQ ID NO: 23065 - DNA, 3241 bp, DROSOPHILA
gacagcccgacaggtttgctgatagccactgacgtggctgctcgtggcctggacataccgaatgtggagcatgtgattcactaccaagtgccgcgcactagtgagaactacgtacaccgatcgggacgcactgcacgagcgaataagcatggcataacagtcatgtttatggagccgggcgaggtcaagagctatgtgaagctgtacaaaacattggagagaagtgagtgagagacttctaacaggaagacagacgttctacatattcgtttactttttagctgaggatctgccgcttttccccattttggagcgttttatgggagctgttcgcgagcgtgtgaatctggcgcgagatctggacaaggaggagctgaagctgaagcgcgtgcagagtgagcgcggctggatgaagaagcacgctgaggaaatggacatgatcattgatggctacaatgacgaatcgtaagttttttttaacaagatctcattaaaatgaagtctatgactaactcttacttttgcagtggcagtgaccaggatgaggatccatttgtgattgagcgacgtcgcaatcggctgcgcgtggagacagttagagcgcagctcaatgctctcctggcccaacccatcttccccagaggcttcagcttcaagtatcccaacagcgaggcggcccaattagccacgagtcatactcaaagtgccgtggagaccatgaaggcggccatagaggaccagaagcaggccaaaaaagatcgcaacaagcgaaaacggaatgcctaatctaacttaaagctgttttattgaataagagatacaaagctatagccttggatgtttccatcaatgctttgaaacaaagtatcgcacacctccatcggtcaatgagcgagcgtgcttggccaatagtgtggaaacggacaagtttggggtggtaaagcacctagttataaaaccgaaaatcaaaaaaacaatctagatatgtgttcatcattacttactctatgtacggttccatttcctccatcgtccatctctttttagtcttaaatagcgcccgcatgcgatcgcttatattggtgggcagtaactcctctgccagggagcgtatgcaaggctgcgctccctccttgtcgcaaatgcccagacctcgtaggtactttaagtcgcaggacatgccctcgggcagtacctcctgccaggtgcgcatgaactcctcgttgcgaaagcgcaaacccggctgaagaatgttctgtgccacaatgcgggagaccaaggactcctggtactcaaacttgcccgggcaacgttcactgggaatggtatagatatcaaacagcccagccacaacatcctctggagctatgcccttcagtgcattgatggtctcctcccgttccacttcgtccaaggcccaggagttttcgcttatcaaacccagcatcatgttaataatgcgatactcgtattcgtactccatcacgcgcattcgcccgtccagttctatggctcgatattggttcaatccctccatgaactgaccgcggctgcactgcaccgtgtccaggagctgcgaaaaggtaaagagtagcttctgctccacgcagaactcgttctccggccccgaatatcgagtcagctgcagtagttcacccagcttgcgaaagcgcggctttatctcgcggcactcgaagtactcgtggaacaccttgagcaccggccgctgctccagagttcgcggcacttccagttcatcctccgtgctgtcattgaggctgcgctccagggaggcgttggcgttgccagtgcgcggactcttcagcggcgaggtgctggtggcggcggcaaacttgaggtccggtaccagcaaaaggctattggatatttccgcgcccttcacgtcgtacgttcgctcatcggtgcacagcaccagcttctcgttctggccacccttgaaatatagcgtctggccgtcgcggatttgtccaagcatgtgcccatcgagctccagaaggcgcagattgtccgaatccacgtccgccgagggaaagtacagagcctgggtgagttgggtcaactggcgctcgtccagtttcgcatgcttcacaatggccttcacatcctccggcgtgcgaacgtagctatggcgggtggttgggtaacattataactcctacgcaggcataccaaaggcactcacagctgggcagcagactcatcaacctccatggattccatgttcgctgcatgtaaacaaaacaaaaaattaaccaaaacaatgagcgggaaaaagtagtgggaccaaagcacagcaatgttgctttcgttgagggtattcaatggcctttcaatatgtaagcttaatgtgcttggaaaacattacagcattaatccgcacaccctgcaagggcacactcaccgctcagctgatcagttatttaacggtcgtagcctcggcaagaacgtttcttttttgagcggagatttcgcgagcacgcgtcttgttttccgccgttcgccgtgcacttggacgcgcactttagaaagcgttgactgcgccaaaggtcattgctgggcaagagaagcgtccaatcgccgctggtggtgacgcttgtggaaaaatcaattcggaccagtgacggacgtcgaacttccagttctctgacaagcggaatccagtcaacaacaacatgcccgtgggaacgtttgacgcctgggatgcggccgtgctgatcaccatcctggtcatatcggctctgattggcatctactaccggtatacaggcggcaagcaaaagaccacacaggagtatctgatggcggaccagagcatgaccacttttccggtctccttcagcctgatggcaagcttcatgtccgccatctcactgatgggcgtctccaacgagtcctacgaatttggtaccatcttctgtgtgatcaacattgcctacgtgctgagtacgcccattgccgcgtacttcttccttcctgttttctacaggatgcggacgaccagtgtgtacgagtatctggagcggcgctttggccaggccacccggctgtccgcctccctggccttcaccgtgcaaatggtgctttacatgggcattgcactctatgcaccagcgctcgctttagaagctgtaaccggcattcatcggtcaatggccatcgtggtcattggactggtgtgcaccttctattcgacacttggcggcctgaaggcggtgctcat

SEQ ID NO: 23066 - DNA, 1182 bp, DROSOPHILA
atggaatccatggaggttgatgagtctgctgcccagctctacgttcgcacgccggaggatgtgaaggccattgtgaagcatgcgaaactggacgagcgccagttgacccaactcacccaggctctgtactttccctcggcggacgtggattcggacaatctgcgccttctggagctcgatgggcacatgcttggacaaatccgcgacggccagacgctatatttcaagggtggccagaacgagaagctggtgctgtgcaccgatgagcgaacgtacgacgtgaagggcgcggaaatatccaatagccttttgctggtaccggacctcaagtttgccgccgccaccagcacctcgccgctgaagagtccgcgcactggcaacgccaacgcctccctggagcgcagcctcaatgacagcacggaggatgaactggaagtgccgcgaactctggagcagcggccggtgctcaaggtgttccacgagtacttcgagtgccgcgagataaagccgcgctttcgcaagctgggtgaactactgcagctgactcgatattcggggccggagaacgagttctgcgtggagcagaagctactctttaccttttcgcagctcctggacacggtgcagtgcagccgcggtcagttcatggagggattgaaccaatatcgagccatagaactggacgggcgaatgcgcgtgatggagtacgaatacgagtatcgcattattaacatgatgctgggtttgataagcgaaaactcctgggccttggacgaagtggaacgggaggagaccatcaatgcactgaagggcatagctccagaggatgttgtggctgggctgtttgatatctataccattcccagtgaacgttgcccgggcaagtttgagtaccaggagtccttggtctcccgcattgtggcacagaacattcttcagccgggtttgcgctttcgcaacgaggagttcatgcgcacctggcaggaggtactgcccgagggcatgtcctgcgacttaaagtacctacgaggtctgggcatttgcgacaaggagggagcgcagccttgcatacgctccctggcagaggagttactgcccaccaatataagcgatcgcatgcgggcgctatttaagactaaaaagagatggacgatggaggaaatggaaccgtacatagagtaa

SEQ ID NO: 23067 - protein, 393 aa, DROSOPHILA
MESMEVDESAAQLYVRTPEDVKAIVKHAKLDERQLTQLTQALYFPSADVDSDNLRLLELDGHMLGQIRDGQTLYFKGGQNEKLVLCTDERTYDVKGAEISNSLLLVPDLKFAAATSTSPLKSPRTGNANASLERSLNDSTEDELEVPRTLEQRPVLKVFHEYFECREIKPRFRKLGELLQLTRYSGPENEFCVEQKLLFTFSQLLDTVQCSRGQFMEGLNQYRAIELDGRMRVMEYEYEYRIINMMLGLISENSWALDEVEREETINALKGIAPEDVVAGLFDIYTIPSERCPGKFEYQESLVSRIVAQNILQPGLRFRNEEFMRTWQEVLPEGMSCDLKYLRGLGICDKEGAQPCIRSLAEELLPTNISDRMRALFKTKKRWTMEEMEPYIE

SEQ ID NO: 23068 - DNA, 6405 bp, DROSOPHILA
tgttcgtgtcgcacgccaggcgtcgctcaaaaaaaaaataataaaataaaaaaaaaagtggcaaagaagccaagaagcggcgttggcaaaaactttccaactcgcacggacacttcaagttttttttttttttttttggcataaacttagaattccgacaggtttcgcacgccagttaacaaaagcaaaaggggaaatccccaagtgacgggtttttatatacatatatatacaaatgttgcagaagacttgacaattttggagtggcattatctgccaatctagtgatattgcaactaagtcttagttttaagttctagagagttgttcttagagtgtgtaccctttaaagattacacgcagatatactttctgaagagttcagtaattatttttaaagtagcagttatcttagatataaagttcaagagcttattcaccagacaaaggacaatcgaagcatagcaatttagcttagatactgtgttaaggcacgcaatttgtggcaactttgaattgggtttttttttttgggtgttgcaagaggtatcttaaatagcgtgctggattgcaaattagcgacaatcggtagctttgcgttgccataaatcaactcaccaatcgatcattaccctatctccatcgccatcaaagtgaagagagacccgtggcgaagtgctccatttggcggtggtcaccagtccaggcaggatgtccttcgcggatgatagctatagctttggtcgctgctacgagtatcagcccgatgattgcaaatggtcagcctagcaggagatcccttatatattgcatatacgtagtaccaaagttgtcagtgactaaatccgtaacagattgttgtaagatctaaagaaatctaaagcgagctttatgtctcaaggctattttatctcctatttacactaggagggtcagtgattagttaaatgcatttgattgtgtttatttaaccttcatcattttggtacttgtctcaattatttcaggcaggctacaggacctagaccagtggccacagccgccgtattggccacaaacagggaatcatccagcagcaccgagggccgcgagtccgccgttactatggagagaaacgatgcggacattaactttcaacgggtctcaatttcgggtgaggacaccagtggcgtaccgctcgaggatttggagcgggcctcgaccctgctgatcgaggcactgcgcctgcgtagccactacatggccatgtcggatcaatcgtttccctcgaccacggctcgattcctcaagacagtgaagctcaaggatcgcatcaacaatctgcccgtcaaggaggtgtcgggtgagttcttgtattccatcaatccaatcccgtattcccataaggaagagtgcaaagctatcttctggtcttcccttgtacagtggtatcttcaacttatgcatggactgggttggttttgtggtctaaacttaaacgctactttggtgtatttaattcgctgtattttataaaatcgacccagcccatcgcaaatttgtaaatatgtatgaaataatgtgcaataatgtacaattgcccctaagtgttgtgatgcacccaattatgaatattattaatatatggcaattaattcacttgcgagtgaataatgtataatacaagttcgtattagcgggtgttttgtgtgaactgtacttgccggcgttgccaactcatttaattgcagaggttagctcgtgtgtccgtctctttctcgcctccgccttagccgcctcgctccgtttcgttttcatgtcctccgtttttttatttagagcctttaacgagcaactgtgtacatactgtgtatatgtttgagcctttttagccccctttttttatttcaatttgttgatttattatcgactatttatttctcttctcgtatttttcattatttcttatagacatcattcgcaaaatgagtgtagcgaacatacaaggtaattcgtgtgcacacccgattttcctgccttcccgctttccgcctatccaactattccaccacgatcaacaagaacaactcctccttctgtttttctgcctgaaatttgatttccgttgagcactgctttatcttgttttgtgttcttaatggttacttcacgctcctaacctcaaaatagagatagaaacgctgctttcaacgcatagagtgtggccagcttttggttattcagtgtgattgtaattaaaaaacaaatacatatgttttctgaatgtgttaatgaccaagcttaaatctataataataatttatgttacctgttccccagttcgcataatagtttataagattaattgctgcatccgatttgtacaatcgtgcaaaggttactaaattggccgtcctaaccttcagttgtctgcctctcccgctgcattaaacacaatgctggccacactaatctctagctatttcgcccgctataaaaactacactttgcagaattgaactttctgtcaaacactcgcatgtacatatgtattcattgaccgtttattttttcacttccactgtgtttctgcatatgttacttgcgtgttctatatatttgccaccacaaaagaacaacaacaacacgccccagctaaaatcataaacgatataaaagcttaaactctcaccgttcctcacttactttttggtcctttgaaagggaaaagccttgtacaaaaggaaagactcaactactccactttgaaagcttttgtagcgcacgagtggaactcagatgtattttctagtatcctgttgtcctttaaattaatagggattaatttaagatatcaaatcgtaatttaattttgcttcaaaaactaaaaagaaaattcgaagctagaatatttaaaaaggtgtactgatactgtacggaggtccactctaaagcacgtcgtacacaccaaatacttactgacaataacactcgcacaaacacctgagtgtagagtgttgtctttgccactaactgtaccaattaccattgctgctgcgatcgccttaaaaactaaaacaatttctatttttgaatttgaatttaacacaaacacacacgtctcaacttgcttcgaaactgttaagaatctgcagatgtccatttgagacattcgccaatgaagattacgaatccgtggaacgtcgagtttcccaatgacgaagatttcaagattaagcccctcaacggagtgtttcacatttacgagaatgatgtaagtatctagctaatacataagaataccacgaatccttacacactcatgataatattccaggacgaaagcagtgagatcaaatacgaatatccagatatgagccaattcgtaaacgacatgcaggtcatgtgcaatatgattgccgatgggccattgtaagtatattttcagcaatgtatcaaatcgattaagatatagaaataatgtccaatgctcgactttaataggaaatccttctgctatcgacgtctctgttatctgtcgtccaagtatcagatgcacgtgctcctcaacgagctgcgtgagctggctgcccagaaggcggtgccgcatcgcgatttctacaacacccgcaaggtggacacccacatccatgccgcatcgtgcatgaaccaaaagcatctgctgcgcttcattaaaaagacgctgaagaacaacgccaacgaggtggtcaccgtcaccaatggccagcaaatgacactggcccaggtgttccagtcgatgaacctgaccacctacgacctgaccgtcgacatgttggacgtccatgccgatcgcaacacgttccatcgcttcgacaagtttaactccaagtacaatcccatcggggagtcgcggctcagggaagtcttcctgaagacggacaactatctgaatggcaaatactttgcacagatcataaaggtggttatcaattcacaactgaatacgattataaactaattcttccgtttttcttgccaggaagtggccttcgatctggaggagtccaagtaccagaacgccgagctgcgtctctccatctatggcaagtcgccggatgagtggtacaaactggccaagtgggccatcgacaatgatgtgtacagctcgaacattcgctggctgatccagataccccgtctcttcgacatcttcaagtcgaacaagatgatgaagtcattccaggagatcttgaacaacatattcctgccgctcttcgaggcgacagcccgacccagtaagcatcccgagttgcatcgctttctgcagtacgtgatcggattcgattcggtggacgatgagtccaagccggagaatccgctcttcgacaacgatgtgccacgtccggaggagtggacctacgaggagaatccgccctatgcctactatatctactatatgtacgccaacatgacggtgctgaacaagtttagacagtgcgtagaagtatattgatatgtatatatatcattgattaacccactgttacctttgatacatcagatctcgcaatatgaacacctttgtgctgcggccccattgcggcgaggctggacccgtgcagcatctggtttgcggcttcctcatggccgagaacatctcccacggcctcctgttgcgcaaagtgcccgtgctgcagtatctgtattatctgacccagattggcatcgccatgtcgccgctgtcgaacaactccctgttcctcaactatcatcgcaatccgctgccagagtatttggcccgtggcctcatcatttccctctccacggatgatcccttgcaattccacttcaccaaggtgggctagacaatatatgctttaatattcagcattaaattaacccatgtccgcttttcaggaacccctcatggaggagtacagcattgcggcacaggtgtggaagctcagctcatgcgacatgtgcgagctggccaggaacagtgtgatgatgagcggattcccacatgccgtgagttccaagcatgctttctgctttatgttcggacaaatgattccaattccgatttcatccacagatcaaacagcagtggctgggacccatctattacgaggacggtatcatgggcaacgacatcacgcgcaccaatgtgccagagatccgtgtggcctatcgctatgagacactgctggacgagctgtccaacatcttcaaggtgaaccagacgtgctccattgcagacatgaacgccacatagtctggtccatgcggtacatctgctccatcgcgttgttgtggcttcctatgctaacttaatgcaaattacgcagatatatacgctagttatatacataatttaaatgtttctgtactaaccaaaatgtaaacgcggcagaccaaaacctttaaatatacaaaacttgtacacgaaacttccattcattcaacttttatttaaaaataatcataaggtaaataatatataaatataaataataatatatttcgagctatgggatctaaaattgtagttttggctaaccttttgggttcaaaagtaaaaatagtggatataagttaaaaactcaagaagagtaatattaaaatttcaatgtttgaaatttagacctcaaatatttcaaaatcccgactttaaatggattaaaattattgcaagctaaaaaaataactaagtggaattgtaattaaatttacaattttaaataataacgttgctagattaaaaaaaaaaaaacaatgtaatgcaatgcaatatgtatttgatattttagagtggcccttttgagctgcagtatattttgtggtatattcgcctgcctgccggacagtatattataaacgtaacccgcggcggtcacacttaactgtacgaattttttgatattccaatgcaggcgcacaaagaaaatgcagaaaagctgatagaataaaggaaaagccgactgactgattgccaactagccgagcacagttagctaaggtcttttccgaccgggaaaagcgagccaatcgttgatttcggggcggcgtcccccccgcagagcgagacagcaagtgtggcgagggagtaggagagacggaagaagaagacgataaggaggaggagcaggatctggtggataaatatacatatatcaaaagacagaatgaccacccagcggacgcagacgcaggcgaggaatcccggcaactccgattccgactatgagacactgatgcagcgtcttcacatcggtgggggaggtggtgctggtgttggaggagggggcggcagtggtggccctggagacgggggcgtggccatgcgaagctaccagcgctcaccgggcgccattgagaactacctgcaggaaagtcagcagcaacagcagcaacatcagatgcagcaaatgcagcaactccatc

SEQ ID NO: 23069 - DNA, 2250 bp, DROSOPHILA
atttcaggcaggctacaggacctagaccagtggccacagccgccgtattggccacaaacagggaatcatccagcagcaccgagggccgcgagtccgccgttactatggagagaaacgatgcggacattaactttcaacgggtctcaatttcgggtgaggacaccagtggcgtaccgctcgaggatttggagcgggcctcgaccctgctgatcgaggcactgcgcctgcgtagccactacatggccatgtcggatcaatcgtttccctcgaccacggctcgattcctcaagacagtgaagctcaaggatcgcatcaacaatctgcccgtcaaggaggtgtcgggtgagttcttgtattccatcaatccaatcccgtattcccataaggaagagtgcaaagctatcttctggtcttcccttgtacagtggtatcttcaacttatgcatggactgggttggttttgtggtctaaacttaaacgctactttggacgaaagcagtgagatcaaatacgaatatccagatatgagccaattcgtaaacgacatgcaggtcatgtgcaatatgattgccgatgggccattgaaatccttctgctatcgacgtctctgttatctgtcgtccaagtatcagatgcacgtgctcctcaacgagctgcgtgagctggctgcccagaaggcggtgccgcatcgcgatttctacaacacccgcaaggtggacacccacatccatgccgcatcgtgcatgaaccaaaagcatctgctgcgcttcattaaaaagacgctgaagaacaacgccaacgaggtggtcaccgtcaccaatggccagcaaatgacactggcccaggtgttccagtcgatgaacctgaccacctacgacctgaccgtcgacatgttggacgtccatgccgatcgcaacacgttccatcgcttcgacaagtttaactccaagtacaatcccatcggggagtcgcggctcagggaagtcttcctgaagacggacaactatctgaatggcaaatactttgcacagatcataaaggaagtggccttcgatctggaggagtccaagtaccagaacgccgagctgcgtctctccatctatggcaagtcgccggatgagtggtacaaactggccaagtgggccatcgacaatgatgtgtacagctcgaacattcgctggctgatccagataccccgtctcttcgacatcttcaagtcgaacaagatgatgaagtcattccaggagatcttgaacaacatattcctgccgctcttcgaggcgacagcccgacccagtaagcatcccgagttgcatcgctttctgcagtacgtgatcggattcgattcggtggacgatgagtccaagccggagaatccgctcttcgacaacgatgtgccacgtccggaggagtggacctacgaggagaatccgccctatgcctactatatctactatatgtacgccaacatgacggtgctgaacaagtttagacaatctcgcaatatgaacacctttgtgctgcggccccattgcggcgaggctggacccgtgcagcatctggtttgcggcttcctcatggccgagaacatctcccacggcctcctgttgcgcaaagtgcccgtgctgcagtatctgtattatctgacccagattggcatcgccatgtcgccgctgtcgaacaactccctgttcctcaactatcatcgcaatccgctgccagagtatttggcccgtggcctcatcatttccctctccacggatgatcccttgcaattccacttcaccaaggaacccctcatggaggagtacagcattgcggcacaggtgtggaagctcagctcatgcgacatgtgcgagctggccaggaacagtgtgatgatgagcggattcccacatgccatcaaacagcagtggctgggacccatctattacgaggacggtatcatgggcaacgacatcacgcgcaccaatgtgccagagatccgtgtggcctatcgctatgagacactgctggacgagctgtccaacatcttcaaggtgaaccagacgtgctccattgcagacatgaacgccacatagtctggtccatgcggtacatctgctccatcgcgttgttgtggcttcctatgctaacttaatgcaaattacgcagatatatacgctagttatatacataatttaaatgtttctgtactaaccaaaatgtaaacgcggcagaccaaaacctttaaatatacaaaacttgtac

SEQ ID NO: 23070 - protein, 658 aa, DROSOPHILA
MERNDADINFQRVSISGEDTSGVPLEDLERASTLLIEALRLRSHYMAMSDQSFPSTTARFLKTVKLKDRINNLPVKEVSGEFLYSINPIPYSHKEECKAIFWSSLVQWYLQLMHGLGWFCGLNLNATLDESSEIKYEYPDMSQFVNDMQVMCNMIADGPLKSFCYRRLCYLSSKYQMHVLLNELRELAAQKAVPHRDFYNTRKVDTHIHAASCMNQKHLLRFIKKTLKNNANEVVTVTNGQQMTLAQVFQSMNLTTYDLTVDMLDVHADRNTFHRFDKFNSKYNPIGESRLREVFLKTDNYLNGKYFAQIIKEVAFDLEESKYQNAELRLSIYGKSPDEWYKLAKWAIDNDVYSSNIRWLIQIPRLFDIFKSNKMMKSFQEILNNIFLPLFEATARPSKHPELHRFLQYVIGFDSVDDESKPENPLFDNDVPRPEEWTYEENPPYAYYIYYMYANMTVLNKFRQSRNMNTFVLRPHCGEAGPVQHLVCGFLMAENISHGLLLRKVPVLQYLYYLTQIGIAMSPLSNNSLFLNYHRNPLPEYLARGLIISLSTDDPLQFHFTKEPLMEEYSIAAQVWKLSSCDMCELARNSVMMSGFPHAIKQQWLGPIYYEDGIMGNDITRTNVPEIRVAYRYETLLDELSNIFKVNQTCSIADMNAT

SEQ ID NO: 23071 - DNA, 5455 bp, DROSOPHILA
gtgtgtgggtgtgagtgcaagtgcgcagttgtgtgtgtgtgttcggacagcctctctttttaaaaacgcataaatgttgattacagtaaattgacaatttgttgttgttgctatctcgctttttgggtttatgtttttgcacgtgtctgattggaatcctgtaccggctccttttagacttgttaaataacgaaacctatgtacaatcatttttttaatcattaatttgctatcgaataatactaaagaaataaaatttattttaatttgcatgcaatttttttttattataagtcttattgtgataaaagtttttgggaaacacatggttatgatgttaaaaagaacataaaaccatattaataagtgctaatatgcagttcaaatatcgctttataaagtgctgacataaatgaccaaatttctcgagaattttagatgtatttaccttaggtatgaagttaggttacatctgatgaatattaaaaatgcaaagcattggttttaagcaacgaaaacaaagatcaaagtcgtcgattaaataaatcccgactaaatttattgcttattcccgggaacttacactttttgttacttctctttcgtgtttctttcaactggatttgtcccgccaattttccaatcaaaatttctgacagaaaaaagctaagcgctccaaaaccttgggttgtagcgtgccgaagagctgattgctatgaaacactgtcctatttgacagccgctaagcgctagagttgtcaccgaaaatgcgtttttactagtgcgaacaataaaattacctgcgcaaaaatggaaaaatgggataaaaaacaagatgagtagcaaagaaaatatttaaagatatatttgtactgaaattaaactgagaaggaggtgcaaacgtgttgcaaaaaaattgaattcacatctaggcaccctagcaaccctgtcattttgacattgccgctcacacgcacgccacacagacgcacgttagtcacagcaacgcacacacacactaccaaacggctacattttttttcgagtgtgttcgacattcataatttttgtggtggagctgcctgcaaaatcgaattttatcagtttgccaacgaagttatcggccataactgcaaataaagttcagcaataacttggcgctgttacgatgtgagtttgtgttttatcgaaagttgcatactttatctaaaaaccattgtttttgtccaaaaatgttgtaaatgcccgaaaaaataccaaagtgagaacaacaacaacaacagcagcaaaaaaaaagcaggagcagcagcagcagaagaagcagaggcagcagataaaatttaatataatatcgaagaagagcaagaaaaaagccgtaaaagttgataaatcgaatatatatgtgtgtgtgtgtgaaaaataataattgcggcgttcgcaccaagtattcgccgtttttttctattaacttaaattcgccaaaaaagcggcgtttgcttttcttcttttcttgactcgccctctttgtctcacccatccgcatattctcttttcgcctttgtctttttcgtgcgcgttgtctgcattttgtctgtgtgcgtgggtgcgtgactcgctgtgtctgtgtgtgtgcgtatgcaagcgaaattgttgcttgtaaaaaagaaaaatcttatttggttttttttttgtagtttaattgccaacattattgatttttcaagcggttcaccccgtttctccccctccgcattcctcctgtccaatctgcttcttcttcctctgcggaactacgtgcatttgtcacccaaaagggaaatcaataagttggtaaaacagcgaaacgccgcacattatggttaaattattgctgttttcgcgttaataacgcaatttcttttgtttgcttcgagtgtttttcgttgctgttgttgttgctttcgcaatacaatttctggaaattttggggcattcatttattgccttttgtttctggtttatctgcgtctttctttccccttctcctctttattttacttgattttccgtgtgtctgggaaatgtaaacagttaaaggagccgcaaggtcacgctaaaggagttggcaatagtgggtgggctttgacttacacaagcagaaatttattttgaacttcgcaaaaagtgtaacggaaataaatccagaaaatattgaaaatattggtttacaatatagtctagatatccagaatcaagttaataactttgaattccgttcatatacttcaatataaatattattaagtactacaatttgaaaacatctttaaatatacaacatattttgaattagtttatttttttttttagccacatagagacatctttgtggcatgctaaattctgtagtaaaactttcttggggaaagtgaaagccacgtatcagaccaaaatccacccaaccctgcacacacgcatccccataaagaacgaccttgagctgcaaaaaggaaaattctctttgacttgccacgctcttccccaagaaaaccaagtgaaactccaatttactaatgctactatttcaccgatacatgtagttgagcccttatttaaattagtaattagtttaatttcacagttgaaaccacgactgtaaacattagggatactaatttatagtcttaattaacgttgagtggatagtggatgataccgaggaactacttaattggttaacttcactccgatctcgtttgcagctcaacgagaaggtccagactcaacccgcgtttccagttcaccgcgtaaaaggaaccagctaaacgatgtccagcctgccacgtcgcatcatcaaggagactcaacgtttgatgcaggagccagtgcctgggatcaatgccattcccgatgagaacaatgcccgttacttccatgtgatcgtgaccggaccgaacgattcgcccttcgagggcggcgtgttcaagctggagctgttcctaccggaggactatccaatgtcagcgcccaaagtgcgcttcatcacgaagatctaccatccgaacatcgatcgtttgggccgcatttgcctcgacgtgctgaaggacaagtggagtccagccctgcagatccggaccatattgctatccattcaggcactgctcagtgcacccaatcccgacgatccgctggccaacgatgtggctgagttgtggaaggtcaacgaggcggaggccattcgcaatgcccgcgagtggacccagaaatatgccgtcgaagactgaacgcccgaggtcaggaggaaagtcagaaagcggatccgtcagttgtatcggcgtttttccagaaagtgggtgcgtgacatgaacgggcgggtgggtaaattgaatactttaaaagcaaccagaaaaacctaaaacatacgaaagaaaacataaaataagaaaaaagtaaggaagcaaacataaaaaaaaacgatttaagaacacatttttttttcgaaccttctggggcgggatatacatataaaatattaatatatatatttttttcaaccaatcgatcggggcgatcggcgaaatggaggagagatagcgaaagcattctttatgtaagacgtatacatgtatccgaaacaaactaaaaacgaaaaaaaaaaaaaaaaaaaaaaacagtaattggttttagtcgtttctattgatttgttcgagggttctggtgtctatatacatatagccgtatataattctatgtgtaactgaaataaccaacccataaccattaacacatgtagcatcagatatgataaatcaattggaaaggcaaacaagaagggattttgatttcctttaactcgtcatttgaaaactcggcttaaatgtcaattcaaaatagagaattttgattgtatcattttcagtgtttcagaaaatttaagatgtgatcgtccaacttgtagactttacttttcttaactaagagttcaccatttcgattgatacttgagctttgcctgggttgtgtcagagtccctttgataaacgataaatagtttttactcgaaaacaattttttttaaccaaacaatgaagcctttaagctattagtaatttttgaaaaaaaaaaaaataaaaaatatatatataaaaaatatacaaaaatatgatacatgatcaaaatacaatgaatgcatacactatatatttatacaaaaaaaatacaaaaagaaaaacaaaagtagtggcttgattgcgtgaaaatttcaagtgcagttctcaacaaaaattgtgtacagtaattaaatgtttgtcaccgaaatcactaaaggataatccaaaaaacaatagcaaccgaaaagcaaccataaatcaaagagtaagcgaaaataaaaattcagttttctttaattttaattaatttttttctaagaaaaataaataaaaacgaaaaattcaaataaaaattataaaaaataaaccgagttgtgttttatttaaatagttaagtggtaatataactgaatggtaagtttattaattaatttaagtgttaaaaaattactgaatttataggattttgatttggatactatttataaatagtatcagccgatgctgccttgtcgaaacaatgacatttgatttgtttttggcccaactgacacataaaatatcgtatgcataacatattatgaaataaaagaactaatacttattatgccagccgaacataaaacgaattttcgagtctagagttcccatctggaagggcatgacagagtcctggcaggccttttagcacgtgtcaaaaactcaaagaagaagacgatgactttgaagtctacaaatcatatttctctgaacaagtgaactggcaacatgtcgagctcggtaagtaactaggtttttcctatagaaattatagcaagtcacagtaaaatcttgtagccagaacaacaacagcagctggatcgattggttcctcgggatcaagggcaaccagttcctctgccgcgtgcccaccgactacgtgcaggatacgttcaaccagatgggcttggagtatttcagcgagatacttggacgtgatcctgaagccggtgatcgatagttcctctggcttgttgtacggcgatgaaaagaagtggtacggcatgattcacgcccgatacatcaggtcagagcgtggcctgattgctatgcaccgaaaatatatgcgaggagattttggatcgtgtcccaatatctcctgtgataggcagaacaccctgccagtgggcgtcagcgctgtatggggcaagtcaaccgtcaagatccactgcccacggtgtaaaagcaactttcatccgaagtctgatacacagctggacggagcgatgttcgggcccagcttcccggacatcttcttctcgatgctgccgaacttgacatcgcccctggacgacccacggtaagtaattctccgaatatagtcctgg

SEQ ID NO: 23072 - DNA, 1884 bp, DROSOPHILA
cagcaacgcacacacacactaccaaacggctacattttttttcgagtgtgttcgacattcataatttttgtggtggagctgcctgcaaaatcgaattttatcagtttgccaacgaagttatcggccataactgcaaataaagttcagcaataacttggcgctgttacgatctcaacgagaaggtccagactcaacccgcgtttccagttcaccgcgtaaaaggaaccagctaaacgatgtccagcctgccacgtcgcatcatcaaggagactcaacgtttgatgcaggagccagtgcctgggatcaatgccattcccgatgagaacaatgcccgttacttccatgtgatcgtgaccggaccgaacgattcgcccttcgagggcggcgtgttcaagctggagctgttcctaccggaggactatccaatgtcagcgcccaaagtgcgcttcatcacgaagatctaccatccgaacatcgatcgtttgggccgcatttgcctcgacgtgctgaaggacaagtggagtccagccctgcagatccggaccatattgctatccattcaggcactgctcagtgcacccaatcccgacgatccgctggccaacgatgtggctgagttgtggaaggtcaacgaggcggaggccattcgcaatgcccgcgagtggacccagaaatatgccgtcgaagactgaacgcccgaggtcaggaggaaagtcagaaagcggatccgtcagttgtatcggcgtttttccagaaagtgggtgcgtgacatgaacgggcgggtgggtaaattgaatactttaaaagcaaccagaaaaacctaaaacatacgaaagaaaacataaaataagaaaaaagtaaggaagcaaacataaaaaaaaacgatttaagaacacatttttttttcgaaccttctggggcgggatatacatataaaatattaatatatatatttttttcaaccaatcgatcggggcgatcggcgaaatggaggagagatagcgaaagcattctttatgtaagacgtatacatgtatccgaaacaaactaaaaacgaaaaaaaaaaaaaaaaaaaaaaacagtaattggttttagtcgtttctattgatttgttcgagggttctggtgtctatatacatatagccgtatataattctatgtgtaactgaaataaccaacccataaccattaacacatgtagcatcagatatgataaatcaattggaaaggcaaacaagaagggattttgatttcctttaactcgtcatttgaaaactcggcttaaatgtcaattcaaaatagagaattttgattgtatcattttcagtgtttcagaaaatttaagatgtgatcgtccaacttgtagactttacttttcttaactaagagttcaccatttcgattgatacttgagctttgcctgggttgtgtcagagtccctttgataaacgataaatagtttttactcgaaaacaattttttttaaccaaacaatgaagcctttaagctattagtaatttttgaaaaaaaaaaaaataaaaaatatatatataaaaaatatacaaaaatatgatacatgatcaaaatacaatgaatgcatacactatatatttatacaaaaaaaatacaaaaagaaaaacaaaagtagtggcttgattgcgtgaaaatttcaagtgcagttctcaacaaaaattgtgtacagtaattaaatgtttgtcaccgaaatcactaaaggataatccaaaaaacaatagcaaccgaaaagcaaccataaatcaaagagtaagcgaaaataaaaattcagttttctttaattttaattaatttttttctaagaaaaataaataaaaacgaaaaattcaaataaaaattataaaaaataaa

SEQ ID NO: 23073 - protein, 151 aa, DROSOPHILA
MSSLPRRIIKETQRLMQEPVPGINAIPDENNARYFHVIVTGPNDSPFEGGVFKLELFLPEDYPMSAPKVRFITKIYHPNIDRLGRICLDVLKDKWSPALQIRTILLSIQALLSAPNPDDPLANDVAELWKVNEAEAIRNAREWTQKYAVED

SEQ ID NO: 23074 - DNA, 4252 bp, DROSOPHILA
tttgctccagtcgtttgtccaggaactccgattgcagccagcctggtggtgggtcctgctccatggcctccttacccaagatctccgttttgcagacctctggcatgccaacgatctctaaatccttgtagcccaccttttccgctttcggtgtcgtggcctgcagtccaggaactacctggcaggtacatggatccaattggtcgcccagcttggaaagtggcgcgctcatcagacgctcgcccttcatgcggtccgcgtagtccagcacgcgcttcaccatttgcccgtcgcggttgtccagcgtggagcggcggttgaagagcacctcactggccagcttgcccgtttcccgctggactcgttcttgcatcaacttgcgctggtgaagtacctccttccagtatcgcagccgtttgtccacgtgcggttcccgctccttaattggccacggaatattagccgcgtgacaagaggatgaggtctctggaaagtccccccgtcgctccttgaaaatctcggtcagaatatcctccaccatgcgctccgtgtacttgcccatgggggactcggcattcagctgcgcctgtgcagtcgaacgggtcgtcggttcggtcaaagaagatggcagcgacaccatgttggccagtgtaaatttcgaaaaggtatcggacccgttggttttgaggttaatatcttccatgccctccattttgtaacgtggttcagtttggggttcgagttaacttgaacaattataaaatatatattgactcgaattgaaaaggcttagtttcaagctagctatatgactcgttggtgtggtgaatggattgtgatttcaataattgttaagtcggtacaatatgtaagtccagtgtataagtctaacagcgaaaaaaaatgaagccccatatctataataaatgcttttttattttatttgggtgttgccacttaaaaaaaatatgaccaaaactgggaaagggtgttgtgaatgctaatcagcggtgctttcgatgacggagactatgtcctcggcagcatcacagagcagactgtaggtgtgcatatagagagagtccttgaggtacttgcttgccttgactctcttcgagactttctccacgatctgaatttcttcgttttcatctggaccctgctggcgattcttctggcctagctctgaggcgacgggaagagaagaattctcccctagatagtggaggagctccagcttaaagaactgttcatccagcccaaaaaccattgcctcccactcgtcgattttgctggcgatagtgccacgcacgtaaatgaagcgggatctatcccgctccgtattgtgttccattaagggataagctgagcacctgttgcacttcatcggctggagcaaagcaaccagtttgttgtggagattctcgcgcaggaagcgactctcctgcttgccaataaagtgacgcagggtctcgatacttaaatcccagggtctatcgcgaggcttcttggccagttgatataagtccttgagagcctccagatcctcgtatcgctggcatcggtaagagaagttctgggcattaaagacctcgcgctcgtcaagatgtctttggtagggacacaatggtcgagggttctcgataatgggagccagactggcctgcatttgcagaaggccctgggcctgcaattgttgctgcttatctaggggcacctgtcggtgaccctcgaggcgtctctggaacggaacgggcatggtgcactgaccctggagaacgacgtccaggcggcgggtgccacagaagggcgatttttggaagttcacgtgccatcgctgcgtgaaaaggcccacctttttcggctggaacatcacacgaatgaggcggcgaccctgtggctccaggatgaactcgctgcggtcgaagaccatctcggagttcaagggcagccggtcggaacgcaagcggttcttactaagccaatagacgtgcaccagcttcggacttagattctgcaggaagccattgtgttagcaagtatgtcctcgtactaatatttactaatgtccccacagaaaaggacacgaagatgaaccccagtttacctgaatgtccaaaagtatcttcaccacgcgctcatatggttcacattgcagcagcatattgatgcttttgcttatggcgccgacaggattgcggtaatcaaggatcaccccgttgatcatcagaccttgtacgtccttgacgtcatccatgtcctgactctcgacaattccctttgtaatatcctcgagtgccgcctcttgaaagctatcgcttacctccccctctatggacagcagatcggactccgaatcctcctcctcttccggagtggagttcccggagatattagacaaggaagtttcgtcgattttgatgatcggcagattcttagtggacgagcccacaaaggccggcgtgacctgcagcccatttagatcgggcgcaaagtcaagcacctgtcgaatagagtgcttcttgtcctcaagtcgttcgctcaagacctgggagcgctgccactggctctcgatctcgttggaatgaaggcgggtggcagccagctccttttgggtgacctgcggcaggccgacgaactccacctcctgcaactgcggcttcgcggcgtacagctccttaatctcgcggcagagatggggatcacagcgcggcttcagggagttcaaggtcacattgtccttgaggcgagcaagaggtcgtgacctgtctgcggtgtcaaggacgcgcagaatcatccgcttgttggcctcgtcgatggtcgccgagcgattgaagagcacgtcctcggcccgcttacccgtctgccgagcgatcctatcctgcagtcgcctacgctcctgcagcacgcggttccagctgcgcagtcgcgggtccatgtccaaatcgtcgcccggcttccgatccctggacctctccgagtggcagaactgatctaggttgctgtccgactgcttttgctggaaattctgcatgcacaggacctcattaagaatgtcctccacggtctgggtggccatgtacatatgctcaggctgcttttcctcttgttccatatccatgaagttatgtttgttggagtgcgaatcgttgatagtttgattcgaaatctttttccccaaggagtttatgacggagtgctgcgtgggcctcattttttgatgttttttggattcgatgcgctcggtttaatgtatgatacagttgtgtatttaaatatataaggttttttttttttggcagaacacgcttagtacatcctgatttcaagctccctagacttagcctagcctctcgagagcttttttaattttgtcattattagtttttcttgttcgaaaggtgcacaggtaaaaatccatagttattccaaataaattgcaatttatgaacctttctgttgtgctaatttgctaacaatccccactgaatagttccaccaaaaaagctaatagaaaaaccgggctcgtgtgacaagtcatcgtaattttcgcccaagcagttggcccggctttctggagttcgaatttgaatttccctcgccatttaccttaagtcccaatgacattgacgtgccgccttcacacaattcaaaaagttgctggaagttgttgttgatgttgccattgtgactggcacggccaacaaagagaaaggagtcgcctggctgtcgtatatcaacttacctgtaacgagaaaaggagaaatattaaattgatttatacacaggtcatgtgcaacttaaacaacaactgaatatgaactattttgtatttatggacggttcaaaggctcattaattatgtcatctgcggtttggcaggaggttgggagtagcttttcgtggtctggggtggtatgtttaatgttgtgttcagggatttaccacgtcttaccccgtcttcgggaggaggaagcgaaatgaggtttctcggctggcggctttccattccagaaacaaactttccgctcaacaaaagggcgaaacacagaaacagccgagcgaaacaaagccatatcaattaccctggcaacgaaccgtacaggagtataaagtaatttggcccgaaccgctaagggagggatcctggccagaacaaaggccaccagaccgcagaaaaggaagccgagtagggactgatagtggaagaggcagtgggtggggggctggagctgcggaaatgcactgcatt

SEQ ID NO: 23075 - DNA, 2159 bp, DROSOPHILA
attaaaccgagcgcatcgaatccaaaaaacatcaaaaaatgaggcccacgcagcactccgtcataaactccttggggaaaaagatttcgaatcaaactatcaacgattcgcactccaacaaacataacttcatggatatggaacaagaggaaaagcagcctgagcatatgtacatggccacccagaccgtggaggacattcttaatgaggtcctgtgcatgcagaatttccagcaaaagcagtcggacagcaacctagatcagttctgccactcggagaggtccagggatcggaagccgggcgacgatttggacatggacccgcgactgcgcagctggaaccgcgtgctgcaggagcgtaggcgactgcaggataggatcgctcggcagacgggtaagcgggccgaggacgtgctcttcaatcgctcggcgaccatcgacgaggccaacaagcggatgattctgcgcgtccttgacaccgcagacaggtcacgacctcttgctcgcctcaaggacaatgtgaccttgaactccctgaagccgcgctgtgatccccatctctgccgcgagattaaggagctgtacgccgcgaagccgcagttgcaggaggtggagttcgtcggcctgccgcaggtcacccaaaaggagctggctgccacccgccttcattccaacgagatcgagagccagtggcagcgctcccaggtcttgagcgaacgacttgaggacaagaagcactctattcgacaggtgcttgactttgcgcccgatctaaatgggctgcaggtcacgccggcctttgtgggctcgtccactaagaatctgccgatcatcaaaatcgacgaaacttccttgtctaatatctccgggaactccactccggaagaggaggaggattcggagtccgatctgctgtccatagagggggaggtaagcgatagctttcaagaggcggcactcgaggatattacaaagggaattgtcgagagtcaggacatggatgacgtcaaggacgtacaaggtctgatgatcaacggggtgatccttgattaccgcaatcctgtcggcgccataagcaaaagcatcaatatgctgctgcaatgtgaaccatatgagcgcgtggtgaagatacttttggacattcagaatctaagtccgaagctggtgcacgtctattggcttagtaagaaccgcttgcgttccgaccggctgcccttgaactccgagatggtcttcgaccgcagcgagttcatcctggagccacagggtcgccgcctcattcgtgtgatgttccagccgaaaaaggtgggccttttcacgcagcgatggcacgtgaacttccaaaaatcgcccttctgtggcacccgccgcctggacgtcgttctccagggtcagtgcaccatgcccgttccgttccagagacgcctcgagggtcaccgacaggtgcccctagataagcagcaacaattgcaggcccagggccttctgcaaatgcaggccagtctggctcccattatcgagaaccctcgaccattgtgtccctaccaaagacatcttgacgagcgcgaggtctttaatgcccagaacttctcttaccgatgccagcgatacgaggatctggaggctctcaaggacttatatcaactggccaagaagcctcgcgatagaccctgggatttaagtatcgagaccctgcgtcactttattggcaagcaggagagtcgcttcctgcgcgagaatctccacaacaaactggttgctttgctccagccgatgaagtgcaacaggtgctcagcttatcccttaatggaacacaatacggagcgggatagatcccgcttcatttacgtgcgtggcactatcgccagcaaaatcgacgagtgggaggcaatggtttttgggctggatgaacagttctttaagctggagctcctccactatctaggggagaattcttctcttcccgtcgcctcagagctaggccagaagaatcgccagcagggtccagatgaaaacgaagaaattcagatcgtggagaaagtctcgaagagagtcaaggcaagcaagtacctcaaggactctctctatatgcacacctacagtctgctctgtgatgctgccgaggacatagtctccgtcatcgaaagcaccgctgattag

SEQ ID NO: 23076 - protein, 706 aa, DROSOPHILA
MRPTQHSVINSLGKKISNQTINDSHSNKHNFMDMEQEEKQPEHMYMATQTVEDILNEVLCMQNFQQKQSDSNLDQFCHSERSRDRKPGDDLDMDPRLRSWNRVLQERRRLQDRIARQTGKRAEDVLFNRSATIDEANKRMILRVLDTADRSRPLARLKDNVTLNSLKPRCDPHLCREIKELYAAKPQLQEVEFVGLPQVTQKELAATRLHSNEIESQWQRSQVLSERLEDKKHSIRQVLDFAPDLNGLQVTPAFVGSSTKNLPIIKIDETSLSNISGNSTPEEEEDSESDLLSIEGEVSDSFQEAALEDITKGIVESQDMDDVKDVQGLMINGVILDYRNPVGAISKSINMLLQCEPYERVVKILLDIQNLSPKLVHVYWLSKNRLRSDRLPLNSEMVFDRSEFILEPQGRRLIRVMFQPKKVGLFTQRWHVNFQKSPFCGTRRLDVVLQGQCTMPVPFQRRLEGHRQVPLDKQQQLQAQGLLQMQASLAPIIENPRPLCPYQRHLDEREVFNAQNFSYRCQRYEDLEALKDLYQLAKKPRDRPWDLSIETLRHFIGKQESRFLRENLHNKLVALLQPMKCNRCSAYPLMEHNTERDRSRFIYVRGTIASKIDEWEAMVFGLDEQFFKLELLHYLGENSSLPVASELGQKNRQQGPDENEEIQIVEKVSKRVKASKYLKDSLYMHTYSLLCDAAEDIVSVIESTAD

SEQ ID NO: 23077 - DNA, 5492 bp, DROSOPHILA
ccgctccagactgaacttggtgccgcgcagaaaggcgagcaggaactggtcgtcggtgcaggcccgcagatgtggctgcttcagcacccaatcccgcagagcctcaatgtcctgggccatacgggcgggcaactcgttcaattccctgatgcaaatctcttgcagcgcggcattcagtggtcgtaccgagctcatttcgatacaggaaacggcctcaagacaatgagtccgcgttaattgaaatggtaaaaatcgttattttatgagggaaacctctcctcacttcacagcaaatcggattgcgtgcatatgcttactgcttgaagatacctcgtcgaatgatacacgagtaacatgtggattcaactgcctgatcataagccgatttaccaacgtacgaagacatttgtcgatatggcggatgtgagtggcggtggtcggtgggtggtggttggtggttggtgggtggtgctgggtggtaccaggccggcgcttggagtatttcagtcggtacccttggctgtgggtcgcttcgcgattgattggcttaattggctttggattggatttactttttgagtgcatgcggctgcggccgatatgagctgttaaatcccattgataaagaaggttaatcgggtgcaattacttaacgaaaggcagatagataacgtatgctagcttgataactcgccagctgaaaagtaaacaaggaaattaacacaaaagtgtgacaacataataagttcaagtaaaaataattagtaagttctagtagttacttcattttaccgcaattataattgcatagaaagtaacgcgcttctgttatttttttttcttttgctagctataaataataagaatacaaatattttttcatcttattgacttctaacatttttgaatgtcccgccaataggggtagtcatctggacatttggtatattttagtgagcttgcattgtgtactccaacggtcacactacttagaccttgtcagactttcaagttaaaatcatctgacaataaaaaccaattttccccgatgacaagcatcgaggagaatccgttcgcggctctgctgcaggagggcgccaactccgatggcgtgccgcacaaactggtcgaggaggtgctcctcttcacgctgaacaaggcgtcctcttccgcggtcctgtgcctggccgacgtggtggtggagaccagcgaggagatgctaagtgaggacctggtggcccacgccctctttgagcgcctgatgctggccgagaccagccagtatgcagcgggcaatgccagtgaaatggccatggagcggcgagctatgcgttaccttaaaggtgccttcacgcgatgcggactcattcaggcggagaggaaaatcgattgctccaagatactagcgcttatcctaaacaatgccagcacctgcatgcgccagccggacctctttgcaccgcaatccttcggtgcccagtggatggagatgttcgagcaggatgaggatgagcacgataccagcacgcaggagtttttgatacgcgtcacctgcaaggtgatggaggaggtggagccgattgaggccctgggcgccctaaaggccatcttctaccctgtgctcaccgagctgcagaagaacatcgccaagctgaacctcattacaatgaagaagaacacattctggatcctcggatatttcgtgcgcgacaagcgagcagctgttcttggagagctgctaattgactacaccactcccaatcccagagctagcggtatttaaagcaaattcttaaatattagctgcaattcgatataaaatcgtcatttttcaggtagcgaatatatggacactttgttgggcagtctactgtgcatctcaatcctgcccaagacccaaacaggcaaatacgagtttttccaggagctgtcaataaaccaaactgacgaagctctgtgggctctattgtcgcatcaccagcagtccattttcctgctggtcaagcaactcctcgtactctcacccgaaacaaagaaaaagacgcttcaatgggtaggcaattgcctggatgcaaatgtgccgcgtggtcacctatggagcagcatcaatgccagcctggagcaaacagctcacagcacgtcaagcgatgccttcatgaccaacctgactgcagttctagttcgtctctgtgctcccctatgtatgccctcgttaaaggtaaatacacttctgaactagccatgcccccttatctagtaataactttttaaatattcgctgcaggttctcctggtggaccctacatattgtgcagttcccaacaaagatcggcaggcgaagggcgttagtatgctaagggcccacgccgagacttgcctgctcaccagcgaagagggcgaggagcgtttgacggccgaaaagtacaatttcgtgacggagatcttctacatgacacacaaatgcttcgagctctccaatattccgtgcattgagcgcttcgttcgggtgctgcgcgagctgcaaaacacgcagatggcgtacggagagatcgtgaacagcgatccgaatagcgaggtggccaaaaacctatttcgcatgataagggaccagatacagcaagtgctgaccatcaagaacacgctcgccgagcccaccaatgacatgtacctgttgaaattcttcgaagcttcggctatttggctcactgagattgccatgctcccgcgtgagatttacgagcagtgcctggacaagcgcgacttttccccacaggttttccgcaacatggagctgctctcagacacaccgccctttgtggcaccctatatgcaatcggtgccagagagcattatcgacaacatctcggcatttttgaatgcggcccggaaactaaacggcgaacaatacatcaatatatatttctctgcccatgatgcctttttcaagatgataattctattcatgggcagctcagcgctggtcaagaatcctcaccttcgggccaaactggctgaagcattggaatttctcttgccctcacggattatgggaagccatcgcaagacttttgtcagccatgtcttcgacaaccatccggatcggttgaaggtggtgcgcagcctgttgaacgttttcgtaagcattgagatgactggacagtcagtgcaattcgaacaaaaattcaactatcgccggcccatgtacgctataatggagttcctgtggaccaaacccgagcacgttcagtgctttcgtgacctggcagtcgaagcggagcagaatatggatgccattgagccgcccatatttctgcgcttcattaatctgcttatcaatgatgccatctttctgttggacgagtcgttgtccaatctggagcagatcaaacagcttcagcaggcgcaggacaatggtgagtgggaaagcctaccgcacactgagcgtgagcagcacatgacgaacctccagcacctgggcatgctagctcgatttgacaacattatcggtagggacaccataaatctcctcaagctgctcacctcgaaaatcaaaagcattttctgccacaacagcatggtcgatcgcatggcagccatgctgaattattttctgctgaatttggttggcccaaagaaggagcgcttcaaggtaaaggacaagaaggagttcgaattcgatccggctcagacggtgatcgagatctctcacatctacatcaacctaagctccgatgagagcttctgtttggccgtatcgcaggatggacgttcatacagcgaacagctcttcagctatgccgagaacatcctgatccgaatcggaggcggccaacttataggcgacatgtccgagtttgctgtgaaggtagcgcgtatgggtgctcaatacaaggaggagcaggagctgctggctgatgcgccggaagagtacctcgatccgattatctcaacgcttatgaccgaccctgtggtgctgcccagctccaaggtaacagtggatcgttccaccatcgcccgtcatcttctgagcgatcagaccgatccctttaaccgcgaaccgctcaccatggataaggtcaagtccaacgaggctctgaagcaggaaattgagagctggattcagggcaagcgggaggcggcccgctcgaacagttgaggtagcagcgaacccgcagctgctggctcagttgcccaaccaaagagttagctccacggggattcggttgttagggcaataatcaatgtttttttgttcataagaattccagtcatacatggtggtatgtgtatgtgcagttttataattagtggtttttaaaatgtattcttaatccattttttcctgtcaaccgaattaattaacaaacaatgtgtacgaataacatgcaaaggataaattattgtagtcatatttggttttgtgttcacaatatgtttacatatatgtttaaataaacggcgtttcgctgaaaaaatgtgtatattcaattaattcatcaaatgaaaatatctataatgcaaatcgacagcatatgttttattaaatccaatctctaattgtcttttttcgctccattggtttctacggcagatccattgtccatgtcgtgacttactgattcacggaatcgattgaagtagcgacgaccagttaggtaccacagcgcctcgtgatagcttctgggaaggatctccggaactgctttgctgcaggagtaggtcaggtgcagcacattgcacttaagctccgtaaagctattgccatcgattgcattcaccaccgtcagcagctgaatgtagttttcgtgggtgaaaaccacgtacgccttcagttttatatagctatggacgggaatggaatgggcgaacgtaacgtccgcaatgaagcggatcatgcaacgctggttggagtagagggaggctgtcatgtagctaatctcgatagccttgcggatgatgaaccctccgaaaatggtgttcgattcgtttcggttctccgggaacggatgcatcagggttctgcggcgccacgtggacatccagcgggaattcggtggtagagtagtcatatcactcggcgaaggtccgtcatcgcccttggttcgggtaaatagctcgtacatgagctgctgttcctccttggtgggctgctgcgactccaggcgatacaacgctttggcacgctcctggtgccgcttctgcgcttcctggtgtaaactttcttccagctcattggccggcaccagaggattgacaggagcagggccattattgatggcatcgcgagcctctaccacaaaaatgccctttgccagcaacattccgctttgtcgcacatatgccgtgacctccatgaagttattgtccgtatatgaaacgtgaccggagagggacacatctgcatccgcaataaacttgtcttgcaagaagtgggcgtggtccaccagcatggtgataaaagtgtatggcagcggcacaccctccggcagatt

SEQ ID NO: 23078 - DNA, 3366 bp, DROSOPHILA
cagactttcaagttaaaatcatctgacaataaaaaccaattttccccgatgacaagcatcgaggagaatccgttcgcggctctgctgcaggagggcgccaactccgatggcgtgccgcacaaactggtcgaggaggtgctcctcttcacgctgaacaaggcgtcctcttccgcggtcctgtgcctggccgacgtggtggtggagaccagcgaggagatgctaagtgaggacctggtggcccacgccctctttgagcgcctgatgctggccgagaccagccagtatgcagcgggcaatgccagtgaaatggccatggagcggcgagctatgcgttaccttaaaggtgccttcacgcgatgcggactcattcaggcggagaggaaaatcgattgctccaagatactagcgcttatcctaaacaatgccagcacctgcatgcgccagccggacctctttgcaccgcaatccttcggtgcccagtggatggagatgttcgagcaggatgaggatgagcacgataccagcacgcaggagtttttgatacgcgtcacctgcaaggtgatggaggaggtggagccgattgaggccctgggcgccctaaaggccatcttctaccctgtgctcaccgagctgcagaagaacatcgccaagctgaacctcattacaatgaagaagaacacattctggatcctcggatatttcgtgcgcgacaagcgagcagctgttcttggagagctgctaattgactacaccactcccaatcccagagctagcggtagcgaatatatggacactttgttgggcagtctactgtgcatctcaatcctgcccaagacccaaacaggcaaatacgagtttttccaggagctgtcaataaaccaaactgacgaagctctgtgggctctattgtcgcatcaccagcagtccattttcctgctggtcaagcaactcctcgtactctcacccgaaacaaagaaaaagacgcttcaatgggtaggcaattgcctggatgcaaatgtgccgcgtggtcacctatggagcagcatcaatgccagcctggagcaaacagctcacagcacgtcaagcgatgccttcatgaccaacctgactgcagttctagttcgtctctgtgctcccctatgtatgccctcgttaaaggttctcctggtggaccctacatattgtgcagttcccaacaaagatcggcaggcgaagggcgttagtatgctaagggcccacgccgagacttgcctgctcaccagcgaagagggcgaggagcgtttgacggccgaaaagtacaatttcgtgacggagatcttctacatgacacacaaatgcttcgagctctccaatattccgtgcattgagcgcttcgttcgggtgctgcgcgagctgcaaaacacgcagatggcgtacggagagatcgtgaacagcgatccgaatagcgaggtggccaaaaacctatttcgcatgataagggaccagatacagcaagtgctgaccatcaagaacacgctcgccgagcccaccaatgacatgtacctgttgaaattcttcgaagcttcggctatttggctcactgagattgccatgctcccgcgtgagatttacgagcagtgcctggacaagcgcgacttttccccacaggttttccgcaacatggagctgctctcagacacaccgccctttgtggcaccctatatgcaatcggtgccagagagcattatcgacaacatctcggcatttttgaatgcggcccggaaactaaacggcgaacaatacatcaatatatatttctctgcccatgatgcctttttcaagatgataattctattcatgggcagctcagcgctggtcaagaatcctcaccttcgggccaaactggctgaagcattggaatttctcttgccctcacggattatgggaagccatcgcaagacttttgtcagccatgtcttcgacaaccatccggatcggttgaaggtggtgcgcagcctgttgaacgttttcgtaagcattgagatgactggacagtcagtgcaattcgaacaaaaattcaactatcgccggcccatgtacgctataatggagttcctgtggaccaaacccgagcacgttcagtgctttcgtgacctggcagtcgaagcggagcagaatatggatgccattgagccgcccatatttctgcgcttcattaatctgcttatcaatgatgccatctttctgttggacgagtcgttgtccaatctggagcagatcaaacagcttcagcaggcgcaggacaatggtgagtgggaaagcctaccgcacactgagcgtgagcagcacatgacgaacctccagcacctgggcatgctagctcgatttgacaacattatcggtagggacaccataaatctcctcaagctgctcacctcgaaaatcaaaagcattttctgccacaacagcatggtcgatcgcatggcagccatgctgaattattttctgctgaatttggttggcccaaagaaggagcgcttcaaggtaaaggacaagaaggagttcgaattcgatccggctcagacggtgatcgagatctctcacatctacatcaacctaagctccgatgagagcttctgtttggccgtatcgcaggatggacgttcatacagcgaacagctcttcagctatgccgagaacatcctgatccgaatcggaggcggccaacttataggcgacatgtccgagtttgctgtgaaggtagcgcgtatgggtgctcaatacaaggaggagcaggagctgctggctgatgcgccggaagagtacctcgatccgattatctcaacgcttatgaccgaccctgtggtgctgcccagctccaaggtaacagtggatcgttccaccatcgcccgtcatcttctgagcgatcagaccgatccctttaaccgcgaaccgctcaccatggataaggtcaagtccaacgaggctctgaagcaggaaattgagagctggattcagggcaagcgggaggcggcccgctcgaacagttgaggtagcagcgaacccgcagctgctggctcagttgcccaaccaaagagttagctccacggggattcggttgttagggcaataatcaatgtttttttgttcataagaattccagtcatacatggtggtatgtgtatgtgcagttttataattagtggtttttaaaatgtattcttaatccattttttcctgtcaaccgaattaattaacaaacaatgtgtacgaataacatgcaaaggataaattattgtagtcatatttggttttgtgttcacaatatgtttacatatatgtttaaataaacggcgtttcgctgaaaaaatgtgtatattcaattaa

SEQ ID NO: 23079 - protein, 993 aa, DROSOPHILA
MTSIEENPFAALLQEGANSDGVPHKLVEEVLLFTLNKASSSAVLCLADVVVETSEEMLSEDLVAHALFERLMLAETSQYAAGNASEMAMERRAMRYLKGAFTRCGLIQAERKIDCSKILALILNNASTCMRQPDLFAPQSFGAQWMEMFEQDEDEHDTSTQEFLIRVTCKVMEEVEPIEALGALKAIFYPVLTELQKNIAKLNLITMKKNTFWILGYFVRDKRAAVLGELLIDYTTPNPRASGSEYMDTLLGSLLCISILPKTQTGKYEFFQELSINQTDEALWALLSHHQQSIFLLVKQLLVLSPETKKKTLQWVGNCLDANVPRGHLWSSINASLEQTAHSTSSDAFMTNLTAVLVRLCAPLCMPSLKVLLVDPTYCAVPNKDRQAKGVSMLRAHAETCLLTSEEGEERLTAEKYNFVTEIFYMTHKCFELSNIPCIERFVRVLRELQNTQMAYGEIVNSDPNSEVAKNLFRMIRDQIQQVLTIKNTLAEPTNDMYLLKFFEASAIWLTEIAMLPREIYEQCLDKRDFSPQVFRNMELLSDTPPFVAPYMQSVPESIIDNISAFLNAARKLNGEQYINIYFSAHDAFFKMIILFMGSSALVKNPHLRAKLAEALEFLLPSRIMGSHRKTFVSHVFDNHPDRLKVVRSLLNVFVSIEMTGQSVQFEQKFNYRRPMYAIMEFLWTKPEHVQCFRDLAVEAEQNMDAIEPPIFLRFINLLINDAIFLLDESLSNLEQIKQLQQAQDNGEWESLPHTEREQHMTNLQHLGMLARFDNIIGRDTINLLKLLTSKIKSIFCHNSMVDRMAAMLNYFLLNLVGPKKERFKVKDKKEFEFDPAQTVIEISHIYINLSSDESFCLAVSQDGRSYSEQLFSYAENILIRIGGGQLIGDMSEFAVKVARMGAQYKEEQELLADAPEEYLDPIISTLMTDPVVLPSSKVTVDRSTIARHLLSDQTDPFNREPLTMDKVKSNEALKQEIESWIQGKREAARSNS

SEQ ID NO: 23080 - DNA, 5541 bp, DROSOPHILA
gcctatcgctatgagacactgctggacgagctgtccaacatcttcaaggtgaaccagacgtgctccattgcagacatgaacgccacatagtctggtccatgcggtacatctgctccatcgcgttgttgtggcttcctatgctaacttaatgcaaattacgcagatatatacgctagttatatacataatttaaatgtttctgtactaaccaaaatgtaaacgcggcagaccaaaacctttaaatatacaaaacttgtacacgaaacttccattcattcaacttttatttaaaaataatcataaggtaaataatatataaatataaataataatatatttcgagctatgggatctaaaattgtagttttggctaaccttttgggttcaaaagtaaaaatagtggatataagttaaaaactcaagaagagtaatattaaaatttcaatgtttgaaatttagacctcaaatatttcaaaatcccgactttaaatggattaaaattattgcaagctaaaaaaataactaagtggaattgtaattaaatttacaattttaaataataacgttgctagattaaaaaaaaaaaaacaatgtaatgcaatgcaatatgtatttgatattttagagtggcccttttgagctgcagtatattttgtggtatattcgcctgcctgccggacagtatattataaacgtaacccgcggcggtcacacttaactgtacgaattttttgatattccaatgcaggcgcacaaagaaaatgcagaaaagctgatagaataaaggaaaagccgactgactgattgccaactagccgagcacagttagctaaggtcttttccgaccgggaaaagcgagccaatcgttgatttcggggcggcgtcccccccgcagagcgagacagcaagtgtggcgagggagtaggagagacggaagaagaagacgataaggaggaggagcaggatctggtggataaatatacatatatcaaaagacagaatgaccacccagcggacgcagacgcaggcgaggaatcccggcaactccgattccgactatgagacactgatgcagcgtcttcacatcggtgggggaggtggtgctggtgttggaggagggggcggcagtggtggccctggagacgggggcgtggccatgcgaagctaccagcgctcaccgggcgccattgagaactacctgcaggaaagtcagcagcaacagcagcaacatcagatgcagcaaatgcagcaactccatcacaatcaggactataagctgtacgagcgcggcaacatcattgccgcctccaaatacgccacgccccgtccggtggagcagatacagcacacgcacaacggaagtgcacaaatctatgcaccgaccgcacagattctgggccagcggattgcaccgcagaagcattcgccggtatatgagaacttggagttctacggtcaattcgattcaaaccacaagagggctcagcctcaaagtcccgggagcaggcagagcgccatattgaacggctatctgctgatgcagcccattcgggctgggcgctttgcacacacgccggtgccagagaatcaaggatctgcatcgttgggaacgaccagagcagcaggaggaccaccaccaccatcgggacgttctgctgctttgggtccaactggcgatctggaggagcatgctgcgcccatatacgagaacatcattccacactctggccagcgggcacagccacaggcctcgccggccaccgccaccatgtatcaggagatgcagcccacgtccaactcctcaggcagttcgtccaccgccggtctggatctcaatgcgctgctggcctcgcccatgcaccagcgaagcattagcagcaacacggccagttctagctccttgggatcgccaacgcaacgatataggaatctatcgttacctagccacctaagtcccgtacccaccgcgcagtcggtggccaaactgcagcagcacacgcccgttaagtcgcccggcggcgccattaatgtctccgttaatcctaactatatagaggacatcaatagctctgactacgtttgcatgacggcgaatctgcacaggaatacggcagcaggattggctaccggcagggcggctgcaacgggagcccctgcccagcgaactgtccaggaaccaccaataataacgtcatcactggccatgggcatggccacggcagctccaccaaccacatccaatgcaccgacatcagcagcagcggcaccagcagcaccaacatccaccgcttccttgcgggcgacgcccattgcgatgacggctcctctggcggtggccacatcacccactccctcgcagggcagcacaggtaagcgactgacgatcgtctgtccccaaaatggcgaattactttaagtgatggaatagatactgcatcgcttaggtggagtacatgctatatatagtaaagtgaacaaaaattctatcgatccatttaaagatgcatggttactttactaaactaaagctatcatttaaatatggaataataataaaaagcaccttcaacgtactttttattatacataaacatgtatttcgcctagcatgcaacatattataatatttcagtatctatgtatgcatacttttgcctacatggatacattccatcactaaacaaccatcaattcgagattgtattaatcaaactaatgaatccaaatgcttcccccatcaaaaatgcttgcacgcagccgttaatgctgccttgaaacccaggagaggtatgacgggctgagcttggtttctccaaaggggttgggttccgttcgtgtcatcactcatcgctcaatcataaaccggttggcggggcgacaaactttggtcaaacggttgccgctaaccggtttaattttaagtcctttacctgaaccgattcaatgacaaccgaaaccgattcgaatgcaatatcgttcattttcatttcaccatgattgaaattgcgattttatcgtttaaacaaacaaattttttatgttttgtcgatgggaattataattagaaaaatattattataatttgatttcatttttcattcaagaatttggcttacaccgcgaatttttcagcttttttcctgatttatttatttcaattattttcgtttgtcccaacaatgcgcccgcatatttatttttgttttttcctaactaagctgactaatcttcacttggccttgcaagccaagtcaatagcatgacctaatatctactctgtaccgccatcaggtctcaccaagaatctgctaccgtatagcgtcaccccgccgcgtccggctggcccgacggaggcgcagcgcaagatcgaagagctcacacgccagctggaggaggagatcgaacagagcgaggagcacggcgaatactttggtgtgtatttattgttagcacttaaccataatatctctgactcacaataatatcggttacaatcactaggcatttgtcacacatgcggcgagaaggtgaagggtgccgggcaggcttgccaggcgatgggcaatctgtatcacaccaactgcttcatctgctgctcctgcggacgggcgctgcgaggcaaggcgttctacaatgtgcatggtcgggtctattgcgaggaggattacatggtgagaagatagttgtagttgtagtttagtcaggactgaaaaatattgatattccccgtaaaaactccttttcattttgagaaaacactttcccaactgtattgtgttgtttgaattttattatatttatgattataaatcgttatttttggttactgacgcaattaccttttcatttgctttgttatgatttcaacgccattaattaataataataagaattcactcttgcagtactcgggcttccagcagacggcggaaaagtgcgccatctgtggccatctgatcatggaaatggttcgtactgcaccccattcgtttctatcccactctaattgggcaacttgtactcacattgacgtcgctctcgctctttccctcttgcagatcttgcaggccatgggcaagtcgtatcatccgggctgcttccggtgctgtgtgtgcaatgagtgcttagacggggtgcccttcaccgtggacgtggaccacaagatctactgcgtcaacgactaccatcgaatgtttgcgcccaagtgcgctagctgcggcaaaggtgggttcacaacttcattccgaataatacgtcaatgctaatctcgcaatcgtcggcaattctcggcaggcatcacacccgtcgagggcaccgacgaaactgtgcgcgtcgtctcgatggacaaggacttccacgtggactgctacatctgcgaggagtgcggcatgcagctgaccgatgagccggacaaacgctgttacccgctggacgggcgcctgctctgccgcggttgccacctgcaacgtctggcgctgcaatcctcgccacacgctcgtcatcaggagcccgtctgcgcttcgtaccagtatatgggataagcggaacggagtgtggctgggagaggcggcgcggcgcagaccgaccttccgaccttcgactgagtggcgcacaaaaccagaacaaactatcgcaatcaacttattccaattaacaatattatcttaaatagacagaagtgaaaacaaatgcatttatacgaaacgagggccaagctaatggcttttttttttcttcatttttatggcagtgtactaggatctcgaaacggatctgttagaaactatgtaatggattcctaaaatctccgacagttggcagccattgttggcaatactattttgatacaagtatattgatgtgttcttcatatgtatgtcctggggtgttcctgagacctcttgaggtttcaatgcaatagcaaacggtgtctcaaattatgcaataaaatacttaatacttcttatctgaaagtcttttgtggatattccagtgggttagtggcttgttgtgatacataccatacattcggttattaagtagcgaaaatgcaaaattttaattgtttgcctaaaccgtgagtaattaacatatacgtgtgacattttgaattttgtttagttttcttataacacatacatacaaaatattttcttttaaatttttcgaatgcttaatgctttaaatgcgttgcgcttaacagaaaaattccaataaaattattggaaagaaaaaaatataatcatcaataaaattttaaacgaactgaatgaaatgcatataaacgataactaggtattaatctggctaatgttagtgcataaggatctccagctggacgagccgctggttggtggtcgatggcattcggtatggaacgctggcagccatgttggtgaatgccttggccctgtctcgcaaatgtttcacggcgggctccttattgacgcacttgctttcatcaaagaaaccggaagctgtttcattcgagtccattagcttcacatactcctggtatacaatgtccatggacgccagcag

SEQ ID NO: 23081 - DNA, 2187 bp, DROSOPHILA
atgaccacccagcggacgcagacgcaggcgaggaatcccggcaactccgattccgactatgagacactgatgcagcgtcttcacatcggtgggggaggtggtgctggtgttggaggagggggcggcagtggtggccctggagacgggggcgtggccatgcgaagctaccagcgctcaccgggcgccattgagaactacctgcaggaaagtcagcagcaacagcagcaacatcagatgcagcaaatgcagcaactccatcacaatcaggactataagctgtacgagcgcggcaacatcattgccgcctccaaatacgccacgccccgtccggtggagcagatacagcacacgcacaacggaagtgcacaaatctatgcaccgaccgcacagattctgggccagcggattgcaccgcagaagcattcgccggtatatgagaacttggagttctacggtcaattcgattcaaaccacaagagggctcagcctcaaagtcccgggagcaggcagagcgccatattgaacggctatctgctgatgcagcccattcgggctgggcgctttgcacacacgccggtgccagagaatcaaggatctgcatcgttgggaacgaccagagcagcaggaggaccaccaccaccatcgggacgttctgctgctttgggtccaactggcgatctggaggagcatgctgcgcccatatacgagaacatcattccacactctggccagcgggcacagccacaggcctcgccggccaccgccaccatgtatcaggagatgcagcccacgtccaactcctcaggcagttcgtccaccgccggtctggatctcaatgcgctgctggcctcgcccatgcaccagcgaagcattagcagcaacacggccagttctagctccttgggatcgccaacgcaacgatataggaatctatcgttacctagccacctaagtcccgtacccaccgcgcagtcggtggccaaactgcagcagcacacgcccgttaagtcgcccggcggcgccattaatgtctccgttaatcctaactatatagaggacatcaatagctctgactacgtttgcatgacggcgaatctgcacaggaatacggcagcaggattggctaccggcagggcggctgcaacgggagcccctgcccagcgaactgtccaggaaccaccaataataacgtcatcactggccatgggcatggccacggcagctccaccaaccacatccaatgcaccgacatcagcagcagcggcaccagcagcaccaacatccaccgcttccttgcgggcgacgcccattgcgatgacggctcctctggcggtggccacatcacccactccctcgcagggcagcacagccgttaatgctgccttgaaacccaggagaggtctcaccaagaatctgctaccgtatagcgtcaccccgccgcgtccggctggcccgacggaggcgcagcgcaagatcgaagagctcacacgccagctggaggaggagatcgaacagagcgaggagcacggcgaatactttggcatttgtcacacatgcggcgagaaggtgaagggtgccgggcaggcttgccaggcgatgggcaatctgtatcacaccaactgcttcatctgctgctcctgcggacgggcgctgcgaggcaaggcgttctacaatgtgcatggtcgggtctattgcgaggaggattacatgtactcgggcttccagcagacggcggaaaagtgcgccatctgtggccatctgatcatggaaatgatcttgcaggccatgggcaagtcgtatcatccgggctgcttccggtgctgtgtgtgcaatgagtgcttagacggggtgcccttcaccgtggacgtggaccacaagatctactgcgtcaacgactaccatcgaatgtttgcgcccaagtgcgctagctgcggcaaaggcatcacacccgtcgagggcaccgacgaaactgtgcgcgtcgtctcgatggacaaggacttccacgtggactgctacatctgcgaggagtgcggcatgcagctgaccgatgagccggacaaacgctgttacccgctggacgggcgcctgctctgccgcggttgccacctgcaacgtctggcgctgcaatcctcgccacacgctcgtcatcaggagcccgtctgcgcttcgtaccagtatatgggataa

SEQ ID NO: 23082 - protein, 728 aa, DROSOPHILA
MTTQRTQTQARNPGNSDSDYETLMQRLHIGGGGGAGVGGGGGSGGPGDGGVAMRSYQRSPGAIENYLQESQQQQQQHQMQQMQQLHHNQDYKLYERGNIIAASKYATPRPVEQIQHTHNGSAQIYAPTAQILGQRIAPQKHSPVYENLEFYGQFDSNHKRAQPQSPGSRQSAILNGYLLMQPIRAGRFAHTPVPENQGSASLGTTRAAGGPPPPSGRSAALGPTGDLEEHAAPIYENIIPHSGQRAQPQASPATATMYQEMQPTSNSSGSSSTAGLDLNALLASPMHQRSISSNTASSSSLGSPTQRYRNLSLPSHLSPVPTAQSVAKLQQHTPVKSPGGAINVSVNPNYIEDINSSDYVCMTANLHRNTAAGLATGRAAATGAPAQRTVQEPPIITSSLAMGMATAAPPTTSNAPTSAAAAPAAPTSTASLRATPIAMTAPLAVATSPTPSQGSTAVNAALKPRRGLTKNLLPYSVTPPRPAGPTEAQRKIEELTRQLEEEIEQSEEHGEYFGICHTCGEKVKGAGQACQAMGNLYHTNCFICCSCGRALRGKAFYNVHGRVYCEEDYMYSGFQQTAEKCAICGHLIMEMILQAMGKSYHPGCFRCCVCNECLDGVPFTVDVDHKIYCVNDYHRMFAPKCASCGKGITPVEGTDETVRVVSMDKDFHVDCYICEECGMQLTDEPDKRCYPLDGRLLCRGCHLQRLALQSSPHARHQEPVCASYQYMG

SEQ ID NO: 23083 - DNA, 5321 bp, DROSOPHILA
attatgcttcgaatttggagagtcacaagggctgcaccttgtgccatgaaagcggaaagcccaacatatacaccgataaaggtcagttttcaaaaaaattttttacatactgaatatagggtaatcttttaatattcttattgagactaaaaaaaactacattgagtttggcgttattaagataaaacagatgtgagttgttgtgaaataagcggttatcgtactgtaccaaaactattgcaatgcagaattttttgtaaaataaatttaatttgtaagatttttgtgctatttttaagtaaaataaaatcattttcaatgattaaattaaatatctattgacaaatgttgtaccactagtaatgtaaataatatttaatacaaggaccacccgcagtaagcctgggatattcatacccccttaaaagggtaaataacaaaaaatacaaaatatctagaacaaattttcatagtctgggtgagtttttatcttaatattgcaatttgtttatcttaaggattggaaaaatttgcttgctacacgattaatttcgtacatatttttgaattaaaacattacgagtcttgaaaggtattcctgtctcgtctaattttattgtcataaaataaaaaaattatatattgttcttaacgtaaaaacgaaggaaatgtcgctccagtgacgtaaatatgtacaatactagtcaaactcggtattgcaaaaaaaaacagtagaggtcataggcgctggatttcagaaactataaatagatttgattattgattttatttcttttcgagatttttgtgaaccataaaaataaatccaaatcttaaaataataatgctagcaagacaaaaaaatatttttaaaaaacgataaaacttgtgtgatatcgggtaatgaaactttactaaaaacataaaaacactccatacaacaacaaaaatttatataatgaattttacataacactttacaattatcacattcacacagataatccacacacagactacaacatctacaacaaataccattccaacaataatttcaacaaaaaaactaatcaaccccataacaacattgcacccagcgatgaagttcgtttggagtcaataaaacggcaaattttgacaaagcttggtcttagccacaagcctaatgtatctcatcctttaccaaagcaatttatttgggaaacaatatatcgagtcgatggtggacgaatgataccaaacaatgcatttgggagcagtggtaagaatttagatcagaagactatcaagctgagggcgtttgcctcgcccggatcacatttgtttaatggccgaggtggaaggaccgatcagagaagcgaacgggatcccagtcatcataaatatcgatccccgttcgatttcactttcaatataagtaaaaataatgtatatgggaaagtattgagaaatcgttctttagaacgaatcgataaaaaaaactcattcttaaacggatggacagaaaaccgtcaattaaaaataaactctcaaattgcatctatgcctatagaactaaagagccaccataacagtagtcctaaggagcttaaaagcggagcggtcagaaaagttaatggcatcaacggcacacaaatgaatgagaatgccttaaaaaaatctacatatcctatagatataaatcatagtattgataataaaacccatactggcaaaaatggtgagatgagccacaatgattatgaatattttaacgattacagtgttcagactcatgataaaaaccggtaccatgaaggtcgctctagcattggatatcagccagcgatccacaacatagaatatgaaaatcagaaaggacatcacgaatcttttgctgatgatcatgaaaatattgatcatgaagacttctttggaaatacgcaggaaataattacatttgctgaagagggtgagtagatttttattcaacacaggattaaacgctatcgtcgagggcaaattaaaaaataagagacgtcgagttcgccgactatcagatacctgttactataaataagtaaatataaattttattttatacccgttataactagtgggtacgcaaacgcgaaatttcataattttgctgggatatcgttggatattacggggaaataaaatgagaaaaaaattgtataattctttaatagtgagggagtgagcctcttgggcgttttgttggtgaaaggatgtgcgtgatcacagtgttttggtataccggtggaaattagcaagacaaacaataaaacaaagaaaaatctaaaaaaaattttctaaagtgtgggcgtggcagttttttggcaaatccataaaattttaaaagactaataaaattatgaaaaaatatccacaaatttgtcaaaaaaaaaaaattgtcggcggcattttttgggtcgttagagtgggcgtggcaaaaagtttgttgacaaatcgataaaaaaaaatgtacaagactacagactaaaaatatgagaaaatatcaaaactttttcaaaagttttcggaggtttgtgggagttggctcaacacacgtgcgatgcgtttaggtgtctacaatcggtatgcttctagctagtatgcttctaaccttctagcttttatagttcatgagatctagacgttccatacagacatggctagattgattcggctattgatcctgatcaagaatatatatactatatatagtcggaaacgattcttcctgcctttaacatactttactatactatactatactatatactatagttactattatatattattatattataatatatattaatatatagtaatagtaatatacagtaataaaaataagaaagagtgatcgtgcccaaaaaacattaggcaaatcagtagaaaccggcttgtggcggtatgtatggcataccgatagaaattggcaaaacaaattatataatgactaaaaataaaaacgctttcttaaaagtgtaagcgtggtagcttgtgagagtgcttcttctctgaaatttttaattttttatctgaactttctagattttacaggccctgacatcgatacgatcgatatggacaaaaacgaatatatttaaatacgttatattaaagttgaagtagttgaggtttttttaatgtctaccaatatccgccatctctaacgcctacaaaacgcttaagagtacattttatatacaaagctttgatttttagttaactgtacaaaaattgtaaactttacaatatatctgtttttgaagaaaaaaaacaatgcaatatatttttttgtaattcgctcatatgactgtgtgtagtcttcttattcattggcataatatattttattttaaggaacccaatatcgacaatatcgaatactcgagttttcggcccaaaaccgccgtgttcccagccaaaaattatccatacgaagcgctcagattcatataaggatagacaagccacatagtctttggattgaaaaagcaaaaagtttgccagaaaaacatttactaaacactaaacgaaaatggggagcaaataaaccacatcacagaataaaaatatgggtatttcagttatcaacttcaatcaatattacggagaaggtaacattaaaaatattgttttttaactaatttttaaagctctttatttatagggaatagataaggctattatcttccgagcttcttttcaagttgacccgaaaaatttaggatggcaaaaattcgatttaaccgatacaatccgtgaatggtacggccataccagtcacgaaaaactgcgtttgttgattgattgtactggatgcggtggtcgttactctttgcacctctttcaaacttcgaaactgagaggaaactcatccgactacttgagtacgaatcccaatcgaccatttctcgtacttcatacagaatcatccagaacaaggcgtgttaggcgacgcgccgtagattgtggcggagctttaaatggacagtgctgtaaagaatctttttatgtttctttcaaagcactaggttgggatgactggattattgcacccagaggatattttgcaaactattgccgaggcgattgcacgggctcttttaggacgccagacactttccaaacatttcatgctcattttatagaggagtatcggaaaatgggacttatgaatggaatgcgaccgtgttgcgccccaataaaattctctagtatgtccttaatatattatggtgatgatggtattattaaacgagacttgccaaaaatggttgttgatgagtgtggttgcccttagcgtaagtaataacacaatcttattttacctaattctataacaaaattacttttacagcttgccttacaattttatattttccgtccgatagaaataaaaatatatgtgtcctaactgagcgccaatctcttaacgaaatcttttacttttaagttaaaagtacataaatatatacataaagtagactcaattttattttatacttagctatgctggtgacaatatttgtatatttacgaacaaatccaaattgaggaagtgcctaaattacgttaatgaaatatttgtacattttaagaatatttcaaaaatcactaaaatatctttgtactaataaaattcgatatttttaattattactttatttaatatgttcaaattaacataagtataaaacgaaatgatttaataacctataacatgagcaaagcgtcgcgctttttttattgtcaaaacattaattttactaacttgaaaagcttatatcacagacatgtaataaatatttcatattacagtttaataaagtattaatataaggattactatatgaaataaaataaatttatgttttcttgttaataaacaatgtaagcaatgtaaacgctggactggggtgctcgcataatatgcttatccctctgtgtgtttgccagttgttctgtatgaaatcattgatttaaagtcattgggagccacacttactttatctagcatatcaagcagaacatcaacccgctagcttagcggggaaaaaatttaagagctagatccctcgctatttatggttacatatttattttaggatccttaaataccccgtaagcaagtggatcgttaaacgagtaagagatcttaaaaactctaaacgctggactagtgggaggatgagcatatacagctgtcttcaatgaagtagtagtgcaagggaaactaagaaatacaaaggtatttttccttgtcccttttcggaatcgactttttattccacctttttttg

SEQ ID NO: 23084 - DNA, 1841 bp, DROSOPHILA
ataatccacacacagactacaacatctacaacaaataccattccaacaataatttcaacaaaaaaactaatcaaccccataacaacattgcacccagcgatgaagttcgtttggagtcaataaaacggcaaattttgacaaagcttggtcttagccacaagcctaatgtatctcatcctttaccaaagcaatttatttgggaaacaatatatcgagtcgatggtggacgaatgataccaaacaatgcatttgggagcagtggtaagaatttagatcagaagactatcaagctgagggcgtttgcctcgcccggatcacatttgtttaatggccgaggtggaaggaccgatcagagaagcgaacgggatcccagtcatcataaatatcgatccccgttcgatttcactttcaatataagtaaaaataatgtatatgggaaagtattgagaaatcgttctttagaacgaatcgataaaaaaaactcattcttaaacggatggacagaaaaccgtcaattaaaaataaactctcaaattgcatctatgcctatagaactaaagagccaccataacagtagtcctaaggagcttaaaagcggagcggtcagaaaagttaatggcatcaacggcacacaaatgaatgagaatgccttaaaaaaatctacatatcctatagatataaatcatagtattgataataaaacccatactggcaaaaatggtgagatgagccacaatgattatgaatattttaacgattacagtgttcagactcatgataaaaaccggtaccatgaaggtcgctctagcattggatatcagccagcgatccacaacatagaatatgaaaatcagaaaggacatcacgaatcttttgctgatgatcatgaaaatattgatcatgaagacttctttggaaatacgcaggaaataattacatttgctgaagagggaacccaatatcgacaatatcgaatactcgagttttcggcccaaaaccgccgtgttcccagccaaaaattatccatacgaagcgctcagattcatataaggatagacaagccacatagtctttggattgaaaaagcaaaaagtttgccagaaaaacatttactaaacactaaacgaaaatggggagcaaataaaccacatcacagaataaaaatatgggtatttcagttatcaacttcaatcaatattacggagaagggaatagataaggctattatcttccgagcttcttttcaagttgacccgaaaaatttaggatggcaaaaattcgatttaaccgatacaatccgtgaatggtacggccataccagtcacgaaaaactgcgtttgttgattgattgtactggatgcggtggtcgttactctttgcacctctttcaaacttcgaaactgagaggaaactcatccgactacttgagtacgaatcccaatcgaccatttctcgtacttcatacagaatcatccagaacaaggcgtgttaggcgacgcgccgtagattgtggcggagctttaaatggacagtgctgtaaagaatctttttatgtttctttcaaagcactaggttgggatgactggattattgcacccagaggatattttgcaaactattgccgaggcgattgcacgggctcttttaggacgccagacactttccaaacatttcatgctcattttatagaggagtatcggaaaatgggacttatgaatggaatgcgaccgtgttgcgccccaataaaattctctagtatgtccttaatatattatggtgatgatggtattattaaacgagacttgccaaaaatggttgttgatgagtgtggttgcccttag

SEQ ID NO: 23085 - protein, 371 aa, DROSOPHILA
MSHNDYEYFNDYSVQTHDKNRYHEGRSSIGYQPAIHNIEYENQKGHHESFADDHENIDHEDFFGNTQEIITFAEEGTQYRQYRILEFSAQNRRVPSQKLSIRSAQIHIRIDKPHSLWIEKAKSLPEKHLLNTKRKWGANKPHHRIKIWVFQLSTSINITEKGIDKAIIFRASFQVDPKNLGWQKFDLTDTIREWYGHTSHEKLRLLIDCTGCGGRYSLHLFQTSKLRGNSSDYLSTNPNRPFLVLHTESSRTRRVRRRAVDCGGALNGQCCKESFYVSFKALGWDDWIIAPRGYFANYCRGDCTGSFRTPDTFQTFHAHFIEEYRKMGLMNGMRPCCAPIKFSSMSLIYYGDDGIIKRDLPKMVVDECGCP

SEQ ID NO: 23086 - DNA, 4786 bp, DROSOPHILA
gctcttcaagaccgctcagtcactgaactttggagcggccagcattaacaaattgagggcggacatctacaaggcggagaagacctcacagcagtacaactcgcagtacagtccgcagctggcatctagtccgcaggccagcagtagcagcagcagcagcactagcaccaccagtaccacaactagcaccaccacgaccaccactcgacgtcctccgaccactgtcagaaccaccactaccacctttacaacaagtgcaccacccgtggagaccaagaagtcggttaagagcaaaaaggagcagcagcagctggagaagaaggaccgtccagctggcaagaggccaccgcatgcagacgaggacaccagctacgattacgcctactacgacacggactgagcggcaatcctgcccaggactcgcactaactacttgcataaccacacccgatagcccatttccggaccacacataatcccccaaatatataggtgccacagtattttaaagagaaatccttccaagaatagcatgctcatcagaattccacactccatttgcgtatatatcttacttacgaaccgcttgacacccattaacactcgcgtacattcattcaatccgtttcagatgcgttctaatgaatttccatgcgtgtatctagttatttaaataaaaagaatatattgttaaattgaagcgaattggcagcgaaaaccgtatcgaggaccggctggggaatgttttcagaaattccattgaactattttatacaatattcaatgaattcactacgaaattatattagtcttaagttttcttgtaaataaaatgatatgtaattcgtaaacaaaattgtttgatattttttggtaccctaaagtaaacttcgatgcaaaaacaaatgtttatacttttaaatagatacaatgagaagtttttattttattaaattaaagttaaatctagtgaaaacttggaaacatgatatctgaatccttagtccttgaacttctggcgaacacatctaggcattgggaataggtaaaccagcatgttaaaggcggccaagcccacagcaaaagcgcaggaagcggccacatcgatggtttcctgtaaaataaataatataataatccgataagctaccatattatcatcccacttacatcgggatccggcaatcccagtcgctcgtgcatgaaatccgcgggtttgggacagatcacggaggcggtgggagtacagttgagtttcctcgactggaaggcgatgctgtgcagcaatgaggatgcgtagcgtgtgtgagtgcccttcgtgttgtcctgcagccaaggttgaagtcccttgaaggagctattggtacagacacctcaagtaactcaaactatagtatgaacacagccttactcaccgcacagttccactagccagtgcaatacttatgacaaggacataggtcactgcaatggctgcgttgaagggaaccttgaccaccaaaaggaacgcgatcgtgagctgttccgccagcacaaaactggaccacagggccactagcaagtaggcgaagacagtaccattgttgtacttcacatccaatagcagactgaaagaaatagatatatagtttcgagtcccgatacccagagagatgaaacttacggatatacaacacaactggctatgacggcagatacggcggaaaatggtatagacacggagttgtaggcaatcagtagagttgtgcccgaatagagaccctctggagtatcctgcgagaacttcttgcgccaaatcggaactatggtaaaatatgcttagacagcttaacattgaagggaaaatcgaaacttacataaagatatggtagtcaaaattccacaaccgtacgacagccccaaaatattaaggatcatgccgttttttgtaaagaatccatgtgaatcgtcctagaaaattatattaaaaaatgcttaaaatgtataaaaaattaagtttcttaccccgacatctgtgtaaaatgcccataggatgcttaaagccaatggaagaagcaaaaggcgcagaaatagtgtcttcataccaacgagtccacaggagaaggttgatgctaatagtttcctaaaaacgaagtcaagaattttatcatatttgaaaaaaaagaagtaagtttaacttacagatacagcataacccaaactttgagctctccaggctttccataggccagaggcactttcccagaacccatgttgtttagaggggcatccgagatcggtgtttcccgagagaaacgttccaccagcgcctcgatctgctggctagactccaggaatcgatcccgactgcgacgatccacagtggacaggcagagatagtacatcaagggattctcgagctgtggacaagggaatccgatgccatgaaagtactccagcatggcacgagtgcctcctgaatagaccactccgcccaggcagaggaatagggctctatccaggaatgggaacacatcggagcgaggtttctccagcgacagaagaattccacagcccgtcttcttggccgtgttggacaaaatggatatcagcagataggcactcaagggatcgaggccatgggtcggctcatccagcaatagcatgactaaaataacatttttgttatttaaggaatctttgtgatatattcatcattttaccaggatctctgaccaactgtattccaatagccagacgccgtgcctcactgatattaagatactccactctcttatgcgccacttgggaaagggccaaatccgccagcacttggcgcactttggaactcttcagatagccactcaactaagaagggtttgggtattaacacagtcagttattacttaaaatctcttcatattcattattttatacaaatactcactatagtgggggtatagtgtagtgtttgggccaccgttagaccaggaacaaaggtgcaggattgggtgacatagccacatctctgttggaacaatgccttggagagcggagatccattgagtagcacctgaccacgagttgctccatcggcacgtctagaaataacatctaaaagagctctcttgccgctacctaaagttggtaaaatgattattattattttgttttaacaaaatgtaaattaaaaatatacccttcgagcccagaatggccataacctcgccgctgtgcacggttagattgacgcctttgagcaccagggccgaattgccggctccattgaaacagccaccaccatccacctgttgttcaggccaaaaagaaaacaataaaggtttaatagcagggggttttcacgagtctaaagagaacgtacctcggtggtgtggaaaatgttgtgggcttccagtacgtagtcgctgccgatcattttcatagccaccgctgggagagccgcttttgtttgtttatacttctcgtgctctttgggccgaaaacactctgttcgtaactcaagagtggtttgttaggagctgattttcagttccagggagggaagagagaatatcaagagtgtaaaagtgagattgagatgtagagatacttgattataaattggtatttggctaaaactgaaaactaaaattttacacaataaacaattaggaaaaatccaacacatattttttcaaaaaactttaatacatattttatatgatattttagatgctttattaaaatattcttcggtagtcacttacctccgcgaacacgtcctcaccaactgagcgctctgttccaactgaactgaaactgttgcttgccattccaattggcatggcttgaaccgctccgctccgcctggaaagcggctctctccggccaactcgcttccaggcgaagcaagcgggctaagatggcggccgaggccaagttcagatcagttcgctgcgagccgagctccgagagagttgcctccaccgatccgcggttcgcgtcgattcgatttttttctggcggccccctaacacacagttcccagaagaaaattacaaaaaaaaaatatgaaaacacataaaacgcatttggaaatctaattgaaatattcacggcttaacgggctataatatacacacatatatctgtgcaaaggcgaatattttttaatgaccaccgggaagtgcatgcaaatgtggttatttgttgactcgcggaatatccaatagatacaaaaaaaaaaaaaaaataaaaaaaggaaaaagtggccaatatccaagtgacgtgagtgtgtgtgtgagcagtgtctatatggtctatataaaatatgcagacatcggtgtagccagcagatcgacattgtaatgtaagtgttttgcccaagttatgaatgagtgtcaccgagcggctaattagagtccaactggccaactggtatttactgttaattgtattaggccaacggcagcacttgccacctcgaaccaaatgaaaccgacgagtatccaccacggtccacgttccattcctttgggtataatactaataccttctggttcttctgtttttttgtactccccccctcttctgttcttctgttctgttctgttctgctcgcgcggtcgtcaccatcgcaggtcaaagatcccgcgagcgggttttgtctagcaaatgtatcttagcccacactccatccaccactgccactgctggcacttctttgccgctctccctgcgctcagcgccctgcagagcccaagcgatccaaagtggaagtccaactcgatgccaaaaccagaaccca

SEQ ID NO: 23087 - DNA, 1952 bp, DROSOPHILA
tggaacagagcgctcagttggtgaggacgtgttcgcggagctcctaacaaaccactcttgagttacgaacagagtgttttcggcccaaagagcacgagaagtataaacaaacaaaagcggctctcccagcggtggctatgaaaatgatcggcagcgactacgtactggaagcccacaacattttccacaccaccgaggtggatggtggtggctgtttcaatggagccggcaattcggccctggtgctcaaaggcgtcaatctaaccgtgcacagcggcgaggttatggccattctgggctcgaagggtagcggcaagagagctcttttagatgttatttctagacgtgccgatggagcaactcgtggtcaggtgctactcaatggatctccgctctccaaggcattgttccaacagagatgtggctatgtcacccaatcctgcacctttgttcctggtctaacggtggcccaaacactacactatacccccactatattgagtggctatctgaagagttccaaagtgcgccaagtgctggcggatttggccctttcccaagtggcgcataagagagtggagtatcttaatatcagtgaggcacggcgtctggctattggaatacagttggtcagagatcctgtcatgctattgctggatgagccgacccatggcctcgatcccttgagtgcctatctgctgatatccattttgtccaacacggccaagaagacgggctgtggaattcttctgtcgctggagaaacctcgctccgatgtgttcccattcctggatagagccctattcctctgcctgggcggagtggtctattcaggaggcactcgtgccatgctggagtactttcatggcatcggattcccttgtccacagctcgagaatcccttgatgtactatctctgcctgtccactgtggatcgtcgcagtcgggatcgattcctggagtctagccagcagatcgaggcgctggtggaacgtttctctcgggaaacaccgatctcggatgcccctctaaacaacatgggttctgggaaagtgcctctggcctatggaaagcctggagagctcaaagtttgggttatgctgtatctgaaactattagcatcaaccttctcctgtggactcgttggtatgaagacactatttctgcgccttttgcttcttccattggctttaagcatcctatgggcattttacacagatgtcggggacgattcacatggattctttacaaaaaacggcatgatccttaatattttggggctgtcgtacggttgtggaattttgactaccatatctttatttccgatttggcgcaagaagttctcgcaggatactccagagggtctctattcgggcacaactctactgattgcctacaactccgtgtctataccattttccgccgtatctgccgtcatagccagttgtgttgtatatcctctgctattggatgtgaagtacaacaatggtactgtcttcgcctacttgctagtggccctgtggtccagttttgtgctggcggaacagctcacgatcgcgttccttttggtggtcaaggttcccttcaacgcagccattgcagtgacctatgtccttgtcataagtattgcactggctagtggaactgtgcgctccttcaagggacttcaaccttggctgcaggacaacacgaagggcactcacacacgctacgcatcctcattgctgcacagcatcgccttccagtcgaggaaactcaactgtactcccaccgcctccgtgatctgtcccaaacccgcggatttcatgcacgagcgactgggattgccggatcccgatgaaaccatcgatgtggccgcttcctgcgcttttgctgtgggcttggccgcctttaacatgctggtttacctattcccaatgcctagatgtgttcgccagaagttcaaggactaa

SEQ ID NO: 23088 - protein, 602 aa, DROSOPHILA
MIGSDYVLEAHNIFHTTEVDGGGCFNGAGNSALVLKGVNLTVHSGEVMAILGSKGSGKRALLDVISRRADGATRGQVLLNGSPLSKALFQQRCGYVTQSCTFVPGLTVAQTLHYTPTILSGYLKSSKVRQVLADLALSQVAHKRVEYLNISEARRLAIGIQLVRDPVMLLLDEPTHGLDPLSAYLLISILSNTAKKTGCGILLSLEKPRSDVFPFLDRALFLCLGGVVYSGGTRAMLEYFHGIGFPCPQLENPLMYYLCLSTVDRRSRDRFLESSQQIEALVERFSRETPISDAPLNNMGSGKVPLAYGKPGELKVWVMLYLKLLASTFSCGLVGMKTLFLRLLLLPLALSILWAFYTDVGDDSHGFFTKNGMILNILGLSYGCGILTTISLFPIWRKKFSQDTPEGLYSGTTLLIAYNSVSIPFSAVSAVIASCVVYPLLLDVKYNNGTVFAYLLVALWSSFVLAEQLTIAFLLVVKVPFNAAIAVTYVLVISIALASGTVRSFKGLQPWLQDNTKGTHTRYASSLLHSIAFQSRKLNCTPTASVICPKPADFMHERLGLPDPDETIDVAASCAFAVGLAAFNMLVYLFPMPRCVRQKFKD

SEQ ID NO: 23089 - DNA, 13292 bp, DROSOPHILA
aagtcattgggagccacacttactttatctagcatatcaagcagaacatcaacccgctagcttagcggggaaaaaatttaagagctagatccctcgctatttatggttacatatttattttaggatccttaaataccccgtaagcaagtggatcgttaaacgagtaagagatcttaaaaactctaaacgctggactagtgggaggatgagcatatacagctgtcttcaatgaagtagtagtgcaagggaaactaagaaatacaaaggtatttttccttgtcccttttcggaatcgactttttattccacctttttttgtaaaatggaatgtgaagataggaaaaaaagaaagtcccgttagtttttcatgttatcacgatagtatgtccgacgacctccaaacacggagtaccactcaagacttttaatcatggtggacccaaaatcctggtataggcttgttttttatataatggtatggtattattcaccaaacgcatatgtaaatatacttagtgatgtcttactgtcatgtgaacaagtgtaagtgtgtaaggctcagctttggcaagttttgcaggatgcatgttcaaaaattccccccaaatgtcgccaggaccaggtggactccatgccacgtaggtgtaaggctgtgctggctaacaaaggctatccaactaagtattaggccctaatttttttttattatttttccatagcactgctatttcagtgaacaccagatttctgtctattatgttgttttaatttatactttcgaaactatttaaaaaataaaagtgaaacatttgttgattgtttgaaattaaatacataatgatattataaaaaatttgcccattaaaactgtaaatcatagcaattttcatgaacacagttcaagttagtcctaacagggcaactttttgtatatatgtaaacgttgtcttgcattttttataactttccaataaccttttcttcagtaaaaaagttttgtgatattaagtttttattaatttttcgttttacttagtttaaaaaaagatttttcctcacgaagggattcgataaaacatgtaagcccagtttaggcagattttgcctttttgttcgcaacaaatgttgatgacttaatgacgcacttatgttggccgtgcaatccatgaatcggaagacagcgacagtcactgacgatttccgtcttaaagagagtatctgccagcgatgatgtaatctgattcaacattttcttttggtccgaagcttttaatttttcaaagttttgtgtggcaaacacccagccaccgttattaaggacaaagtcaatgcccatgtcgttatcgaattgcagcttagtccgttttttgctgtctttcccatctacagtagccaccaatcgagaattgaagcctaaaatacaagaaggtcatcatatggacttataggtataagtacaacttcgtaccaattagtttttcgcttaacactccttctaatgagagcccctttactggtgcaataagatgaataagtgcaccatcaaacttagtgatggatccagttaactgagctcgaacaaatttccactaaaaataaaaaatgttggtttttttcatatttcgaaactagaaatgcttggcttacccaattcttatattctaaagaatcacttcgcacaccgataatgctttttgccgccccagcgcggaagggataatctaaagccaattggaacgccttttcatctgcttggggtgcaatgccctttactatttcttttaaagaattgtaaatatctaaaattcgtttttcagttataatttgctccacacaattgtcacagaagctctttattccagccagcttaacatcagcaacgtttcccttgtagttaattttgccaccatcacttgtgagtagagcgggatatcgtttggtttcctcgaaaacaatcactccgacttgtacatctgaaaatccccggcttcttaatgattcacgaatatcattgatggccggcgctattaaattagacagcactccgggtgttacattgatatcaacgacaaatacaacgtcaaccttgttgtttggtaacttaacagtaaactcatctccaaagtcgtgttgtccagcaggtcctgcgcacttaatgcaacgcggtggtaatagcacccacttattaatctgcttaactgccgaaccataagctaaagcaaacgtgcacgcagtggcctccttttccttttcagccacttttgcaagtgcaatatcacatgccttgcggtaaggtctcgaatccaaggtaatgaaattgaaagccagagtcgattcaataccaaacagttcgctacacatttcctgtcttttggagcttttaaactggttattgtcaaattcaattgctgtgcattttcctactccatagtcgttgcctagggcggccgaattttcggctaaggtaccatcgattagcaagaagtcatcatatggttctgcgttgccgttgccgagaagtcctctggttttgcttgtgtaaaatccgtttatgttgatgtggcaaaccttcaggtctgatgtacatactatgcctactccgtactcagaatataagtgaatagtgtaaaatcggcgccacgcgtgaagaccagacaagtgttgtgggtattcaactaggtttccatttagcttcagggcaaggttgtctgctacttcgaaatagctaccctcccgatctataagcgtaatgctcttaagttttccatttgtaagctgaccaattattgtgaagttattgtcaacactgtcctgagcgagaatatatttgcagttgcccggatacgcgaaattcaggccgtcgaaagtgaatatatgcttcccatcgacgacatggcctcgtagttcgaagtcgttaaagaatatccatgagtataatagctttttgttaaatactacatcccaattctcatttaataaacagtttaagatacttgaacggaatgaaagtatgctcggaagaacagccaatgagtcaaaagaatgcgttagagaaccaatccaagattgaaaatcaattacatgatccgatgagcctggataagtgcttctaatcgagacccaaatggaacgaacagcctttattaaaagctgtccaagttcttcgatgtatttttcattatcaatatgttcttgctttaatttagcgattaagtaatcgtggagtttttgtagaaactcggaagtctctggggtctgtggtaaaatgttaatctgatcaaatagactatttgttaactctgttgccttttcaaatagtttcagaactttaactttgtcattaaactcattacgaatactttcaaatgacggaaggcttgcgacatattgcttgaattcatgggttacaccttcagcggcattaaccacaattttaatgacttcctgagcagcgtcgtttataggttttacaatttctccaatagcttttccatagtttttcagagctggtccatatttctcaagcgcagaaaggagatctttaaatgactgtgtacaaatcttgataaactcagttttgagtgtacttattagtttctgtacagttataatgaaatcttcccaggctttaagaagggaatccttccaaagggcttgcaatttatcgtaaatatcaacaatggacttctgagccttttccaatatttctgatattgccttgtttatgtcatcaacaataccggctatttttttaaatagggtgcgtctaaaaaagggaatgcatatattttaacgaaaatgttatactgaatcatttacttacatgccatcaataatcggtgcaattgattgatcagcctcaagctcttgaacaatatcatttttataatcaagtaatttaccctgcagtttggaaaaatctggtccagcttctttagccaatttaacaattttatccgtaacttgacgagatttttttaagcgttccttgatattttcagaaatatattcactatctttatttatttccgattcaacaatatgctgtaaaaaatatatatatcataaataccaacgaatttaacttaatatatcttacccagaaaccatttagatgatcttcatttataaagtagtttgtttgtaaaaagtttgttgcatctaatgccactcggccattaaataattgtttcccacttccaatgacatctactttaaattccttgcccagcttaacttctgcagtgccatcgatgaaatcttgacgcttcagtataatctttgcagaattaggttgaacctccgatgtaatttcaattggatttttatcaagaatttgaacctttgtattaagctttgcataatggttttgcttagaaaagtctccgactatataaatgatatgtttatttgattcacttaaagagatttcaaatttttccttatttaaaaacgaaatcgccttaacatcgatttcaccgttattaattccaagccaatgttatactcatgggcttcaatatccactgcagcgttactatttatttggtactgaaactgaaggccagcagacttaacagttgtaatatatgcaatattgaaaccattttgagaacgggagttgcgcaattcactgtttccaaccactttttgttccggcagtcggaaaatatcaaatattacttcggcgcttgcgatctgttgattcacgtctccattcaattgtccagaaatacttaatggacgaatagttggatgttcaaacttaagtttcccgttggcgttgaatgcaacgcgttcggtgcccgttacatctacaatagcagaaaagcgggcaacgtcgtcaggcttttgcaacttgtcaataaagaatgaagctgtttgctcgtagcggccaaaaaggcttccgtctgctggtattttctgagtagtttcgaacaaaatttgacgtttcgggagtgctaatttaattgtggacgacgtgggctgaacgttggctgtaaattggtacttgaaattatttcctgttataataaagctatctaaatggtactgatacttaagaccttgacgtgtattttgagactttaattcaaactcgtatggatatccaaaatctctcaggtcaacaataataagtgtggtatgttccacagcgtccagtttttgttcatcaatgctcacaattgattgtactattaaatttgtacactgtctcttttcttcacaaacggaaaatttggtgttgaattccttgtttgtgatttttaaagtgcctaatccgtttttcgatcctaaattacccataaaagtgtaagagaaaccaacttccctatcagtaccaaaatcaaagtgttgccgggtaagcttaaaattgccactgagcgcctttccttgatactgcactttgccttgtccatcgataatagttttgtttagttcttttttaagagcataagtggctgtacctgagaaaattatgccattttcattcttaagttgaattttaatgttcttactttgagctcgtgcttcaagttcgtagccatcgagctttaatttcttcgagctccagttgacaattatataaaactcatcaatgctgacgtatgaagcttcactatttattttaatgtccaaatcggccaagtttagaatttcaaagagtacctttccttttcggtctcctaagagttcagcaatgctcgatatgataattggcttttctttcaacagatctaaacgaatatcaacaccttttttgtgggccgaatgataaaatgttgtgtctaatccgtatgacttgtcagtctgtttgaatagtgcagtgactacatatgtcgaatcatccaaaggtttaaaagtgcgaatattaactttgatatcttttacagaatcaaagctggaatctataacatatgctatatctactttctcggctccataacctaatgaagcatccatttttacgtattgtgctccgtactgtgcgttaagtacgtacgtttgtttaccggtaaggtcaccatcttttatattacctgtttgtttccgatgatatttaccattgaactttaatggagactccatattgttagtttgagcttcaaaatcatagctgccatcatttgccgtgccgttccatactgtattgacacgagcatattgccctagactggttttagaatccaggaagaattctacattgtatgcagcgttttcatttccgattaaagattttaggacctttccatgactgtttatttctaaggacttcaaggtggatttcggaatttcaatattagcctgaagcccatattcaagtgcttgattattgttgtagtttccatttgcacttacagaaaaaatctcaccgtacttacttgtgatactaactacggcatgctgtgcactgtaatctcctaaggcaaaagcgatctcaaaaggttggggtagtggatttccataggccttaaggctaaaatcgatgtttttagcatccccgtttggttgctgcttaatttgataacttatctccgacttttctccattaaatgccgtgtagactaaattactgtttgcagaaaattctttggtttttgtgttgagccgatcaagctttccgattagtgaaattgagcgtttcttattactgccaaaaggtgtatcactaagctgcgcgtcaatgttgccttgagataagccactttttgcatttgtggaaatcttacgattgatactgccgtcgatgactcgaccatcgggagcgttaaatataaaggtaccttgtatttccccatttcctcgcaattcgccttttaaacttccattagcttcgaaagcaattattttgtcgtttgcctcaccaatgtttttagttgagaattttaacttttctatagtgttttctgacttcaagtgcactttcctttttccatcaagtgttagggaagcatcaatatcgtactttggagactgtatgtgaaatttagattctatttctagtttgtgcttcggttcagtcttcagagtgtcaatactggctgtaaagtcaccctttccatttttggctacacgaaactcgcctttggcagttaattgatttttgacaattaagttaagtttggcaaaggatattttatcttgcggatgttgagactcgctagttagtttaataagctctgaggtgtctcggctaatcctaaagtcgctgttggttttgtcaggtgtgccgattactttaagtatccattgagtaactttgtcctttccgctaatttgaacattgccttgaatattaatattaatgtcttgggccgagtaacgttgtcctatttctccttttgcagatagtaaagttccccaactagttactaaagagttatcgacaacatagacgtttccgttaaaatcacacttagatataacatctatggagtgcttgttaatctttgcacttgcctccagggaataatcctgtgcgtgtcgctgattactttcgtatttaacgattatggacccaattttttgctcacgcgaaatttccacatcgacatccattttattaacatcaaaattcgacataatctttattcctccgacctgcttatttttatactgaatttctacattttccacaagtgagcctgcacgagcagagttggaatcggcaagtttttggaaattaaaactaccatcactgccaatggaccaagcagctgctttcccgttagttttaagagcataagactggtcagctattgttaaatgtatcgaacttccataaatattttcgggagaatgttcatcatttatgaagaaaccagcctcatacagaccattttccaattttaaattttcttttattaagaaggtttggtgatctaaagaaattcgaagctcagaggttaatgaatttgtcccaacatccgaccatccgtttactgctacgtgggcgttattagaatttgacacttggaagttttcaaaattatatctttcaatattattactgtttttttttacaactatttttccgtctgcgtggtaaccatttatgctatttgagattccattattgtcttggatttcaattaatggcttgtattcatttccgtttttgctaaagccaattttacttttttttatttctttgtcttgttcgtattgaccatatacaaccaattcattcttgtcgttgtttattccaccttccactgcaaagtggcattgagagttatcaaaggataatctactaaatgttttaggcttatttccgagttcatatacaacagttgtatcgtgagaaactttggatccaggagtggaataatctaatttccacttttgggagaaagcttcctgtgtgtgaattcctttgaatgtaaatttgcgttcagtcgttaagtaaacggcgaaattaaatggtctagataaatgaaatttctccgaaacagaaagtcctctctctgcaacattgccgttaccagcttgaacctcacttaagcttgttgaactcttaatgcaaatatttaatccaacaagttccaattgattaaagcatatctcactaggttgagaattcttattttttttgttaccctttagggcaattgccttttgtttgtcttgttcggctacatatagttctgtgtcaacattaaaattaataagctcaagtttttcgcgtggtagctcgaggtcaacgttaaagccctctccatcgctaataacagctacagtaatatcgctaccggtggcagaatgggctgacgaaaccacgcggagtccagtggatagtacttgtgcattaaagcctatctgaacgttagcattaatatcgacactcggaacaaactttagtctatacttagccttttgccagttttgttctagaattgcattaatatcaagactaacggcaagatcaactttggtagctgcaaaaccttgggctacaagctccaaaggtactccaatactagttggataagcgaggtctgtatcaaggaataagtggtgactggaaaattgcttttcaaacgaagataattcctgttttgctttttcgaaagaagttgagaagtagtttataatgtcatctagggaacttggtatgttgtcgcctaggctcaaaaatgccaattccgaaccaaacagttttaatgacacatctaaattgagatcttgcacatttttgactccatacattttatactttttcgaaattttagaaacgtcatcaacaattgatcgtcgggctcggccaccagcagcaacaccattattgccaacttcaatgagtttaacaatttcgtcaaaatctttgtttactaatcctttcggccctaaatagtattccaatacgtcttcaacattttcttgtcggacgcttgcctcaaatacattgtagttcgtgccaaaaaattctgttgttacattgatacgagatgatcggggcaagaatccatgttgcgaatatattatttggtaatcagtgctggcgccaacaccaagggattcaagcttataggaaacctcattattaaaactgtatcgtctgtagtcaacgggaaatgtttttgtaaccctaatgttagccaaatggtatttttgctggtctctgctgacgtctgtagagtctcggatagcttttaaattagatgatataaatcctccaacctggttaacagtttcggaattaactatttccgaaatttgattagcaacctctgcgttagggcatgaaatcgcggacaaataagcttcaatacgcaactctgaatcttcgttacgattcttaagaagttccaaggatttagattgcaaggtttcttcgcatttaacttttgaaaaagcgtgcaaggctgcgacacgtatgcggttggagcgtcctgtggaagcgcactcacttagtgcagctaccgtattgccacttaaactctttgcatttcctagtccctttaaaatgtacacaatgcgctcttcttcccgcttagtatttggcttacagtgcttaaggccatcagaaaactttttagatatggcatcaatttccggtccttgacaataattttttaaacaatatttagcaactaagttacccacagctatatatagttctttaggcgcgttaggtaagagctgagaagccgcttgattgagggtctctttgtcaacacttttcactatgtttaaggacagtattgcaagtaatttctccttctcatcaaatttggaaagctgttttaatataactctagctgactcagctgtactggtccgaaataatccatccaaatataccttgcgggctaagactttgtttggatgtggaaacgcagccagttctaataaagtctcactatcagattggcgtagcaacctaataaactcaacaaactttttagctgtttcttttttcacatagtcgccagttgaatctacgagatcagatagaatcgttttgagggcgttaatatttttggaggtataggtttctggtctctgaaatattaggcttctgacagtagaaccagttcctggtgagtttgccttggtaccgcttggatttttcagttttaatattgtgactacttttgcactgatatcagagtttcttttagtatttccaataaacttatatgtttctgtcagctgaacattttcaattaagtggtttacaatcctggactcctttatatagtttgcctgcaacagcaggctagacgtaatgccagctttttcgttaactttgccggacaccaagccactgtttatctgctcgcgatgcgaacagctgtttaagttccgcgccttcgtaattatatttgcgttacccactttcgatgttgatgtatgtgtagggcacatgccgaaaacgtcaacctcatgttccgcttctattcccgattgaagcaatgatacaactgcgcgcttaatattcaaagagtagtccaagtcgctggagtctgagcaaatttgtggctctaaaattccacttaccagtgtaaactgaactggcttctgaatgctgttcaatatctttttctccacagactcttttgtattagttaccttaacggaacttaactgtaatgtgtacccacagtttcctttcgcaaaaatttttgcagatccggacactttaagacttgtatcatctgagtcgttcggaacgtcgctactcgctccaatagttaaaatactgtcgaaggaatagtcatagtagttgccgggtatgtacttcaaaagtccattgtcagctgtggcataaaattgtttagtatataaatacatactttttttgtattacttacattttggacatcctagattgcaagcgttttctaaaattaaaaagaaaatgtttgtatagaatgaattaaggaaaagtaatctccaagtcgccaaataaatattagtatcaccagaaagaattttaaaatttgggttccccctttaccacttatgtatttacctgaaccatctataaggtctataaatcgttatcaatgattttgagttttaaaggtgcaatgtcctctaattttatatgttttgattgatgggactcaaacgatttttatgaaatatatgattttttaacggagctattggcaaaagaatttctcttgctatccgtttttaacaatttactgaaaaagaatccagttggacattgcggtttaactggcaaaaacagcatttgtcaaactttgattttttttttttttttttgaatattccaaatccttataactttgacttttttggagcaaatttgaagttttgtattctaataaattttatagtattatagtcaatataatataaaaagtgtaattttgtaaagtagagaaaatcattcataattaaatctcctgtaagagatttaagtagttaaaccatgtttttacacgatcggctcatttatttttgatttagtttacataatctatatcattcgataaaaatcaagatttcaataatttatggttagcttaacttgtagcacttaccagcatttacagcaattgttaaaagcacagaagctaggattccaatcaaagcgatattgtatttcatcctggccattacgctgggccccttagggatagcctgggaatagcaaacgccacaatttgtatcacatttttattttactacatgtattttttacctttaccaacactggtccaatttcactttgtatatacttcttagattaagaaacacacagaccatccgcgaattaaaccgattcgaatacaatgaacgttgtctacgaattaagccggattacgtgaaaacactcactttaaatacctcaaataaatcaagaactcacacatctacaattgtgccacatagtatttaagtgtatgtcttgtaaataaatacaaatacagcgaaacaagtacagatgaagacacattgtgagagacatgcatttaaacgattctttatcaccagcgatgggtgctcaggccaaagccgagtgtatttaatataatctcattataatcggacttcgacatactcgaccctagcttagtacctttacctactctcaattttcatctaatacataagacaaaaataaaataaagaataattaaatatagatataattaaataaaaatatatcgctttgcataatacgtgctcaacttacaatggctgatataaaatatagaatatatagaaaatgtagacgctatagtaccatttcccgtctttcacctacattttctcgatataccagtggaaaatgaccagaaaaataataacatgaaaaaaaatcacaaaattttttttaagtgtgggcgtgacagtgagcgacgtaaaaatcggtagattgtaaaatctgattgataaatctgactgataacaaaaatgcaaaatatcaaacatttttcaaaagtgtgggcacggacggacatgcccagatcgatttggtaagaaatcctgctcaagtttatatatatatatatatactttacagggtcgtttatgcttgcttctaaacttggttgttttgggtgaccacccccttctggccatcctaccagacctattatacccaattaagcattttaatttacacttcaccgcattttctggcaagccatatgttaccaaaaccacccacagtctccattaaaaatgtaacttaaaagcaaatattgttcgaatcactctattactttagtagtacaaaatcctttcatctaccttttcaatattttaaatatggctttgggctaataaagtaataaacaaatcgcaaa

SEQ ID NO: 23090 - DNA, 10280 bp, DROSOPHILA
aattcgtagacaacgttcattgtattcgaatcggtttaattcgcggatggtctgtgtgtttcttaatctaagaagtatatacaaagtgaaattggaccagtgttggtaaaggctatccctaaggggcccagcgtaatggccaggatgaaatacaatatcgctttgattggaatcctagcttctgtgcttttaacaattgctgtaaatgctgaaaacgcttgcaatctaggatgtccaaaatctgacaatggacttttgaagtacatacccggcaactactatgactattccttcgacagtattttaactattggagcgagtagcgacgttccgaacgactcagatgatacaagtcttaaagtgtccggatctgcaaaaatttttgcgaaaggaaactgtgggtacacattacagttaagttccgttaaggtaactaatacaaaagagtctgtggagaaaaagatattgaacagcattcagaagccagttcagtttacactggtaagtggaattttagagccacaaatttgctcagactccagcgacttggactactctttgaatattaagcgcgcagttgtatcattgcttcaatcgggaatagaagcggaacatgaggttgacgttttcggcatgtgccctacacatacatcaacatcgaaagtgggtaacgcaaatataattacgaaggcgcggaacttaaacagctgttcgcatcgcgagcagataaacagtggcttggtgtccggcaaagttaacgaaaaagctggcattacgtctagcctgctgttgcaggcaaactatataaaggagtccaggattgtaaaccacttaattgaaaatgttcagctgacagaaacatataagtttattggaaatactaaaagaaactctgatatcagtgcaaaagtagtcacaatattaaaactgaaaaatccaagcggtaccaaggcaaactcaccaggaactggttctactgtcagaagcctaatatttcagagaccagaaacctatacctccaaaaatattaacgccctcaaaacgattctatctgatctcgtagattcaactggcgactatgtgaaaaaagaaacagctaaaaagtttgttgagtttattaggttgctacgccaatctgatagtgagactttattagaactggctgcgtttccacatccaaacaaagtcttagcccgcaaggtatatttggatggattatttcggaccagtacagctgagtcagctagagttatattaaaacagctttccaaatttgatgagaaggagaaattacttgcaatactgtccttaaacatagtgaaaagtgttgacaaagagaccctcaatcaagcggcttctcagctcttacctaacgcgcctaaagaactatatatagctgtgggtaacttagttgctaaatattgtttaaaaaattattgtcaaggaccggaaattgatgccatatctaaaaagttttctgatggccttaagcactgtaagccaaatactaagcgggaagaagagcgcattgtgtacattttaaagggactaggaaatgcaaagagtttaagtggcaatacggtagctgcactaagtgagtgcgcttccacaggacgctccaaccgcatacgtgtcgcagccttgcacgctttttcaaaagttaaatgcgaagaaaccttgcaatctaaatccttggaacttcttaagaatcgtaacgaagattcagagttgcgtattgaagcttatttgtccgcgatttcatgccctaacgcagaggttgctaatcaaatttcggaaatagttaattccgaaactgttaaccaggttggaggatttatatcatctaatttaaaagctatccgagactctacagacgtcagcagagaccagcaaaaataccatttggctaacattagggttacaaaaacatttcccgttgactacagacgatacagttttaataatgaggtttcctataagcttgaatcccttggtgttggcgccagcactgattaccaaataatatattcgcaacatggattcttgccccgatcatctcgtatcaatgtaacaacagaattttttggcacgaactacaatgtatttgaggcaagcgtccgacaagaaaatgttgaagacgtattggaatactatttagggccgaaaggattagtaaacaaagattttgacgaaattgttaaactcattgaagttggcaataatggtgttgctgctggtggccgagcccgacgatcaattgttgatgacgtttctaaaatttcgaaaaagtataaaatgtatggagtcaaaaatgtgcaagatctcaatttagatgtgtcattaaaactgtttggttcggaattggcatttttgagcctaggcgacaacataccaagttccctagatgacattataaactacttctcaacttctttcgaaaaagcaaaacaggaattatcttcgtttgaaaagcaattttccagtcaccacttattccttgatacagacctcgcttatccaactagtattggagtacctttggagcttgtagcccaaggttttgcagctaccaaagttgatcttgccgttagtcttgatattaatgcaattctagaacaaaactggcaaaaggctaagtatagactaaagtttgttccgagtgtcgatattaatgctaacgttcagataggctttaatgcacaagtactatccactggactccgcgtggtttcgtcagcccattctgccaccggtagcgatattactgtagctgttattagcgatggagagggctttaacgttgacctcgagctaccacgcgaaaaacttgagcttattaattttaatgttgacacagaactatatgtagccgaacaagacaaacaaaaggcaattgccctaaagggtaacaaaaaaaataagaattctcaacctagtgagatatgctttaatcaattggaacttgttggattaaatatttgcattaagagttcaacaagcttaagtgaggttcaagctggtaacggcaatgttgcagagagaggactttctgtttcggagaaatttcatttatctagaccatttaatttcgccgtttacttaacgactgaacgcaaatttacattcaaaggaattcacacacaggaagctttctcccaaaagtggaaattagattattccactcctggatccaaagtttctcacgatacaactgttgtatatgaactcggaaataagcctaaaacatttagtagattatcctttgataactctcaatgccactttgcagtggaaggtggaataaacaacgacaagaatgaattggttgtatatggtcaatacgaacaagacaaagaaataaaaaaaagtaaaattggctttagcaaaaacggaaatgaatacaagccattaattgaaatccaagacaataatggaatctcaaatagcataaatggttaccacgcagacggaaaaatagttgtaaaaaaaaacagtaataatattgaaagatataattttgaaaacttccaagtgtcaaattctaataacgcccacgtagcagtaaacggatggtcggatgttgggacaaattcattaacctctgagcttcgaatttctttagatcaccaaaccttcttaataaaagaaaatttaaaattggaaaatggtctgtatgaggctggtttcttcataaatgatgaacattctcccgaaaatatttatggaagttcgatacatttaacaatagctgaccagtcttatgctcttaaaactaacgggaaagcagctgcttggtccattggcagtgatggtagttttaatttccaaaaacttgccgattccaactctgctcgtgcaggctcacttgtggaaaatgtagaaattcagtataaaaataagcaggtcggaggaataaagattatgtcgaattttgatgttaataaaatggatgtcgatgtggaaatttcgcgtgagcaaaaaattgggtccataatcgttaaatacgaaagtaatcagcgacacgcacaggattattccctggaggcaagtgcaaagattaacaagcactccatagatgttatatctaagtgtgattttaacggaaacgtctatgttgtcgataactctttagtaactagttggggaactttactatctgcaaaaggagaaataggacaacgttactcggcccaagacattaatattaatattcaaggcaatgttcaaattagcggaaaggacaaagttactcaatggatacttaaagtaatcggcacacctgacaaaaccaacagcgactttaggattagccgagacacctcagagcttattaaactaactagcgagtctcaacatccgcaagataaaatatcctttgccaaacttaacttaattgtcaaaaatcaattaactgccaaaggcgagtttcgtgtagccaaaaatggaaagggtgactttacagccagtattgacactctgaagactgaaccgaagcacaaactagaaatagaatctaaatttcacatacagtctccaaagtacgatattgatgcttccctaacacttgatggaaaaaggaaagtgcacttgaagtcagaaaacactatagaaaagttaaaattctcaactaaaaacattggtgaggcaaacgacaaaataattgctttcgaagctaatggaagtttaaaaggcgaattgcgaggaaatggggaaatacaaggtacctttatatttaacgctcccgatggtcgagtcatcgacggcagtatcaatcgtaagatttccacaaatgcaaaaagtggcttatctcaaggcaacattgacgcgcagcttagtgatacaccttttggcagtaataagaaacgctcaatttcactaatcggaaagcttgatcggctcaacacaaaaaccaaagaattttctgcaaacagtaatttagtctacacggcatttaatggagaaaagtcggagataagttatcaaattaagcagcaaccaaacggggatgctaaaaacatcgattttagccttaaggcctatggaaatccactaccccaaccttttgagatcgcttttgccttaggagattacagtgcacagcatgccgtagttagtatcacaagtaagtacggtgagattttttctgtaagtgcaaatggaaactacaacaataatcaagcacttgaatatgggcttcaggctaatattgaaattccgaaatccaccttgaagtccttagaaataaacagtcatggaaaggtcctaaaatctttaatcggaaatgaaaacgctgcatacaatgtagaattcttcctggattctaaaaccagtctagggcaatatgctcgtgtcaatacagtatggaacggcacggcaaatgatggcagctatgattttgaagctcaaactaacaatatggagtctccattaaagttcaatggtaaatatcatcggaaacaaacaggtaatataaaagatggtgaccttaccggtaaacaaacgtacgtacttaacgcacagtacggagcacaatacgtaaaaatggatgcttcattaggttatggagccgagaaagtagatatagcatatgttatagattccagctttgattctgtaaaagatatcaaagttaatattcgcacttttaaacctttggatgattcgacatatgtagtcactgcactattcaaacagactgacaagtcatacggattagacacaacattttatcattcggcccacaaaaaaggtgttgatattcgtttagatctgttgaaagaaaagccaattatcatatcgagcattgctgaactcttaggagaccgaaaaggaaaggtactctttgaaattctaaacttggccgatttggacattaaaataaatagtgaagcttcatacgtcagcattgatgagttttatataattgtcaactggagctcgaagaaattaaagctcgatggctacgaacttgaagcacgagctcaaagtaagaacattaaaattcaacttaagaatgaaaatggcataattttctcaggtacagccacttatgctcttaaaaaagaactaaacaaaactattatcgatggacaaggcaaagtgcagtatcaaggaaaggcgctcagtggcaattttaagcttacccggcaacactttgattttggtactgatagggaagttggtttctcttacacttttatgggtaatttaggatcgaaaaacggattaggcactttaaaaatcacaaacaaggaattcaacaccaaattttccgtttgtgaagaaaagagacagtgtacaaatttaatagtacaatcaattgtgagcattgatgaacaaaaactggacgctgtggaacataccacacttattattgttgacctgagagattttggatatccatacgagtttgaattaaagtctcaaaatacacgtcaaggtcttaagtatcagtaccatttagatagctttattataacaggaaataatttcaagtaccaatttacagccaacgttcagcccacgtcgtccacaattaaattagcactcccgaaacgtcaaattttgttcgaaactactcagaaaataccagcagacggaagcctttttggccgctacgagcaaacagcttcattctttattgacaagttgcaaaagcctgacgacgttgcccgcttttctgctattgtagatgtaacgggcaccgaacgcgttgcattcaacgccaacgggaaacttaagtttgaacatccaactattcgtccattaagtatttctggacaattgaatggagacgtgaatcaacagatcgcaagcgccgaagtaatatttgatattttccgactgccggaacaaaaagtggttggaaacagtgaattgcgcaactcccgttctcaaaatggtttcaatattgcatatattacaactgttaagtctgctggccttcagtttcagtaccaaataaatagtaacgctgcagtggatattgaagcccatgagtataacattggcttggaattaataacggtgaaatcgatgttaaggcgatttcgtttttaaataaggaaaaatttgaaatctctttaagtgaatcaaataaacatatcatttatatagtcggagacttttctaagcaaaaccattatgcaaagcttaatacaaaggttcaaattcttgataaaaatccaattgaaattacatcggaggttcaacctaattctgcaaagattatactgaagcgtcaagatttcatcgatggcactgcagaagttaagctgggcaaggaatttaaagtagatgtcattggaagtgggaaacaattatttaatggccgagtggcattagatgcaacaaactttttacaaacaaactactttataaatgaagatcatctaaatggtttctggcatattgttgaatcggaaataaataaagatagtgaatatatttctgaaaatatcaaggaacgcttaaaaaaatctcgtcaagttacggataaaattgttaaattggctaaagaagctggaccagatttttccaaactgcagggtaaattacttgattataaaaatgatattgttcaagagcttgaggctgatcaatcaattgcaccgattattgatggcatacgcaccctatttaaaaaaatagccggtattgttgatgacataaacaaggcaatatcagaaatattggaaaaggctcagaagtccattgttgatatttacgataaattgcaagccctttggaaggattcccttcttaaagcctgggaagatttcattataactgtacagaaactaataagtacactcaaaactgagtttatcaagatttgtacacagtcatttaaagatctcctttctgcgcttgagaaatatggaccagctctgaaaaactatggaaaagctattggagaaattgtaaaacctataaacgacgctgctcaggaagtcattaaaattgtggttaatgccgctgaaggtgtaacccatgaattcaagcaatatgtcgcaagccttccgtcatttgaaagtattcgtaatgagtttaatgacaaagttaaagttctgaaactatttgaaaaggcaacagagttaacaaatagtctatttgatcagattaacattttaccacagaccccagagacttccgagtttctacaaaaactccacgattacttaatcgctaaattaaagcaagaacatattgataatgaaaaatacatcgaagaacttggacagcttttaataaaggctgttcgttccatttgggtctcgattagaagcacttatccaggctcatcggatcatgtaattgattttcaatcttggattggttctctaacgcattcttttgactcattggctgttcttccgagcatactttcattccgttcaagtatcttaaactgtttattaaatgagaattgggatgtagtatttaacaaaaagctattatactcatggatattctttaacgacttcgaactacgaggccatgtcgtcgatgggaagcatatattcactttcgacggcctgaatttcgcgtatccgggcaactgcaaatatattctcgctcaggacagtgttgacaataacttcacaataattggtcagcttacaaatggaaaacttaagagcattacgcttatagatcgggagggtagctatttcgaagtagcagacaaccttgccctgaagctaaatggaaacctagttgaatacccacaacacttgtctggtcttcacgcgtggcgccgattttacactattcacttatattctgagtacggagtaggcatagtatgtacatcagacctgaaggtttgccacatcaacataaacggattttacacaagcaaaaccagaggacttctcggcaacggcaacgcagaaccatatgatgacttcttgctaatcgatggtaccttagccgaaaattcggccgccctaggcaacgactatggagtaggaaaatgcacagcaattgaatttgacaataaccagtttaaaagctccaaaagacaggaaatgtgtagcgaactgtttggtattgaatcgactctggctttcaatttcattaccttggattcgagaccttaccgcaaggcatgtgatattgcacttgcaaaagtggctgaaaaggaaaaggaggccactgcgtgcacgtttgctttagcttatggttcggcagttaagcagattaataagtgggtgctattaccaccgcgttgcattaagtgcgcaggacctgctggacaacacgactttggagatgagtttactgttaagttaccaaacaacaaggttgacgttgtatttgtcgttgatatcaatgtaacacccggagtgctgtctaatttaatagcgccggccatcaatgatattcgtgaatcattaagaagccggggattttcagatgtacaagtcggagtgattgttttcgaggaaaccaaacgatatcccgctctactcacaagtgatggtggcaaaattaactacaagggaaacgttgctgatgttaagctggctggaataaagagcttctgtgacaattgtgtggagcaaattataactgaaaaacgaattttagatatttacaattctttaaaagaaatagtaaagggcattgcaccccaagcagatgaaaaggcgttccaattggctttagattatcccttccgcgctggggcggcaaaaagcattatcggtgtgcgaagtgattctttagaatataagaattggtggaaatttgttcgagctcagttaactggatccatcactaagtttgatggtgcacttattcatcttattgcaccagtaaaggggctctcattagaaggagtgttaagcgaaaaactaattggcttcaattctcgattggtggctactgtagatgggaaagacagcaaaaaacggactaagctgcaattcgataacgacatgggcattgactttgtccttaataacggtggctgggtgtttgccacacaaaactttgaaaaattaaaagcttcggaccaaaagaaaatgttgaatcagattacatcatcgctggcagatactctctttaagacggaaatcgtcagtgactgtcgctgtcttccgattcatggattgcacggccaacataagtgcgtcattaagtcatcaacatttgttgcgaacaaaaaggcaaaatctgcctaaactgggcttacatgttttatcgaatcccttcgtgaggaaaaatctttttttaaactaagtaaaacgaaaaattaataaaaacttaatatc

SEQ ID NO: 23091 - protein, 2307 aa, DROSOPHILA
MARMKYNIALIGILASVLLTIAVNAENACNLGCPKSDNGLLKYIPGNYYDYSFDSILTIGASSDVPNDSDDTSLKVSGSAKIFAKGNCGYTLQLSSVKVTNTKESVEKKILNSIQKPVQFTLVSGILEPQICSDSSDLDYSLNIKRAVVSLLQSGIEAEHEVDVFGMCPTHTSTSKVGNANIITKARNLNSCSHREQINSGLVSGKVNEKAGITSSLLLQANYIKESRIVNHLIENVQLTETYKFIGNTKRNSDISAKVVTILKLKNPSGTKANSPGTGSTVRSLIFQRPETYTSKNINALKTILSDLVDSTGDYVKKETAKKFVEFIRLLRQSDSETLLELAAFPHPNKVLARKVYLDGLFRTSTAESARVILKQLSKFDEKEKLLAILSLNIVKSVDKETLNQAASQLLPNAPKELYIAVGNLVAKYCLKNYCQGPEIDAISKKFSDGLKHCKPNTKREEERIVYILKGLGNAKSLSGNTVAALSECASTGRSNRIRVAALHAFSKVKCEETLQSKSLELLKNRNEDSELRIEAYLSAISCPNAEVANQISEIVNSETVNQVGGFISSNLKAIRDSTDVSRDQQKYHLANIRVTKTFPVDYRRYSFNNEVSYKLESLGVGASTDYQIIYSQHGFLPRSSRINVTTEFFGTNYNVFEASVRQENVEDVLEYYLGPKGLVNKDFDEIVKLIEVGNNGVAAGGRARRSIVDDVSKISKKYKMYGVKNVQDLNLDVSLKLFGSELAFLSLGDNIPSSLDDIINYFSTSFEKAKQELSSFEKQFSSHHLFLDTDLAYPTSIGVPLELVAQGFAATKVDLAVSLDINAILEQNWQKAKYRLKFVPSVDINANVQIGFNAQVLSTGLRVVSSAHSATGSDITVAVISDGEGFNVDLELPREKLELINFNVDTELYVAEQDKQKAIALKGNKKNKNSQPSEICFNQLELVGLNICIKSSTSLSEVQAGNGNVAERGLSVSEKFHLSRPFNFAVYLTTERKFTFKGIHTQEAFSQKWKLDYSTPGSKVSHDTTVVYELGNKPKTFSRLSFDNSQCHFAVEGGINNDKNELVVYGQYEQDKEIKKSKIGFSKNGNEYKPLIEIQDNNGISNSINGYHADGKIVVKKNSNNIERYNFENFQVSNSNNAHVAVNGWSDVGTNSLTSELRISLDHQTFLIKENLKLENGLYEAGFFINDEHSPENIYGSSIHLTIADQSYALKTNGKAAAWSIGSDGSFNFQKLADSNSARAGSLVENVEIQYKNKQVGGIKIMSNFDVNKMDVDVEISREQKIGSIIVKYESNQRHAQDYSLEASAKINKHSIDVISKCDFNGNVYVVDNSLVTSWGTLLSAKGEIGQRYSAQDININIQGNVQISGKDKVTQWILKVIGTPDKTNSDFRISRDTSELIKLTSESQHPQDKISFAKLNLIVKNQLTAKGEFRVAKNGKGDFTASIDTLKTEPKHKLEIESKFHIQSPKYDIDASLTLDGKRKVHLKSENTIEKLKFSTKNIGEANDKIIAFEANGSLKGELRGNGEIQGTFIFNAPDGRVIDGSINRKISTNAKSGLSQGNIDAQLSDTPFGSNKKRSISLIGKLDRLNTKTKEFSANSNLVYTAFNGEKSEISYQIKQQPNGDAKNIDFSLKAYGNPLPQPFEIAFALGDYSAQHAVVSITSKYGEIFSVSANGNYNNNQALEYGLQANIEIPKSTLKSLEINSHGKVLKSLIGNENAAYNVEFFLDSKTSLGQYARVNTVWNGTANDGSYDFEAQTNNMESPLKFNGKYHRKQTGNIKDGDLTGKQTYVLNAQYGAQYVKMDASLGYGAEKVDIAYVIDSSFDSVKDIKVNIRTFKPLDDSTYVVTALFKQTDKSYGLDTTFYHSAHKKGVDIRLDLLKEKPIIISSIAELLGDRKGKVLFEILNLADLDIKINSEASYVSIDEFYIIVNWSSKKLKLDGYELEARAQSKNIKIQLKNENGIIFSGTATYALKKELNKTIIDGQGKVQYQGKALSGNFKLTRQHFDFGTDREVGFSYTFMGNLGSKNGLGTLKITNKEFNTKFSVCEEKRQCTNLIVQSIVSIDEQKLDAVEHTTLIIVDLRDFGYPYEFELKSQNTRQGLKYQYHLDSFIITGNNFKYQFTANVQPTSSTIKLALPKRQILFETTQKIPADGSLFGRYEQTASFFIDKLQKPDDVARFSAIVDVTGTERVAFNANGKLKFEHPTIRPLSISGQLNGDVNQQIASAEVIFDIFRLPEQKVVGNSELRNSRSQNGFNIAYITTVKSAGLQFQYQINSNAAVDIEAHEYNIGLELITVKSMLRRFRF

SEQ ID NO: 23092 - DNA, 2483 bp, DROSOPHILA
caatgcttgttttattaagcaaatattgcccacaagccgcatcagttgcctgaaaattgtttaattcatttattattgtatgtaccactgcattgtttcagtgtagcgctaatcctctgtcgctgcgctgccaatcagtcgcaacatctcttgagtcgcactaacccatatagaaatataggaaagttataataccctgtaaagtggtatagcacttgggtttcttaagatacatacttcaaaatatacaaaaataaaatgataataaatcagtttagattgcgtcaatcaagtttctgcgaatatatcccggtgccttgtggaataataagctttttagttaagataattagcccacttaaatatgattctttgcggcgggtttattcctttgatgataggagattattgttgtttttgtgaccttgaagtgtattccaacttcggatcgttttaatcagtctcctcatctagtttgttgtgttttgagtgcgtgttttgattttgccagtatttttgctatctccgctaatccctctctcctccatttccgtctctttcgtgctgttttacactgcaaaaaaaatataaaagaacaattaaaataaataatattagctattataatctatatttgaattattaccaaacatccaagtgatctattcaaatgatcttgaatatcagttagttcggattaataatttcacagtgaatctaagcttatatgtaaatatttttcagtgcccttcttttttgtaaaactttgttgttcgcccaatttgtagtcgccaatcaattccgtgtggttgttttcttggaagtcaatgttttagttcgtttaattttattttttttattatttatttgtgcctccaaagatgatgcgcctctgctgcagtcgcagtcgcagtctcagtcgctgtcgctgtcgacgtcggtagatctcggcctggaattctccgatcttcgacgttttccaatttcattcaggcgacaactctcgaacaagttacttcacaacacaaccttgtctacgatcctccgatttcccgggttttctctgcattttctgtacactttttcatttttttttttgccatgaacttcaatcgcatggataccgcccatcggttgcgcgtcgatgttcgactttatgggggatcgatgggaaatcagctaaatgacaaaggcaccgcctcctccacgcccaccatttcatcggacgatctcagtaggtgttttgcaccacaatgggatctataacttaataactttacctgtttaatttgaatccctataaatatgattgttttctaatttcttaggtgatctcgccgattcaccggtggatgagaaggccgaagctgatgtggaggtgaccaacgagatctcggcgccctatgaagtgccccaatttcccattgaacagatcgagaagaagctgcaaatccagcgccatctcaatgaaaagtgagtgttagaaaccaatatacatatatcataaagatgctcccataatgattaaaattaaatggtaatttagctttgagagattatacttttaaattgttggattttgagaaagacctgattatttttcacttatcagcaaaactttagtgatttgctattggaaactgtaacatattacagtttaatcagttattaataggacttacaacctgtcttacgtgctacatttaataaaatataatacgttttagagaagctctacactttcaaaatgtaagtttcacacaatatatagaaaagcaaactttcatttttaaaataacaaacgacagttgaagtttactatgtactttttgtttgtaaatatatcttcataatttacatagatatatatatagattaaattatatgtcttcaaatccccattattcggttatagtaatcagatccaaacctaaatcggttctgcttcgctttagatttgtttactttacatgcaaagcagacaaaaaacacggcgagttcacagatctcgtgattgagtccttatcagcttttctatattaaggttagatttttttcaaggctaaaatctctattaaacaaacaaagaaattttaaagaggacaaaaataaaaacaaatcttatctgggaaacatatgaaaatatgtttttacatctcaaaataaatgataatattttctttgaatattttgtaattcgaacatatcttaggatcttacatctcataatagatggaaatatattttttttatatttgaacatattcttaggatttgcacgcatttcagtctgcttggctctcaatcatgagcagtttctatagccccgtaatgaggcagccacaaaatgtgtaggcgttgcaattatcagtctgccaggtgggcggtgaatgtatgtatgtagattcccgggcgtaatccaaagtgggtttatgtctgccgccagagtccggatctcggttgctgtttggattttcattttt

SEQ ID NO: 23093 - DNA, 389 bp, DROSOPHILA
ctctcgaacaagttacttcacaacacaaccttgtctacgatcctccgatttcccgggttttctctgcattttctgtacactttttcatttttttttttgccatgaacttcaatcgcatggataccgcccatcggttgcgcgtcgatgttcgactttatgggggatcgatgggaaatcagctaaatgacaaaggcaccgcctcctccacgcccaccatttcatcggacgatctcagtgatctcgccgattcaccggtggatgagaaggccgaagctgatgtggaggtgaccaacgagatctcggcgccctatgaagtgccccaatttcccattgaacagatcgagaagaagctgcaaatccagcgccatctcaatgaaaagtgagtgtta

SEQ ID NO: 23094 - protein, 93 aa, DROSOPHILA
MNFNRMDTAHRLRVDVRLYGGSMGNQLNDKGTASSTPTISSDDLSDLADSPVDEKAEADVEVTNEISAPYEVPQFPIEQIEKKLQIQRHLNEK

SEQ ID NO: 23095 - DNA, 15490 bp, DROSOPHILA
agactctgaaaccacaattaattagtaatagcgcccactagagcccgaaatagccctactaaaaatgtaaagcccctagaatggtaagacaaattaagccgcgccgccagacgaacggaagacttcttctgagtcgaccgagctctaaggcctgcagagacccgcctgaagctttgccgcttcttcagagacgtcgtggtgagaccacagagccataagagccccaccaaacgaaagtgaacctgcggagagcacaagcgttgcgccggcgtcggttggcgacgctcggtggcaacgcagacgttgactcatctgctgagacgggcagccagcctcagtgattcacttgttcgcgttcgcatctttggcagctgaggctgcggcttcggcttctgatgcaggcgtcggctgcggagcttctgcgacgcgctgcggttggggctttgctgggcacatataaaacaaacgatctcggagaaatattcacaatcatattcaagttgttcgttcgcgcgttcgagttccagtccaaaaaagatttggatttccataagtgtaagaaaagaaacagacaggcgacagtgatacagtgtaatcgttagctccggcgcacatccgggtttcggaagggattcggttcggacttatgtacacagttcttaacctaatatccatcctaatgccccaccggcggtgaacttgtgaaaagttaaaggacatcgatcgtaactgtctgccaggcgagctccatttgaaaatgccgcaatgcatccaggtcaattgcgctgtttggctattacttgtgcagccgcagcagcagccttttgtggttggaaattaaattcatttgcggttgattgattgatggatagttccattgattcagtttcagttgtctctgctccgaggttgccgagtcgctacctccgtccgtccgtccgtccgtccgcccgcccggccgtcagtttgtgcagccatttcgacttcgcatttggttgccaccgtccattgtgtttagctcgttggaaatttatttgttggtgatgcgatctgaactttgctgttcgttgtttcttactgttttgttgaatggttgccaaatgcgccaacacaaaaatttgcagttttaatttatgtggaaagcgcccacggaaatgcagcagaaactgcaataagcagacaacacagcaccattagaaccaccagcctccgaaataacagcatcaaaattcagtttgtagtggcctctgcctcttgccataagccgaaggagttactacatagaagtactaaatataagattgacaaaacattttggagccggttgacatactgcccctaaaaagaataaacacattttacacgattgttttggctaaaggacctaaaggattttacatagaacttttgaattttcaagtatgtaaagtaaaatttttcaattaactgtggaccacaaatttcgacttgagttgagtaaaccatgcccatgttcctattgaaaaggctagttaattaatgtatattaattatattatatatactcaagagcagcgttccttttcaataacaaaaatttagattttagatttcagctgaaaaggttaacttaacacatattgtataagcaaggggacaatttcaacagttttatttctgtttagcaatttttcggaataaagcaattgtttgcaattaaaaaaaaccgaaaagttatatggtcgaaaatagtacgtattcagtgagtgcttaaaaaaaggtattaaattttgaaatgatatatgttatatgtatatattatatagtacgctattttaacttatatttgtatcatatgcaacagaaaaactacttttgaaaaaatttgtcgcagatagctttaaaattggaagacttgtttgcgtagaagcatactgcgttctgactgaattcaacatatgtacattcggcaagggtataatgggaaattccctataattgaacaagtatcgcataaaaatgcaaattatattatattttgactaatttcatacttcactgtagttcaatttatatatgatattttaaatgatgatttgatgcgatttttgaattttgaattttaagaatattacttatctatttattttcgattttttttttttgcatatcggtagaaaaaaaaaatacaagcggaaacgcttccttctacatgttacatacttttcaaaaaatcgtatatactctacgagtaatgggtataccatttattctttaaagtatttagaatatgggatgggatatcgatgggagtttcaagttaaaattaattcaattttaaaagtgagtttaatatctacagcatatttcctgatgatatttataagttctataacttttacctgcctggatttgatcgatatttaaactaataattgtaatttgctgaatgtgtaacaccgaacatcctaaccgacttagcagaactgctcaacgcaataatacaaaaattacttcttcacttataaacaaacaaatcagcttcaaattgtgtatttgtttaacataacagcaatctaaatttaacaaatgacgtgtatatacatttatattagacaaagccgcaaccgggctagaaattcagatttttagcccactgcacactacctaggcactatgtcgctatgcgtgaattttttaaaatattctcctgcatgcatatttggtactagaagactcgcagcggcttcatccgtgttttacaaatttctcaagtcggttgaaaaaccagaattggggaattctcaaattacgtcatatgattggcttcggaattgctgaggtggcaaccacactttcgcttgtggattttttaaggtgccaaagcttgtttgatattataattccggtcagctgtttgtagaacagaaaagccagtggcgaataaagtccaacttataagatattggcataagccgatgcagcaaaatatttttgctgaatgttgagaatacataaagtgatatttcccacgtaattttttgatgtgtgtgtatctgaatgtgcgttgactaatattctccccactcgcacgcaaaatcatttctaaaaattatacaacatcattgcttagctgaggcctgaatatggggaatatggcatccattagttggctggtttggtaatagatgtaagcctacaacccagctcgtaagctgagcaatgaattgatctagggtagcatggtgtgaatcgaatagcgcttttcaaagtgcagtaaggctctgaattgccagaaagaatttcgttctcgtttcatacttcgatttattagtggggaaagcggcaaaacgttgtatctccataattcccgtcattttcaacggtttttcaatataatttctcaaccgttatggttgctgcttcaagaaagttcgtggcttggatttctcatacttaataaagtatgcgccgtgagccaattataaaaatatttgttgtccataaattctaagagcttaaaatagaaagtaggaaatttcgcagaaatttctaaatcggttactgaaataaacaatctttaaatgttgtccgaaaagtccgaaaagattttatgctaatttcggattggtaaaaaccagcaaatacgcaaattgttgtttttgcttggtaccggggctgcttttactatttttagcttttagtcacggacttgtcgaagaataacatgctaatctaagcagctcttttactgtcgtccattagcggtttactgtggtacaactcattcagcaactattccttgtatcaatcaaaaactgccgtcaaaaactgacgcttccaattgttcgtttgccagacgccaatcacagtttttgcagatgatatcgcagagattgggggatctccctgaaacaggttatcataggagcagcaaggcagcaagtcttaatctttgaaattcctctatagtttctatagccatttgtggttccagtctgaggtagcacacggacttgtttggaactcgtgaaatcccgatgaaaaattatttcatcatagctgcttgcttgcattaagatggtgacgaaatgttgtctctcatcggaagtcttagaattctttgaggtcattaaatttgattgactatccctgatttgatttggtttcctcttctatttttccctagtgctcttgagccccagatccagagaatccgagcgccatgtccgcttcacacttcagggagcagctcgccctgtgcattaccctggcagtgctcgccgctgccagtggcgactaccgggccaacatgtttctcaatggccaatatcaaaacggtatcaaggatcaaaaggagaacaaccttttagtaaacccctcgacgaacgtgttcctcaaccacgccataatcagcaggcaagcgtcgccgttccagggcccaacctatctgccgcccaaggagttcctgaagtgcgctcccggccagcagtgcgtccgcagtggtcagtgcctgaacggatatttcgcccagcaactgcccaagattcaagtaagtgaaacgccgaaacgctttctacacacgggccaacgttaatttttgcccatttgtattttcgtctactggatcatttggaatattgatttcgggttttcccggaacagaaaataaaaataaaacaaatccgttcgtctgctgctgctgcttgattagcttgcctgatctgcattttgcgctttgctcctgacgctttttggcttaatggctggcggtttgagttgtatggcacatttaccgctattttccggtttgtcattaccaaggttcgaaataccagcccacatacatattaacatgctgtccggggtccgtagaccgaagaccgaatatcgaagatcgaagaccgtagggggacggggagtttcgtaatcgcccaaaatcgaataaaaagcgaactttgtgtttaattgctctgccaaaaacacattaacacgcatgtgtgtgtacaaaaaaaaacaagaagtcagcgacaccgaagtgggtaaacaacccaaattgggcagttcgtcaacatatttcctctaccggtaacgaacgaacttcacaacaatttgcgggaaatactatgagaacttctcaaactaatggaaggagcaaggaatgcaaattatttaccaaataagatagactaccaaatgtaatgttggaccaacatgttctagggagaaagttaaactcgacattttcaatactctcacaaagttttaaacagaaaaagaaagaaagaaattaattattattaattattaaaaaaaaaaaaacaccaaaaaattttctaagttttgcaaaacaccctaaatatgcattttcgtcaaaatatctggttaagtgcaaaacgaggggaattcgcgacatactggtaaattgtacatatttcggaataattagcaaaacagttggaagactaactatcattacgcgctatatcagcgatcttcaaaactaaacaaactgatgatgtcaaaaccagcaattgaaatcgctcacaaactcacagacatatatagtatataacaaacgaactagcagttccgggaccgtggaaacggatacgccaatctactgttgcgattgaagcacttgcccgaaacagttcaaccgtacgggctttagtatgcgctggcactttaaaaaaatagctgccacgcatgggttcgatcgcagctatttaattaagaaaccatttcaaaacacacaaacaagatctgagtgctttccaaaaccactagagctggtcttctgagatcgaagcccgaaatgattgcttcgtaaattcatatatccatgctatttaaagtccatttagctcaaatcacgctcaggccaaagatctttattagtcaaggtcggtcgggcctcaaagcaatatattgagaacattcaaatgggtttccgattttaacatttcttgcttattggaggtattcaaaccgaaataaataagaggatttagacagattaatttgtaatattcagagactactgattgatatatggagtgccagttctggcgaatctacgatctgaactggtttttaaactcttctttattggacaggcgcttcttgcctgccatctacagccgatgggaagccgcacaataaattgctgagctacaaattcctcaagtcgaccccgccttatgctactgatgtggcttctgatctctgaccgaccagacgctctcaaagttatttatttgcaattgttcagttgctaaatgccagttgaccattgagatttgataaaactaaatgtaccatatgtacatatacccgcggcaaagttcaatgcgaatgcaatagcttaaatcatctagccgccggccactgactctagaacctggctgtccacctcttagcacatcatttatccaaactttggtgaccttttggccacataatcttaatcagtggttatgtgatgctactttggtgttattctaaagttggtaatcgactagatactccattgaaaataacaatttacgtagtgtttttgaatttttaaaaatattacaagcctgaggagccagtagagcgtgttatcaaagattaacatttgttttctttgattttctaatagggtttatactagagtttatcgtatatatgcattctacaactatttccatgtgcttggaaggtccagatcgagacgggtaattatttcgcatagatgccttccaattagttcctagcatggtctcatatattgtccacatgtacaatggttcattttgccatcaaaaaagtgcaaccttttcgcaacccaagccaaaacatcgttcttcacggtgggaacaaggtgctcggcctcttgttattgttcttctatggaattcctgattgttgcgccgtcgagagacattaacatctatggaaatttattggctaacatgacttgtttcaataaacagaataagaatcctccagggcgctgcgcagttagttaagcatcttctgctgtgttgtatttcgcttactgacgttttaattatactaaagtccctcatatgaatgttatgaatataagatgagaattgctgcttaagatcagtcaactctttcaaaaactgctttggaatctttgtatttttaaagattaaatttgtatcctcagctcagttctttagtatgctatgctatgccttaaaaaaactaaccataatcgaactgtttatttccagaactgtgatccggaaaccaccgtttgctgtacttacaggccgcctcccaccaccacaacaacaaccactacttccgtgccagtggccaattgtgcctacgactccgactgtgtgactccggacaactgccggaacggcgaaattagcgccataaactacgtaaagaagcaaggagtaagtctttactcatgatcgatcgcaggcggccagaatacgtattcgcatcaaaagagttaagcaattcatagggggaacaactggttttcggcatcattagtacgtagggttttcccactcattcagcctttgtagcatcatttcaatagcaaaatagctgtgctgctttaatgttgtctcagtgacgaaacaatcaaagctactgcagcggatacaactggctatgccagtatcaaactcgaccgcaactatcgcagcccatttcacaatcgcgttgatgcacgacggacggagcatcgttgagaaacggcaccgccagtttattggcacgcaataggttagttatgtcggctgatatcctttaggcccaaaagtacttgaatgtttgagctggccgctgatatggaccgctttaaagtatactctgtggcagtgcttcggggcgagtacgcaattaaaataactgtggcagtggtaacgaacttgacgccaccaagcagtagtccaactggaatgccgttgcagtacaagtattgcactacactacatgcacgcatccgagtaaaaagtgttaaattacagccgagctgtatatgcagtccatgcagaccctgctgcaccactgtatctgtatttacaagtgcacataagcagaaggtaggtcatcggctcggctcgataggagaggacaatactcagagaggcgataagacattcgactaagagagatctcaggttttcaccaggcaggccagtgcaattgcataatttgcttacaacatgccggaaaaacgggtcagttgcgtaccgtgttgctgcatgcaacgccttgaaaaaataagcacaacaagtgaaaaatttggcagtgcaggcggcaaagcaacagctgcactttcggcattgtcatcactgatgcctctgaaaactcaataaaatcgttgcatcgttgacttgcattctttggctctgagctctttcagcctgcgatcaagaagccctttcttgtaggaccccatggtgccaacaccccccccccccccagcccccccccctcctgtgtacggtcgcaacttagctatacgcgcatcgacgtcaactgcggggcatgcttcgcagaacccactgtggtgtgtgtgtgtgtgtgtgtgtgtgcctttgttcagcagagagccacattaatgtatattatcaatgcgatggctatagttacgcccaggcggcgctggatagtgtagccatgaaaacgctaggaatgcaggcaaggtcacttaactctgggcataattattatgtttttacaaccccaagtacctctggaaataggaatttcataaaatcgattaaacagaattttcagtacgttaatctcttttttttttaagttgcgcgcaagataaaagagttttgttgtaagtgtggactatgttaggccattgaaattgcatacgcgtaattaactgccatctcaagtattttaaaaaagtgtaatccaaaaaatgtggcttgcggtgagcattttatggttaatgacgtatgaaaaacaatagaattgcaatgttagttgttttttccttcttaattaaataatattttgtagatcttgaaagataaagaaatgattgctttcgctcaattaaaagatactgatttgagttaaaatgaatttaaaaacctgcaccctatatatattttgttttaaacacaaaaaaatgaaatggtggcctaatttcggctatttcactatttctccttctgtagatttcaagagttatgaaagtttgcctgtaaaatacatggctcaagtagaacttgttccgtagtttccttcgttatttagctagtcagttttctcaaaaagttcacatctgccagaaagttcggcacttaaggacagaatggagctatagattctctactccaagccaagaggtgcctcagggtaaaaaccaaggcacgtaggctcaaaaagcattcatagcaagaaagccagaagccgggaatgtcgagcgcttagcatgcagacgaaaaactcaagcggctaactcaaggtctaggtcgcgctcgagttctcttcgaggttgctcgcttgctcttgctcatacggttgtcaaaaagtcgttaacagctcttaacatttattcgagtcgtgcaggttgactttgctggtgggttttcggtttcctttggctaatgcgtgttttatggtcatcataattgttatggttttattagctttgtttgctgctaatcgatatcgattgttattgttccgatacactgtcaatggctgcgactttgttttaattaacataaatccgtgatgtatgtacaataatatacagcgcaaaatgacatcttgcccgcttgatttgggtttttattaattagttttcgtatagagcgcgagagacttggtatctagtttggtcataaattaccgagcttacgcccacgttaatgatgattaagcattaactgcaccgcatgacgcataaacaaaaggctttaacgccgaacttctaacacaactggctggctgactggctgactggctgactggcgacctgcaagcacttgtacttcagggccgagcgtggtatttagaagcttcttccactctgcggctcggctcgattaaacttggcccgcaccaagatagccgccactcgtaaaacgaaaatttagaagcgtccactttataggtttataaaaagtgtgcggtagggaggtgaggagcaagactgggcaatttagtgttgtgctagaggcgccttaatgcagtcataaaaattgtttcgtgtgtgttgtgaagcattagtgtcataaatttcgccgctggagatgtcgtcacggcttgacctttccccaagccattaaggcagcaacggcctatcaccaaagtatccgcttctgcttttctgaatccattgaacttggtaatggctttaaattatacatttttataatatatatatacttcgagtaattgcaacattattaacaaattgcgacagacaatctatgggacattaacaacaaccttaatggacaacttgtctggtatggccagcaacaacatttataaaaagcattttggggtctccctgcgcgcttgtcgttgtgtcgttggtgactacatattttagctgtcgctggtacacaagtagtagctcgaggtttttgttgtcgaagttgttatcttcgcgtaacatgattgatcataagctatgcaatggccagtgaccaccactggccggtaatcgccgctcaggggcaaaaattggtgttgtacggcatttcgcctgctcagaaaagcttgttgtcattgatcaaaattaaatgcgcttctccgtcctgctttctcgcagagcccgccctgattaataacatgtattacataactttaatggtttaatgtgcgcggtaggctgagcctcgcaaaataccagcgtgaatgatgtctacattaagataacatttgattaactctaaaatgataccaaattgaggcagacaaccgacagctgtgcctaatgatgatcttcacaaattaatcagagagacaagttccacatacgagtagggataatggtacaatggttattttcattaatgaactttaataaggtcgaactgggacttggcaaacggaagtgttttgtttctgctacgatacaaataattatttgaccacaacatgcggctttagattgccataaagaaagactaccaactctgtatcttatgatagttgcgatgattgcatagttcgatgttcggtaagggaatgcaaatgttaactcgtctttgggttaccgcaactgaacatattttctatgaatacatgtagatctttatacaattttattgagaaaacatcggatagacatagcatgacaatggcattaccctcaattgttgaatgtttcaattaaaaacagcagaccgacaaacttgacaatgcattgtatgaaaggcggtactgaaattcgtggggccattagggagacggtgtccgagtccgcccatggtgtgttgtattccaccatgaatctgcaatattttctctgattccattgagccaaagcgcaaaggccattgacgggcgaggcgagtaactccgtccagtgtagcaactgaccttccaacttttgaataggcacataggtacaggctgcaggccaagcggctttagcaagttgtcgcgaaattgtgtgtcattggccgtaaacgtaaccgactatggccgctcttctctaagccccactcactttcacttacagcccaaccgctgccctgctcctaatatatgctgccgcataccctcgaccacgctaacggaggatgggtacattttcaaccttccggaaaagaccttcccgctgccgacgaaaccagcagtgctcgcgatgccctccacccaggcgccgttccgcccgcaacctacgactgctgtgccagcttctcgacccaccattgagtatttgccgccctccaccacacagcatcccagttacgagaaagtccagacaagccgacggccagtctacttgccaccttccccggccactgagtcggccagcagtctcatcccaaaaattaggccgaggccggagccacgcccccagccgacgcgccgtccaacgaatgagtacctgccgcctgcggccgctaacgaaatccctcgcttcgagcctgaccgcgctccgcagccatcaaaccagaagccaatctaccgcggagaggaccagctgtcgcctcagatctttcccactccccagccagccaatgttccaaaacactttgccaagtgcgcctcagccttagtgtgcacctctgagaacttctgcaacgccatcggagtgctttctgagacccccgtagagctgtctcccatggaagcagctttccgagtgccccttacggactgtttgcagacagagaacggctcccccggaaagtgctgtcgtgaccctaactatgtagacccctggccggtcaacttagccggagtgtgcgcgacaaggaacaagcggtaggcaggcaaatttcttacacgaaccaacgacttacctccatcttccctccagaacgaagcccacgggagttaaggatctggatgcaaacttcgccgaaatcccctggcaagccatgatcttgcgcgagtccagtaagacgcttatttgcggaggtgccatcatcggagaccaatttgttttgagctccgccagctgcgtaaatgggtatgtgaaaacattctatatgtctatgttccctcaaactcactacaattgaaaccccttagtcttccggtgaccgacattcgggtcaaggctggtgaatgggagctggggagcacgaacgagcctctgccgttccagctgactggagtcaagaccgtcgatgtccatcccgattacgatccgtcgacaaactcccacgacttggccattatccgactcgaaagacgtttggagttcgcatcccacatccagcccatctgcataagcgacgaggacccaaaggattccgagcaatgtttcacctcgggctggggaaagcaagcgttatctagtaagtgcttatattcaaagtcatgatgcattggggaactggtctgcaccttggttaggttcaatagaaaactgcgacaatcggaacagaaaacagtaaatgaaagttaataataatttaaaaaaaattatttccttcatatataaatgacaacaggtaatatttataccagtaactagagtaaaagggtatactattgtagattcgttgaaaagtgtgcaacaggtagaaggaagcttttccgaacatataaattatagatattcttgattaggatcaaaagtcgagtcgatgtggcaaaggacgtctgtccgtccgtatgaacgtcgagatgtcaggaaccataaaagctaaaaggttgagcatacagattctagagacatagacgcagcgcaagttttttgacccatgttgccacgcccacacttttaaagaatgtgttgaaattattattattattattgtatacagatattattgtatacagataacaaacacactgcggccaacttcttcctttcagctacaaaatgcttatcattttattccccaatacctatgtatataaaacaaaaaaattatgtaatttactgatagtcaggaaactcgactataacattctcttttgttttgttttcgccccatacatttctactttaattgaccagtaatgatcagcaaatggatggatctatataacagtgtgcagtagccaatcaattcatgttattcaattatcaataataataatcaataattaatttcatcatgatcactgaatttaagatataaattatatcagtggagagcgaatattgatattggttagaagtttgaaacacagtgtatgctaatatactgtcagaagacataaagtacgatataagtataaggtataagtgaaaacagacggatggactgacgaacagaaaaacatgcgggctaggttgatattgtttctaaatataaagtatgcaaacctagtaggtttttttttaatacaaaggtatttacaagggtatatgtagtacaatagatccgactgggtcgcagtacacatacaaacccactaaataataatgccttgttagttttcaagatttagctagactcattctccacataatatttttcacaatataaattcatccttttaaataaatttacactttaattacattctcgattcgatacttttcttatttttcgttcaacagtacatgaagagggcgctctaatgcacgtaaccgacactttgccgcaagcacgcagcgagtgcagtgccgactccagcagtgtgtgtagtgctaccaagttcgactcttgccaattcgacgtgggaagcgcccttgcctgtggcagcggctctagcgtccgcctcaagggaatcttcgccggtgagaactcctgcggagaggggcagacagtacgttttgccaagccggacattaagtggattaacactgcgttcgccgaaaacaataagccgctcctgttgaagcgattttgagatggactttaattcggaatacgaccaaggagcgagaaaatgtttgcatcccgatactacagataaacagggtaaataacccaaacacgctgaggggttatgaacttgccattgcaatttcgttggagctcaaaatggagggcattcccgatattatcaatttatctattttgttgcatgcaaggttggaaatattgcgaaacatttctgcgaacgtatttttgtttccagatttgaaatcaacatctacacaatgcacttatgtaaatggttaccttctaatatctttgtcttaaattataaatagaaacgttaggtggaatcgagaagtcgtttatacacaaaattgattgtttataatagaagctcgcgaacccaagtttttaaacccatttaaatactatttttacttgtccacattctgaatgcagctccaatgaaaaagctacattttactatctagatacaatttttctcatacaagttcgttcgaatattatcatatgttgtatgtatatatacatatacgtaaatcttaatgtcaaaaataacattttcttcagtgagtgaggccaacgatgtagagtcatagctgcatcatgagtttgaatcagtttgtatccagtacgtgctctcgaagtacgtatgtatgtacatacatggggttttatgtaaacgattccagctatggggagatgtaaaatactttgtaattataattattttggagaaaccaactcaccgccaaccaaccacaattaatagagattatataagttttaagacgtgcaccttccaagcaaaggccctaagcacacacttaaaccgtacaacggaatctccgcaccaataaatttattgatatttaaagttttccctatatcataaattgaattatattatgtttaatgtgtctaaaaatagcttataatttaattattaaataaagaaaactaagatgtacgacatttacatttgtttaactttgcaggggatacat

SEQ ID NO: 23096 - DNA, 2423 bp, DROSOPHILA
accgtccattgtgtttagctcgttggaaatttatttgttggtgatgcgatctgaactttgctgttcgttgtttcttactgttttgttgaatggttgccaaatgcgccaacacaaaaatttgcagttttaatttatgtggaaagcgcccacggaaatgcagcagaaactgcaataagcagacaacacagcaccattagaaccaccagcctccgaaataacagcatcaaaattcagtttgtagtggcctctgcctcttgccataagccgaaggagttactacatagaagtactaaatataagattgacaaaacattttggagccggttgacatactgcccctaaaaagaataaacacattttacacgattgttttggctaaaggacctaaaggattttacatagaacttttgaattttcaatgctcttgagccccagatccagagaatccgagcgccatgtccgcttcacacttcagggagcagctcgccctgtgcattaccctggcagtgctcgccgctgccagtggcgactaccgggccaacatgtttctcaatggccaatatcaaaacggtatcaaggatcaaaaggagaacaaccttttagtaaacccctcgacgaacgtgttcctcaaccacgccataatcagcaggcaagcgtcgccgttccagggcccaacctatctgccgcccaaggagttcctgaagtgcgctcccggccagcagtgcgtccgcagtggtcagtgcctgaacggatatttcgcccagcaactgcccaagattcaaaactgtgatccggaaaccaccgtttgctgtacttacaggccgcctcccaccaccacaacaacaaccactacttccgtgccagtggccaattgtgcctacgactccgactgtgtgactccggacaactgccggaacggcgaaattagcgccataaactacgtaaagaagcaaggacccaaccgctgccctgctcctaatatatgctgccgcataccctcgaccacgctaacggaggatgggtacattttcaaccttccggaaaagaccttcccgctgccgacgaaaccagcagtgctcgcgatgccctccacccaggcgccgttccgcccgcaacctacgactgctgtgccagcttctcgacccaccattgagtatttgccgccctccaccacacagcatcccagttacgagaaagtccagacaagccgacggccagtctacttgccaccttccccggccactgagtcggccagcagtctcatcccaaaaattaggccgaggccggagccacgcccccagccgacgcgccgtccaacgaatgagtacctgccgcctgcggccgctaacgaaatccctcgcttcgagcctgaccgcgctccgcagccatcaaaccagaagccaatctaccgcggagaggaccagctgtcgcctcagatctttcccactccccagccagccaatgttccaaaacactttgccaagtgcgcctcagccttagtgtgcacctctgagaacttctgcaacgccatcggagtgctttctgagacccccgtagagctgtctcccatggaagcagctttccgagtgccccttacggactgtttgcagacagagaacggctcccccggaaagtgctgtcgtgaccctaactatgtagacccctggccggtcaacttagccggagtgtgcgcgacaaggaacaagcgaacgaagcccacgggagttaaggatctggatgcaaacttcgccgaaatcccctggcaagccatgatcttgcgcgagtccagtaagacgcttatttgcggaggtgccatcatcggagaccaatttgttttgagctccgccagctgcgtaaatggtcttccggtgaccgacattcgggtcaaggctggtgaatgggagctggggagcacgaacgagcctctgccgttccagctgactggagtcaagaccgtcgatgtccatcccgattacgatccgtcgacaaactcccacgacttggccattatccgactcgaaagacgtttggagttcgcatcccacatccagcccatctgcataagcgacgaggacccaaaggattccgagcaatgtttcacctcgggctggggaaagcaagcgttatctatacatgaagagggcgctctaatgcacgtaaccgacactttgccgcaagcacgcagcgagtgcagtgccgactccagcagtgtgtgtagtgctaccaagttcgactcttgccaattcgacgtgggaagcgcccttgcctgtggcagcggctctagcgtccgcctcaagggaatcttcgccggtgagaactcctgcggagaggggcagacagtacgttttgccaagccggacattaagtggattaacactgcgttcgccgaaaacaataagccgctcctgttgaagcgattttga

SEQ ID NO: 23097 - protein, 655 aa, DROSOPHILA
MSASHFREQLALCITLAVLAAASGDYRANMFLNGQYQNGIKDQKENNLLVNPSTNVFLNHAIISRQASPFQGPTYLPPKEFLKCAPGQQCVRSGQCLNGYFAQQLPKIQNCDPETTVCCTYRPPPTTTTTTTTSVPVANCAYDSDCVTPDNCRNGEISAINYVKKQGPNRCPAPNICCRIPSTTLTEDGYIFNLPEKTFPLPTKPAVLAMPSTQAPFRPQPTTAVPASRPTIEYLPPSTTQHPSYEKVQTSRRPVYLPPSPATESASSLIPKIRPRPEPRPQPTRRPTNEYLPPAAANEIPRFEPDRAPQPSNQKPIYRGEDQLSPQIFPTPQPANVPKHFAKCASALVCTSENFCNAIGVLSETPVELSPMEAAFRVPLTDCLQTENGSPGKCCRDPNYVDPWPVNLAGVCATRNKRTKPTGVKDLDANFAEIPWQAMILRESSKTLICGGAIIGDQFVLSSASCVNGLPVTDIRVKAGEWELGSTNEPLPFQLTGVKTVDVHPDYDPSTNSHDLAIIRLERRLEFASHIQPICISDEDPKDSEQCFTSGWGKQALSIHEEGALMHVTDTLPQARSECSADSSSVCSATKFDSCQFDVGSALACGSGSSVRLKGIFAGENSCGEGQTVRFAKPDIKWINTAFAENNKPLLLKRF

SEQ ID NO: 23098 - DNA, 5088 bp, DROSOPHILA
tgtagttcttggctgaacgcatttaatggtcgaacaaatgcctctattttttttcctgttgtattttttgagggtgagaactcacacacacacgtgcaagcggtaagggttgctaaccctcccgtgcgtatgtatatatatacatatatgtgtgtgtgtgcgggatgaaaactagtgcccctagagtgcgaaagaaagagaaggtgcgcaactggcacatttaaccaattggcagccatttttagttttggccaccacaaatccaagtaacttttcatggaaaaaaaggttacgtcgatcagcaaaatctattaaattttgcttcattatatatattatataaatcacaattcgcgacaatttatatcataaaaatgtaacccaataacttttaagttttaacaagagtgtactttcttatcgccaggaagtgtgcatttttctcagaacctctttaaatttaagagcgcgataatttctacttcaattttagatcaatcgagctttttgtgtaataccatttaccctattgatttgctgttcttattgttatatcatttttatatgtgaatcgatcgatgcaatgtatgcagatccattgtgtccagctgttaacttcaatctttcgtttttttttttattattgatatcctatccaaatatttacatcacttcttttatgatgtttttcatgaccatgcattgctataatacaataatagtaatagtgttttacaatttcttctacctacaatacatagcaggctctgacttttaagtttccccatgtctgtagtatctgctttcccgaaatcactttaatcagagcgctggtccggaatagacattgtcgactgactttcttattttttattgtatcagttaaaattctcaatgtgtcgataagaaaacagacgctgaacgaaaaaaacaagaaaattcgtagtgttattcatttgtttgcctgccccaacccaaagaataaagtgtgattttcacaatggccaaggatcaagagggaaacacatatcaaccaaccgtcccggagtccacggaggaccaaaaacgggagcagcgtgcccgcctcatcaaagcattgagccgcttcaagccccgcgatgccagtccgcttcagttctacaactgcgttcgcgaattgtgcatcatgcacaattgcagcatcgacgagggtctggaacgagcggcattaacttggccaggacttagcatgcgacagcgtgagctatacgattcggtaagtgaaagccatagattagaacttcctttttaaagcggcaaatcgaactgtcttcaactataacagcaacgtcacgcagaactaccgatacctgttccacgtcacctgatctaccgagcattccagaaggagagcaagggtctgtggtccctgggccgctcctcggtgggtggcaacaagcagagcacccgctacaccctggagtcctacaagccgccgcccaagttgtcccgtctaaagacgcagctgaatgagcgtcgtcccaagtacgacaatctattggatctgccgcccaaggaggcagctatgcgcgtgccaccggagccgaatcgtaaattttccagggtatcaccatcatccggtcgacggatacgtagttttacgccaccggccgttacgcgtgttcgatccattcagcagattctgtcaatggccagtgtggacatgaagaagagcttacggttacggaatccgggtaaatgcaatcgaaccaagaaacccgaaacggttgaagccggcaaatcgcaaccggataaactgccaaccggaatttccaagctgacgaaaaagaagacgatcaaacgcaaaggcatcgcctccaaggcaaagcgtttggccaaggatgaggatctgctgtcctcgaacagctgggaagaggccatcggatgtgttcgtcggcgtctcatgatgtacaagcccttaaagtcctaaatcctaactatatatactacatatatatatgtatataccccacaaaatggtgtcagtaagtgtagtttttacttgttaaagaattacatcattgtcctcaattgaaaggctgattgttagtcgtgctcttctttaagacaacgcaagccccaagatgttaaattaaaagtatgtgcttataactcaagatctaaacaatctaaagcattttatttggcaaatcttatggggtattatgatcacaagaaaagtaaaaaaaataaaaacagaaaggtgattcatcaatttgatggcaaccatttcggcaaacctttgtgttgaattgattcacccagattaacataacaacataaaaagtgtccaataaatactataattaaaagcattgagatcttaacatttcgttcgagggaaacatgagaaaacactaacaattttctaggcaattctatggccgcttgtgtctcgttattcctcaacttcttttcctattagttttatttttctggtttccaagcggtcgcaatcattttgatgaaccgttagttaagcaccaacaacagcaacaatagctaataaaacattaacgcacacactggcatatagaagcccaaaaaaaagaagataaataaaatcagcagaggcagagaaaaaaaaattcgcaaaagttttatttcacttttttttgccaatcggcacgcagaaacgacgttgagcatttgacctaaattcgaggacagctcttcttctacgttttctactatttttttttttttttttttgcgttctcaacgcgcttttgtgcgttacccaaaaacaaaaaaaaaaaccgaaaaaacgagagaaacgcaaaaaattcgcaaacttttttgtgcgactgctaatttcgcaaaggcaaacaaaaaacatttcaattccgcatagagaaagagaagcgaagagttggttaagaaacaagaccgaaacaactgtacaaaagtcagtttattttattttatttatttatttattttttggggatttttgtattgttttttgattgcctatgtcacgaaaatttttttgcgttttaccttttggcaattttcagttttgcggggataactttttcaggagaatttgtattctacctgtttggcagaagatttgtacaatagatatcacacagagaaatgcgttataaaatggtgggtttgaagtagtttttcaaatattaaacatgcagacatagcctatcgcggttttaaaacaagtttaaattccaaataaaatctgggaaaattctattaacttaaactttcttaattcttaagcttaaattgtggagaaagttattgcgttctttgctaatgcctggttattttcaaggatgtcttatcgacgcctttaatttactttttcgacgaaactttcaacaagcgtatatactttttagccagaactaaccaacttaaccaccctactcgtctgcatctaagattaatttgaatcatccgatttcattgccattctttcttctttttggcccataacaatttatagacgcttttgcttggcaaaagctttgatgacgctccaaaaagacacatatggcataagtacattattcaagggtataatgatttatttaacgactttcaatggcattttacaaacagcaacaaattctattttaattttgaaaaatatataccttttaaggtatagtttaaaagatatgaaattcaatataaacaaaaataaatcgcttttttatcactaagttgtgttttaccaagatcatttgcctaaattatatatctgcctaatcttggcttccccgatttctctgcactttttgttttagttttctttcttttttgcttgttgctttgctcttgcgccatttgacttctaaccgcttttgtggcttcaaacatatctacagacctacatggtacatctacatatgaatctgctattttttaagtcgctaactaggcaaaagccaccaagttaacccaactaggcgtccctcgcccctcttcttatacatatatatattttttttctattgggcgctgctgtctatttggctttgttttgttgtcaagctggtgtccaaaatccaaaaaaaaaaaaaaaatagcaacaaattcagcaagagcaagagtacaacgctgattacgcaatgcgttcgggaaacacacacaaacgcacatgcaaacaaaaaatagacacacacaggcaaggtttttgtttcgtttccgcgatcaacgcgcttgcgaaaactcacacaagcatacaccgaaaaaaattcgcatataacaacaaagtagcttgtgcgtgcgacccaattggaaatttgacacacattgacagcgtagataggcgaaaaaaaaaatagtgtgcggcacggagaggaggaggagaagggcagggatgtcgaggggatcagggagtgacgaagcccagaagcagctgctcagatacaaagatacacatccacaagaagcgcggatacaagttcacatgtatctactgtgaacgaaatgtgtgcgaaatgatacactcaccaaagagaaggtttccaaacacaagcaacatttacaagatactaaaattaaaattaaaacataagttgcgtgatatctgattgttttatatacaataaagaatatttaataaatttaatagaattgaaagaatttcttaaaattcgttgttttttttttcccaaaatgacaatattatgagcaattgattttgttctttcataattttaattatattaatatatgcagggcattttttgcacaccttcttcgccagcgtttttcatggcgaaatttaaaagagaaaattataaaaaaaaagtgtgtgtgggggaaacacacatctgcggatttgtgtgtgtttgcactcattgctcatttgtttcgtgggcttagagtaactggcaactggcctgacctttggcttgaccgtgggcgtgaattgcgaatagttgcgaaaatacaaaacacacaaaaaaaaaagaaaagagcgtactttgcaaaaccaaagagctggaaaaaaaagaagctcgaaatggcagacaaaactgtttctagcgggctgcttgtcgcacagctgaaatt

SEQ ID NO: 23099 - DNA, 1102 bp, DROSOPHILA
atggccaaggatcaagagggaaacacatatcaaccaaccgtcccggagtccacggaggaccaaaaacgggagcagcgtgcccgcctcatcaaagcattgagccgcttcaagccccgcgatgccagtccgcttcagttctacaactgcgttcgcgaattgtgcatcatgcacaattgcagcatcgacgagggtctggaacgagcggcattaacttggccaggacttagcatgcgacagcgtgagctatacgattcgcaacgtcacgcagaactaccgatacctgttccacgtcacctgatctaccgagcattccagaaggagagcaagggtctgtggtccctgggccgctcctcggtgggtggcaacaagcagagcacccgctacaccctggagtcctacaagccgccgcccaagttgtcccgtctaaagacgcagctgaatgagcgtcgtcccaagtacgacaatctattggatctgccgcccaaggaggcagctatgcgcgtgccaccggagccgaatcgtaaattttccagggtatcaccatcatccggtcgacggatacgtagttttacgccaccggccgttacgcgtgttcgatccattcagcagattctgtcaatggccagtgtggacatgaagaagagcttacggttacggaatccgggtaaatgcaatcgaaccaagaaacccgaaacggttgaagccggcaaatcgcaaccggataaactgccaaccggaatttccaagctgacgaaaaagaagacgatcaaacgcaaaggcatcgcctccaaggcaaagcgtttggccaaggatgaggatctgctgtcctcgaacagctgggaagaggccatcggatgtgttcgtcggcgtctcatgatgtacaagcccttaaagtcctaaatcctaactatatatactacatatatatatgtatataccccacaaaatggtgtcagtaagtgtagtttttacttgttaaagaattacatcattgtcctcaattgaaaggctgattgttagtcgtgctcttctttaagacaacgcaagccccaagatgttaaattaaaagtatgtgcttataactcaagatccaaaaaaaaaa

SEQ ID NO: 23100 - protein, 299 aa, DROSOPHILA
MAKDQEGNTYQPTVPESTEDQKREQRARLIKALSRFKPRDASPLQFYNCVRELCIMHNCSIDEGLERAALTWPGLSMRQRELYDSQRHAELPIPVPRHLIYRAFQKESKGLWSLGRSSVGGNKQSTRYTLESYKPPPKLSRLKTQLNERRPKYDNLLDLPPKEAAMRVPPEPNRKFSRVSPSSGRRIRSFTPPAVTRVRSIQQILSMASVDMKKSLRLRNPGKCNRTKKPETVEAGKSQPDKLPTGISKLTKKKTIKRKGIASKAKRLAKDEDLLSSNSWEEAIGCVRRRLMMYKPLKS

SEQ ID NO: 23101 - DNA, 4380 bp, DROSOPHILA
tctttttgtgtgagcttctaagtgtttgcttgccttgtcttcagttgccatgcatgagttgataatgtagccgaaaccccaccccaccccccctctcctcctgcagcatatagatttcgatccctaggacaggtggactagcagctcctcctattcgtcagcttagagttctaaggataactccacttctgccccatactcttctgaccccctagtccccttcaaacaaaagaaagcatataaagcagtaaaatataggcactgcactccaacagcatatagattgtactgccagaacccgactatatataccgatttctgatcccacagctgctacgcaacttcagctccccaatgagcgccatggccgccagtcgctgccccacacccttcgccttccccttctcgcccctcggcctgagcctcttcgacatcgatccgtccagaattctcagcctgctgcatcatcagacctggttggcagaggaggccctcaggtgagtcaatgaaatggttagaggagtgaaaaagaaagattaatcgaaagattaatcgaacgattaatcaaaagattaatccaaagatagatcgaaagattaatcgaaaaattgagttactgctttgacagcaacattgcgatttgaaaaggaaactgaatacattcggaataaatcacataaactaaaaagtgttaaccataaaaatttgctaattcgcaggacacgtggactactgacggcgcccaaggactttccgcaccgcttcacgacgctcagcgatctgctgaccaaggactaccaaccgggtgctggtcaaccgatggtaacggccacagcgacggcgaccacagcctcctcgaccagtcaggtgagtgccagccgatccggcgacactcagtacaacaagcacgcacagcaaccgcagcaacctcaaaccggcggagcaacaggatctggcgtaggtggtctgggtggaagtcctacggcaggagcgtcattcaacctgcgttaccccacgcccaccgccttctaccagcagcagcagcagcagggtaagggtgccaaatcgtcgccttcgccccagcaaatggccaccagctccaccacagtcatgtccaatgattctggggaggatagctgcaagcgcagttcggcggacagcgatgaggtgaccattatggagctgcccagcgaacgcagtgcccagctgtacaaggagtcgctggagcagctgctgcagcgccagcgtcgcactcccatcctggcgggctcgggatcaggctctggttcgggtacgggatcgggcagtgttattgttgatgccgccggtcttaggcagtatacccaacttttgttagccggagccggctctggtggtgcttccgatctgaaggagaagagctcctcgtcgtccacctcgtccacgccaccgctactcacccagcagctcagccagatgctgaagagtccctcggacacgtgctcctcgcttttcagctcgtcgggcggcggcacaggatcgaccggcccgggaatcaccggcgagaccatcgaggaggagacccgttgcgtggtctgcaatgcccactttccgaacgtgtggctgctggagcagcacgcggccctccaacatccccatgtgggtcccggcgaggagaaaccgttcatttgcgagcagtgcggccagtcgtatcgctatcgcagcgcctacgccaagcacaaggagcaaaatcaccgtgctcgtctgccggccgacaagctcttcacctgcgacgtgtgcggcatgcagtttcgctacctgaagagcttcaagaagcatcgcttgaaccatgccctcgagcgactccatggcaagaagagcgtgggcgtgatcggacgactgggcggatctggttcgggacccagttcatcggcgatttccgtctcggtggcggcacctacttccgtttccgcctctggatcggtgacctcggtggaccaggatgtggtcaccagctcgcaggagcccatgctggccgacgagggtgaggatctgcgcgtgaatgtgaaacgcgagggtaccgccgatgagcagagcgccgagtcgcgggccaacgacctcgaggagcacgaacaggacaacaccgtcgactccgcgggcatcacgatgctctaccaggacaacaactcctcggcctcggcctccaccagcgccaccgagccgaacataagcagctccgacggcattcatagtacaaacaagcgggtaagtagttctcgatatcgtcatcaaaagttaccttctttttgtagagaatcttaagagatgtgaaattaatttacaattttttttacttaccttctattccacgtatgatgcagtcgcgcctgcaccacttggaaacggatccctcctatccacaccatcatcaccaccaccaccaccatcaccatcaacagcagcaccaccaggcgcagcatcagcaccacaatccgcagtcgcagctgccgacccacttgggccacgtttcactgccactggtggccacctcggccgccggctcctcatcttcggcggctgccgctgccgttgtggccgctgcccaggcacaggtcagttctggcgccaccggaagcggcgcaaccggaagtggtgcacccggcagcggcaacgttggctcagcaggcagctccggtgcgggcggcggcataagttccctcagctcgctcacatccctgatcaacgccgagcgcattccgaacgagcagttcctgggactcaatccgcaggaggcatccatcctcaatttcttgcgcgtggatgccgccgagcgacagagggacaagcggtgagtcttttgatcccttaagaccacacggcgtataagtaatattgttaaattgcaattttggaatgagtggtatgatttaacttaacggatattagttaagcatattatgggggcgagaccagtttgatcgtattatgtctaaaagattagtaaaatattgatctaaaagagatgtataaaatgtattcgatttacccattcttatgcgcaatatgaaatgacccacaaacaaatttctaaatagctcgactaatgttctgtttcgttcgatttcagaccggccacctcgcgattcgcgtgccccttttgcggcaagtgtgtgcgctccaaggagaatctgaagttgcatgtgcgcaagcacaccggcgaaaggccgttcgtgtgcctcttctgcggacgtgccttcggtggcaagtcggatctgacccgccacctgcggatccacaccggcgagcggccttaccactgcgagtcctgcggcaagtgcttcgcacgggcggactatctatcgaagcacctgaccacacacattcacaatgcgccgcgctgagatgaggcgcgtaggagacggctcctacgcagataaggaaccagctccatgatcagacacgctcacacaccaacacacacactaaatacaggatataacaaagccgttgtgtataaatcctattattaccagaagctctacgattagatcgatgtaagacacattttttcgctagagttttttgttttttttttctttttttttggtgcaagctagagaaaaacaaaatgacgggcaactaattagcacgggtattaaagtgtttaagattctgaatatacacctatctctctaaaatataaatattatgtgtggagtaaggtttacgattataattacggattataattattatcgtagcacaagattaagtttttctacaactatgattaagtgcagatggtaacgaaatgcgacttggttctgtgagacaaattatttctaatttctaataacaataacattaacgaaacagccacaaacaaaaaatagcatcagacgacactgcaataccaattaaacaaaatagtctgtattttctaccgaaacaaatgaagtaccgcagatctgccgttgatatacacaatagataaaatatatttaattttacaccgatctatagaagctaactagcaacaatttgtacaaaacaaacaaaagccgagcaaacgagaggaaactaactttgcaaggatcaatgcaataactgagtaaactctgttacctaccacagaaaacaataagcgatatgggattttagttaattctagtacagcaactgtactggaactaggccaaccactaaatactacatgtaaaaaacaatgtttcaacgatgcaagtgcaagcattatttattcttcggttgaccgataatatacacatatgttcagtatggaggcgtagttggtttataggattattgtaaagctaggagatacgaatgggatctaccaccgtcaatagtttaatttatatacatacaaagcaaagcaaagcg

SEQ ID NO: 23102 - DNA, 2409 bp, DROSOPHILA
atgagcgccatggccgccagtcgctgccccacacccttcgccttccccttctcgcccctcggcctgagcctcttcgacatcgatccgtccagaattctcagcctgctgcatcatcagacctggttggcagaggaggccctcaggacacgtggactactgacggcgcccaaggactttccgcaccgcttcacgacgctcagcgatctgctgaccaaggactaccaaccgggtgctggtcaaccgatggtaacggccacagcgacggcgaccacagcctcctcgaccagtcaggtgagtgccagccgatccggcgacactcagtacaacaagcacgcacagcaaccgcagcaacctcaaaccggcggagcaacaggatctggcgtaggtggtctgggtggaagtcctacggcaggagcgtcattcaacctgcgttaccccacgcccaccgccttctaccagcagcagcagcagcagggtaagggtgccaaatcgtcgccttcgccccagcaaatggccaccagctccaccacagtcatgtccaatgattctggggaggatagctgcaagcgcagttcggcggacagcgatgaggtgaccattatggagctgcccagcgaacgcagtgcccagctgtacaaggagtcgctggagcagctgctgcagcgccagcgtcgcactcccatcctggcgggctcgggatcaggctctggttcgggtacgggatcgggcagtgttattgttgatgccgccggtcttaggcagtatacccaacttttgttagccggagccggctctggtggtgcttccgatctgaaggagaagagctcctcgtcgtccacctcgtccacgccaccgctactcacccagcagctcagccagatgctgaagagtccctcggacacgtgctcctcgcttttcagctcgtcgggcggcggcacaggatcgaccggcccgggaatcaccggcgagaccatcgaggaggagacccgttgcgtggtctgcaatgcccactttccgaacgtgtggctgctggagcagcacgcggccctccaacatccccatgtgggtcccggcgaggagaaaccgttcatttgcgagcagtgcggccagtcgtatcgctatcgcagcgcctacgccaagcacaaggagcaaaatcaccgtgctcgtctgccggccgacaagctcttcacctgcgacgtgtgcggcatgcagtttcgctacctgaagagcttcaagaagcatcgcttgaaccatgccctcgagcgactccatggcaagaagagcgtgggcgtgatcggacgactgggcggatctggttcgggacccagttcatcggcgatttccgtctcggtggcggcacctacttccgtttccgcctctggatcggtgacctcggtggaccaggatgtggtcaccagctcgcaggagcccatgctggccgacgagggtgaggatctgcgcgtgaatgtgaaacgcgagggtaccgccgatgagcagagcgccgagtcgcgggccaacgacctcgaggagcacgaacaggacaacaccgtcgactccgcgggcatcacgatgctctaccaggacaacaactcctcggcctcggcctccaccagcgccaccgagccgaacataagcagctccgacggcattcatagtacaaacaagcggtcgcgcctgcaccacttggaaacggatccctcctatccacaccatcatcaccaccaccaccaccatcaccatcaacagcagcaccaccaggcgcagcatcagcaccacaatccgcagtcgcagctgccgacccacttgggccacgtttcactgccactggtggccacctcggccgccggctcctcatcttcggcggctgccgctgccgttgtggccgctgcccaggcacaggtcagttctggcgccaccggaagcggcgcaaccggaagtggtgcacccggcagcggcaacgttggctcagcaggcagctccggtgcgggcggcggcataagttccctcagctcgctcacatccctgatcaacgccgagcgcattccgaacgagcagttcctgggactcaatccgcaggaggcatccatcctcaatttcttgcgcgtggatgccgccgagcgacagagggacaagcgaccggccacctcgcgattcgcgtgccccttttgcggcaagtgtgtgcgctccaaggagaatctgaagttgcatgtgcgcaagcacaccggcgaaaggccgttcgtgtgcctcttctgcggacgtgccttcggtggcaagtcggatctgacccgccacctgcggatccacaccggcgagcggccttaccactgcgagtcctgcggcaagtgcttcgcacgggcggactatctatcgaagcacctgaccacacacattcacaatgcgccgcgctga

SEQ ID NO: 23103 - protein, 802 aa, DROSOPHILA
MSAMAASRCPTPFAFPFSPLGLSLFDIDPSRILSLLHHQTWLAEEALRTRGLLTAPKDFPHRFTTLSDLLTKDYQPGAGQPMVTATATATTASSTSQVSASRSGDTQYNKHAQQPQQPQTGGATGSGVGGLGGSPTAGASFNLRYPTPTAFYQQQQQQGKGAKSSPSPQQMATSSTTVMSNDSGEDSCKRSSADSDEVTIMELPSERSAQLYKESLEQLLQRQRRTPILAGSGSGSGSGTGSGSVIVDAAGLRQYTQLLLAGAGSGGASDLKEKSSSSSTSSTPPLLTQQLSQMLKSPSDTCSSLFSSSGGGTGSTGPGITGETIEEETRCVVCNAHFPNVWLLEQHAALQHPHVGPGEEKPFICEQCGQSYRYRSAYAKHKEQNHRARLPADKLFTCDVCGMQFRYLKSFKKHRLNHALERLHGKKSVGVIGRLGGSGSGPSSSAISVSVAAPTSVSASGSVTSVDQDVVTSSQEPMLADEGEDLRVNVKREGTADEQSAESRANDLEEHEQDNTVDSAGITMLYQDNNSSASASTSATEPNISSSDGIHSTNKRSRLHHLETDPSYPHHHHHHHHHHHQQQHHQAQHQHHNPQSQLPTHLGHVSLPLVATSAAGSSSSAAAAAVVAAAQAQVSSGATGSGATGSGAPGSGNVGSAGSSGAGGGISSLSSLTSLINAERIPNEQFLGLNPQEASILNFLRVDAAERQRDKRPATSRFACPFCGKCVRSKENLKLHVRKHTGERPFVCLFCGRAFGGKSDLTRHLRIHTGERPYHCESCGKCFARADYLSKHLTTHIHNAPR

SEQ ID NO: 23104 - DNA, 1911 bp, DROSOPHILA
tgctgttaccattggggattggggattggggattggtgttgggtgctcgctgctcgctgctcgcctggcaattgccaatttctttgcgaggtgggggcttgcctaatttcagatcgtttcgttgattggccaaatgctggtcgtcgttggctgctcgattaattatttagccatcaaactaatgcaaactgatggcgcgatgtggatggactgttaagccgattgaaattgactgccaattaaagtaaaaggatgaaagtgcctggtttttttttttatcttaatgtacgtacagaatatttgaatgcatgctgcattaatctaatcaaagatatacagttgtagagtaaagtgtttaaacgggagctgtattaaactatatacttaaactgtggtttcgaaaaatgtgaatcgaggggttttataatccgaaatattgattttagatccaaaatatttgttgccagcaaagtactgtgcatgttatagcaaaaaaaaaaaacacttggataaaattgctaagtcagcattttgttatggaaataacgcagtgacacgcctagtcacgccctccgtggcccccaatccccgcagataacccctaaatatatatatatatattcttttttttttttgttgggtggcagtgacatttgtgaactctgggcaagatttcgcaatttgtttggcatttgtgcaagcgctgtggcattaattgcatctaaagataccgatacaaagatacacctatctgaatgcatgtatctgccgtgcggtgcgattgattacgcaatttcaattagcggcaatagctgcaaccgcaaaacaccaaattaagaaattactaccacttttgatcgcgagtcgagtcattccctgctgcattccatacgctcgctcttcgctcatttatttcattcatttattaatgttaatgctaatattattattattattattattattattattctttgcagcagcgtaagctgtcaccgacatgggcagtgagcactactgcttgaggtggaacaattaccaatccaacctgttaggggtgtttagtcaattactacaagacgggagcctggtggacgtcacactagtttgttcagagggcacatccatcagagcccataaggtgagtactcatatatgtatgtacatctaagtagtatatatatttttgagtgaaagaatatataagatgtccgagattataggtacgattttttgtacataaaacagaaaatatctttagccaataatgcaatatcaccgaaaagagggtttttttttattaaaacttgactgaattaattcaaacaacttaaataactactgtattgtgaagccaattaccatttctaaatatctggataactttttggtggattttggaaaaataaatttttggtcaatttttgcattttcggcaaggggtaacatcatcaaaatttgcaaaaaatggcaaaaaattaaatttctttttttttaatacagttcgaataggaattgaaatacaaactcagcaaggtatggcattctatatttggattattattactaatgctctggccaaaaaacggattatttttgatcaaaaaatcagaaaagccaaaaacttgatttttacttttcgcttttttatcataattctgttaaaaatggtcacattggtaaaattataactgttttgtgcagctaattaccatttctaaatatctggattaatttttggtggattttgggaaaataaattttttgtcaatttttgcactttcggcaaggggtaacatcatcaaaatttgcaaaaaatggcaaaaaattaaaacttggaattttaaatgcaatttaattgggaatttaatcacgagctcaacgagctataacattatatatttggaccat

SEQ ID NO: 23105 - DNA, 171 bp, DROSOPHILA
atgggcagtgagcactactgcttgaggtggaacaattaccaatccaacctgttaggggtgtttagtcaattactacaagacgggagcctggtggacgtcacactagtttgttcagagggcacatccatcagagcccataaggtgagtactcatatatgtatgtacatctaa

SEQ ID NO: 23106 - protein, 56 aa, DROSOPHILA
MGSEHYCLRWNNYQSNLLGVFSQLLQDGSLVDVTLVCSEGTSIRAHKVSTHICMYI

SEQ ID NO: 23107 - DNA, 7151 bp, DROSOPHILA
ctttaaaaattttttgaattggcgacgtgtaagccattttaaactctgccgacgatctggcaacccctccacgtgtgctcttttcacgcaccctctcgctcacactcccttaaatcgcaagcaacatacaacatcaaaacaataagtttctgtacacatgctcccggattttcacttaaattagcatcttaattataaactgcacaagttattggttttaaggctacattatcgggcatatcacacaaagttatccgctgctctcttaatcgctctctgaattccacaatatgatgtcagaggaaacctttttccgtacacttcgtaaggtaataataaattggaatccaatacgccagctttcactgagtactttgttggacaccggcgacttttttctaaaaagctagcccaaattttgcgcgttacattttcgggtgaagtgcataaaggaaaaaaaaaacaaacttcaattttcaaggtcactgctgaagttttccagccacacacacgcacatagtcctgtcgtttgccacccactgcagcactcagagcgttccgaaaccgagcattaggattattcaaagtgaagaggcttacttcgcactcaaatttagttactgggtttacaaaatttcctccgatggagccgcgaaactggcgaaacaatttacgagctctggccagtgttaccaactgctccaagttctctatatctgagttatttcgcacaacgctatctggcgcgcatagtatatggcattcgcactgagtcgaaaaagatagcagatactgtgaactagaattcagataacttaaacagaatgtatttaaaacatataaatttcaaaggccattaaatacagcaataagatttgataataaatcatatctgtggaatagttgaaacagacccgaaatgcccctttcctatttcggtatttttctgaggccacacagcattccttggcgcacccagtacggtcacacgaatgaaaagccaactcagctgaaagtgaacccatttttatacacaaaaaattagtagctgcagcgaaataagttgatttcacacgaccactgcgccccgaaaacaatgcaaaatgcggctgaccaacgagaaagcaacaatgcagccccagctgagtgatttggccctggtcctgggcctgttgatctgctgtcttccaactttgacgtgggctgcgactctctccgacaagcgactgtgcgccgacccgaaatgtgaacgtaagttgtaatctatggccagacaagtcagccttggacctccggcacagccatgtctcttaaaattgcataattaattttgcgtttgtctggtttatgcttgcagaaatcatttcgatgggcattgccaaaatcacctacgccattggtggtgaggggctgatatccttcaaaatcaactcccccatccgcgtcctgtccaagagcgccggttccaatatgcaactgtggggtgtggacatcaatgggcggcgcggctatgccaataaggactttatcatggaaaagaagatcctcgtccgggataaggatctattgtacgaggtgccagtggtgggacctggtagtccagtgcagtcagtggagacaccagttcagagcgtcgagacgacagtgcagcctgttcttaacgcctctgagtcaaccgatgatctggcaacgactacaacgtcaccacttgagatagccgttgattcaatagtggttgagcacgacaagctgcaggatcagcaggttcctgatcctactgcggcttccaaggcccaagtgcaggttatagaaggaactgagcttcccctggaggccattgcagctacaacggaaggtagcattgttccagagacggcagcagacccccaagaagcaacaaatctcgactcgacagttgttgatacgaaagagccacaggcattaaattcggaggccattaaattgcaggaagagccaaaagcacagcaacctgccacagaagctgagaaacctcccccactgccccaggctatcaacgctgaactggaagacgctgacgatttcgattacggggatgacgagacagatgacgactcccaacaaggtagtcaagataacgaatcgatcgtagagatagcaaacgataacaaatcaattaacgaatcgattgaactgaaaccactttcggtcgcgcaactgaagaaaacagataaagtggaggattcaaaggatgagactaaagaaaagcatgcagaaatggaagtctccaagcaggaagattcttccttacccactgagaccttaaatgtgacggcactcgaagagcaaattgatcagaaggaatttccgaagcaggtactggatgcagccgtggaattaaagtcgtcagatcctctgccagttgaggaggtcaccgaaactgtggctgagccaccacgaacgattgtcgaagataaaattaatgaagaaatagttccggtttcagctaaaatccaagcaaagcctgcaacagttaaccctaccgaacctattgttgctcaatctgatgcggaaataaaagcgccatctgagtcagtaatcagttcaaccactcccgctcctgtcgttgaagaggcaccacagaaagcagatcctgttggtctgccgcccctctttgaaaagaagaactttgagaatcccaataattattacaagcaattgcaggaggaacaggaaaaacagagactagttgcagaggcggaggagcaaaagcgtttacaagaggaagcggatcagcagaagaggttgcaagaggaagctgcgctgaataaaaggttactcgaagaagccgagcaacagaaaaggttacaagaggaagcggagcagcagaagagattgcaagaggaagctgagctgaataaaaggttactcgaagaagccgagaaacagaaaaggttacacgaagaatcagagcagctgcagcgctcaagtgaggaagcggagccacaactgagcgttcaggaagccaacatgcagcagcttaatgactctgtggattcgcagtccaacgaaatcgttgataacaacaataggcagcagccagagcaatatcagcagcaccatcatcatacagaaagtgcctttaatcatccatcgactgcatcacatacaactccaacgcctgacgccgaatcaccgtacgcagcagtccaggaggagaccacagaagcatcccaaacggataaccatcgtgagggagttggttacgtggagcctgtagctctgccagcgacggctagccccgtgtcggaagtacctatcaaggaggacgccgcaggctttggtctctttgccacaattgtcgacaccgtaaacaattttatcggaaaggatcctcagagtgatccagcagatagcagcgatgaattgcatagaatcctctatccaggaaggcctgaagtgccaccttctcaaaggaaggcggaaggtgatgcttattcatttactaaatcattattaccatacgattcttcagaaattagagagaatatccggtccggttttgttacatactatacctttttttttacatattccagactttgctcctgccgatgtggatggatattgtgcccggtttcaagccaaagatgagcactgtcatcgctctatatctcttgataattttgttgaagtaatggccgacaagctggttgaccacagccaacttttactttgcgtggttatcgccgcgatttcttccttgttcttcatgtttgcatactactgcttctgcaatagtagtcaggagggagcgcttctttcgaagctgaaccatttggagcgcagtctgttggcctcccacaaggagaacctgatcatcaaacacgacctgatgactacgcgaacaaagttggccagcattgaggacaattccttcggctcaaacgacatggtggccgatctcaagaagcaacttgaatctgagctgtacgagaaggctaagctgcaggaacaggttggctcattagaaagggtaggtccatattatttaatcaaataaacgcttacaaggatctctttacaaggatctggataacgcggctgaggctggcctggagctcaacaagatgctgtccgaagtccttaacggtcagaatggcgatgaggctttcatgagcaccgtcgacgaactgcagcgacagcttaatgaccaagaaagtgaggaaccgccgttgattaatacttatactaatgtgactttttgatgactacttatttaaccatttagtatccaaagcagtttcctgttcaatgcagattctaactccataacttttgcagagatcatcatcgaaatcaacaacagtctggccgagaaaagtagggagaacagcgaactgcagtatacgtttacggaggccacgactcggctcaacagcgagctgaagacgctacaagaggacaactacgagttggagatggagaagtctaagctgcaaactcgtcttcaggaaattcaggctgaaacggaatcggaattggccaaggcactggaagccagaaattacgaaatgcaaaagctgcagaatcagattgttgagctgactgtcaagtgggagcgcgaacatggcgatctgcagaccagtctagcaaagatcgaagctctcgaagattgcctgaaggcagtcggaaaggatgcgatccacaatgtccaagagctgattacctcggccaagacacgcggtgaactcaacgcggtccataagaagctggtcgagttgcagtcgaaggtggagcaagaagaggcccacaagcaacgtctggagagtcagctgcagcagtcaagtcaagatgtggagcagctgaagcaggacttcaaccaatcagagcgcgataagctagaagcccagacgcgtcttgaagtcttatccggctacttcagggagaaggagaacgatcttaagaagtagtttatcaagaaacacatttgaggaaagtctttatctcttaattaccatttcagagaacttagtctgcaggagaccaagtggctgcagcaccagggagagaatgccagcacagttgagacccagacgctgatgaagaacgaaatccaaactctgaagtaagtcaaaatcgcgcattatcgctttcaagaaatgttaaaatccatttcgccttagatctcagaatgacgagctgcgtgccgagatcgaggcccagatagcctcgcacaaagctcagatgggcacgctggagaaccgagctcatgagtcctggctggcagcgcgccagtcggagcgccgttgcgaagaagcgttggccgaagctgccagcctgaggcgtaagctgaccacaatggccagcggcggaggaggagtaggcggagatccaggcgtaatggaggccatcgccgccaacggaacttccgtgctgggggcggaactgaaaacggctccatcgccgcttcccttgccgggttcaccactgctgaacatgccaaatccactgccattcctggcggcacccttctcaccgttcatgggtctgccgccgccattcctgcctccaactggagcgggaggggcacgtcctccgcccctgggacgcatgcgctctccgccgccctcgagtcgcggcgatcgggatcgagagcgttactcagactacagcgactacgatgactacgacgacgatgaggaggacgaccggggcatggaccgtcgtcgacggcacagcggcagctggggtcgccggcatcgcggctcctacagccactcgccgcgcacatatcgctcgctatcaccgtcggacagtcggtacaactacaatgacacggagactgacttcagtccgcccccaagtccgccgcccgttccgtcgggacgcagcgcgacatcgcgaccctacagcgaggtatgaggagcagggtgtgcccgtgcaaccaagtcctaccaagtatattagactcaaaactagttcaaatatatttattaatcaacgattatcgaacggtgggatcggggcgggtcgggacgacctctcaaaccgattccccaaaacagggatctcaggagagttcgtgaacaactaagaaaactcctgtctcagcggtgaatgatatccaagaaaattgaaacaaattaaacgcaatgacaaacacaaatccaatgtgagctgtttttactgtggaattgaaaaatattcattttctctgaacaaacatttttaaataatcagcatggcacatttttaatatgatattaatttctgagaggtaagattatgtattatacatcatttattgaaaactacaaataattgaatacacgaacttagaaccggtttatatttttatattatatttatatattattatcagcaatcattttaataaccagcttatcgacgaaagacttatcaattaaatagcacaattttggtccgtttagataatagttaactaagctagttaacttagtgaatcacgactcggggcgtttaaattccaattcaatacattcgtcaggtaattgtgaatagctgctactagtagcactgaaggaaacattaagtttgggatgtttaaagtgcttcgaaacctgcgaaagagtatgagttttaggatcagtactttataaatcagttatgtacgcaccaagtcatccttgccggttttataaaaatgcattttcaaaggcttcgttcgctgatttagagcgcggttcattgttgacttgctgaaggcaaagaactcgtcgtacaaaacatggttgatcatgctgaattccctgagacggggacaggcaagaagcacgtcccatataccatcggcgttgacccatatacgcgagttctccagatgcagttgctccaagagcggaaagcaataggtgatcgtggaaaagtcaatggcagcacatccttcatcatcgacgagagttaaacatcggagatttcgcagtttggccagcacctccgttggcctcatccagatattattactgaatgcggcagtcaacacatcttgaccccttatgcttccaatttcgcacagtagatcgtccacctggtagaagttgtgcaggcgcagctttatcagtttaggcaggctcaacagttggctgatgttgtccctgtttaggtaaactatgtccagctccagctcc

SEQ ID NO: 23108 - DNA, 4643 bp, DROSOPHILA
ccaactcagctgaaagtgaacccatttttatacacaaaaaattagtagctgcagcgaaataagttgatttcacacgaccactgcgccccgaaaacaatgcaaaatgcggctgaccaacgagaaagcaacaatgcagccccagctgagtgatttggccctggtcctgggcctgttgatctgctgtcttccaactttgacgtgggctgcgactctctccgacaagcgactgtgcgccgacccgaaatgtgaacaaatcatttcgatgggcattgccaaaatcacctacgccattggtggtgaggggctgatatccttcaaaatcaactcccccatccgcgtcctgtccaagagcgccggttccaatatgcaactgtggggtgtggacatcaatgggcggcgcggctatgccaataaggactttatcatggaaaagaagatcctcgtccgggataaggatctattgtacgaggtgccagtggtgggacctggtagtccagtgcagtcagtggagacaccagttcagagcgtcgagacgacagtgcagcctgttcttaacgcctctgagtcaaccgatgatctggcaacgactacaacgtcaccacttgagatagccgttgattcaatagtggttgagcacgacaagctgcaggatcagcaggttcctgatcctactgcggcttccaaggcccaagtgcaggttatagaaggaactgagcttcccctggaggccattgcagctacaacggaaggtagcattgttccagagacggcagcagacccccaagaagcaacaaatctcgactcgacagttgttgatacgaaagagccacaggcattaaattcggaggccattaaattgcaggaagagccaaaagcacagcaacctgccacagaagctgagaaacctcccccactgccccaggctatcaacgctgaactggaagacgctgacgatttcgattacggggatgacgagacagatgacgactcccaacaaggtagtcaagataacgaatcgatcgtagagatagcaaacgataacaaatcaattaacgaatcgattgaactgaaaccactttcggtcgcgcaactgaagaaaacagataaagtggaggattcaaaggatgagactaaagaaaagcatgcagaaatggaagtctccaagcaggaagattcttccttacccactgagaccttaaatgtgacggcactcgaagagcaaattgatcagaaggaatttccgaagcaggtactggatgcagccgtggaattaaagtcgtcagatcctctgccagttgaggaggtcaccgaaactgtggctgagccaccacgaacgattgtcgaagataaaattaatgaagaaatagttccggtttcagctaaaatccaagcaaagcctgcaacagttaaccctaccgaacctattgttgctcaatctgatgcggaaataaaagcgccatctgagtcagtaatcagttcaaccactcccgctcctgtcgttgaagaggcaccacagaaagcagatcctgttggtctgccgcccctctttgaaaagaagaactttgagaatcccaataattattacaagcaattgcaggaggaacaggaaaaacagagactagttgcagaggcggaggagcaaaagcgtttacaagaggaagcggatcagcagaagaggttgcaagaggaagctgcgctgaataaaaggttactcgaagaagccgagcaacagaaaaggttacaagaggaagcggagcagcagaagagattgcaagaggaagctgagctgaataaaaggttactcgaagaagccgagaaacagaaaaggttacacgaagaatcagagcagctgcagcgctcaagtgaggaagcggagccacaactgagcgttcaggaagccaacatgcagcagcttaatgactctgtggattcgcagtccaacgaaatcgttgataacaacaataggcagcagccagagcaatatcagcagcaccatcatcatacagaaagtgcctttaatcatccatcgactgcatcacatacaactccaacgcctgacgccgaatcaccgtacgcagcagtccaggaggagaccacagaagcatcccaaacggataaccatcgtgagggagttggttacgtggagcctgtagctctgccagcgacggctagccccgtgtcggaagtacctatcaaggaggacgccgcaggctttggtctctttgccacaattgtcgacaccgtaaacaattttatcggaaaggatcctcagagtgatccagcagatagcagcgatgaattgcatagaatcctctatccaggaaggcctgaagtgccaccttctcaaaggaaggcggaagactttgctcctgccgatgtggatggatattgtgcccggtttcaagccaaagatgagcactgtcatcgctctatatctcttgataattttgttgaagtaatggccgacaagctggttgaccacagccaacttttactttgcgtggttatcgccgcgatttcttccttgttcttcatgtttgcatactactgcttctgcaatagtagtcaggagggagcgcttctttcgaagctgaaccatttggagcgcagtctgttggcctcccacaaggagaacctgatcatcaaacacgacctgatgactacgcgaacaaagttggccagcattgaggacaattccttcggctcaaacgacatggtggccgatctcaagaagcaacttgaatctgagctgtacgagaaggctaagctgcaggaacaggttggctcattagaaagggatctggataacgcggctgaggctggcctggagctcaacaagatgctgtccgaagtccttaacggtcagaatggcgatgaggctttcatgagcaccgtcgacgaactgcagcgacagcttaatgaccaagaaaagatcatcatcgaaatcaacaacagtctggccgagaaaagtagggagaacagcgaactgcagtatacgtttacggaggccacgactcggctcaacagcgagctgaagacgctacaagaggacaactacgagttggagatggagaagtctaagctgcaaactcgtcttcaggaaattcaggctgaaacggaatcggaattggccaaggcactggaagccagaaattacgaaatgcaaaagctgcagaatcagattgttgagctgactgtcaagtgggagcgcgaacatggcgatctgcagaccagtctagcaaagatcgaagctctcgaagattgcctgaaggcagtcggaaaggatgcgatccacaatgtccaagagctgattacctcggccaagacacgcggtgaactcaacgcggtccataagaagctggtcgagttgcagtcgaaggtggagcaagaagaggcccacaagcaacgtctggagagtcagctgcagcagtcaagtcaagatgtggagcagctgaagcaggacttcaaccaatcagagcgcgataagctagaagcccagacgcgtcttgaagtcttatccggctacttcagggagaaggagaacgatcttaagaaagaacttagtctgcaggagaccaagtggctgcagcaccagggagagaatgccagcacagttgagacccagacgctgatgaagaacgaaatccaaactctgaaatctcagaatgacgagctgcgtgccgagatcgaggcccagatagcctcgcacaaagctcagatgggcacgctggagaaccgagctcatgagtcctggctggcagcgcgccagtcggagcgccgttgcgaagaagcgttggccgaagctgccagcctgaggcgtaagctgaccacaatggccagcggcggaggaggagtaggcggagatccaggcgtaatggaggccatcgccgccaacggaacttccgtgctgggggcggaactgaaaacggctccatcgccgcttcccttgccgggttcaccactgctgaacatgccaaatccactgccattcctggcggcacccttctcaccgttcatgggtctgccgccgccattcctgcctccaactggagcgggaggggcacgtcctccgcccctgggacgcatgcgctctccgccgccctcgagtcgcggcgatcgggatcgagagcgttactcagactacagcgactacgatgactacgacgacgatgaggaggacgaccggggcatggaccgtcgtcgacggcacagcggcagctggggtcgccggcatcgcggctcctacagccactcgccgcgcacatatcgctcgctatcaccgtcggacagtcggtacaactacaatgacacggagactgacttcagtccgcccccaagtccgccgcccgttccgtcgggacgcagcgcgacatcgcgaccctacagcgaggtatgaggagcagggtgtgcccgtgcaaccaagtcctaccaagtatattagactcaaaactagttcaaatatatttattaatcaacgattatcgaacggtgggatcggggcgggtcgggacgacctctcaaaccgattccccaaaacagggatctcaggagagttcgtgaacaactaagaaaactcctgtctcagcggtgaatgatatccaagaaaattgaaacaaattaaacgcaatgacaaacacaaatcc

SEQ ID NO: 23109 - protein, 1377 aa, DROSOPHILA
MGIAKITYAIGGEGLISFKINSPIRVLSKSAGSNMQLWGVDINGRRGYANKDFIMEKKILVRDKDLLYEVPVVGPGSPVQSVETPVQSVETTVQPVLNASESTDDLATTTTSPLEIAVDSIVVEHDKLQDQQVPDPTAASKAQVQVIEGTELPLEAIAATTEGSIVPETAADPQEATNLDSTVVDTKEPQALNSEAIKLQEEPKAQQPATEAEKPPPLPQAINAELEDADDFDYGDDETDDDSQQGSQDNESIVEIANDNKSINESIELKPLSVAQLKKTDKVEDSKDETKEKHAEMEVSKQEDSSLPTETLNVTALEEQIDQKEFPKQVLDAAVELKSSDPLPVEEVTETVAEPPRTIVEDKINEEIVPVSAKIQAKPATVNPTEPIVAQSDAEIKAPSESVISSTTPAPVVEEAPQKADPVGLPPLFEKKNFENPNNYYKQLQEEQEKQRLVAEAEEQKRLQEEADQQKRLQEEAALNKRLLEEAEQQKRLQEEAEQQKRLQEEAELNKRLLEEAEKQKRLHEESEQLQRSSEEAEPQLSVQEANMQQLNDSVDSQSNEIVDNNNRQQPEQYQQHHHHTESAFNHPSTASHTTPTPDAESPYAAVQEETTEASQTDNHREGVGYVEPVALPATASPVSEVPIKEDAAGFGLFATIVDTVNNFIGKDPQSDPADSSDELHRILYPGRPEVPPSQRKAEDFAPADVDGYCARFQAKDEHCHRSISLDNFVEVMADKLVDHSQLLLCVVIAAISSLFFMFAYYCFCNSSQEGALLSKLNHLERSLLASHKENLIIKHDLMTTRTKLASIEDNSFGSNDMVADLKKQLESELYEKAKLQEQVGSLERDLDNAAEAGLELNKMLSEVLNGQNGDEAFMSTVDELQRQLNDQEKIIIEINNSLAEKSRENSELQYTFTEATTRLNSELKTLQEDNYELEMEKSKLQTRLQEIQAETESELAKALEARNYEMQKLQNQIVELTVKWEREHGDLQTSLAKIEALEDCLKAVGKDAIHNVQELITSAKTRGELNAVHKKLVELQSKVEQEEAHKQRLESQLQQSSQDVEQLKQDFNQSERDKLEAQTRLEVLSGYFREKENDLKKELSLQETKWLQHQGENASTVETQTLMKNEIQTLKSQNDELRAEIEAQIASHKAQMGTLENRAHESWLAARQSERRCEEALAEAASLRRKLTTMASGGGGVGGDPGVMEAIAANGTSVLGAELKTAPSPLPLPGSPLLNMPNPLPFLAAPFSPFMGLPPPFLPPTGAGGARPPPLGRMRSPPPSSRGDRDRERYSDYSDYDDYDDDEEDDRGMDRRRRHSGSWGRRHRGSYSHSPRTYRSLSPSDSRYNYNDTETDFSPPPSPPPVPSGRSATSRPYSEV

SEQ ID NO: 23110 - DNA, 10092 bp, DROSOPHILA
tcgggggatacggatgtgaccatgcacattaaaaaagcaagtagtggacaatatatatatatataatatatatatgtttatgtctgatgaacttgctttcaaaagttgctatgattaattttgctgccgattggtaatatatatatttatacagatttaaaaggtgaatatcattcgtggttacaatatcattctaaatatcatttgggatatgatgtagttccaagctatccccagcgattctttttaaagctgtgcagatataccatggcgacaaggtggacaactaaggcggaaaaaaggagtaaagaggtgctcaagtgataaaacagtagcttactgattgggtataaggctaatgcaaacatgattggataaatgtagcttaagattatgccggttttaaacagtgatttattgttctgctgaaacaaaatacaaaaaatattcagccatataaggtaaactttgaacttgccagtctatcgccaagcatcatgagtatcccagcaatgacgtaggttagtgcaatgacgagtacagcaaatccgatgctaaaggcaaatgacaccacatcgctatggggactatgcgaagtcgccattaatattcctaacaacattcctacggctccaaaacatatgcaccatatcggatagaagatggcgcaacagtccggtgtataaatgcacattttaaagcacttccttaatcctgaacgtgtatatgtgtatactgactgacgcgttggcgtatttaaagtgagctgttttcccagtgtactacgttcagagaattccgggattcccttcactataagattattggctttattcttgtagctgatctgttttatccgactatctgtatagttccgagactttttattgtgcaagtactgtggtgacccgcgggtcagttactttacttagctctagcataggtacatgtacatgggctataaataatttaaagtatttgcgaactcctggactgccttctactgccccccagttcgctgcacgttgtcgaagggcacgagaatgccaggcggtccaccaaaacggctctcagtcctcctgttgccaccggatgactgttccctgtgttccgttcgctggttaattggctggaagggacgtggctccgcctgcgcttgaggcgaaagaactcccgtgggcgccccgaatccgccgttgtagcgacccggattcacggtgggtcgcgccttgttcgccttcaaaacactgctgaactcgtgttggttgccagccacatagatgtcggagccgggtctcggattggaattgggtcccgaattggagaccgagggattggttgactgtgggcgcagtaggccaggcggtgcaccaaatcctcccgtgtacttcccggtgttgctagctggaggtgcaacagtctccgctgcttaacaaaacatatgtttagtaatatttcacttacgtgtggtaagtagattattgtgagtgcctatagatatactcactttttcgctgattgttggtgaccggcgtgctgatgaccttgccctcgtcgctcttggtgtactccaccttgctgggcgggaagggttcaacgctctgggagctggagctgctggccgatggctcgaagcgggctgcaaaaggcgtgacagagttggaagtgggttgggtcagttgtccaggattggggccgaattgggagtcggaaccagaagcggcctccgcgcggtcagcgggcggaacgagtaccagctgtggttcctcactgctactgctactgatgctgctgcctggaagcggaagcgtgactttggatggaaaagcggaggaaacgggcgggacggtggggggacgtggcggattggtggggttacgggtgctgctggccgacgctgttccaaagttgtccgggtcaaagggcacgcccggtccgacatccggatagtcgaagtcacgcagccaggcaggaatggtggccgaatcgaatgggttgccagcatccaacgggcttggagtggtgttgacgaaagttgtggtgctgctgctgccactgctgctcgaatccttcggcgtgttatctgcgtgatgggtggtggttgtggtcagtttcactggcggtggttctgggtgctcttgggtgctgtgagtggatgttatgggtgctttggtagttcgctgcgtgctcggacgacgagtggttgtggttgtcgttgttcgtggcgttgttgttgtggttgtagttgtcgttgttggtgccggcgtggtggtggtggttgtcgttgttgtcgtggttgttgtgcttgtagtggttggcctgtcaatgggtggtggtgtcagctgaatgtttcccagatctacgaagggctcaaatggtggctccaagtcgttggccagcgtgtggttgtactgatcattatcagtgggcacttcaaatgttacggccacatccagatcaggatcggtgacctcctgcagccacgttggcagggtataggcataggcctcctcattttccaagcgatagaaggtggatggatcctcggtcgtaccaatagtactggctaccgggttgacagtgcgcgtttccggtttcgctgtagtggtgctggtagttgtggtcctcctggtggttgtggtggtcctagctgtagttgtagtggtcctgggcgtggttgttgtggtcccagctgtggttgttgtggccttgttggttgtggtgctgatgcgcggtcttagggtggtactactgctcctggtggtgctgtagtgcgctgtgcctctctggcgatttgggaaacgacccggattgctgggtgtggttgtgcccacatgggcatttgtgccatgatcggccggtccatcgttatttaggttgtcctgcggctgtgcctggagttgcgccgttggtgccaccgggcttagagcattgccactactcagactgatgcgaatgttgtgacttatgggatccacaataccctggacctttttagcaggttgctgctgcgcttcagtaatgatagttggctcctcagcctgatccttattatcctggctttgatgcggtggcaacagatcccaagcaatcacactgagcggtgctccatcggctgctggtttccactccacaggacctcctatgtttgcatcctcgcgctgcagctcccggatataatcgggcagagtttccacctccttctcctcctgtgggagcggcaccaggtgcgcctgctccacctccacatccgcagtggtcgtcgtgtcgggtgatggtggatcatggaggggcggtgttaatgatgtggctggaagtggtgctggtgcagatgctgatgctgtgccagtgaatgagttcggattcggtttctgatcggtgctgggttccagggccacagcgatggcatctgattggagaggattcggaattgagtatttcgagcaattcgcgttggttgggactgtggctgtggctagggaactggcaatagggctgtgcttgggactgggacagagactgggaagtggacttggactcgagtgggtaccgatctgggtgattggagagtccagggcggcaaagggattcagtttgatcagtgagaaggggggtggggcgtggcggttactgggtggtgcaatggggaactggacgcccagcgattcacgcttggccagcttgttagtggtgctaatgggtgcggctagtgcggtgcgggtgctagtgctatttatactatttctacgactactggttgtgtgcggtgctgtcgaggcattgttttcggttttagttttagtttcgtgtaacgtcctggtcctcatttccgtttccgttctgctggtggcaccgctggcagccgctgctcgcgtggaggtcaactcaccaatgtgtggcggcagaagatcatcggccggccgccggatctccgtgattcccgaggcgtatgtgggtatctcaaactgaacgccctgggcgctgaccaccttgcgcccgtcgggcgtatcgatgggtcgcagggcgtcgatggggttgccgtagctgtcgatggccttcggcccggcaccacccccctggcctgaactgaaggtcacgtccgactgcagcagcggaggctgcagattgagggcgaagggcgactcgcgcacatctgttggagggggagcagaatgtggtgggtctcgttgtggctgcggctgcttttttttttgagctttggaaaggcgtggaagtggcaagtgaagatagcaagtggaagtagcaagtgggaatatgacagagtggcgcagtgagagattgaatgaagacgatacatgacacctcggaaatagtacttttcaaactttaaacttgtgtttacctaattatattagatacaaaatgtatggaaatatttaatctagaagtaaaatgttttgattcattttcgaacaagaatatatttaatttcaaaagaatatagcaattaattaaaatgtatctagccaaagggctcttttcaagttaaagtcgaactcgcattcccattgggtgcatgctgaatggtgggtgaggagcattttcggtggctatgctggtggttgggtgacagatgaggcagctgtgggcggctcttgggcaatttggctgccgcggcggctgattgattgacattgactgagatgggccatacatttggttttgggtttgcttgatgctgctgcggttgttgtgatgtgtggctggtgtgcgatggttactgttagttacacaaaggtccgccaccagataaaattcaattttaaaagttacccaggcaggttagtcaatgtacgtgtgtgtgtgattgtgtgggtgtgacaggtgtgcaaccatcaagttcgttgcctaagtctttcgtttcagctggtcactggaatcatgcaaaagggctctatggcatactgtgcgtttcgtgtcatccaaacataaaatactaaagataattcaacatttaagcgacaatttgcctagtaaatatcttatataacaaatcgtagttgaaaatcccattgtttatacttcgtgaaaaagataagtaatttattaacacacattagtgactctttctgtgcaatttgacgttaaagggtcaatccgaaacgtagcctaacactcttgaaacgcactgtgcgattgtggaatggctttttatgaaatgaacactcattgttttgtcgctgggagtctgggaatcggggaatccatgtgacagctggctttgacagcaacaacaaccgaattaatggctaatgattgcactgacaacgattttgttattttcgctgtgggtattgtgcggcgctcgtgccatgctcgtataattaataataatttccttggatatctgaaagattctcagccagcttctgatttctgatctgcgcctcgattcctgtttgcagcggaataactgaataaattgtgtgtatactgtatatgtagaatattttaattaggctggcattggggaattctggaaatgctgtttctgctctgcggtcaacttgaatgtgactaagccagatcgcggtgggcgttgcttcgaatttgccagccaagtcagttccggctgctaagcacatgtgcatatctcaattctatggccacgagcaattgggattcatttgcattttgggacggacgggcttggccgtctatcaggaagccctgaactttcgcctgcaactcggcccctcattaacttgaatgctcagagatagtgaagatgatttgcgtcacggctggcggccgaaagtgttatatctcgtatctcgcggattatgccgaaattatcgaaattccccacacttccgccgcaaacggtgctcaagttcaggccaattaattttgcttgtctccagcgaaatcttcattcgcatcgacatctccatctccatcaccatcgccatctccctcactgtttatgtttattgaatttaatttttaattgattgacggcttcacgacatctgcacccacctagagacaatgggtatttctgttgaaaacattttgcacttgccaattttacagtttgtttaccatcttcttgattttgacatgtttctgtgcctggccaaccttcgccggaatcagcgaacaaaaattgtaatggatttttattaatcttcgtttatatcatctcgcagaccttggaggtatcgacatattgggctgtcatcccacacagaaacggctaacgaaatgtgtcaaatgccgtgccaaatcgccaaaacacaatcccaacttgtaaattatacttcgatgagaaacgaaatgtgtttattgcacttgaaatagccagatgaaatatgattcaattgtgattggctcaaaaatgtcaaggggcaagttgactaaaacggaaaccgaactctcccataaatgaataaatatttgcggtttagaatggccccagaaccaattctatatagattggaatgtgtcggctgtctttgataaattggcaagagttagttggctatgtcgaaactccaaactgccgccactcatgtgtctacatatcttcatctatatccataactggttgatatcctattgtgttttaattacgataatctgcgactgaatcataaatcaaggcacgcgaaagtgaggcacgattacccatttcagatccgtgcgaattcgctaattatcacgtacgggtccattcattatgatgggttcattgattgccgaatatgaaaaccgcgaccgaaatataactatttcgtgccaaacaaaaccattaggctccaatgatatttccatcatgggtgctttgaatgagctctaagtttatggattggttttaattgttagtagccaattaacttgtctagttggtcaatgggttttggccaagtctttaaaccgttttctggtacattcattctcgaaatcctcagtttcttgtcacagcttcttgcttgtggccccatgacccaaaaagagcgccccgacattagtctctagttggtgtaaacaacttagttaacagatcgtcttgacaaaagcgtcgctaaatttatgaactacatggactaccccccaagggactccattccagaggtcgtttaacccctcctttaaccccccaaacgccaagaggaagacggatcgacaacgacatcgccgaagccttgccagtcacgttatcttcagcttacgtaactccacttgctggagctctgggtttcagtttcgtcttgagattggagttggagttttggctttggttttgggttttcttcgggggcctcttcacaacggctcttctcgaatttcgtttttcttacggctttgcctttgggaacttcgctgtttgtttttacagcggctacctgatttcgctttcagtccaaaaaaaacttaatgatcagcacccagttcttcagtttgtttgtcaaacaaaaacagcttaaggctgcatttataaaggctcttcaacggcgaaggctaattgcatgcataagccttcgggacaagtcaagagaatgcacttctctgaaaaaattagtattttaagatatactcttctctgtggacatccataaacaaagtggttccatatatgtattgacatcctaaataaaaattagccaatatttcaattgatttcagacccagtgagtgttctattggtgcaactgtcattagttgttagctgtgggatagcacttgcctacccaccgatgtgggtcatgatcacgatcacgatcgaagttaactgtggggtgagttcgaacttgtgcaccggtgagttttggaaatgcaaatgcaaatggaaagtgagggtgagattgtatatgcaaaaagtgagtgaagaattggaatttctaacagatattcatagacagaggaagggggaggggggctcgggatcagttcagaataaatcttagtaggatcgagataaaatcgtaaaattagttacagataacaacgtcaagaagaagctgaaagtcatgggtgtgctattctatacacaagttataaaatattcatagatggtaatgttactcaagcaggtttgactggcataatatttatgccatatatttataatatctataactttgtatgtcacccataaacttgtagcttcttccagaaaaaaacgcaataagcacacataacatttaaaacgtaaaccgcaaataggaaagaggtaaagacaaaaaaaaagcgaagaggatcgccgtttcaaaaatccgattcgcatgctggtgcgaattgaatatgcgatccgatagcgcaatcgcaatcgcaattgcaatcgccttagtttatatctatataggctgctttaatttaataccaggccttccagcggcgaaatcggcgccgatgatcagcagcagcataacggtaaagctaaccacgctgccaccgcatcgtgtcttcggatcgaactgcattatctcgtgggtgagcacggagcttcgcgttttggcttactgctcgtattatttctctttatatattaaccccttttcgaatttgtcacgcaattaacaatttggaattgggcattgcccaaaggggatggcagcgagatcggcgggaatacaattatatcgcgtaggagccgtcgatccggccaacaatgatcgcgatgacaaaatcgcaggcgtcgcaatcgaagccgacaactataatgtgtaatattttcaccgccttttctcaatcggaataaaatccgcggcacgatatcacgatcacttcggtgcgcgagcgagagggtgctatgcgcggagggcggcggtgcgagcgagcaagagcgatggagatcgtaggtcgtatctgggagatgcgcgatgcgctcgagcgaaacacgtccgtagctcacggattctgcgctttcaataaacttggccaagagccgctgctccaagctcgacttggctaaagccgcgacgtcgccagcgacgccgactgcgacggcggcagagtgtcaagtaagtaagttgggaaaaatgggaatttcgaacgcgcgaaagcgttatctattcaagagcctttttcagcttccccccgaattttccaacccttctgatcgccatgtgtgtgtgtactactatcaaccggaaaagagtgcaaaataattattttaattaccccaggtgatcagtttttttttgcatactggtctctcgccacactttgacgcactgccaatgacgttcaaggtcagccgagcaacatgatcggattcagatattaacccctgtaagccaacttttgtgttatcttaaaaatgcgtctatagcacgaatatctttatgagattagtagatatgacgaacaagataatatatgtaatatgtattatatattaatatcaacgaagcaagcataccaaaatagaagttgatcccgcatttcgataaggtgttaatattaacatccagctaacagtcgcctaacattagtgctattcgctaaatgatttacaagacaatagctaaatcgcctcccaaatagacacaactttcgcataaattaaacacacacgaaatgcaaatggttattgaaaacgaatgtgctccgttcggtttgtttattttgacaggtttggcttgatttttggaaaattattatgctaacaatgcataagttatgccttccatgtgccacagattcgccagatcctgttcccacagcgagttcttgttgttctcgactccatctcaattcattaatacaatatttgacaatcgcggcgttgacataaacacatttcaaacttgcctgtttcagtctggctcagtgcattgggttcttgactggtctgagtcagagaaccaatcgatcgatcgatcagacttttggcagatcagcgttcagtaaagatgcgttgagttggtcggcggtgtcagtgatcgatgaacttttggcatttcggcccgcccggctattgacgcgaccggtgattagatcatcgcacctcgtgctcataagtcatcacctttatgatcgccccccatatgaaattcttttcatattttgcatatagaaggtagttcaatagtctcgtactttagtatcaacgatatgtttctg

SEQ ID NO: 23111 - DNA, 3819 bp, DROSOPHILA
atggcgatcagaagggttggaaaattcggggggaagctgaaaaaggctcttgaatagataacgctttcgcgcgttcgaaattcccatttttcccaacttacttacttgacactctgccgccgtcgcagtcggcgtcgctggcgacgtcgcggctttagccaagtcgagcttggagcagcggctcttggccaagtttattgaaagcgcagaatccgtgagctacggacgtgtttcgctcgagcgcatcgcgcatctcccagatacgacctacgatctccatcgctcttgctcgctcgcaccgccgccctccgcgcatagcaccctctcgctcgcgcaccgaagtgatcgtgatatcgtgccgcggattttattccgattgagaaaaggcggtgaaaatattacacattatagttgtcggcttcgattgcgacgcctgcgattttgtcatcgcgatcattgttggccggatcgacggctcctacgcgatataattgtattcccgccgatctcgctgccatcccctttgggcaatgcccaattccaaattgttaattgcgtgacaaattcgaaaaggggttaatatataaagagaaataatacgagcagtaagccaaaacgcgaagctccgtgctcacccacgagataatgcagttcgatccgaagacacgatgcggtggcagcgtggttagctttaccgttatgctgctgctgatcatcggcgccgatttcgccgctggaaggcctgatgtgcgcgagtcgcccttcgccctcaatctgcagcctccgctgctgcagtcggacgtgaccttcagttcaggccaggggggtggtgccgggccgaaggccatcgacagctacggcaaccccatcgacgccctgcgacccatcgatacgcccgacgggcgcaaggtggtcagcgcccagggcgttcagtttgagatacccacatacgcctcgggaatcacggagatccggcggccggccgatgatcttctgccgccacacattggtgagttgacctccacgcgagcagcggctgccagcggtgccaccagcagaacggaaacggaaatgaggaccaggacgttacacgaaactaaaactaaaaccgaaaacaatgcctcgacagcaccgcacacaaccagtagtcgtagaaatagtataaatagcactagcacccgcaccgcactagccgcacccattagcaccactaacaagctggccaagcgtgaatcgctgggcgtccagttccccattgcaccacccagtaaccgccacgccccaccccccttctcactgatcaaactgaatccctttgccgccctggactctccaatcacccagatcggtacccactcgagtccaagtccacttcccagtctctgtcccagtcccaagcacagccctattgccagttccctagccacagccacagtcccaaccaacgcgaattgctcgaaatactcaattccgaatcctctccaatcagatgccatcgctgtggccctggaacccagcaccgatcagaaaccgaatccgaactcattcactggcacagcatcagcatctgcaccagcaccacttccagccacatcattaacaccgcccctccatgatccaccatcacccgacacgacgaccactgcggatgtggaggtggagcaggcgcacctggtgccgctcccacaggaggagaaggaggtggaaactctgcccgattatatccgggagctgcagcgcgaggatgcaaacataggaggtcctgtggagtggaaaccagcagccgatggagcaccgctcagtgtgattgcttgggatctgttgccaccgcatcaaagccaggataataaggatcaggctgaggagccaactatcattactgaagcgcagcagcaacctgctaaaaaggtccagggtattgtggatcccataagtcacaacattcgcatcagtctgagtagtggcaatgctctaagcccggtggcaccaacggcgcaactccaggcacagccgcaggacaacctaaataacgatggaccggccgatcatggcacaaatgcccatgtgggcacaaccacacccagcaatccgggtcgtttcccaaatcgccagagaggcacagcgcactacagcaccaccaggagcagtagtaccaccctaagaccgcgcatcagcaccacaaccaacaaggccacaacaaccacagctgggaccacaacaaccacgcccaggaccactacaactacagctaggaccaccacaaccaccaggaggaccacaactaccagcaccactacagcgaaaccggaaacgcgcactgtcaacccggtagccagtactattggtacgaccgaggatccatccaccttctatcgcttggaaaatgaggaggcctatgcctataccctgccaacgtggctgcaggaggtcaccgatcctgatctggatgtggccgtaacatttgaagtgcccactgataatgatcagtacaaccacacgctggccaacgacttggagccaccatttgagcccttcgtagatctgggaaacattcagctgacaccaccacccattgacaggccaaccactacaagcacaacaaccacgacaacaacgacaaccaccaccaccacgccggcaccaacaacgacaactacaaccacaacaacaacgccacgaacaacgacaaccacaaccactcgtcgtccgagcacgcagcgaactaccaaagcacccataacatccactcacagcacccaagagcacccagaaccaccgccagtgaaactgaccacaaccaccacccatcacgcagataacacgccgaaggattcgagcagcagtggcagcagcagcaccacaactttcgtcaacaccactccaagcccgttggatgctggcaacccattcgattcggccaccattcctgcctggctgcgtgacttcgactatccggatgtcggaccgggcgtgccctttgacccggacaactttggaacagcgtcggccagcagcacccgtaaccccaccaatccgccacgtccccccaccgtcccgcccgtttcctccgcttttccatccaaagtcacgcttccgcttccaggcagcagcatcagtagcagtagcagtgaggaaccacagctggtactcgttccgcccgctgaccgcgcggaggccgcttctggttccgactcccaattcggccccaatcctggacaactgacccaacccacttccaactctgtcacgccttttgcagcccgcttcgagccatcggccagcagctccagctcccagagcgttgaacccttcccgcccagcaaggtggagtacaccaagagcgacgagggcaaggtcatcagcacgccggtcaccaacaatcagcgaaaaacagcggagactgttgcacctccagctagcaacaccgggaagtacacgggaggatttggtgcaccgcctggcctactgcgcccacagtcaaccaatccctcggtctccaattcgggacccaattccaatccgagacccggctccgacatctatgtggctggcaaccaacacgagttcagcagtgttttgaaggcgaacaaggcgcgacccaccgtgaatccgggtcgctacaacggcggattcggggcgcccacgggagttctttcgcctcaagcgcaggcggagccacgtcccttccagccaattaaccagcgaacggaacacagggaacagtcatccggtggcaacaggaggactgagagccgttttggtggaccgcctggcattctcgtgcccttcgacaacgtgcagcgaactggggggcagtag

SEQ ID NO: 23112 - protein, 1057 aa, DROSOPHILA
MQFDPKTRCGGSVVSFTVMLLLIIGADFAAGRPDVRESPFALNLQPPLLQSDVTFSSGQGGGAGPKAIDSYGNPIDALRPIDTPDGRKVVSAQGVQFEIPTYASGITEIRRPADDLLPPHIGELTSTRAAAASGATSRTETEMRTRTLHETKTKTENNASTAPHTTSSRRNSINSTSTRTALAAPISTTNKLAKRESLGVQFPIAPPSNRHAPPPFSLIKLNPFAALDSPITQIGTHSSPSPLPSLCPSPKHSPIASSLATATVPTNANCSKYSIPNPLQSDAIAVALEPSTDQKPNPNSFTGTASASAPAPLPATSLTPPLHDPPSPDTTTTADVEVEQAHLVPLPQEEKEVETLPDYIRELQREDANIGGPVEWKPAADGAPLSVIAWDLLPPHQSQDNKDQAEEPTIITEAQQQPAKKVQGIVDPISHNIRISLSSGNALSPVAPTAQLQAQPQDNLNNDGPADHGTNAHVGTTTPSNPGRFPNRQRGTAHYSTTRSSSTTLRPRISTTTNKATTTTAGTTTTTPRTTTTTARTTTTTRRTTTTSTTTAKPETRTVNPVASTIGTTEDPSTFYRLENEEAYAYTLPTWLQEVTDPDLDVAVTFEVPTDNDQYNHTLANDLEPPFEPFVDLGNIQLTPPPIDRPTTTSTTTTTTTTTTTTTPAPTTTTTTTTTTPRTTTTTTTRRPSTQRTTKAPITSTHSTQEHPEPPPVKLTTTTTHHADNTPKDSSSSGSSSTTTFVNTTPSPLDAGNPFDSATIPAWLRDFDYPDVGPGVPFDPDNFGTASASSTRNPTNPPRPPTVPPVSSAFPSKVTLPLPGSSISSSSSEEPQLVLVPPADRAEAASGSDSQFGPNPGQLTQPTSNSVTPFAARFEPSASSSSSQSVEPFPPSKVEYTKSDEGKVISTPVTNNQRKTAETVAPPASNTGKYTGGFGAPPGLLRPQSTNPSVSNSGPNSNPRPGSDIYVAGNQHEFSSVLKANKARPTVNPGRYNGGFGAPTGVLSPQAQAEPRPFQPINQRTEHREQSSGGNRRTESRFGGPPGILVPFDNVQRTGGQ

SEQ ID NO: 23113 - DNA, 6399 bp, DROSOPHILA
cagtctttatatcattgtacaggtatgatacgattagatatgatataatatgtaaccagttttcatgtatcataattaaatccattatattgtatttggtctgtttttagagtctcctgggcctgtttcccagcctctgcatctggctcgcctacttgcttcctgcccacagcatggcgggactttacacatattccaacagcagcgatacgggcatatacctgtatatgggtaagctatcttggacaccacctcccactttcccctggttaatactcccattgattcataggctacatgctgctctacttgacgctcattcagacattggcactgttctgtgcccacctgctgccctgcaaggtctcggcgagcattgtcaacgggctcatcagcctggcagtggcggcagtgggtggctacctggtgcatccccagaacctggcccagttctggtcctggttgcaattcgtttcgccagaacgttggctgctgcccgttctggtgcaggatgagtacagtgccgagacgttgtctaactccgcaggactgcagttgtgccgaaataagcaggttggtgtgctcccttctaagggattctcatggccatgacaaaaattaaactcatataattgcccaatttcaggtgcagcaccaggagattattgtgcaacagccctgcccgccgcccaacggcacccaagtgctagtcgacttcgagctgctgccccagcagcacgtgctggatcccacgcccacctatgaccagaccacctcggtggctttggttctgggttcggtgctcgtcttttgcgtcaccttcatcgtctttttgtgcaattgtcgcggcgcctgtcgaaggaagcgtagccgttaggcagataccgtgactgggaggggagctggccaggatctggagtttagatggcacaggctaccgaactgtacattccatagaaactaattcttgaaataaatagtgtttagtcgaggcagtgttcgtttaactaactaaaggcaagtggttttattgagcttggaatggtcataaggcagtttgatggggtttgattaacagggtgtttctataaaaatacttaaaacgctacaaatgttatcaaaaatatttcaaatacaactacaattatttcagatatgtaattttgctacatatttaaaaatgcctttctacgtaggttatagatttcagtttagaacgtaaatcaaattaactgaattgagaattatttacaattctcttatgtattcgacttgagaagttgggatttaaagttgaactttatggaaatcaaagaaagagcttaaaaactgggaatgaatcgtatactcaagagtgtgttgaacctaatggtggaacaatcgcagattggtatgggccatgatgataccgtgctcatcgcaggcggcaatgacaccagcatcattggtggatcctgcgggactggctatgtaggagacgccgctctgaaagaatatttgggcaatttaaaaaaagaagctcaaaaatactagctaactaactcaccaggctagcgcgatcgatattatcacggaaggggaagaaggcatcggatcccaaggccacgccactcagctgctttaaccattccactttttgctcactggtcagttgggctggtgccttatcgaacctatatagagaagagtgtggttagggtctgcaaatatgtgaaaaatctctacaacttacattccctcgaactgcgacaaaggcatgtccttgcccacagttccgtttacgtaattgtcgattgcattagagatctccgcccgcttcacaccagccttgaacttcatgccggccacgctgggatgctgacgcagccaccagttgtccgccttctcgcccgccaagcgggtgcagtgaatcctcgactgctggccggcaccgatgcccacgacctggccatcgcgggcgtagcacacggagttgctctgagtgtacttcaaggcaatggtggccacgatcagatcccgcacagccacctcgggcagaggaccacgcttgctcaccacattggaaaagagcgaggcgtcgatgacagcatcgttgcgcttctgctccagcgtcagaccaaaaatagtcttgcgctccaccgcggagggttcgtagttggggtccatctaaaagtattaaaatttaaactcaataatcaaggacagatgaccttaaagcatcaatcctacctgcagtatacagtagccgccattcttctttttcttcaggatctccagagcttcgggctcataacccgcggcaataataccatcggacacctctcgcgagattatcctggccgtcacaacatcgcacacatcagagagggccacaaagtcgccgaaggagctcatgcggtcggctccacgggcacgagcataggccgttgccagaggtgtcaactgctcgtacagatcatccaccatgcacagcttggcctgtgccggatttagaggcactccaacagccgcacccgctggagaaacgtgcttaaagctggtggccgccggcagctgcagagccttcttcagttccctaaccaactgccaaccgttgagggcgtcgcacaggttgataaatcccggcgaggcattgaggaccgtcagtggaagcttggccagctgcgtgtagagctgagccggcttctggtggggattcatgccatagcgcaacggtagctgggacaccccagatccatactgtttcctgaagtaatctgagatggcatcatcgtaggtggcggtgtgcgtgaatgccttgagagccagagcctgacgcgtctccacggtggtattccccgaagccttcaactccgacaggacacgatcataatccactgcttcgcagacaactgtgactcgctggtgattcttagcagccgcccggagcagagtaacgcctccaatatcgatgttctccacggcatcggccagcgtaacatcaggcttcgctacggtgctggcgaaggggtacagattgcagaccaccagctggataagatcgaagccctgcttgcgcatgtcagccagatcagagtcggtggtgcgggaaaggattccagcatgcacagccgggtgcagcgtcttcacacgtccaccgagcatctcaggtgctcctgtaatctccgagacatccctcaccttcaggccagcgccacgcaagctagttgcagtgcctccactggcaaccaggtcaaagcccagtgccaccaaactcttgcccaagtcgagcaggcccgtcttgtccgacacactgagaagagctggggaagatatagcaattttagataatccacgagaaaggatcctgtcagacttaccaatcttgctggagctcatggttgatgattggtttctctaattgcgtctgaaccgctgggcaactgaaatgcaaatgaaagacgagatcagtcagtgggcgatggcgattgtgtgggctggttgttcggtgcacaaacatgtttacgcgttttcgcttttctggctaggcaacgacctcccctgcggtctgtggtccccattagcgaggtgtagggttatcagatactcctcaagccgcttgcatcagcagcaaaacggtgggattgagattcaaaacaacaacaaatgactcaaatttacgtaggttcatttattgccaagccgcgtctagtgttacattgccttatcagtatcattgactcggctgggtggtggctgagtctccgcctttcctgcctcctctttctcctccttttgcttcttcgctagatccgttgagagcattgtttcgtgatccctttgccgcttgcgctgtccctcctttcttcgcttgtgtttgttggacttcatatgcagtccccattggtactccccaacgaaatgccgttcgcatatttgacaaaaatggctagtctcctcatccaaatccgctccaggatgctcccgcttggccattggtagtatctcgcaagcctcttcgtttcgatagctttctatgatggtctctgcccgcttgtagactgccacctgccaagctgacacatcactggtgtccagttcgtagagatccggcacttgacgatctttgctggccaggaatcgattgttgatccacttcagctgcttctttgagtatcggcgagtgactaactttagttcttcgcaacaattgcgtaggagttccaagccatctggaagaccttcttctttcagtttttctgggcctggcagcttgtaactatgggttttgaggtactcctctatcttttcgtcctgctgctggtcgtacttgatcagatagggaataaactccttgtagccaatcgtctgcagaactcccgacgtataggcttgcacagtggtagcatggtgggcattgtgaaactgtcgtagttcagggagcagcccttgggccagcatgccatctacgcgggaatccaatcgctcgtttagaacatcctgctggcaacgcaaccaaaggagaacgatgtgtggatagcgaaggggtccacccaggcggtttcctcccggctgtgcccgctgttccgccagcatctggctcaaagtctgcccggtgctctgatacacttcgatagcccggatgatcttgcgccggttgttggggtgaatacggttggcactacctgcgtcgatcttggcaaggtgctgatgcagctcgagggtggacaaagcattcagttcggcatccttaagatgctcccccgaatgtttgccttcgtccggcttgacatccgagtcaaccagaatatcccaaagtagggattctatgtagtaattcgtgccgcccaccacaatcggagaagtgtccttggcgagcaggcgctccacaatgggcagtgctgcgttacgaaagtgagtgactgtgaagggttcggccggtgtggccacgtccagtagatgatgtcgtgcccgggactgctcctccttggttgccttggcggtggcgatgtccaggtgggtgtaaacctgcatggagtcagcgctgattatttctcctccgaagcgttcggccagttgcaaagacagtttcgtctttccggtgcccgtggagcccaggactacaattagcggcacctttcgaatcatttccacttattgcgagtgaatttaagtcaattaaggcaaataaaacccacacgttttgagcacgtgtattccgatggggaccgaaccacttgttgccgtcagctgttttttgtgcttacaagtaattggtattctgtttgcaattggcgtatattaagttaattatttgctaaaaaataaacctattttgatgcataaagtgattgtttaaacttacaaatcgaaaaataatggtagagttttaaagggaaatagtggaaccacacaaaattctgccggaatatacaagcaccgcgttgccaactactctgttgataagcgagccaatgttgccctaagaaattcataatgggcgggaattttaaactgattttaggttgtaaggaattgtatataaaaaccaagttttttaaacttttaagattacaaaataagaatcaaattagaattatattttagtacaaattcggaactcagataaattaagataaaaacggaactcaaaagtttaattaaaggcactgcatgatttgcttaagaatatgcaattattatattttttatataaatataatgaataattctttatttttaatttgttgtttttagatatcctcgcgatacatcgcatcaatgattgcacaaaatttgggccatccctatgcgctcgtgtcatctctaacgcgtacgcggtagtgtggccgaagcagcgcccagtttcaatcctgcacgggcagctagtatcgtatatctttcgtgcatttctttaatttacctgcagttccgttccgaataacaaaactggatcaatcagtttgattaaatttggagtactcgctgtcacagcggaacacagggcaggcagaaacctctggtgctcgtacacttttattatttgccgcaccgtgcgactttcactttttacaattcgcacaagaagaacaacaacaccagaaacaaaaacagcaacaacaagggcggccagcagcaacaacaaaaaaagaagaaacgaaggcaaagacgaagacgaagagcgatgagtgtgaaaaataccagagcggacaacatcaggccacagagtgcagcgagaattgtttaagaatcggtgggttgcacggcaaatgcaaagcaaaataacaataacaaaccagcacaacagggccgcctgtgtgtgtgtgcgtgagcggtagagggtgtgtgtgtgtgtgcgtgtgcgtgtgcccgtgcgtgtgtgctccagcgagagtgcgagtgtgtgcgtgagtacattga

SEQ ID NO: 23114 - DNA, 2237 bp, DROSOPHILA
aattttgtgtggttccactatttccctttaaaactctaccattatttttcgatttttgcccagcggttcagacgcaattagagaaaccaatcatcaaccatgagctccagcaagattgctcttctcagtgtgtcggacaagacgggcctgctcgacttgggcaagagtttggtggcactgggctttgacctggttgccagtggaggcactgcaactagcttgcgtggcgctggcctgaaggtgagggatgtctcggagattacaggagcacctgagatgctcggtggacgtgtgaagacgctgcacccggctgtgcatgctggaatcctttcccgcaccaccgactctgatctggctgacatgcgcaagcagggcttcgatcttatccagctggtggtctgcaatctgtaccccttcgccagcaccgtagcgaagcctgatgttacgctggccgatgccgtggagaacatcgatattggaggcgttactctgctccgggcggctgctaagaatcaccagcgagtcacagttgtctgcgaagcagtggattatgatcgtgtcctgtcggagttgaaggcttcggggaataccaccgtggagacgcgtcaggctctggctctcaaggcattcacgcacaccgccacctacgatgatgccatctcagattacttcaggaaacagtatggatctggggtgtcccagctaccgttgcgctatggcatgaatccccaccagaagccggctcagctctacacgcagctggccaagcttccactgacggtcctcaatgcctcgccgggatttatcaacctgtgcgacgccctcaacggttggcagttggttagggaactgaagaaggctctgcagctgccggcggccaccagctttaagcacgtttctccagcgggtgcggctgttggagtgcctctaaatccggcacaggccaagctgtgcatggtggatgatctgtacgagcagttgacacctctggcaacggcctatgctcgtgcccgtggagccgaccgcatgagctccttcggcgactttgtggccctctctgatgtgtgcgatgttgtgacggccaggataatctcgcgagaggtgtccgatggtattattgccgcgggttatgagcccgaagctctggagatcctgaagaaaaagaagaatggcggctactgtatactgcagatggaccccaactacgaaccctccgcggtggagcgcaagactatttttggtctgacgctggagcagaagcgcaacgatgctgtcatcgacgcctcgctcttttccaatgtggtgagcaagcgtggtcctctgcccgaggtggctgtgcgggatctgatcgtggccaccattgccttgaagtacactcagagcaactccgtgtgctacgcccgcgatggccaggtcgtgggcatcggtgccggccagcagtcgaggattcactgcacccgcttggcgggcgagaaggcggacaactggtggctgcgtcagcatcccagcgtggccggcatgaagttcaaggctggtgtgaagcgggcggagatctctaatgcaatcgacaattacgtaaacggaactgtgggcaaggacatgcctttgtcgcagttcgagggaatgttcgataaggcaccagcccaactgaccagtgagcaaaaagtggaatggttaaagcagctgagtggcgtggccttgggatccgatgccttcttccccttccgtgataatatcgatcgcgctagcctgagcggcgtctcctacatagccagtcccgcaggatccaccaatgatgctggtgtcattgccgcctgcgatgagcacggtatcatcatggcccataccaatctgcgattgttccaccattaggttcaacacactcttgagtatacgattcattcccagtttttaagctctttctttgatttccataaagttcaactttaaatcccaacttctcaagtcgaatacataagagaattgtaaataattctcaattcagttaatttgatttacgttctaaactgaaatctataacctacgtagaaaggcatttttaaatatgtagcaaaattacatatctgaaataattgtagttgtatttgaaatatttttgataacatttgtagcgttttaagtatttttatagaaacaccctgttaatcaaaccccatcaaactgccttatgaccattccaagctcaataaaaccacttgcctttagttagttaaacg

SEQ ID NO: 23115 - protein, 590 aa, DROSOPHILA
MSSSKIALLSVSDKTGLLDLGKSLVALGFDLVASGGTATSLRGAGLKVRDVSEITGAPEMLGGRVKTLHPAVHAGILSRTTDSDLADMRKQGFDLIQLVVCNLYPFASTVAKPDVTLADAVENIDIGGVTLLRAAAKNHQRVTVVCEAVDYDRVLSELKASGNTTVETRQALALKAFTHTATYDDAISDYFRKQYGSGVSQLPLRYGMNPHQKPAQLYTQLAKLPLTVLNASPGFINLCDALNGWQLVRELKKALQLPAATSFKHVSPAGAAVGVPLNPAQAKLCMVDDLYEQLTPLATAYARARGADRMSSFGDFVALSDVCDVVTARIISREVSDGIIAAGYEPEALEILKKKKNGGYCILQMDPNYEPSAVERKTIFGLTLEQKRNDAVIDASLFSNVVSKRGPLPEVAVRDLIVATIALKYTQSNSVCYARDGQVVGIGAGQQSRIHCTRLAGEKADNWWLRQHPSVAGMKFKAGVKRAEISNAIDNYVNGTVGKDMPLSQFEGMFDKAPAQLTSEQKVEWLKQLSGVALGSDAFFPFRDNIDRASLSGVSYIASPAGSTNDAGVIAACDEHGIIMAHTNLRLFHH

SEQ ID NO: 23116 - DNA, 4321 bp, DROSOPHILA
ttttttttctgtaaaatccgaccatttgagtttaatgcgatcaaagagtgcggcatatggaaaaacttcttgaaaatagttaagtgaagccactgatttgatttaacttatctcaattgcatattttgtttgttttgatttgagactttttgaaccacacgaaatttgaaaaacacaaaaaacacgatttggccccccgagtttgttttctccaataacccaaaattttatatgttttttttttcgttttgttttttattccaaattgtattctttttgtttaagcatttatggacatttatgtacagattaaccattttaatttgtattgatttttttcgtgcgctaaattgtcaaatcaggcaaaaattataccagttttttccaaattttcaaaagaaaccaataaaaaatgaattagatgatgtatgcaaggtgtgcgtggtgaatagctctttttttttatttagttaagtacaattttttacttgaataagcccaaacctcaaagtttttgtttttgatttgacaatccaattgaagtacgaaaaaaatcactgttcaaccaaatttaaacttttaaatcgataaagcgtaccgcgttccaaatttgatcaaaatcttggtcaaaacgtcaaatttaagcaaaaaaaaaaccacaaaacaaaacaaaacaaattttaacaataagtttacacaaacaaaaactatatttaaaaagaaaaaaaaaacacaaaaagctaaatgtaaaaccgaaatcaaaaaagaaagcaatgaaaaagctttatcaatatctaacgtacgattatgcgacgtttttcgaacaacgcccaaacaaaaatcgaaattcaacttcttgaaaacaaaaaaaaaaaaaaacaaaaaagtaccaaaaatatcgaaaattatataaataccagatactttgttaatgcaattcttgtaaagcaataactatgaaaatgaaaaaacaacaagcgaaatacacaacgatagtcaaatgctgaaaccccctcttgtttttttggcatccatccaacggtttgagacacgtttgaagcactcggccaaggttttggcctggtccacggcccaagaactggtccagacccaaatctggcggagtagggagaggcgcagagccggaggagagcattgcagggcctgcgaggcccctaagttttccattcttcttctctgatgacattgattcattgatttcgttttcagttccttgccttaattttctgtattttttttttctcgacaattgtaaagtttgtaatttgtttttttttttcctaattttccttttacctatctctcccacgctcatgtacaactaaaatactagagttccaacgctgatttattttaccgacagtgaagtaaggagagcaagttgctgaagtaaatactctacttgattatcttcttttaaaatgcataatttacgttgtcttagtttggaacatcctatatataactctctctctctctctctctcttactctctctctctctctctctcactcactccaagtaaacaaataattgtatgattatttttttggtttccgttagaaaaatactagttttgccaaagacaaagaaaacgaagaaaagcaaaaattcaagaccagcagagaggcgttgctaaaactagagattcaaatcgattgccagcaaaaactgaaactgaaaaaaatccaaagcgaaaatatatcgaaaccatagaaaaaataccaaaccaaaacaaaaaaaaaaatatataaaaactaaaaaaaaaaatcgaaagaaaagcaagtaaagaagttgatgttggatttttgtttggtgtctgttccaggaaacgtccgaatcgccccaccaacaacaacagcccccaccacacgctgtgggcgttggggcgggcggtggctcagcggccgcagcagctgccgcagcagccgccctgctgcatcagcagcaacagcagcagcccccacacagccccccgccgccgccactgcacatgtttccgtgcatctactgccgctcggccttccccaaccaatcgaaactcacccgccacctgctgacgcactcgctgaagacgctcgagtatcgcgaaccaaccaccacggctctgctccattcgcatctgctgggcgatctcaacatggccgccgccggcctaccatcgccattcgcctttcagatgaacgccgccgcaatggcggccacttccggtagcgatacacaggagcaggtggcggcattggccgccgcctttggcatcgatatggaggcggccctctcgttggccagcaccggctgtacgttccagagtttgactgccagctgcctggaggcaagctccggcggcggaagcggtggcggcggccagggttcgttgtcccgctcggcaacttcagccggaaacggtggtggcctaatgctcggcagcggaagtggcagtggctcgggggctgcagcggcaacgggtggcagcggcagcagcggctgtggtggcggtggcggtaccgccacatccggctccttgtcgccatccacatccgccgcagcagcagcggcggccgctgcacaatcgcagtcagcggcgctgctgggcgccgcgtccagtgatccgaatagtgttgtcatgtgtaagttctgtgctaaaagttttcccgatgttacatcactgatcacgcatttgtcggtacatacaggtgatcgaccatttaaatgtgagttttgtggcaaagcatttaagctgcgccaccacatgaaagatcattgtcgcgtgcacaccggtaagtctatagttctaaaagttgtcactgaaatgcatatatcatatatctcgcccaaaagtcccttttcacaatgttttttttttttttgatcagtcaatttttagtgttgccatcgaaaagttgagtgcattaaaataacgtatacgtaatataaattcaaaatcacgtatacgacatgttgcctctgttcatatgttaagatacttcaatataaaaaaaaaaaactcacatgttccaattaataatgttccataattccaatgtagtaattatttcaaacaccgggcaatttcgaaacaaattatttgcctaaaatttagagcccataaaggtaacactagtattgtaatattatctgttccaaaaatgttttctgatttaaaacaaaaataaagcttattaaagtaaaaacatagaccaaaattatttaataagtgaataatcatttaaatcttttttttttacaaaaaaaacaagacatgttattagattaggccccatcatgatcatccatcctccatctgaaatttgtgtgtacattagcaattttatctatatctatatatatttcctcgatttccttccattttttttgggaaatcgcattttaggcgaacggccgttcagatgtaatatgtgcgggaaaactttctcgcgctcaacgatactcaaggcgcacgagaaaacgcattttcccaagtacgtgcgcaagtttttgtcacccagcagcccggtcgatacaaaggatgagttgccgcaatagtgaaacgactttagtttgttattaaattattattattactactattactactataataataacaacaataacaacaacaacaacaacaaccacaataacaacgcaaactatttgcaacacaccaacaacaacatcaacaacaccaacaatttcaactacaacaacaattgatgaggacgatccaacaagaactttgacttacttaaggatgaaaatgaagaagaagatgcaggaggagaaggagagaccaacacaacaatacaccaatgcacacacacccacatatatgtatataccgttgaatccatgtatatacatatgtatatattttattaattatgtaaacgaggcatcaattctgaaagttttgggcaagcagaaactctagcaaataggaaagagacagcaacataccaacacgaacacaacaaaacacatacacagacacaatagagcaggcaggctataatcgtatatatatatcccaatatatatacaaatcatctatattaatatatacattatatacaataattatatagcagcatattgtcgaattgttgaagtttataccaagaagcgaacttgtttttttttttttgatgatacaggatctgtccttgaagacagatgagatgaaatgatagggaaagatttatcccttctttttggatggcaagaaaagagagagaaacgttttttctacccagaaaaacagctaaagcgcagggtgagagttgtagcaggaatctaataa

SEQ ID NO: 23117 - DNA, 1285 bp, DROSOPHILA
atgctgaaaccccctcttgtttttttggcatccatccaacggtttgagacacgtttgaagcactcggccaaggaaacgtccgaatcgccccaccaacaacaacagcccccaccacacgctgtgggcgttggggcgggcggtggctcagcggccgcagcagctgccgcagcagccgccctgctgcatcagcagcaacagcagcagcccccacacagccccccgccgccgccactgcacatgtttccgtgcatctactgccgctcggccttccccaaccaatcgaaactcacccgccacctgctgacgcactcgctgaagacgctcgagtatcgcgaaccaaccaccacggctctgctccattcgcatctgctgggcgatctcaacatggccgccgccggcctaccatcgccattcgcctttcagatgaacgccgccgcaatggcggccacttccggtagcgatacacaggagcaggtggcggcattggccgccgcctttggcatcgatatggaggcggccctctcgttggccagcaccggctgtacgttccagagtttgactgccagctgcctggaggcaagctccggcggcggaagcggtggcggcggccagggttcgttgtcccgctcggcaacttcagccggaaacggtggtggcctaatgctcggcagcggaagtggcagtggctcgggggctgcagcggcaacgggtggcagcggcagcagcggctgtggtggcggtggcggtaccgccacatccggctccttgtcgccatccacatccgccgcagcagcagcggcggccgctgcacaatcgcagtcagcggcgctgctgggcgccgcgtccagtgatccgaatagtgttgtcatgtgtaagttctgtgctaaaagttttcccgatgttacatcactgatcacgcatttgtcggtacatacaggtgatcgaccatttaaatgtgagttttgtggcaaagcatttaagctgcgccaccacatgaaagatcattgtcgcgtgcacaccggcgaacggccgttcagatgtaatatgtgcgggaaaactttctcgcgctcaacgatactcaaggcgcacgagaaaacgcattttcccaagtacgtgcgcaagttttttttgttattaaattattattattactactattactactataataataacaacaataacaacaacaacaacaacaaccacaataacaacgcaaactatttgcaacacaccaacaacaacatcaacaacaccaacaatttcaactacaacaacaattgat

SEQ ID NO: 23118 - protein, 427 aa, DROSOPHILA
MLKPPLVFLASIQRFETRLKHSAKETSESPHQQQQPPPHAVGVGAGGGSAAAAAAAAAALLHQQQQQQPPHSPPPPPLHMFPCIYCRSAFPNQSKLTRHLLTHSLKTLEYREPTTTALLHSHLLGDLNMAAAGLPSPFAFQMNAAAMAATSGSDTQEQVAALAAAFGIDMEAALSLASTGCTFQSLTASCLEASSGGGSGGGGQGSLSRSATSAGNGGGLMLGSGSGSGSGAAAATGGSGSSGCGGGGGTATSGSLSPSTSAAAAAAAAAQSQSAALLGAASSDPNSVVMCKFCAKSFPDVTSLITHLSVHTGDRPFKCEFCGKAFKLRHHMKDHCRVHTGERPFRCNMCGKTFSRSTILKAHEKTHFPKYVRKFFLLLNYYYYYYYYYNNNNNNNNNNNNHNNNANYLQHTNNNINNTNNFNYNNN

SEQ ID NO: 23119 - DNA, 8687 bp, DROSOPHILA
ccgtgttggccatctgacgagttcaaggttgatttccagctgaccatgttagttggtcaccatcattgcctgccgactggagatcattaggccgcacattagtgccatctcagcgcaggctaattagaagctgagtgtgaacggaaacactacgtttctgcgtgccgctttttgttgcacaacctgggatgcctcaatgatgcatgatttatggcattttgaattgtggatcggcggcgtgtgaagctcccgaggggccgggcatcaaagacctgtccagcaatacgtatacttatgtaggtttctgcgcttggcttacctgaaacgaaaatgtaaatcgaaggcaattagctgagtctaataagggccaaaataagattgagtataagaatggggattatagttggatagcgttgacgctatcaaaaaatcaatttggctaattgcaagcataacggcctcattcgttgccacatttcatcaaacaccatttgggaaggaaacgtcaaaagagcagccccaaggtgcagacaacttttagacacgccaagtctgggagggaatggctggagtttagggggctggacgtggttcgtttattagcggaatcgaatgggccccaaagtgtcatcaaatcaatgcaagctagctcaaatcgaagtcggcttccaaacttttccggcccacatttgcgcgccattaagcattatgggggttgcggggtgtgggcccgcattcctctcgtgaaatgggcaattttgttggcccataaagggctatcgtaatgggaaaagttggcgccacatcgggggcacaggtgtgtccccaggcagggaaatagttcccaccccgggcgggctaatagatttccaaatcaatagaccatccctggggagtttttctttatttcaatgcgagagttttagcaacttctcggtcatattaaatttggacgttaacattgcaaacaagccgcaaaaagctgttttgtagggctactttaagcgtttttggtgctctcgataacagaaaccacgttctcggccatgtcacacaggtgcgagtaggtctgcatgtagaggctatccctgtaagatttccgcgatcgcagttttttcaagagatactgatatgggtttttcctacgcagctgctggatccacggcttttcctccgattctttgccattataatcggtcccgtcggatggcggctccccttcttcctctcttagctgaaagtgacttatctccaatctgaggccactcagttccatcgacgccatcatctcctcccattcctggattccattgcctatacaacccctcacgtagatgaacctggatcgaatcctctcgtcattccgactgaaatgcgtaagagaatctctgcctctacccagctttagttcctcctgaactttgaccagttttccgtaatagaacttccgtttattagagtccggaagccgcaggattacctcacgaaccgtctgcaggcgcagatcccaagcgggctccctcggtttctttagagctttgtatagtgacttcaatttttccagatcatcaaaccgttcgcacttgtagccgggattttctacattgaacacctccctctcatccaaaactctttcataaggacatatcacttcgggcggatgcaaaaggggcactacggacgcctggtacttgttcaggtcattggacattttcttcttcgccttgtccgtaagcagttgttggtgccgccgcagcttgtttgtgtactccggcgcgggagtacagtgccccgtaagccgggccaagaaaataccgcgcacagaaccgattacgttgggaaaaatgcggagctcatatcgctgcttcagcaggtagcatccacgtggcctgaaaagcgctcggcatacgtgcacctctcctgggaaaacagtgaagttggcctgggacataaggaagttatggcattgggcagtgcttttgggggcacgctttgattcgacagagcaccactggcaggtgagcacatgaccaccgacgttctccacgctagccacatccttgaccacgttctggaacggatgacattcgaagaaaacgtttgcgatctccggcaaaaagatgcgctttcctgagtttacgaacagcataccgttaatcttaacggctgcacgggaaaccacagattccgttccctttccctggtcaggttctgccctggaagggctctcctctttttgctcctcgtcgggaagtatctgagacgtgctgctcacgctgaaaattgagtcgcaagacacccgctcgacacgactgatttcgccgtcggtaaactcctgctgcacgggaccacccaccacctccaatctgtccagattcggaaagaacgagatgacgcgcatgatgtcgctgcttttgttctcaatatgattctccagcattcgcgacttctcccacggagtgggcatctcgggccgttggtacgccctgcccaggatctcctgcttggtggcacgggttagcccggtgatctccacgtccgcccgaccggcctgctcggcgcacggaagcgtctcttgcagttctggtagaacttggcatttgctgggaagaacagcaggtttcttctggatcaaagtagtgggattcatgcgaccggcaaggtcgagaagccgcaccactgtacctcgatccctgggagctactgtgctgcccacgttgatcagcatttcgtcgggtcggcggccgagcttccgctggatcttcgcctgcacagccgcacggttttcaagtgtgtcgtaccacagcttcaggcgagggtccatgctcaaggactctcggatgtcctcctgtagcgaacactccgattctgatagtgtggtggtaccgtgctttttgtcgaagatgccgtggacaatctcatccactagctgcttgccatcccgatcggaaacatccttaagcgtgttgtgcttgcggaattcaagctgtgtggattcagactttaattcaacctcgttcttctgggaatcgggttccttccaggactccgtaatcttgaggaaggactgcaaccacgagcggtgccgagagcccggcaatagcccagattcgtttctcttattcatttttatttttatttttttggtttttttttttgtatttaagtgtcatatgtttgggtgctttgttgtatattgtctgctcggcgacacctatatctggacggtgctctcgatcaccgacgcaatatcctcgaccgctctgcaaatcaatccgtgcaactgcatacagattgagtccataaatggctttgaacggagaatgctattggccttctgcaaactggaactacagtcttcgtgggcgaccctcgacctaaggaaatgcaccctctgttcccattcttccaataaactacctagtattccacgtacataaatcatttttgattgattgcggttccacagcctattaactgagtccgctttaaccagtggcattggacacgttctccgcaagccgtctagcaagtttgccagttccgaagagtgctttatgcgctgccgaatgtcacgactattacacaccaaatggattagcgagtgcacactgtagtcccaggaagaaacatatgaatttggaggcctcacccgtttgtagaacgccattaagcgctcaaaatcttcatgagtcaggcactggaagcttctgttccgccggttaaaaacctcccgctcctccagctcccgttcatatggacagagggacactgtctgctgttgcagaggaaccggcgcctcatacgacaacacctgaagcttctccattttgaggcggtccaagtattctttggggggagtacaacgaccgtttaagtttaatgtgaaaccagaagggcgacagaaaaagatgcgtggacacgtcaatagcagccagcgctgctttacaatggccacgcagcgcggctgatacagaaccgtaacatcccgaaactcgcccggaagaagcacaaatgggtccacatcaaaaacgaagtcatccggatcggcttccatgagagtattgttgtttgagaagaaattaaccttcttccattgtaggctcagctcctgacttccaatgttttcgatgcgtatgatgggtcgcaggtgacgttgaaagggctgactagcaaaggttcggtcaatggtgggagagaactctggattatgtggccagaaattaattccattgatgcgaacgcccagtccgctaaccggttgttggatcgtcactgtagattgggccacctcgacagcgtcactggcgcctaaagcctctgtacggcccacctgattggacattttcgagcaatgggtctggagcttcctgcccaccacctccaaactacggatttggggtggtagctcaggcataatatccgcttcctcattttttagctctttactccccaacatttccgcagctgcatagctgggtagtcctacggtctccaagcagcctcctatggagcgtttcactatttttccctgctgattaaggatcatatcctctggagtcctgcccagttggactcgtagtctctcttgtaacgcccgtctttgaataagcatgttcttccagtaatctagacgactatcaattttactcttgcacttcggtagggaacctgaagacacactgaaggatgactcttcgtggagacctcgttcaggataatttttgaaaatcccctttataaggtcattggctaagccatctgggttaattataccctcagatgtatcctcctccatcagtacatttctctggcttgaactcatttttaattttatcctattttaaggtgtatattgtaaacacttacgtgaaagttttgacttaaaggtcatgcttactaaatattgttgattatacatttaagaacaggttaaaaacacttaggactcctgttcgttcccatgaagcatatctggtctccatgggaatcaataatccatagggtataagatctataagatctcgaaaaatcttaaagatgccatttacacagaactataagctatacaggttaaacaggttaattttaataggacatacttgtttttgcggggcttaagtttgtgtataattttaccaaagcgatgaggaatagtgattggtcttggctactcgataagcgatactcagttaaggattggcatgtaattggatattgatgatcacaactaatacagttcgatgaaaatgaaatggcatgtggcctcgcgatggaaatgtttggaaagaaaccgaagttctggagatactgacctttacacaaacggacagttgaacggaaagccggacgtaaagccagacggaaagccggacggacgatgccacgatggacttgtccagtgactcggaacaagaatacactaaaatacaaacactaaagtctgaatcgcttcctttctaacttctcttatgtacttaatgtattgtgaaaaccattgatttgtccaggattatatatctccttaggtcggtactatttccgtactctctataacggacacaatgtcctctgacatgttgcacagatgtgagtaggtttggatatagagtgcatcccggaaatatttggaccgatacaatttgcggatcaccgccgtccggatcttcttctcgtccaactccgtctcgcctaaaatttccatcagtttctccatgtcgatgggcgtcattggctttggttgatctggttcttcttcatctccttcttcggactctcccaacaagctttggtagtaccgctgaagctctggcttgaaaaaagaatcttccacattgaacattaggtcctcccattcagcgatcccattgcagatcacaccgcgcacatatatgaaccgcgaccgttgcttttggacatcctgctgggaagaggcattcagtgagaatccgccacctagcaaaggagcgagaagttggttaaattcggaaaagatcgattcccgctccaccagtccgttaatccgcattatgtagtccttaatcgttgataggcgcatatcccagagcggctcccgcggcttctttaagcgctgatggaacgcacgaagcacctccaggtcatcgaagcgggcacaaatgtatcccggatttagggcgttgaacgcctcccgatcgtccagaggccgctcataggggcagcacgtcggtggaggcaccaccatgggagccagagcgcccaaatgggtggtcaatttatccatttccactgcatccgacttgcagatgcagacgcattggcactcgagtagtttggccatgtagtcagctggcggagtgcaacgtccgtaaaggcggagcagtaaggactcctggcggccgcaaaagattcgcggctccacctgaagcagccacaactccaccgccatcgccacttttcgtggctggtagagcactgctacattccgagtctcaccgtgcgacagtctgaagccctccaggtcaaagtgaaactcgttgtcctgggccagcaacagagatccccggttgtagtagtaagtgctctgtttccaggagaaggagagcgactgtgtgccaatgttggtcagctgtaggacgtgcttgaggcgacgctgaaacggatcgcatgtgaatcgggcgactatttcatagcagtccttaattccgccgccatctccctcgcacggaacgtaatctacaccattaacccgtagtcccacatccggaatgggaggtggagttcctgacgatttctcctccgtttcgccacacgactcgcagatgcactcctcggtgcagatcggcgagctctcacttttggtcaccgtgtgcatggaatccacatccactaggaacggcttcggtaatcgattgatcttgctgagagcagtacccttcacctgcagggcatccacatcgggaaagaactccacaacgttttggatgtctacaaagttttgctccagtcgtttgtccaggaactccgattgcagccagcctggtggtgggtcctgctccatggcctccttacccaagatctccgttttgcagacctctggcatgccaacgatctctaaatccttgtagcccaccttttccgctttcggtgtcgtggcctgcagtccaggaactacctggcaggtacatggatccaattggtcgcccagcttggaaagtggcgcgctcatcagacgctcgcccttcatgcggtccgcgtagtccagcacgcgcttcaccatttgcccgtcgcggttgtccagcgtggagcggcggttgaagagcacctcactggccagcttgcccgtttcccgctggactcgttcttgcatcaacttgcgctggtgaagtacctccttccagtatcgcagccgtttgtccacgtgcggttcccgctccttaattggccacggaatattagccgcgtgacaagaggatgaggtctctggaaagtccccccgtcgctccttgaaaatctcggtcagaatatcctccaccatgcgctccgtgtacttgcccatgggggactcggcattcagctgcgcctgtgcagtcgaacgggtcgtcggttcggtcaaagaagatggcagcgacaccatgttggccagtgtaaatttcgaaaaggtatcggacccgttggttttgaggttaatatcttccatgccctccattttgtaacgtggttcagtttggggttcgagttaacttgaacaattataaaatatatattgactcgaattgaaaaggcttagtttcaagctagctatatgactcgttggtgtggtgaatggattgtgatttcaataattgttaagtcggtacaatatgtaagtccagtgtataagtctaacagcgaaaaaaaatgaagccccatatctataataaatgcttttttattttatttgggtgttgccacttaaaaaaaatatgaccaaaactgggaaagggtgttgtgaatgctaatcagcggtgctttcgatgacggagactatgtcctcggcagcatcacagagcagactgtaggtgtgcatatagagagagtccttgaggtacttgcttgccttgactctcttcgagactttctccacgatctgaatttcttcgttttcatctggaccctgctggcgattcttctggcctagctctgaggcgacgggaagagaagaattctcccctagatagtggaggagctccagcttaaagaactgttcatccagcccaaaaaccattgcctcccactcgtcgattttgctggcgatagtgccacgcacgtaaatgaagcgggatctatcccgctccgtattgtgttccattaagggataagctgagcacctgttgcacttcatcggctggagcaaagcaaccagtttgttgtggagattctcgcgcaggaagcgactctcctgcttgccaataaagtgacgcagggtctcgatacttaaatcccagggtctatcgcgaggcttcttggccagttgatataagtccttgagagcctccagatcctcgtatcgctggcatcggtaagagaagttctgggcattaaagacctcgcgctcgtcaagatgtctttggtagggacacaatggtcgagggttctcgataatgggagccagactggcctgcatttgcagaaggccctgggcctgcaattgttgctgcttatctagg

SEQ ID NO: 23120 - DNA, 5118 bp, DROSOPHILA
atggagggcatggaagatattaacctcaaaaccaacgggtccgataccttttcgaaatttacactggccaacatggtgtcgctgccatcttctttgaccgaaccgacgacccgttcgactgcacaggcgcagctgaatgccgagtcccccatgggcaagtacacggagcgcatggtggaggatattctgaccgagattttcaaggagcgacggggggactttccagagacctcatcctcttgtcacgcggctaatattccgtggccaattaaggagcgggaaccgcacgtggacaaacggctgcgatactggaaggaggtacttcaccagcgcaagttgatgcaagaacgagtccagcgggaaacgggcaagctggccagtgaggtgctcttcaaccgccgctccacgctggacaaccgcgacgggcaaatggtgaagcgcgtgctggactacgcggaccgcatgaagggcgagcgtctgatgagcgcgccactttccaagctgggcgaccaattggatccatgtacctgccaggtagttcctggactgcaggccacgacaccgaaagcggaaaaggtgggctacaaggatttagagatcgttggcatgccagaggtctgcaaaacggagatcttgggtaaggaggccatggagcaggacccaccaccaggctggctgcaatcggagttcctggacaaacgactggagcaaaactttgtagacatccaaaacgttgtggagttctttcccgatgtggatgccctgcaggtgaagggtactgctctcagcaagatcaatcgattaccgaagccgttcctagtggatgtggattccatgcacacggtgaccaaaagtgagagctcgccgatctgcaccgaggagtgcatctgcgagtcgtgtggcgaaacggaggagaaatcgtcaggaactccacctcccattccggatgtgggactacgggttaatggtgtagattacgttccgtgcgagggagatggcggcggaattaaggactgctatgaaatagtcgcccgattcacatgcgatccgtttcagcgtcgcctcaagcacgtcctacagctgaccaacattggcacacagtcgctctccttctcctggaaacagagcacttactactacaaccggggatctctgttgctggcccaggacaacgagtttcactttgacctggagggcttcagactgtcgcacggtgagactcggaatgtagcagtgctctaccagccacgaaaagtggcgatggcggtggagttgtggctgcttcaggtggagccgcgaatcttttgcggccgccaggagtccttactgctccgcctttacggacgttgcactccgccagctgactacatggccaaactactcgagtgccaatgcgtctgcatctgcaagtcggatgcagtggaaatggataaattgaccacccatttgggcgctctggctcccatggtggtgcctccaccgacgtgctgcccctatgagcggcctctggacgatcgggaggcgttcaacgccctaaatccgggatacatttgtgcccgcttcgatgacctggaggtgcttcgtgcgttccatcagcgcttaaagaagccgcgggagccgctctgggatatgcgcctatcaacgattaaggactacataatgcggattaacggactggtggagcgggaatcgatcttttccgaatttaaccaacttctcgctcctttgctaggtggcggattctcactgaatgcctcttcccagcaggatgtccaaaagcaacggtcgcggttcatatatgtgcgcggtgtgatctgcaatgggatcgctgaatgggaggacctaatgttcaatgtggaagattcttttttcaagccagagcttcagcggtactaccaaagcttgttgggagagtccgaagaaggagatgaagaagaaccagatcaaccaaagccaatgacgcccatcgacatggagaaactgatggaaattttaggcgagacggagttggacgagaagaagatccggacggcggtgatccgcaaattgtatcggtccaaatatttccgggatgcactctatatccaaacctactcacatctgtgcaacatgtcagaggacattgtgtccgttatagagagtacggaaatagatatgatccttaatcagcagggaaaaatagtgaaacgctccataggaggctgcttggagaccgtaggactacccagctatgcagctgcggaaatgttggggagtaaagagctaaaaaatgaggaagcggatattatgcctgagctaccaccccaaatccgtagtttggaggtggtgggcaggaagctccagacccattgctcgaaaatgtccaatcaggtgggccgtacagaggctttaggcgccagtgacgctgtcgaggtggcccaatctacagtgacgatccaacaaccggttagcggactgggcgttcgcatcaatggaattaatttctggccacataatccagagttctctcccaccattgaccgaacctttgctagtcagccctttcaacgtcacctgcgacccatcatacgcatcgaaaacattggaagtcaggagctgagcctacaatggaagaaggttaatttcttctcaaacaacaatactctcatggaagccgatccggatgacttcgtttttgatgtggacccatttgtgcttcttccgggcgagtttcgggatgttacggttctgtatcagccgcgctgcgtggccattgtaaagcagcgctggctgctattgacgtgtccacgcatctttttctgtcgcccttctggtttcacattaaacttaaacggtcgttgtactccccccaaagaatacttggaccgcctcaaaatggagaagcttcaggtgttgtcgtatgaggcgccggttcctctgcaacagcagacagtgtccctctgtccatatgaacgggagctggaggagcgggaggtttttaaccggcggaacagaagcttccagtgcctgactcatgaagattttgagcgcttaatggcgttctacaaacggtccttcctcaagattacggagtcctggaaggaacccgattcccagaagaacgaggttgaattaaagtctgaatccacacagcttgaattccgcaagcacaacacgcttaaggatgtttccgatcgggatggcaagcagctagtggatgagattgtccacggcatcttcgacaaaaagcacggtaccaccacactatcagaatcggagtgttcgctacaggaggacatccgagagtccttgagcatggaccctcgcctgaagctgtggtacgacacacttgaaaaccgtgcggctgtgcaggcgaagatccagcggaagctcggccgccgacccgacgaaatgctgatcaacgtgggcagcacagtagctcccagggatcgaggtacagtggtgcggcttctcgaccttgccggtcgcatgaatcccactactttgatccagaagaaacctgctgttcttcccagcaaatgccaagttctaccagaactgcaagagacgcttccgtgcgccgagcaggccggtcgggcggacgtggagatcaccgggctaacccgtgccaccaagcaggagatcctgggcagggcgtaccaacggcccgagatgcccactccgtgggagaagtcgcgaatgctggagaatcatattgagaacaaaagcagcgacatcatgcgcgtcatctcgttctttccgaatctggacagattggaggtggtgggtggtcccgtgcagcaggagtttaccgacggcgaaatcagtcgtgtcgagcgggtgtcttgcgactcaattttcagcgtgagcagcacgtctcagatacttcccgacgaggagcaaaaagaggagagcccttccagggcagaacctgaccagggaaagggaacggaatctgtggtttcccgtgcagccgttaagattaacggtatgctgttcgtaaactcaggaaagcgcatctttttgccggagatcgcaaacgttttcttcgaatgtcatccgttccagaacgtggtcaaggatgtggctagcgtggagaacgtcggtggtcatgtgctcacctgccagtggtgctctgtcgaatcaaagcgtgcccccaaaagcactgcccaatgccataacttccttatgtcccaggccaacttcactgttttcccaggagaggtgcacgtatgccgagcgcttttcaggccacgtggatgctacctgctgaagcagcgatatgagctccgcatttttcccaacgtaatcggttctgtgcgcggtattttcttggcccggcttacggggcactgtactcccgcgccggagtacacaaacaagctgcggcggcaccaacaactgcttacggacaaggcgaagaagaaaatgtccaatgacctgaacaagtaccaggcgtccgtagtgccccttttgcatccgcccgaagtgatatgtccttatgaaagagttttggatgagagggaggtgttcaatgtagaaaatcccggctacaagtgcgaacggtttgatgatctggaaaaattgaagtcactatacaaagctctaaagaaaccgagggagcccgcttgggatctgcgcctgcagacggttcgtgaggtaatcctgcggcttccggactctaataaacggaagttctattacggaaaactggtcaaagttcaggaggaactaaagctgggtagaggcagagattctcttacgcatttcagtcggaatgacgagaggattcgatccaggttcatctacgtgaggggttgtataggcaatggaatccaggaatgggaggagatgatggcgtcgatggaactgagtggcctcagattggagataagtcactttcagctaagagaggaagaaggggagccgccatccgacgggaccgattataatggcaaagaatcggaggaaaagccgtggatccagcagctgcgtaggaaaaacccatatcagtatctcttgaaaaaactgcgatcgcggaaatcttacagggatagcctctacatgcagacctactcgcacctgtgtgacatggccgagaacgtggtttctgttatcgagagcaccaaaaacgcttaa

SEQ ID NO: 23121 - protein, 1705 aa, DROSOPHILA
MEGMEDINLKTNGSDTFSKFTLANMVSLPSSLTEPTTRSTAQAQLNAESPMGKYTERMVEDILTEIFKERRGDFPETSSSCHAANIPWPIKEREPHVDKRLRYWKEVLHQRKLMQERVQRETGKLASEVLFNRRSTLDNRDGQMVKRVLDYADRMKGERLMSAPLSKLGDQLDPCTCQVVPGLQATTPKAEKVGYKDLEIVGMPEVCKTEILGKEAMEQDPPPGWLQSEFLDKRLEQNFVDIQNVVEFFPDVDALQVKGTALSKINRLPKPFLVDVDSMHTVTKSESSPICTEECICESCGETEEKSSGTPPPIPDVGLRVNGVDYVPCEGDGGGIKDCYEIVARFTCDPFQRRLKHVLQLTNIGTQSLSFSWKQSTYYYNRGSLLLAQDNEFHFDLEGFRLSHGETRNVAVLYQPRKVAMAVELWLLQVEPRIFCGRQESLLLRLYGRCTPPADYMAKLLECQCVCICKSDAVEMDKLTTHLGALAPMVVPPPTCCPYERPLDDREAFNALNPGYICARFDDLEVLRAFHQRLKKPREPLWDMRLSTIKDYIMRINGLVERESIFSEFNQLLAPLLGGGFSLNASSQQDVQKQRSRFIYVRGVICNGIAEWEDLMFNVEDSFFKPELQRYYQSLLGESEEGDEEEPDQPKPMTPIDMEKLMEILGETELDEKKIRTAVIRKLYRSKYFRDALYIQTYSHLCNMSEDIVSVIESTEIDMILNQQGKIVKRSIGGCLETVGLPSYAAAEMLGSKELKNEEADIMPELPPQIRSLEVVGRKLQTHCSKMSNQVGRTEALGASDAVEVAQSTVTIQQPVSGLGVRINGINFWPHNPEFSPTIDRTFASQPFQRHLRPIIRIENIGSQELSLQWKKVNFFSNNNTLMEADPDDFVFDVDPFVLLPGEFRDVTVLYQPRCVAIVKQRWLLLTCPRIFFCRPSGFTLNLNGRCTPPKEYLDRLKMEKLQVLSYEAPVPLQQQTVSLCPYERELEEREVFNRRNRSFQCLTHEDFERLMAFYKRSFLKITESWKEPDSQKNEVELKSESTQLEFRKHNTLKDVSDRDGKQLVDEIVHGIFDKKHGTTTLSESECSLQEDIRESLSMDPRLKLWYDTLENRAAVQAKIQRKLGRRPDEMLINVGSTVAPRDRGTVVRLLDLAGRMNPTTLIQKKPAVLPSKCQVLPELQETLPCAEQAGRADVEITGLTRATKQEILGRAYQRPEMPTPWEKSRMLENHIENKSSDIMRVISFFPNLDRLEVVGGPVQQEFTDGEISRVERVSCDSIFSVSSTSQILPDEEQKEESPSRAEPDQGKGTESVVSRAAVKINGMLFVNSGKRIFLPEIANVFFECHPFQNVVKDVASVENVGGHVLTCQWCSVESKRAPKSTAQCHNFLMSQANFTVFPGEVHVCRALFRPRGCYLLKQRYELRIFPNVIGSVRGIFLARLTGHCTPAPEYTNKLRRHQQLLTDKAKKKMSNDLNKYQASVVPLLHPPEVICPYERVLDEREVFNVENPGYKCERFDDLEKLKSLYKALKKPREPAWDLRLQTVREVILRLPDSNKRKFYYGKLVKVQEELKLGRGRDSLTHFSRNDERIRSRFIYVRGCIGNGIQEWEEMMASMELSGLRLEISHFQLREEEGEPPSDGTDYNGKESEEKPWIQQLRRKNPYQYLLKKLRSRKSYRDSLYMQTYSHLCDMAENVVSVIESTKNA

SEQ ID NO: 23122 - DNA, 8177 bp, DROSOPHILA
caagtcgggcaaaactgtcacgcccacacttttgaaaactgttttgatattctttcatagttttattagtcttgcaaatgtgtatggttttgcaaaaaaacttttaaaaaagttttgatattttttcatcttttttaattataaatttttatcgattatgccacacccactatcgaccgtaagccgcagaaacctgtcacggacacacatttgaaaaatatgttatatctttttttcacatttttattagtattgtaaaattctatcgatttgctacaaaaactttatgccacgcccactctaacgaccacaaacctcccatttcttcttgtccaatatctatcgatggtcctaaaaaattatgaaatttcgcgttctcacttccactagctgagtaaaaggtatttgatattcggggaactcgtgcgttctctcttcttatttatttaaaacaagagagaacaatagtcgattactttcgactatcagatacccgttactcagcgaattttgagattttttttgtcatttcgatggaaatttacatttatataacaaaatgaaatgaaaatcaaatcccttttcacaactgagagcaggatacctggccaataaacggtttcatggcgtctggataggcttgcgaacgcactaacttgcatgcgaacggacaggcggacagatcaagattatatgtatgtgtgtactccagtaaacttataattattatgttagtctaaaaccttaatgcgttggagatttacaataaatgtatgtacatatgtacatagtcatgaattctttaaattcctcgaaattgttccgatacgggaatcgacccccctatattaattgaagctgatatggccgaagtgcagcgtattctgccaagaaacgctatccaagtattttggtacgtatgtatgtatgtacatacatgtgtatatggtacattcatgtagtacatacatacatatgtatgcaagtacgtacgaacgctcgacaattcctctgctaaaaccaaatgcgaacgcgtcaacggatttttgtattacacacattttctgttgtttcgttctgcgcgttctccctgttgtgtgtgtgtgtgtgtgcgacgccgcttttcgcttgcttttactttctgtggcttgtgattgcgattaaacggggtttccatccggcgagtcgcgctctaggcagcgcccggagagcgctttagacctatatgtctggatcagataacgggaacggtggcagcgagccacggccggagagagacagagagcgcaaagagctatagctggctctcatgtcgatgtcgaatgcgcgtgattttttggctctgaatgcgggcttgctgccaactgcgctgccggctcggcgtcgacgacggctgagcgcagcccgcttgccgcggtggttgttattttctggtcttggtttttagttgccgtttaaacttggtcgtgagagggtagcagccccgttatcagccgaccgcgatcgcgtccgaactaaagagtactgtggagccctggccagttcaagccttcaaatcctccagaacattctgatggcgcccgtgagcggctgtttgcccaccgccacccactcgctgcaggacatgagtgctgccgccgcggcaatcgctcttgacatgaagcccaagttggagccccaccccctggccgccgcaactgccatgccctctcagaagataaagaaatgtgcgtacacagatttattccccacattcatgcaaacatacgtacatacatatgtatatatgtacaatttttatgcaaaatgcagtcgaaagtcgatacgtcgaacaagcagtagaatttattttatctcttcattgcctattcaaatagttcggttcaccctatgtgcaatgtacatacatatacgtacatacgtatgtatgtacatttgggttaaaaaagttcgacttatagaagttttgaggtgcctgtaccgtgctttcttaaaatattcgactgtcgagactcgaggacttatattatttgcattcatttttgtgtcccaacagtggttcggcgcaacgcctccgacaagctgaagctcatccaaatggtgcacgacaatccaattctctgggactcccgtctcccgaatttcaagggcgccgaagaagaaaagaaccgagcctgggagcacataggccgcgagttcaacgctcccgggcgtcgcgttgcacgggccttcaagtccttgagggaatcctaccgccgtgaactcgcccacgtcaagctaatgggcaatggcttcaagcccaagtggagtctctatgaggccatggatttcctgcgcgatgtcatcagagaacgaaagtaagtataaggaatagtattttagtgaactggtgaccaggtgattctcttaaatttaaaaccgtcaaggaagtttcatgccaatatcgactcctggggttgaccagtaatatagagcccgttatgaattttgcattctctgcttgacccattattgccacaccacaaatcatgtcactaaaaatgatcttcatccaaatggctttacaaaagcaaaagcaataatagaacacgagagaagagcgcttaaatttaaaatttgacagaaatacgagtcattcttataatcgaatagtaaagtacatgaaattctatatcaacgaataattattacagaacgtattgcacttatttccaagttttcttttaatctttctaggcaatatttacctttcccaaaatgatcttaattaacgtacttattcttatcctctgctttttggagatcgataccaaaacaaatctaaaagtggaaccgttatttctcaaaagtaatgctcccttacgactacagttcttcaataatatcgtcttacactctgaacattatttgtgtcaggagtacatttggctacttatattacaatgagtttgataagccgtcactaaccatacaaccatcgaacaacggtcaaagtttggcttgagtcgtgaataacagttttcggtttagattggtcttctgttttggtcatacacggattgattcatgcgaaacaaatacatgcatcagtttgaagactagctaacttatacacaataataatgtgactcacctttccaacgatcatttacattggtcgaaggtattgtatgctttccagtcctgtgtctgaaagaggtttttccgaatctgcccccctaaaaatatgtgtgcttgtcagtagtcagtcaagcgaacaatgttgtttagcttggctcaatcaaaaataattattgcaggaaattccaagaatcttatcattttatgcgagtagccacttcagcttatgtacactgagaagtgtatgagtttgtgagtcatggcttagatctaatgttggacaaaatatgtcaataaatttatttcaaaaatcatagaatcacggacttcgtaaagatctgacaatttaaataaattgagaattcggaaatatgttcagatcgaatagacaatacatacaattgtcacataaaaaacatgtgataagtttagcataaagttattcgaaccgtaactacgaaattccacttccattcgagccttcgtacaaaactcatcccttagcccagtcgatttgcataaacgcccaacaattcgagcaaatctcagcaccgtgtctgagaaaacatctgcccagcgaaaaagaatagcaaaaacaaggcaagggggcatatggacactaaggagcggtaatgtggaaaaaaccaatccgaacaaaggaatgaccgggccagagacccgcaaatggtctcagtcgagagtctgccccgtccaatgttctggctcatatggagccgtgctcgagctgcgggtgtgtgtgtgtgtgtgagtgtgtgtactttatgtacatatttatatgaaataaggccatttcctttcaattgactgtacccacatgggcaacaagcagtcgacggccccgacacatgcccgcgcacactcacccatggtgtgtgtatatatttaaatttttattattgtgagctgataacagacagctcaacgggcccggccagtcgggcagcgcttgagccggagctatagccgcagctatagccacagccatagccataacacagatctcgccaagcggcgaatattatacaacgtcgcagcatcgtcgctgcttgaaccaaaaacgaaattgagggaagctgcaaacgcaagaccaagtccatcgaatagtgcttgcgagaggggtggggactatgggaaggcgccgagagagcgataaattaatgagagcactacgaaaatgacaatcagcaccgaagaatacggattgcgagtggaccaagttgggaaagactggtagctcgtgagcgagaaaggggctggtaagggaaaatgagcgaggttctgcctgtgtgtgtatgacatgagcaccgaacactcgtaaagatcgctgtatgggtgagctgagtaattgaacgaatagcttggtctgacttcggccagggttaaaaatatgcccacgaccattagccagccgcatcggccgcgtcccggccaaggggttgctgagacccagagtcggggtctggacgcctctttcaggctgccctggcccacatgctttcgtcgttcagtcctctcttaatggggggctctcgtaccctcaccctcacacacacgaggccacttgggtgtgaaagttctgctgggctctgtctgtgtcacgcttatgatttaataagcaaatgtgctgcgaaattgctgaaattgtttggctgtccgtcatccccacaatccgaatctcgccccacgccctgaaatcactgtccgccgtatttcgcattgaaatgctttagccaatgcgtcacggaagaagaaaagtgggcggtagtccgtgcttgccttttgattctcgtacctttaaatgcctttgcatggagctagttcttgcctaataaatcataataaaaagttctaggtctgcaaaaatctaaaatctcattcggaccattggaatatttaattatgttattattatattaatattcatagatttgtttccaagtgcaggtgatagagattttagaaaacgaattcaaaccacaaaaacccataaacaatctcggaaaacggcttgggacctaagcaagagcggaagcaaataatgataagctgagcgattcaaaccccgaaaagaaaccaagtcaaaataatgaagtaaataaagccattcccgattgtggaacatgtgaaaatgtatttcgactcgattagtcctgcgagttttttggtcttggctggcgagcgagtatcagttttcaaattttacaattgtcaactacctgcagccgattgcggtgataaggctgtcttctaggtcgcccatgcccgtgcctaccactaggccaggtctttgcattcggcaaataactataggtatgggggaggcccaaaatagccacgttcagatgttctttgagcacccggcccaggcagctgcattgcctgtgaaaatgctcttgaaacttgagacgcgtaaggagagagacaggaagcgatactacactgaaagacatttatgtttatgcatttcttgtgttattgccttaaacagacaagatttcaaaatggggatatgaatcgttgagtcacaggaaacatatgaactctataaggctaatacaattatatttttgtgtgttttcgaactcacaattaatacgaacatgctttccttatcagggtcactatccgatcgcaatgtccgtcggcataaaacaaagctaattagttgatgacaacctagcaaagttttacgaacttattgatttgtctttcagactattctatttctaattttttgcccaacgttttgcaaatgattattgccagcattatttaatatttttttatttattgtaattaatataatttaagataagagaaagaaaatctgttatactataaatgatgtgtgagagacaaagaaaagtattctttctacttttaatttaagaacgtaggcggttcttaaagtgtattaaaaacaatgtacataaccactagtcacggttatatgttattgtatttaataaatttattaatctttttgtatgcccttttaaacaacctccttcatcaaatttttattagtattcaacttaacatcaatacaaaataaaaaaataccgcagacttgctgcgaatatgaatattgaatatgacgcaaaagtaaaacccaaccttaaacccgttaaaatgtgaaataatttagtcttctaacatatgttctttctattataggggcgcttcgcatgcaaccgatctaagcctgacaacctatggccatattaacaataacaacaacaacaacaacaacagtaacagcttggctgcagggggaaaggcaatgaccctgaagctgtccaattcctttaacgagtccgcctcagtgttaaatctctcaaagtgctcctcgctcaatgtaagcgacgatcactactattgcgactactatgtgaagccggagctggatctctcggtgggcggtggggccggaagtagcacaagtgggagtagctccggcggcgggccacttcctctgcccgctcaccaggctcacaacgacagtcgggtgagctcaacgagaaacgagcaaagggcacagcatcacagctatgaagacatggacgacagctcgatacgcagcggggacgaagatatcgcccacgcatccgacgtagtggaggagttggatgccatcgatgcagatttcccttatcctctgattctggattccaactcacgcggtagccccaatgttggtgtggacgatgtggtcatgtcccgcaagcttcgccgtaacgtcgatcaagatgttttggaggaaggaaacggtcacggcgatgcggttatcgatggtgacgactacgaagaacaaatgctgcaacagcaccgccatctccggcagcaacagggcgtcgcaagcggagggttggatctgccgcccccacaaactgtacgtgaggttttgaactccaagttctgcggctttatttcagccaagctaaacagcatggaggactcggacgcggacaatttaatgaatcgcattcttctcttactggttcaagtgcagcagtgcgaagggtccacgaaatagacagcggaggagaagagcgctaagtgtacgggtgtaattatagtagccaaaaaaaagtacataatggaatgatgttgctgctcagagcacttataactgaattttcttgccattatatattactttcctaaagaaatacaaatttacttgccaatgccaaatctgtgccataccaaaaggatcaatcaaatatgaatgattttctaaaacattctctaattttttcgctcctattaacaaaaatgaaccaaactcaacgaaaagacaacacaaagacgtaaaccaagaaatagcaaaataagaaacatagattaattaagctttaaatgttaatttcgttttaagtcgatcaactgtagttcatactcatgccaacgtctcatcacatgaaacaattctttatataaccttttattttacccagattatatcgcctatatataatataacttcttgttaagttgaaaacgtagaaattagaaaagaaaagtttttaacttaaaaaagcgagcatattactcatagtttcatatacagcgatatgaatattaacaatatctgaacactaaatgagaacagctttaacaatttgtcgtttttgaataaaacaccatctttggcagtaatgctttgctatcgatgtacgcagacaatgttttggccattcagcccaatttaaatcaaaaattttgaaaaagttttccgtttttcggtggatattgagtaataaagtacctttaaatataaaaaaatcaaacgtgtctaccgaacatgaacataatcagccgatttttattaatttaaatccgaaattatttatagtcaggaataaatattttatatcgataccaaatcaggaaactttgttatccattttattcttgcgattattgctatggcattcacgactgactagctttatagactaggcagttcacattgatggagcatttataacttttacggttgcaaatgccccctttactgtgtggcaaatatc

SEQ ID NO: 23123 - DNA, 1887 bp, DROSOPHILA
cgacaattcctctgctaaaaccaaatgcgaacgcgtcaacggatttttgtattacacacattttctgttgtttcgttctgcgcgttctccctgttgtgtgtgtgtgtgtgtgcgacgccgcttttcgcttgcttttactttctgtggcttgtgattgcgattaaacggggtttccatccggcgagtcgcgctctaggcagcgcccggagagcgctttagacctatatgtctggatcagataacgggaacggtggcagcgagccacggccggagagagacagagagcgcaaagagctatagctggctctcatgtcgatgtcgaatgcgcgtgattttttggctctgaatgcgggcttgctgccaactgcgctgccggctcggcgtcgacgacggctgagcgcagcccgcttgccgcggtggttgttattttctggtcttggtttttagttgccgtttaaacttggtcgtgagagggtagcagccccgttatcagccgaccgcgatcgcgtccgaactaaagagtactgtggagccctggccagttcaagccttcaaatcctccagaacattctgatggcgcccgtgagcggctgtttgcccaccgccacccactcgctgcaggacatgagtgctgccgccgcggcaatcgctcttgacatgaagcccaagttggagccccaccccctggccgccgcaactgccatgccctctcagaagataaagaaattggttcggcgcaacgcctccgacaagctgaagctcatccaaatggtgcacgacaatccaattctctgggactcccgtctcccgaatttcaagggcgccgaagaagaaaagaaccgagcctgggagcacataggccgcgagttcaacgctcccgggcgtcgcgttgcacgggccttcaagtccttgagggaatcctaccgccgtgaactcgcccacgtcaagctaatgggcaatggcttcaagcccaagtggagtctctatgaggccatggatttcctgcgcgatgtcatcagagaacgaaagggcgcttcgcatgcaaccgatctaagcctgacaacctatggccatattaacaataacaacaacaacaacaacaacagtaacagcttggctgcagggggaaaggcaatgaccctgaagctgtccaattcctttaacgagtccgcctcagtgttaaatctctcaaagtgctcctcgctcaatgtaagcgacgatcactactattgcgactactatgtgaagccggagctggatctctcggtgggcggtggggccggaagtagcacaagtgggagtagctccggcggcgggccacttcctctgcccgctcaccaggctcacaacgacagtcgggtgagctcaacgagaaacgagcaaagggcacagcatcacagctatgaagacatggacgacagctcgatacgcagcggggacgaagatatcgcccacgcatccgacgtagtggaggagttggatgccatcgatgcagatttcccttatcctctgattctggattccaactcacgcggtagccccaatgttggtgtggacgatgtggtcatgtcccgcaagcttcgccgtaacgtcgatcaagatgttttggaggaaggaaacggtcacggcgatgcggttatcgatggtgacgactacgaagaacaaatgctgcaacagcaccgccatctccggcagcaacagggcgtcgcaagcggagggttggatctgccgcccccacaaactgtacgtgaggttttgaactccaagttctgcggctttatttcagccaagctaaacagcatggaggactcggacgcggacaatttaatgaatcgcattcttctcttactggttcaagtgcagcagtgcgaagggtccacgaaatag

SEQ ID NO: 23124 - protein, 437 aa, DROSOPHILA
MAPVSGCLPTATHSLQDMSAAAAAIALDMKPKLEPHPLAAATAMPSQKIKKLVRRNASDKLKLIQMVHDNPILWDSRLPNFKGAEEEKNRAWEHIGREFNAPGRRVARAFKSLRESYRRELAHVKLMGNGFKPKWSLYEAMDFLRDVIRERKGASHATDLSLTTYGHINNNNNNNNNSNSLAAGGKAMTLKLSNSFNESASVLNLSKCSSLNVSDDHYYCDYYVKPELDLSVGGGAGSSTSGSSSGGGPLPLPAHQAHNDSRVSSTRNEQRAQHHSYEDMDDSSIRSGDEDIAHASDVVEELDAIDADFPYPLILDSNSRGSPNVGVDDVVMSRKLRRNVDQDVLEEGNGHGDAVIDGDDYEEQMLQQHRHLRQQQGVASGGLDLPPPQTVREVLNSKFCGFISAKLNSMEDSDADNLMNRILLLLVQVQQCEGSTK

SEQ ID NO: 23125 - DNA, 5367 bp, DROSOPHILA
tgatatctttggagcgagagatcatggacattcgggaggagcacgtcctgcaaaaccatcgccagcgcatggagaacatcagtatcgtacgcagcctgatgctgagcctgaacgtggactccgattccctggcagtgcgtcaggagcccgctcccgcagctcagataaacagaccaagcggcccgcgtcgcagctccagggaaatctgcaaggacatgcgacggacgtgtgcgttggcccgcaccaccagaccaatctcgccaagaagatcttcctcagtgaccagtactgtatcgtccactagtcgccgctccagcgcagaagtgcagtccgaggtggtgaccactaggataccagaggatagaagagccaacaaggtaacttatacttaaatttgattatgcttttcttaacgattcattatcggcttgagtacagcctacaccaccgccacgaagaccagcggaattagtgtttgatgaggacgactcggacgatgatttcgacgaagcagtaagccccgtggaggagacacagactgagcaaaatgaagagaacaatcgtctgtttagcattatagaggaaaatggcagtgaaggggagtccacagactcgtcatcatcatgcgaggccatctattgcgacacaacgtttgaaagtagtccgccaaacgcccaagtcaccgtcacgcccagtggacgggctctgcgggaagtggacaccaatatccctgtagcagtgtccctcagtcggggaaaagagactgggaagggatcatggttggctatttccgtagctgtggaagattctccacaggagccaagcatacagtgcccacgactggcagtcaccaggcctagtcaatcgtctggaatatttcctgatgtcaacggattaacgccgcgaagaagcctgttcaatgggataggcaaaatggccggaagcaccagcactccgaaatcctttctcgtcgaggaaatgccatctataagaactagaagccgaactgcggctaataagaaatcagaaaatacggatatgtctagttctttctgcaacaacagcgcaaggccgagtagaagctgcaggcccaccagtttggtggagccaagtctgaagaacaagttgcgcaatggctcgaaaggcaaggccaaggccaaaaagtagatagacgaattttttaataggctttaatgttgtttctgtaatttcattggttttcaataccactttttaccatttttaatatgaataatatttttaaatcgtcaggccctgataagtttaatttatagactaaaagctgacatcggattactttttgcctgcaatagagggcatattcagttcatccagcgctatcggaaggaagacactccatcatcatcatcacccaaagatgccaataggaatttaaaagtacgtctaatttttacatgttcatttgtgaataaaacaacgtttcaattaattatttgttaatacgcttttaggggaactcattttatagattcctcttagatgcaaactacgtttattcgcacaaagttgttggaaacatttacaaaagactctgaagaacaaagtacaattacaattacaattaaatacagtagcaaaagggtaatgattatacgtaggtaggcgataattgcacttcttttagactacctcgaacttgcccatacaacagttgagatggtctcctgcatggttgtggcttggctgctccgtgttctccttgatctcgctgataatgtcctgtatcttgttgatgatctgttgcgagttttcaccttcgccaggagtgtgttcgctacctgcggccgcttctggttgctttgcctgggcggcatctgcgggtagctccacgcccaaactgaccaccagcttgtttagtgcctcaatcttctcgcgcagctgctctcgctccgcttgcaagagacgcatttgggcggccttctcgtactcacgctgctttagcatgcgcctctgcgtttgatagagggcaatgtactcgccaatcgtttcggtttcgctctgcagctggagcaccagatgctccaggctgtgcttctcctccgtcaagtcggcgacctggctgatcagtgtggtgaaacgcgattgcaagcgttccacggcctcggcggtgggcagcgtttcagctgcttgtctgtgggcgtggttctggccgtgatcatgtggatgatcatgctgatgatcgtgtggatggctatgtgaatgatcatgtgtgtgatcgtgcggatgatcatgtggatgaccatgatcaccagcattatgatggttatgttcatgggaatgatcgtggtcattatcatgacaatgaccgtcggaatgctgatgagagtgatcgtgcgaatgattatgcaaaagaccaacttccttcgcttcctctgcttcgttttccggtgcatctgctccattctctttttcggtttcctcaccggcgtgataagcttttgcctgaaagaaatgataatgggatataaagtcagttaaattttaatcccagtccaacccacctcataatgcctgagacggtccagctgctgttgcaacattaactgctgacgttgtagttccacgttctcgtgcgatagtctaatcatttcctcatccttgaacttaaagcgctcctcatttgcttgaagcttttgctccatgctgttgtagttctggcggatttctcggttggcaaactcttctgaatccaagcggatgaccagctcggctttgtcgtttgtcaactgaacaaatcgctgctgcagttcgtccaactggtttttcatctctacattctgggttagggcacgcgatgcggccactttgtctgactccatggtggccaacagcttggactgatcgggctgctcagcttgcaagcgttcgagttgcttttccaactcgtctaaagccgagttctttaactgcagctgatcgtcctgcgacttgatcttcagctggaattcgtggcgctcaaactcgaagttttcgatctgctctttcaagacagccagttcatcttttaaggctttctgaaattgaactaggagattaaacaggttttccatatttttttggcttacttacctgctcgctggtttcttccttggatggctgcacttgactggcctctttaaattgggcctgcaggctgatgttcttttgtatatcccgctccagggcgcccacgtgctccacaagctggcgttctcgctccctcagtgagttcagtacctctgagagttctgtgtttcgttcgttgagcttggcgatctcgccactctgatgctgcacatagttttgatactgaccagctgcctgctccttgtcctgcgttagttgacccaccatcgcttggaggtcgcgtatctgttgctcgtacatgtattgtgtttgcaccagcgactccactcggttgtctgtggtgacgctagactcgtctgagagctgccgcagcttcagctgcgccatctcgagttcgttcgatttttgggaaagctgttgctgcagttcctcttgatgctggttgctctgctttagctgggcctctagttcgttgagatgcgactgttggtccttgatttgtgcctgcgattgtagcagttgtgcctggagttgcgcgtactgctgtcgctgctgctcaccggtcgactgttgatcctggcagtgctgttgtagctgctccagacgcaattgattctgatccttgaggatgcgaagctcctccagctctagctcacgctcccggcaagccaggcgaaccttggtcagctccgcattgagctgggccttttcagcgatgatcacctggatggcctgcaagctagaggcatctgccagtccaccattgtgttccgactcgttttgggcaaaataagaagcggctgtgggcagggcagactgctccggcggctgcgtcccacctgctcctccaccgttcacatttatctcgctgtctgaccgttccgacagattgctggatatgctcacagtggacgagtgcgattgcgtggtggcagccaccggctcctctgctcccggctgcccattgttgttgctggcgcgctgctggtactccttcagctgtgtccacagaagcgtgttaaacaaaatcaatattagtcggccaatatgtgtccacgtcacaagagcaaaacaattgtgtgtggcactggttgtcgcacctttttccttgccgcggccaacttctgcgccttggcatcctgcgtgtcatcgggcatgtccttcggggtcagcagcggtacctttgccacacctggagtaagctcggttcggaaggcgagccaacaaatgtaaattaagctaggcaaaagtggaaatttctgaatgttgataacaggtctgaagttcagtatgaccgtacgcgtttagagccaaaatgccgcgcgaacgggtacactaggcggcagggaaagcacagttatatattggcgcgcatttttagcttttttttcatttttaaaatcgaacacgtatatatgcgtatccgttttcaataaacagagattatgtacaattaagaaatttcactctacttgcataaacgttcatgcgaggaggttttgagaaatactcttcaaattaaaaaaaaaaaacagtattatttatcgaaacaaccattagttcatcgtttcttatcacttcacttaagtcggcttcctaattcagtcgtagttaagccgctgtgaggagtagaagtccaggtcgatacgatgtacaaccttatcaagggctccttggcaacatactgctgcctgtgcctgctactgatattgattgacccagcggaatcgggacaactgtcaacgagattcaacgtgagcttcgcccagctggattcctgcgaaacctactccgttccgaatacgggctatggctaccggaggttctacatgctgcgcgagctgagcaacaacaacaggaaggccggagagcggctgcacttgaaattctacgtcctgaccgccatggatgcgcacatcctgctctcggtgacgaatcacccgcgcccaaatgatcgcgtttacgagatcggtgggtgaaatcaataatattcagttttaattccagcatttcaatgagctctttctagtggaaccctacctaaatattcaattgatatctttattccgcttgcagtgataggagccggcggaaatacgttttccgcaatccggaatgctatgggaatgaggcgggtggccacgaatcaagagccgaacttggtatcgctgtacgacccgacgccaattgagattgtccaaaaccagagtgagttcccccatcttatcgggtattccctgcccctccaacgcacagtat

SEQ ID NO: 23126 - DNA, 2830 bp, DROSOPHILA
aaatttccacttttgcctagcttaatttacatttgttggctcgccttccgaaccgagcttactccaggtgtggcaaaggtaccgctgctgaccccgaaggacatgcccgatgacacgcaggatgccaaggcgcagaagttggccgcggcaaggaaaaagctgaaggagtaccagcagcgcgccagcaacaacaatgggcagccgggagcagaggagccgcagtctgccctgcccacagccgcttcttattttgcccaaaacgagtcggaacacaatggtggactggcagatgcctctagcttgcaggccatccaggtgatcatcgctgaaaaggcccagctcaatgcggagctgaccaaggttcgcctggcttgccgggagcgtgagctagagctggaggagcttcgcatcctcaaggatcagaatcaattgcgtctggagcagctacaacagcactgccaggatcaacagtcgaccggtgagcagcagcgacagcagtacgcgcaactccaggcacaactgctacaatcgcaggcacaaatcaaggaccaacagtcgcatctcaacgaactagaggcccagctaaagcagagcaaccagcatcaagaggaactgcagcaacagctttcccaaaaatcgaacgaactcgagatggcgcagctgaagctgcggcagctctcagacgagtctagcgtcaccacagacaaccgagtggagtcgctggtgcaaacacaatacatgtacgagcaacagatacgcgacctccaagcgatggtgggtcaactaacgcaggacaaggagcaggcagctggtcagtatcaaaactatgtgcagcatcagagtggcgagatcgccaagctcaacgaacgaaacacagaactctcagaggtactgaactcactgagggagcgagaacgccagcttgtggagcacgtgggcgccctggagcgggatatacaaaagaacatcagcctgcaggcccaatttaaagaggccagtcaagtgcagccatccaaggaagaaaccagcgagcagaaagccttaaaagatgaactggctgtcttgaaagagcagatcgaaaacttcgagtttgagcgccacgaattccagctgaagatcaagtcgcaggacgatcagctgcagttaaagaactcggctttagacgagttggaaaagcaactcgaacgcttgcaagctgagcagcccgatcagtccaagctgttggccaccatggagtcagacaaagtggccgcatcgcgtgccctaacccagaatgtagagatgaaaaaccagttggacgaactgcagcagcgatttgttcagttgacaaacgacaaagccgagctggtcatccgcttggattcagaagagtttgccaaccgagaaatccgccagaactacaacagcatggagcaaaagcttcaagcaaatgaggagcgctttaagttcaaggatgaggaaatgattagactatcgcacgagaacgtggaactacaacgtcagcagttaatgttgcaacagcagctggaccgtctcaggcattatgaggcaaaagcttatcacgccggtgaggaaaccgaaaaagagaatggagcagatgcaccggaaaacgaagcagaggaagcgaaggaagttggtcttttgcataatcattcgcacgatcactctcatcagcattccgacggtcattgtcatgataatgaccacgatcattcccatgaacataaccatcataatgctggtgatcatggtcatccacatgatcatccgcacgatcacacacatgatcattcacatagccatccacacgatcatcagcatgatcatccacatgatcacggccagaaccacgcccacagacaagcagctgaaacgctgcccaccgccgaggccgtggaacgcttgcaatcgcgtttcaccacactgatcagccaggtcgccgacttgacggaggagaagcacagcctggagcatctggtgctccagctgcagagcgaaaccgaaacgattggcgagtacattgccctctatcaaacgcagaggcgcatgctaaagcagcgtgagtacgagaaggccgcccaaatgcgtctcttgcaagcggagcgagagcagctgcgcgagaagattgaggcactaaacaagctggtggtcagtttgggcgtggagctacccgcagatgccgcccaggcaaagcaaccagaagcggccgcaggtagcgaacacactcctggcgaaggtgaaaactcgcaacagatcatcaacaagatacaggacattatcagcgagatcaaggagaacacggagcagccaagccacaaccatgcaggagaccatctcaactgttcgtattaacaaataattaattgaaacgttgttttattcacaaatgaacatgtaaaaattagacgtacttttaaattcctattggcatctttgggtgatgatgatgatggagtgtcttccttccgatagcgctggatgaactgaatatgccctctattgcaggcaaaaagtaatccgatgtcagcttttagtctataaattaaacttatcagggcctgacgatttaaaaatattattcatattaaaaatggtaaaaagtggtattgaaaaccaatgaaattacagaaacaacattaaagcctattaaaaaattcgtctatctactttttggccttggccttgcctttcgagccattgcgcaacttgttcttcagacttggctccaccaaactggtgggcctgcagcttctactcggccttgcgctgttgttgcagaaagaactagacatatccgtattttctgatttcttattagccgcagttcggc

SEQ ID NO: 23127 - protein, 749 aa, DROSOPHILA
MPDDTQDAKAQKLAAARKKLKEYQQRASNNNGQPGAEEPQSALPTAASYFAQNESEHNGGLADASSLQAIQVIIAEKAQLNAELTKVRLACRERELELEELRILKDQNQLRLEQLQQHCQDQQSTGEQQRQQYAQLQAQLLQSQAQIKDQQSHLNELEAQLKQSNQHQEELQQQLSQKSNELEMAQLKLRQLSDESSVTTDNRVESLVQTQYMYEQQIRDLQAMVGQLTQDKEQAAGQYQNYVQHQSGEIAKLNERNTELSEVLNSLRERERQLVEHVGALERDIQKNISLQAQFKEASQVQPSKEETSEQKALKDELAVLKEQIENFEFERHEFQLKIKSQDDQLQLKNSALDELEKQLERLQAEQPDQSKLLATMESDKVAASRALTQNVEMKNQLDELQQRFVQLTNDKAELVIRLDSEEFANREIRQNYNSMEQKLQANEERFKFKDEEMIRLSHENVELQRQQLMLQQQLDRLRHYEAKAYHAGEETEKENGADAPENEAEEAKEVGLLHNHSHDHSHQHSDGHCHDNDHDHSHEHNHHNAGDHGHPHDHPHDHTHDHSHSHPHDHQHDHPHDHGQNHAHRQAAETLPTAEAVERLQSRFTTLISQVADLTEEKHSLEHLVLQLQSETETIGEYIALYQTQRRMLKQREYEKAAQMRLLQAEREQLREKIEALNKLVVSLGVELPADAAQAKQPEAAAGSEHTPGEGENSQQIINKIQDIISEIKENTEQPSHNHAGDHLNCSY

SEQ ID NO: 23128 - DNA, 3484 bp, DROSOPHILA
tgttccatactcgcacgtgcaaggatgttttgtgcaggaatagtgcagcgtagactgagcatgggtctcaatccaaagtgagtagcgcttgcacataactccttcccttaaacaccccatccgaaatccctgaagactcggcctggcgcccaggaagctctactccgaggagaagaagcccccgggtgttttcctttggggcggcggacttggcaagctgcagggcggtctcaaggaggaggagtacttcatttcgttgacccaaaccctcgtgggcaagatgcgggacaagaaggagcccggcgactacctgcccaactgggacgagttccagaagactctggaccacgcctcgctgggcagcacctcttccatgaacaagcacaagaacgtactcgaggaggcctttttcctgaacaaggttgctataagtctccagctcatttttcttctaatttccattgcaatatctttgctttcagactgcagacgacatcaaattattgcacgatcgtgcccaagaagagctcaaatctcgccatactgccacagaactggaactcgaatcagatccccagaacaccaaatagttagttgtttatgtttaaatgccatacaccgatttcttcaggcgcatcatcatcataatcacccaacttatccacatgacacggctcaataaaattgttagttgcaatctttgtagaaagtttttatggaattaaggaagtaattaaaaatccattgggtcatcccagttgattaaaactaaagttctttagcccctatttagtgaatgtgtttctatttccgtgcccactcagtatttttagcagcgctattgtccaatgttcaccagtttgttttcgcaagtcgtcgaaatcgaaatttcagcggctactcatcccttatatatagcttaactatactatataaaccgataaaccgatagaggcaaacatgtttacactgcgacgattcagtcagcgctggtatcccaagcagattcagtaggtttcgcgatttggagagcagttgcgtaagattctagaaccgttttcgaatcgctttgcaggcacttgaagatgtcgcagatcggagaactgggcagtggagccggcaacggcggcggcggcggcggatccatccgggaggcgggcggttcatttggcaaaatggaggctgctcgcgaggaggagttcttctacaagcaggtgagctctttctactacaccagactgtacacgaggtaaagattccatgtttccctgcagcaaaaggagcaactgaagaacctgaagaccaagacggagcctaaggcaccagaggctcccaagaagtgagcccaaccaggagctttgaactccactagcttaactatggttaggctggattgtctgaattgtatttaatgggaatggtactccaaatatattttgtttaatttacaactggttgtgtattggataactcccatccctgatcagctgatcgccccgcggctcacccaaactgcaagcctaaactttccccagaccgctccacttccatttgtttacgaacagcgctgcaaagcggaacagccgacagataagcgtcagtgtaagcgcagctgataacgggcggcggagtggcgacctaaagacgcatggaccgcgcaggcagatggaaacagttcgcaccggttcgctcgagtgtgcagtagatgatccagcggcaggaatggcggccacgatccagaacaccctgaaggtggcgctgcgaaagcgcatgaaggatgcactgaagggcatcgacgcggaggccatcgcccggcagtcgcaggccgtcacggctaaggtaacattggtttggctgggccccaaggttatcaagttaattcccaatccccctaatcggctcgatcgcacaggtgctgcaaagcgagatcttccggcaggcgcagcgggtgagcatttacctgagcacagcctcggagctggacaccacggcgctgctgtcggagatgttccgcctggagaagatggtctttgtgcccacctacgagggcagcaggatgaagatggtgcggctgcgcggcatggaggagtacgagagcctgcctctgaccaagtggaacataaagcagccggacttcaaggaggcacgcgaggatgccatgaccaacggtgagtggctaggcatacatcagagctccttctaaacccacacacacacactcgatcaccacagggcacggcatcgatctcttcattgtgcccggtgtggccttcacccgctgcggagctcggatgggccatggcatgggctactacgacaagttcctcaagcagcacgcggagaagtatccgcacaagaagatctcgctgatggcactgtcgctcaacgagcagatagtcagcaacgaggagttgcccatggagtcgcacgacgtccgtttgcacagtgtaattacggaaaactaacttttggcttacatacaaagtgggaagtaaagcgaactaatacgaaagcaacacacactattaagtattggaattcagctgcccagcgggcatcttaggatctagttctggttcgtttgccgagtttacgggaagtgtcagtgagaagcgggttgggctgcaatgtcctcctatctcaggtaggatggcctggaacgcaggcctcgtccacgcggccgtccactgtagtggggcgacgaatagtgcgagtcgctgctactgaagtgggagtccgaggcagaccgatacgatccgggggactctgcccagctggagggcgaaccaatgcgcatcatcttcttttgcctgttaaaagagtaaaaagagcccattagcgttatcctgctaagtggtaatcgtgacactttacctaaaggcagctgctgccgagattcgagatcctcggttgcgacccacccgggagcctctcagcattgagggtatcttgttgtagccggtgggtcctgtgggctgggcgccacaagtttccaaggccaggaagtcgtccacgtgcagcgatggcggtcgcgaggtgttgggcggccgggagcggaacaaatcgcccctggaaggtggtggccgagcaaaaccacgaccccttaccgacgacacaaacatcttcttttcgggtcgaccagtcgcgggctcaacttccacacggcgcgtgcggaaacaaggcgccgtgggcgtcatctcccgattggattggggcgagccggataagttcatgacccgcttgctatcgccagccacattcaagtccggattgaggcacacgttggccaaatccgtgagatcgcaggcaatgcgctcgtagatcggctcgttcatgtcctcgatcagttcgatgggcagcgggtccagccagtagcgcgccgttagttgggcattctcggcggtggcgcagaatcgcgtgaagatcggacgcgcctcgtactgtgtgacaatgccctcggcctgtggcagatagggctccacgg

SEQ ID NO: 23129 - DNA, 1061 bp, DROSOPHILA
agcagattcagtaggtttcgcgatttggagagcagttgcgtaagattctagaaccgttttcgaatcgctttgcaggcacttgaagatgtcgcagatcggagaactgggcagtggagccggcaacggcggcggcggcggcggatccatccgggaggcgggcggttcatttggcaaaatggaggctgctcgcgaggaggagttcttctacaagcagcaaaaggagcaactgaagaacctgaagaccaagacggagcctaaggcaccagaggctcccaagaacgctgcaaagcggaacagccgacagataagcgtcagtgtaagcgcagctgataacgggcggcggagtggcgacctaaagacgcatggaccgcgcaggcagatggaaacagttcgcaccggttcgctcgagtgtgcagtagatgatccagcggcaggaatggcggccacgatccagaacaccctgaaggtggcgctgcgaaagcgcatgaaggatgcactgaagggcatcgacgcggaggccatcgcccggcagtcgcaggccgtcacggctaaggtgctgcaaagcgagatcttccggcaggcgcagcgggtgagcatttacctgagcacagcctcggagctggacaccacggcgctgctgtcggagatgttccgcctggagaagatggtctttgtgcccacctacgagggcagcaggatgaagatggtgcggctgcgcggcatggaggagtacgagagcctgcctctgaccaagtggaacataaagcagccggacttcaaggaggcacgcgaggatgccatgaccaacgggcacggcatcgatctcttcattgtgcccggtgtggccttcacccgctgcggagctcggatgggccatggcatgggctactacgacaagttcctcaagcagcacgcggagaagtatccgcacaagaagatctcgctgatggcactgtcgctcaacgagcagatagtcagcaacgaggagttgcccatggagtcgcacgacgtccgtttgcacagtgtaattacggaaaactaacttttggcttacatacaaa

SEQ ID NO: 23130 - protein, 318 aa, DROSOPHILA
MSQIGELGSGAGNGGGGGGSIREAGGSFGKMEAAREEEFFYKQQKEQLKNLKTKTEPKAPEAPKNAAKRNSRQISVSVSAADNGRRSGDLKTHGPRRQMETVRTGSLECAVDDPAAGMAATIQNTLKVALRKRMKDALKGIDAEAIARQSQAVTAKVLQSEIFRQAQRVSIYLSTASELDTTALLSEMFRLEKMVFVPTYEGSRMKMVRLRGMEEYESLPLTKWNIKQPDFKEAREDAMTNGHGIDLFIVPGVAFTRCGARMGHGMGYYDKFLKQHAEKYPHKKISLMALSLNEQIVSNEELPMESHDVRLHSVITEN

SEQ ID NO: 23131 - DNA, 2840 bp, DROSOPHILA
tatttacgcttccaaaacatatcgaggttttagtatttttgcgtattcagaccataatgtggacttacgttgttgttaccgcaccaggagagtgtccgaatgccacttttatatatacacaatgaactgtaactgttgtggttgcccgacactaacgactgatacacccatgaaaaggtggtttaatggattgcaagctgatgtggctgagtagaggtaactgcaccaacaaaaataagtaaaacaagagagaacgcaagtacgcaagagaaatttaaattattttatggcttatggatagaatttggaaaatatatgacaaaaaatgatattaatagtggtaggcgtgacagttttgggcggcgtgtgggcaatagattgtgcgttgcagcatcgatgaaaaaacttgccctgattcttcgtctctggaatgttaagtctcaacttgttaaatcactatctagctttcgtagttcctgtgatctcgacatacagagggacatgtgtagatcgactcggctggtgatcctgatatgaagatgatgaagaagatatggttgaaaaagcgagtaaacaattcttagtcagtctgattggcaattaatttttgtttaaaagatatcaaaagcaaacaaaatttttcgatatttgtcttaatacaatttttgtcggcttgtctgcctgaagaaaagcgttattttaaaacctaaaaaataaatttgtttatgttaaactggttggtatgggaaacttagggtttattacttttgctaagcccttccattttagcgagaaacagctataaacatttccttcctacccatcgctaaaatctaatagtttatctaggttaggggtgtttacgcttacaaacacataactacaatatttactccttcaaatcattttaagttatcgatgcatcgatatttcccttgtatttttccacctgtaccacgtgtggtcattttctgcaatacattgatttccccaacgctcaatgaaaataagtaaaaaactcttttcccgccaggaggaaaaacctcggagccaatttctggaggaggaacagtacgtgaacctgacctcaggcgcggctgctcgtgagtgctgcggggatgctctttgggatttcgatggtcagaccgacgaagcctggctggtccagtgtcccaagggtgcagatccacatctgctagtcggcaagcgcattaggcttcctggcaggaagagcgtgggcgatctccaggttcgtgccgtcaaaaactcgacgttacagagcgaggcactgggctatttgagatctatgggtccctatgccctccggaaaattccctttgtcggctatgtggtaatcagcaagcgtctatatgataaacaaccgctaccaggtcagaaggaacatacaattcaagctgatctaacgctacccaagtacctattacgagaacgacatccgttgttcgggcgcagctacaagcaacgcatccaattaccgaagatgatttccacatctcttagtcaagcagacgagaaattcttggaagctactgccaagcttcgcagcactgctaactactacaagatccggagcaagctgcacaccaccacacagacgctagaacaaaaagaggacgatgtgcgacagtcggtgcttaccggtcgtacgccgcagttcatgaaggaaacaataatcccggatctatataaagatctcttagacgaagaggacatcgagaaaaatataatgaacccagcagaggaagttggtcctgccaaaatgcgcaagaaaaaatttaattcaaacggtcacaaaacgggaaatgcagtagggaaatagacaaaagaagcttaaattaaatgaaagcaacggccgctaatgacctggacgaagtaattgcacaagaaggcttaaaaaagtcgaatggaaaccattaagaattagagtttacttaagataaattcacatacttacgtaattaaataaaaatatgtaacgatttggattatagattatcacatataagctgcataaattaatgtagtcatttaataacgaaataaaattgcactttgtcaaggcgtgttcacagcactatgaacagctgacgttaatatcagtaccttaatagttgcggagaaagagcggtggttaaagttaagatttatatttaaaagaatattaagaatacgcgttgcgcatgttccgaaagagatttctgtgctaaaacagttcgatacttaaaacgtttaagttattttacattacattacattaaattgcatattgaacgcaatttaacgttttctcattcggcatgtaacaattaaaaggactcacgcgcgttaaaaagttgaatacgctagcataatttaatttaaataattattcagagttgccaatttttgtcacttcagcaattgacaccaatcactttgcgattattaggcaaccctttaaaactacacgaacaacagcaaatcgatttctcagttgtgttttaattgcgtatttaaaacaatttggatcgggctatgaatggaactgatctctgataaggatgaagagacttaaagcgtacctaaaggatggcatcaatgtggcggcggtaatgtgtctgggcgatactatatcccagttcttttttgataagaaatcgttggacgaatgggatgcggggcgaaccctccgtttcggcatcgttggactggtgttcgttggcccaactttgcgccggtggtaccattttttggagtcccgggttcccaaaacctactcgccaatgcggcggggcgttaccaaaatgctggtcgaccagaccctttttgcgccacccttt

SEQ ID NO: 23132 - DNA, 840 bp, DROSOPHILA
atgaaaataagtaaaaaactcttttcccgccaggaggaaaaacctcggagccaatttctggaggaggaacagtacgtgaacctgacctcaggcgcggctgctcgtgagtgctgcggggatgctctttgggatttcgatggtcagaccgacgaagcctggctggtccagtgtcccaagggtgcagatccacatctgctagtcggcaagcgcattaggcttcctggcaggaagagcgtgggcgatctccaggttcgtgccgtcaaaaactcgacgttacagagcgaggcactgggctatttgagatctatgggtccctatgccctccggaaaattccctttgtcggctatgtggtaatcagcaagcgtctatatgataaacaaccgctaccaggtcagaaggaacatacaattcaagctgatctaacgctacccaagtacctattacgagaacgacatccgttgttcgggcgcagctacaagcaacgcatccaattaccgaagatgatttccacatctcttagtcaagcagacgagaaattcttggaagctactgccaagcttcgcagcactgctaactactacaagatccggagcaagctgcacaccaccacacagacgctagaacaaaaagaggacgatgtgcgacagtcggtgcttaccggtcgtacgccgcagttcatgaaggaaacaataatcccggatctatataaagatctcttagacgaagaggacatcgagaaaaatataatgaacccagcagaggaagttggtcctgccaaaatgcgcaagaaaaaatttaattcaaacggtcacaaaacgggaaatgcagtagggaaatag

SEQ ID NO: 23133 - protein, 279 aa, DROSOPHILA
MKISKKLFSRQEEKPRSQFLEEEQYVNLTSGAAARECCGDALWDFDGQTDEAWLVQCPKGADPHLLVGKRIRLPGRKSVGDLQVRAVKNSTLQSEALGYLRSMGPYALRKIPFVGYVVISKRLYDKQPLPGQKEHTIQADLTLPKYLLRERHPLFGRSYKQRIQLPKMISTSLSQADEKFLEATAKLRSTANYYKIRSKLHTTTQTLEQKEDDVRQSVLTGRTPQFMKETIIPDLYKDLLDEEDIEKNIMNPAEEVGPAKMRKKKFNSNGHKTGNAVGK

SEQ ID NO: 23134 - DNA, 2582 bp, DROSOPHILA
cgcagcactgctaactactacaagatccggagcaagctgcacaccaccacacagacgctagaacaaaaagaggacgatgtgcgacagtcggtgcttaccggtcgtacgccgcagttcatgaaggaaacaataatcccggatctatataaagatctcttagacgaagaggacatcgagaaaaatataatgaacccagcagaggaagttggtcctgccaaaatgcgcaagaaaaaatttaattcaaacggtcacaaaacgggaaatgcagtagggaaatagacaaaagaagcttaaattaaatgaaagcaacggccgctaatgacctggacgaagtaattgcacaagaaggcttaaaaaagtcgaatggaaaccattaagaattagagtttacttaagataaattcacatacttacgtaattaaataaaaatatgtaacgatttggattatagattatcacatataagctgcataaattaatgtagtcatttaataacgaaataaaattgcactttgtcaaggcgtgttcacagcactatgaacagctgacgttaatatcagtaccttaatagttgcggagaaagagcggtggttaaagttaagatttatatttaaaagaatattaagaatacgcgttgcgcatgttccgaaagagatttctgtgctaaaacagttcgatacttaaaacgtttaagttattttacattacattacattaaattgcatattgaacgcaatttaacgttttctcattcggcatgtaacaattaaaaggactcacgcgcgttaaaaagttgaatacgctagcataatttaatttaaataattattcagagttgccaatttttgtcacttcagcaattgacaccaatcactttgcgattattaggcaaccctttaaaactacacgaacaacagcaaatcgatttctcagttgtgttttaattgcgtatttaaaacaatttggatcgggctatgaatggaactgatctctgataaggatgaagagacttaaagcgtacctaaaggatggcatcaatgtggcggcggtaatgtgtctgggcgatactatatcccagttcttttttgataagaaatcgttggacgaatgggatgcggggcgaaccctccgtttcggcatcgttggactggtgttcgttggcccaactttgcgccggtggtaccattttttggagtcccgggttcccaaaacctactcgccaatgcggcggggcgttaccaaaatgctggtcgaccagaccctttttgcgccaccctttaccatggccatgtcttttttggtgccactctccaacggagagcccatcgaccgaatccggcagcgcattcttgatagctacctatctatattggtccgcaactatatgctctggccggccgcacagatgctaaacttcagattcgtgccgctgggctaccaggtgctctacgcccagttcatcgccctcgtatggaactgctacctctccatgatacttaatagctagggcactaagttccccgcataagtaatacggtgcctgtgtatcaaatttaacaaatacattattatccttatctcgacatgtgacttcggactggatttggttgtcgtttttttaggggtattcggcggaaaggctgtacatatagaatggaatttatagtatacatgtattataggcactcgagttttaatcctacaaagcacttcaaaaaattttgcttgaaatcttatttccctccgttattagtcggttgggcatgtgcttctcaaaatatttactcgatcatttaaatttgaattggataagcaagattgtatcataacgacgtcacgcccaatctaacgcccacaatttctgtgggcgttgtgttgttattttgttttcatttaattatctgtcatgatattgacataccacaaaaattttgccacacccaaactgttatgcccactcttaagaattatttttcgattttattttataaattctcttggctgtttctatcgatttgccaaacgtattttagccacgcccactgttcccactatctgaataacgggtaaaccttttatttctgacattttaaggcagattgtgggaggtagggttaaacaacaaacgttctgcaacaatcttgaaaaatgtggcgtcacttgaatctacatgctctgagctctctagagttcatagttccgaaaatatcaattctccataagtttgttcctttctacatttctattttacgatttaggggaataaacttttgaaaagtgcgtcaacggtatcttctgacagtttcccacaagttgttgatatcctgttgtttaacgtgagatagacgatttatggatagaatttaccttagtagcgccaaaaataccgcaaactgcgcacgcacgaagctgagaatgtaagcagccaatagtggaatacacttcatgtgtacatgtgcaaataaacaccctgcaattcaattcatttaacttttatctatatgtcatttcttagaaaaaatctctattgctaatcagccctcaaaacagtgaaattattgattatttttttttcttactaa

SEQ ID NO: 23135 - DNA, 582 bp, DROSOPHILA
atgaagagacttaaagcgtacctaaaggatggcatcaatgtggcggcggtaatgtgtctgggcgatactatatcccagttcttttttgataagaaatcgttggacgaatgggatgcggggcgaaccctccgtttcggcatcgttggactggtgttcgttggcccaactttgcgccggtggtaccattttttggagtcccgggttcccaaaacctactcgccaatgcggcggggcgttaccaaaatgctggtcgaccagaccctttttgcgccaccctttaccatggccatgtcttttttggtgccactctccaacggagagcccatcgaccgaatccggcagcgcattcttgatagctacctatctatattggtccgcaactatatgctctggccggccgcacagatgctaaacttcagattcgtgccgctgggctaccaggtgctctacgcccagttcatcgccctcgtatggaactgctacctctccatgatacttaatagctagggcactaagttccccgcataagtaatacggtgcctgtgtatcaaatttaacaaatacattattatccttatctcg

SEQ ID NO: 23136 - protein, 168 aa, DROSOPHILA
MKRLKAYLKDGINVAAVMCLGDTISQFFFDKKSLDEWDAGRTLRFGIVGLVFVGPTLRRWYHFLESRVPKTYSPMRRGVTKMLVDQTLFAPPFTMAMSFLVPLSNGEPIDRIRQRILDSYLSILVRNYMLWPAAQMLNFRFVPLGYQVLYAQFIALVWNCYLSMILNS

SEQ ID NO: 23137 - DNA, 3296 bp, DROSOPHILA
taaatataaatataaatataaatataaatataaatataaatataaatataaatataaatataaatataaatataaatataaatataaatataaatataaatataaatataaatataaatataaatataaatataaatataaatataaatataaatataaatataaatataaatataaatataaatataaatataaatataaatataaatataaatataaatataaatataaatataaatataaatataaatataaatataaatataaatataaatataaatataaatataaatataaatataaatataaatataaatataaatataaatataaatataaatataaatataaatataaatataaatataaatataaatataaatatatataatacatgtatatatatatatataaaaatatatatatataatttgacgaaacgtgggaattaactttaaagggcttagaaataattaagtaaacactgagcactttacaataagacattactttttaaaaggattttactttgaagctaaagtagtcaataaaactatacttaccgttagaacacatggcatgctgggtgatataaagtccaggcccctcatgccacttccgttaaaacaggattttatgttttgcataaactttcgacgaatagattttaatgagtaaatgcagagtgcagaattgttcgttggtgtattcccttctccttttgaaaaaacagcaaagaggacatcatcttgaatagatatacctaagctttgagccaggtctgagctaggttttcccaagaatccagcctgaaccaagttgaatttagtgccgccttgagcatcacttatacattccactggaatttcagtgtaagaataatagttcgagtcttcctgacatattcgtacgagtttcgttatgtactctttaggagaagaatggtgactgtgctttaactgtgttgttagaaagtaagaaaatcgctcagaactgaatccataaacatagttgacaaaatatgtttcacgtgcgtatgagtttataaaagttctcgttccagttgtaactgccgaggaagcaatctgaaacattttagtcttttcgagggagcgggatgcaactgcgggaatttcactgcggtacggtgaattatttgtgtatgtaactccgacgtacatcacattagtcaccggatgttgtggaggtcccggcgcaataaatgctacggttgaggagttggcatcattagccacaacagcatcaggaacttcatgctcaattatgctgacattttgaagattacgaactgtgcatgtaccttgaaatagtgatccacacgcaataagtcttgaagttgcacgatcaatgagcaagaccttattataattgtccgtcggactgcgaactgcatttaatggacaatcaagaatgctacactcgacggaatcattttgaggccccgttttcacagtttcggaaagctccaaatcaggcgacaactgatacaacctgttaacaccaccaacgaagactcgtccagtaatggtgtccactaataggtgattcaatttggtgtcaaacgcagctacatttgtaatcgtagaattcagattctttgcattctttatcggtgcatttgcattagtcaaatttatcggctcattttgcgcagtcgtcttgtcagaccatatatttgctgccagggtttgacaacctgtcctcgatggcagccagtaatcatacttatctttaagaattgctattaacaacacactaagaacaaaattcatctccacaatcgctccttaaacaggactatcaaagctaccttatttatgaaattgttacttgtaggcgcttgtatgtcccttatttatttgaaattttacgtaaatattaaaatttcctttgcgttggtgtcattcttggttcaacattatgaaaatcatttgtatatgtcgtatttgctcattaattacttaatagtatgttattgtatgtatgtatgtatttaatttaagtaaactcatgtaagatctaatatgcaagacaagtaatctaactaaaaaaatcgactgacttttatttaaactaaaaatgaactaattggtttatatttatatcctttcttacccatattgaagataaaaactattttggcattcttaaaaatacaaagctatcaaatgtaaattttaacaattttattcgtcacaaaatgtgaaagcgaaaaaattttaaagcatatggccacatttattaaaaataaataatttattaattatattcttccaattatttatgcgttatgatatttatacaaaaataatactgatttatatgtcttatatttttatagttttctttttcccgagcaaggagtataagttgttaaaaacttaaaataccgacgcttaaatagttacccttatataacttatttaaagaacttatgtgggtcgcaggggtgttccggtttataatgacaaaaaagctttttttgcaaatcttcacgttatatatggatgttaagggcaattaaaaaaatattttgtttaaaaatatgtactttaatttacataatttacaaacaaagtgttttgctgtaatcataacaatatagaacgaaaatcacgaagactttcgattttttgtaacttgtttaaaaatatttcttttggaccttggaagtcaaatattgaattatgggacaaaatgtgtcctttttagttaattattactaatcaaaaaacatgcaaatgacttgcgaaccttcgaaaatctgttaaatatttgtgtaacaattttccaatacaattgcattcgtggctttgacgactttataaatattctttgtgtgaaaagctactacagcttttacaaaaatgctccgcacatccgcgttgaaagtctgctgttgcaacctctgttgcttctattatcttgaaaattcttccacctacgcagaacctatatacaatataacacattgtcaggattcgatattaatttttctcactttttttaaagagcccccaaaggaatataatgtgagaaagttttcgatacaattataggttcaatgaaaaattccatcaaagtataatacatttcatttttattacatgttattagatatagcctgaaatcaatatcaaaatatatttttacagatataataatacagaataatacagataatagaacacaattaattctttgctctacgacagtcgcacaaaatttggaaataaaaaatgcgactattggaaataaactttaaacgtatccaa

SEQ ID NO: 23138 - DNA, 6382 bp, DROSOPHILA
caagaatgacaccaacgcaaaggaaattttaatatttacgtaaaatttcaaataaataagggacatacaagcgcctacaagtaacaatttcataaataaggtagctttgatagtcctgtttaaggagcgattgtggagatgaattttgttcttagtgtgttgttaatagcaattcttaaagataagtatgattactggctgccatcgaggacaggttgtcaaaccctggcagcaaatatatggtctgacaagacgactgcgcaaaatgagccgataaatttgactaatgcaaatgcaccgataaagaatgcaaagaatctgaattctacgattacaaatgtagctgcgtttgacaccaaattgaatcacctattagtggacaccattactggacgagtcttcgttggtggtgttaacaggttgtatcagttgtcgcctgatttggagctttccgaaactgtgaaaacggggcctcaaaatgattccgtcgagtgtagcattcttgattgtccattaaatgcagttcgcagtccgacggacaattataataaggtcttgctcattgatcgtgcaacttcaagacttattgcgtgtggatcactatttcaaggtacatgcacagttcgtaatcttcaaaatgtcagcataattgagcatgaagttcctgatgctgttgtggctaatgatgccaactcctcaaccgtagcatttattgcgccgggacctccacaacatccggtgactaatgtgatgtacgtcggagttacatacacaaataattcaccgtaccgcagtgaaattcccgcagttgcatcccgctccctcgaaaagactaaaatgtttcagattgcttcctcggcagttacaactggaacgagaacttttataaactcatacgcacgtgaaacatattttgtcaactatgtttatggattcagttctgagcgattttcttactttctaacaacacagttaaagcacagtcaccattcttctcctaaagagtacataacgaaactcgtacgaatatgtcaggaagactcgaactattattcttacactgaaattccagtggaatgtataagtgatgctcaaggcggcactaaattcaacttggttcaggctggattcttgggaaaacctagctcagacctggctcaaagcttaggtatatctattcaagatgatgtcctctttgctgttttttcaaaaggagaagggaatacaccaacgaacaattctgcactctgcatttactcattaaaatctattcgtcgaaagtttatgcaaaacataaaatcctgttttaacggaagtggcatgaggggcctggactttatatcacccagcatgccatgtgttctaacgaaactgcaaaccattggagaggacttctgtggattagatgtaaactcacctttaggaggagaaacccccattacttcagtaccggtggccatgtttaacacaaagttaacttctgttgctgctacgagtacaagcgggtataccgttgtcttcgtggggactagcgatggatttcttaagaaagttgtaatcgagtcttcatctattgccaacgagtatgctagttttgcagtagatttagggtctgaaattaatcgggatatgcagtttgacaaccaaaacctttatatatatgttatgtccaaaacaaaagtatccaaggttaaagtatttgattgctctgattacaagacatgtggagattgcttaggtgctagagatccatattgtggctggtgctcattggaaaataaatgtagcccacgctccaactgccaagacgacgcaaacgatcctctctattgggttagctataaaacagggaaatgtacaacaataacaagtgttgtgccacaccagctacaacgtactacagctcgaaccttagagctaatcatagatcatttgcctcagctgaaagagaatttaatatgtgcttttactacagaggataaagcccttttcactaatgctacaaaaaaacgaaatggcgtaaactgcacgacaccacgaacggatatgctaccccaaattgaacaagggaaacatcactttactgccaaactatctgttcgcaccagaaatggacccgacttagtgtccacggattttactttctttgattgcagtacgcactcttcttgtacacgttgtgtgtcctcggagtttccatgtgattggtgtgttgaagctcacaggtgcacacacgacacagctgaaaactgccggaacgatattttggtaacaggtgttagccggataggtcctagttacagatcaggtcccggattttgtccaacgatcaacgctacaggtgatggaagtgaagtacttgtcgctggtggtacaagcaaatccattaaagtaaaagttcatattattgggcaatttatagttcaaacgcggtttgtttgtcaatttaatattgagggacgtgtaactagtttaaacgctcagttgttgggtgacaccatttactgcgatagcatggaatttcagtatacttctagatcgcccaatttgacagcaactttcgctgtaatatggggcgggtcgaagccacttgacaatcctcataatatacatgttgttatatatcgatgtcgagaaatggccgacagctgtggtatatgcttggccctatctgaaaagtacaattgcggatggtgctcgtctactaatacatgcgaagttgaagaacaatgtaataaaaacaaagaggggaaaactgattggttaaatcgaagtgaaatttgcccaaaccctgaaattcatacattccaaccaaaaacaggtccctgggaaggaggaacaaatataacaatacgaggaattaatttaggcaaaaactataacgatatttattcaggagttcgaatagctggtataaattgtatgccgtttcctcaattttatattgacactaagcaaatagtatgtaccgtggatagtcctggagaacagatgtatagaaatggcaaaatagtggtacaaattggggactaccgtggtgagtccaaagaggactacgagttcgttgacccgaaaattttggattttaatccaaagtttggtccaacttcaggtggaaccgaaatacatataactggaaagcacttaaatgccggctctcgtatacaggcatccataaacgatcacttaccgtgtaaaatactaagcacagattcttctcaagcaatatgtcgcacttctgcttcccctggtattattgaaggaagactaaaaatgtcttttgataatgggccccgagagtttaatgactacaattttaaatatgtactggatcctacagttgaacacgttagttctggaccaagcgggcaaataaaagttccaaaaggaataccagcaggcggtatacgaatttctgtaacgggtacccaatttaccagtatacaaaatcccaatatttatgtagtgtataatggagagatgtatgcaagcccatgtcgggtgcaatcggatacggaaatggaatgtgcatctccagttgttgatgtggacagccatgttattgaagcggaaaggccaattcttcttgaatatgggttcctaatggacaatgttttgcgtgttcaaaatttatctaaggttcataacaaccatttcgagctttacccaaatccagagtattttatattcgaagaaagagttaagtactttaagagtgaatacttaaccataaatggccgaaatttggatcgcgcttgcaaagaaagtgatgtagaagtaaagataggaaatggattttgcaatattacatcactttcaagacaacaactaacatgtagacctccttctgaagcaacagcaaccaaaagcatgaatggacctgaagtaattgttcgtattggaacttcgctagagtatcgtatcggtatacttagctacgaatcgtctaacatcattttggattggggagaaaatgtaatttttgctgtaatagccacaattgttatcttgctgctgatttttgttgctttgcttgtggcttataaaaagaaaagttcggaatcgagccgagttcttcgaaacatgcaggagcagatggacattctggagctacgagtcgcagctgaatgtaaagaggcctttgccgaactccaaactgaaatgactgatctcacaggcgatcttacttctggaggcattccatttttggattaccggtcatatgcaatgaagattctatttccaaaccatgaagaccacattgtactacaatgggaacgtcctgagcttcttcggaaagaaaaaggcttacgtatttttggccaactaatcatgaataaaactttcctcctgctttttatacgaaccctggagtccaaccgatacttctcaatgcgagaacgagttaatgtggcctccttaataatggtcactctgcaatctaaactagaatattgcacagatatattaaaaactttattgggagacttgatcgaaaaatgtatagaaggaaagagtcatccaaagctcttactacgacgaactgaaagtgtggcagaaaaaatgttaagtgcttggtttacattccttctttacaagtttttgaaggaatgtgctggcgagcctttatatatgcttttccgagctgtgaaaggacaagtagacaagggtcctgttgacgcttgtacacatgaggcaagatactcccttagtgaggaaaaacttatacgacagtctattgattttcgaccaatgaacgtttatgcaagcattatacagcagccaatattttgcaataacttagatatgttaccttctcacaccgaaaatgtatctgttaaagtattggattgcgacacaattggacaagtgaaagaaaaatgcttggaaaccatttatagaaacattccatcaagccaaagacctcgaaaggatgacttagatttagagtggagaacaggcgctactgggcgagtaattctgtacgatgaggacgtaacatcaaaaacggagagcgaatggaaaaagctcaacactttgcagcactataatgttccggatggagccgggctaagcttagtaccaaagcaaagttccatttataacttcagtattttatcggacaaaaatgaaaaatcgcacaagtatgaaactcttaatatatcgaaatacacctcctcctctccgacatttagccgcgcaggaagtcctcttaacaatgatatgcatgaaaatggtctgagatactggcatctagtaaaacatcatgatagtgatatgcaaaaagaaggggaacgggttaacaaattagtgtcagagatttacttaaccaggctattggctactaaaggaacgcttcagaaatttgtagatgatctctttgaaacgatatttagcaccgctcaccgtggatcggcacttccattagctataaagtacatgtttgattttcttgacgatcaagctcaattgcacggtattactgatccagaagttgtgcatacttggaaaagtaacagcttaccattgaggttttgggtgaacttaattaaaaatccaaattttgtctttgacatccataaatcgaacatagtggattcctgcctgtcagtagtagctcaaacttttatggattcttgttcgacttctgatcatcgattgggcaaagactcaccaagctcgaaacttctgtatgcaaaagatataccagagtatcgaaaatgggtagatcgctattatagagacattcgggatatgtcccccatttcagatcaggacatgaacgccatgcttgcggaagagtcaaggctgcacacaacagaatttaatacgaattgtgctttacatgagctatacacatacgctgtgaagtacaatgaacaactaactgttacacttgaagaggatgaattttcgcaaaagcagcgattggcttttaaattagagcaagttcacaacataatgtcgtcagaataagagctgcgccatcctaccaagatgacaacaaaatactaaaagttcaacattatgaaaatcatttgtatatgtcgtatttgctcattaattacttaatagtatgttattgtatgtatgtatgtatttaatttaagtaaactcatgtaagatctaatatgcaagacaagtaatctaactaaaaaaatcgactgacttttatttaaactaaaaatgaactaattggtttatatttatatcctttcttacccatattgaagataaaaactattttggcattcttaaaaatacaaagctatcaaatgtaaattttaacaattttattcgtcacaaaatgtgaaagcgaaaaaattttaaagcatatggccacatttattaaaaataaataatttattaattatattcttcc

SEQ ID NO: 23139 - protein, 1945 aa, DROSOPHILA
MNFVLSVLLIAILKDKYDYWLPSRTGCQTLAANIWSDKTTAQNEPINLTNANAPIKNAKNLNSTITNVAAFDTKLNHLLVDTITGRVFVGGVNRLYQLSPDLELSETVKTGPQNDSVECSILDCPLNAVRSPTDNYNKVLLIDRATSRLIACGSLFQGTCTVRNLQNVSIIEHEVPDAVVANDANSSTVAFIAPGPPQHPVTNVMYVGVTYTNNSPYRSEIPAVASRSLEKTKMFQIASSAVTTGTRTFINSYARETYFVNYVYGFSSERFSYFLTTQLKHSHHSSPKEYITKLVRICQEDSNYYSYTEIPVECISDAQGGTKFNLVQAGFLGKPSSDLAQSLGISIQDDVLFAVFSKGEGNTPTNNSALCIYSLKSIRRKFMQNIKSCFNGSGMRGLDFISPSMPCVLTKLQTIGEDFCGLDVNSPLGGETPITSVPVAMFNTKLTSVAATSTSGYTVVFVGTSDGFLKKVVIESSSIANEYASFAVDLGSEINRDMQFDNQNLYIYVMSKTKVSKVKVFDCSDYKTCGDCLGARDPYCGWCSLENKCSPRSNCQDDANDPLYWVSYKTGKCTTITSVVPHQLQRTTARTLELIIDHLPQLKENLICAFTTEDKALFTNATKKRNGVNCTTPRTDMLPQIEQGKHHFTAKLSVRTRNGPDLVSTDFTFFDCSTHSSCTRCVSSEFPCDWCVEAHRCTHDTAENCRNDILVTGVSRIGPSYRSGPGFCPTINATGDGSEVLVAGGTSKSIKVKVHIIGQFIVQTRFVCQFNIEGRVTSLNAQLLGDTIYCDSMEFQYTSRSPNLTATFAVIWGGSKPLDNPHNIHVVIYRCREMADSCGICLALSEKYNCGWCSSTNTCEVEEQCNKNKEGKTDWLNRSEICPNPEIHTFQPKTGPWEGGTNITIRGINLGKNYNDIYSGVRIAGINCMPFPQFYIDTKQIVCTVDSPGEQMYRNGKIVVQIGDYRGESKEDYEFVDPKILDFNPKFGPTSGGTEIHITGKHLNAGSRIQASINDHLPCKILSTDSSQAICRTSASPGIIEGRLKMSFDNGPREFNDYNFKYVLDPTVEHVSSGPSGQIKVPKGIPAGGIRISVTGTQFTSIQNPNIYVVYNGEMYASPCRVQSDTEMECASPVVDVDSHVIEAERPILLEYGFLMDNVLRVQNLSKVHNNHFELYPNPEYFIFEERVKYFKSEYLTINGRNLDRACKESDVEVKIGNGFCNITSLSRQQLTCRPPSEATATKSMNGPEVIVRIGTSLEYRIGILSYESSNIILDWGENVIFAVIATIVILLLIFVALLVAYKKKSSESSRVLRNMQEQMDILELRVAAECKEAFAELQTEMTDLTGDLTSGGIPFLDYRSYAMKILFPNHEDHIVLQWERPELLRKEKGLRIFGQLIMNKTFLLLFIRTLESNRYFSMRERVNVASLIMVTLQSKLEYCTDILKTLLGDLIEKCIEGKSHPKLLLRRTESVAEKMLSAWFTFLLYKFLKECAGEPLYMLFRAVKGQVDKGPVDACTHEARYSLSEEKLIRQSIDFRPMNVYASIIQQPIFCNNLDMLPSHTENVSVKVLDCDTIGQVKEKCLETIYRNIPSSQRPRKDDLDLEWRTGATGRVILYDEDVTSKTESEWKKLNTLQHYNVPDGAGLSLVPKQSSIYNFSILSDKNEKSHKYETLNISKYTSSSPTFSRAGSPLNNDMHENGLRYWHLVKHHDSDMQKEGERVNKLVSEIYLTRLLATKGTLQKFVDDLFETIFSTAHRGSALPLAIKYMFDFLDDQAQLHGITDPEVVHTWKSNSLPLRFWVNLIKNPNFVFDIHKSNIVDSCLSVVAQTFMDSCSTSDHRLGKDSPSSKLLYAKDIPEYRKWVDRYYRDIRDMSPISDQDMNAMLAEESRLHTTEFNTNCALHELYTYAVKYNEQLTVTLEEDEFSQKQRLAFKLEQVHNIMSSE

SEQ ID NO: 23140 - DNA, 5705 bp, DROSOPHILA
gagcaacattttcaaatgcatatttaaatgaagcaaaataaattatcgtacccaatatagatgcgatatatttgtcgtgagttgactcacgcgcacatcgccagaagcgaggttactgcagtcttaggccaaaacctcattaggctatagcgaaatctatatgcgaaatggaggccgacgccttttcaatttgccagcaatgaaaatttacaacatggctgtatggtcgctcctcgactccccccttcgaaaaaataagagaaaaaaaaaccccccaaacgattgcgccgatctgctggggatatatatgtatatatatatatatatcggtcgttcattgcataccccaaggcgtgcatgcgcacataaaaatcgacagcaatgttgaaacacggatcggaactggttgccagttgcaagttgctgatgttgctgctgctgctgctgctgctgcagttggtgttgccgctgttgcagttgctgtggcattgtcattcgtggcatgttcacgccttgacgcccgcagccaactggcaaaaaaaaaaaaggaatgaaagaaaaaaagagaactgcactccaaattgaactccaactgaatcgtccatcgcagcgctcctttttttccgcccgccgcacagcgattttccccgctgctccagcattttctggatcgctcgtttgtggcatcttcaaaagcggcatttgtggctgcgtttgcgaggcagatcgtaaatctaataaatgcttgccgcaccatcgcgctgctcaagggggaaaagcgtggaaaatgcgcctttttccttgggcgcagtgcatagatgatggactgataaaacggaaaaattaaaaaggagcattttttttttttttaaatacttaacactcgcatgctctggtatttgaaagatttcgcaagaaagatgtggcactattagttagtcttgggttgattcaatattctggcttactttttttttttgactaatcagttgggttttctatgctttttcaggtggtcctctcggcttgttcctcgtacttccagagcctgttcctggagcaccccgaaggacatctaattgtgatattgaaggacgtccgttttgccgagctgcaaaccttagttgaattcatgtacaagggcgaggtgaacgtgcaatattgtcagttgtccgcgctgctcaagacagccgaatccctcaaggtgggtggtccttttgttcagatcagtcatcgcttatttaatacgaacgtaataccaatccaattgatctacatatgttgcaggtcaagggcctggccgagatgacgaaccagaatacgacgctgcgcgaaccggaacgggaaccggatcgcttgcgtccgcagggcggcggcggtagcggcggatccgcccacaaggcggccgacagtccggcggccgcgcttgatgccacagcggccacacaggcggcgactgccacggcaacggcaactgccgcggcggcaacatcgacctcaacctcagcaacatctgcggcggcgacggcagcagcgacagcagcaacatctgcgtccacaacggcaacggcggcggcggggagtagtaatacaacaactacaacggcggcaaccacaacagcaacctgtgccacagcagcaacatctacggcagcaacatcctcatcttcgtccgtgacatcagcagcagcagccgcagcagcagccgcatcagcatctggtgttgcgcactcggaggaggcgacctcgtcatcatcgtcaactggcgggcagaagcgggaggctagcgatcgcagcagtcccacgcccgccaaacgatcgtcgcgaatgcatccggcggacaaggtggatgtggcagaggatcgggaacaggagcaaaaccaggcggacgagctgctaagcgaggagctgctcggtcgcaacttaaaggacgaggaggatgacgatgtggatgagctagatgagaacgaggagacgaagctgaggggtcgcgatgaggacgatgacgacgaggatgaggaggaggacacgcccatgccattggatctctatcaaagaccaaatgtcgagccaaaaagcgccgcagcagcaacagcagcgcagcagggcggcagcaacagtctcagcggtagcagcaacgcttgccacaccaacagcagcagcaacagcaataataacaataacaacaacaacaactccagcagcaacaacaacaacaacactagtagtgggaaaacctcagcgtccagcaatggcggcacagcatcatcgggcggcacagcggactccgtggttgcggtagatgacgatgacgacgacgacgatggtggccatcatcatcagcgacaggtgatggacgatcgattggagcaggatgtggacgaagaggatctggacgatgatgtcgtggtggtgggacctgccaccgcgatggccaggggcattgcccagcggctggcccaccagaacctgcagcgtctccatcacacgcaccaccatgcccagcaccagcattcgcagcaccaccacccacattcgcagcaccaccatacgccgcaccaccagcagcaccatacgcactcggatgacgaggatgccatgcccgtgattgccaagagcgagatcctcgacgatgactacgacgatgagatggatctggaggatgacgatgaggcggacaacagcagcaacgatttgggtctcaacatgaaaatgggcagcggcggtgcgggcggcggcggtggcgtagatctgtccaccggctccacattgataccctcgccattgatcaccctgccatcctcatcggcggcggcggcggcagctgcagcggcagcaatggaatcgcagcgctccacgccggccatgtcggcggcccaggcagctggagcgggcgcctcggacctcagtattggtggctgcggcggtcgaccggcgtccaggagctcacgcgacggcggcggtaacgatggcggcaggggaggagcatcctcctccagcctgcttagcccgggaaccgtggccaatctcctgcccgtgcaatcggtgccattggtgagttatgattgccacataggctattattagctgcagtttgtagggcattccaaagtaacactaacgtatgccatttccatttccattgcagagtctcaagaaggagatcgattgcagcgaggacgacaatagcagtcacagcagacacatgcaacagcgttcggcatcagctggcggcggcctgggcggcgaccttgactaccgcgcctcccacgagtcggtaagtctgcgatttggcgataactttgaccctggcccaagccctgaccccgcccctgaattcccacctctgaaaatacgattcgaaacgaacccctgccaaaattcgaaaagaaactccagtcccaggagatgcctttcagtgaatgcttttgctgcttcgataggttaaaaaaaaaaaaaaaaaattaaagataaaatatctaacgaattccgagatgcgtctcgcaaaaatagatctatctgatcccaatctggctcgatccgactccatttctacatatgtatatgtatatctttatcttaagtattgctctctctctctgtctgttcttatatatatatatacatcaatatgccatatttatatatatttaattaccaaaaacaaaatacaaaatccaaaaaacaaatgcaaaaagaaaacaaaatcaaaactcaacatatatttttgctcttcgtcgtgttctttgtctatgaattttttatacatatatatatatacccatacatatatatctacttaatatatatatatatataacttatccatctatatctactatgccctatatatacatatcaagtttttcccaacctaagaaagtaaagtttttcttttttctattcagttgaagataatccttaaaagtaatttgagattaaaaaaaaccaaatatcaaatgttagttgttcagtttcctagctctatatagttaatcatgttttgttcaatgtgtagcgctctatctctctctctctatctgtctctctctacctctagctagctatctctctctctctctatcaatgtctatcgataagtgtctgtgtaattttgttagttaatccaatctatgtgtatgtaatctatgttgttgttgtcgtatatatctatgtgtatatatctctctgtaaatttcccacacacacttacacacctaaaacaccatatgccataagttttcgcacagttgatagaattttgtgtttggttttatttcgatggtagttgagtttttatcgcttcgttttgtgggccacttccacttttcacttgccacacattgttggcaatttccgtttgcaattttgtccaccacccgctgcccaaaaccccaccttcaacttcagcacccctggaatttttttgtttgtattatttatttactggccatgttctgtcctccgaggtccttcttccttccgcagccctctatttcattccctgcccttctattttaatttaattttttatttgccaccaatgctgttgctgttgttgcagttgcatgtttacgacactataattttcaatatggctgtcaagcgaggcgccattgtccaggcctttgcgatgaaaatatttaaaaaatcaaaaatcattcgacgaggcgattctctagaattaagtcaggaggaaaagtaattcgggcaagcgaaaatcaaatatttggaaagcaagcattaaacatagaagaattctcacgatttaacatagatttaacatatcttgtgatttggatatattcactcgcttataacaaatgaaaatacaaatagagtatacgcagtgtgtaccgatggccgcctttaatccagctcggcagcctttccatgtccgtacatttattatttgagactgctatataaataaaataaaaaccaaatcaaatattcaaatcaaacaataagacaaattgtcgcatgttgcaacaggacaaacaaaggggagtacaaacccaaaaaaaaagaaaaaaaaaaagtaaaactaaggaattgcttgcactgtgtgtggctcgatattcaatttatttttttttttcgccccaagtgcgaacaaggcatttcgcgtcgcttccttttgggcggcggttgtctccactaattttggctcgcatacaaagtgaatgtaatgcatacttttgggtgcacggcaagcacaactgtactcgcctggtaaaacatttagcttccggcaaatatattttcacattacattttcccccgcctcccgcgccatcaactcattctttttaagcgaaatttttcgtcaacaaggataaacgcgaaaaatgttgggctgtaacataaaaaaaaaaaaaaaagaaagttgaatgaaagcaaaaggaacacgagtagccactgtcgtttttcttatgttttctagcctcttctgcccgcttttcctacttcagtgcagtggcaaaaggcagcaaaaaaagatatatatatatatgcataacgcactttgttgcaacgcttgacgagtttaagggcgaatttcggggtggcaaaagctggatgacaggccccagatgggccaagccagcggaaatgttgtcaaaaatgcaagagcacctaaaaaaaaaatgcttgaaaattaaaatgtaaggctggcagtgttgactcaaccgcaaggttacggt

SEQ ID NO: 23141 - DNA, 2199 bp, DROSOPHILA
atgctttttcaggtggtcctctcggcttgttcctcgtacttccagagcctgttcctggagcaccccgaaggacatctaattgtgatattgaaggacgtccgttttgccgagctgcaaaccttagttgaattcatgtacaagggcgaggtgaacgtgcaatattgtcagttgtccgcgctgctcaagacagccgaatccctcaaggtcaagggcctggccgagatgacgaaccagaatacgacgctgcgcgaaccggaacgggaaccggatcgcttgcgtccgcagggcggcggcggtagcggcggatccgcccacaaggcggccgacagtccggcggccgcgcttgatgccacagcggccacacaggcggcgactgccacggcaacggcaactgccgcggcggcaacatcgacctcaacctcagcaacatctgcggcggcgacggcagcagcgacagcagcaacatctgcgtccacaacggcaacggcggcggcggggagtagtaatacaacaactacaacggcggcaaccacaacagcaacctgtgccacagcagcaacatctacggcagcaacatcctcatcttcgtccgtgacatcagcagcagcagccgcagcagcagccgcatcagcatctggtgttgcgcactcggaggaggcgacctcgtcatcatcgtcaactggcgggcagaagcgggaggctagcgatcgcagcagtcccacgcccgccaaacgatcgtcgcgaatgcatccggcggacaaggtggatgtggcagaggatcgggaacaggagcaaaaccaggcggacgagctgctaagcgaggagctgctcggtcgcaacttaaaggacgaggaggatgacgatgtggatgagctagatgagaacgaggagacgaagctgaggggtcgcgatgaggacgatgacgacgaggatgaggaggaggacacgcccatgccattggatctctatcaaagaccaaatgtcgagccaaaaagcgccgcagcagcaacagcagcgcagcagggcggcagcaacagtctcagcggtagcagcaacgcttgccacaccaacagcagcagcaacagcaataataacaataacaacaacaacaactccagcagcaacaacaacaacaacactagtagtgggaaaacctcagcgtccagcaatggcggcacagcatcatcgggcggcacagcggactccgtggttgcggtagatgacgatgacgacgacgacgatggtggccatcatcatcagcgacaggtgatggacgatcgattggagcaggatgtggacgaagaggatctggacgatgatgtcgtggtggtgggacctgccaccgcgatggccaggggcattgcccagcggctggcccaccagaacctgcagcgtctccatcacacgcaccaccatgcccagcaccagcattcgcagcaccaccacccacattcgcagcaccaccatacgccgcaccaccagcagcaccatacgcactcggatgacgaggatgccatgcccgtgattgccaagagcgagatcctcgacgatgactacgacgatgagatggatctggaggatgacgatgaggcggacaacagcagcaacgatttgggtctcaacatgaaaatgggcagcggcggtgcgggcggcggcggtggcgtagatctgtccaccggctccacattgataccctcgccattgatcaccctgccatcctcatcggcggcggcggcggcagctgcagcggcagcaatggaatcgcagcgctccacgccggccatgtcggcggcccaggcagctggagcgggcgcctcggacctcagtattggtggctgcggcggtcgaccggcgtccaggagctcacgcgacggcggcggtaacgatggcggcaggggaggagcatcctcctccagcctgcttagcccgggaaccgtggccaatctcctgcccgtgcaatcggtgccattgagtctcaagaaggagatcgattgcagcgaggacgacaatagcagtcacagcagacacatgcaacagcgttcggcatcagctggcggcggcctgggcggcgaccttgactaccgcgcctcccacgagtcgcgaggcgccattgtccaggcctttgcgatgaaaatatttaaaaaatcaaaaatcattcgacgaggcgattctctagaattaagtcaggaggaaaagtaa

SEQ ID NO: 23142 - protein, 732 aa, DROSOPHILA
MLFQVVLSACSSYFQSLFLEHPEGHLIVILKDVRFAELQTLVEFMYKGEVNVQYCQLSALLKTAESLKVKGLAEMTNQNTTLREPEREPDRLRPQGGGGSGGSAHKAADSPAAALDATAATQAATATATATAAAATSTSTSATSAAATAAATAATSASTTATAAAGSSNTTTTTAATTTATCATAATSTAATSSSSSVTSAAAAAAAAASASGVAHSEEATSSSSSTGGQKREASDRSSPTPAKRSSRMHPADKVDVAEDREQEQNQADELLSEELLGRNLKDEEDDDVDELDENEETKLRGRDEDDDDEDEEEDTPMPLDLYQRPNVEPKSAAAATAAQQGGSNSLSGSSNACHTNSSSNSNNNNNNNNNSSSNNNNNTSSGKTSASSNGGTASSGGTADSVVAVDDDDDDDDGGHHHQRQVMDDRLEQDVDEEDLDDDVVVVGPATAMARGIAQRLAHQNLQRLHHTHHHAQHQHSQHHHPHSQHHHTPHHQQHHTHSDDEDAMPVIAKSEILDDDYDDEMDLEDDDEADNSSNDLGLNMKMGSGGAGGGGGVDLSTGSTLIPSPLITLPSSSAAAAAAAAAAMESQRSTPAMSAAQAAGAGASDLSIGGCGGRPASRSSRDGGGNDGGRGGASSSSLLSPGTVANLLPVQSVPLSLKKEIDCSEDDNSSHSRHMQQRSASAGGGLGGDLDYRASHESRGAIVQAFAMKIFKKSKIIRRGDSLELSQEEK

SEQ ID NO: 23143 - DNA, 3585 bp, DROSOPHILA
ttctccatccaatacgacaagtcaccggctttcgcctgtcttcaatcttcagatgtgtgtctcacagttcaagtgcctattaaatggcaattgtgccgcaaattgatacgacgtgacttttcgagaaaaatgaaagaactcactcgagacgctccccaggatatccacacataattgaatatcccctcacatgcatagacatatgtacaatacatatgtatatccaccatctacccttccgtcctgtctgcgcaaatcgttataaatggaatcagatgtcgaaacccatttggggttaaaatacacaaatataaaaataatttccgcccgttcagttggcactccagaaagtgggcagaaaacatagaagaatccttgctgggcgaacacacgtgagcgcctgtggcgaatcgaaaattatgttcttctaaaaagttgagtgttaagtaagcgccactgggcaaaaaaattgagaaattgtattcataatgtgcaaaagttggtcgagtgttaaaaggtttctatttttttccaatataactctggtttttataaatagaaaataaatatataaatggcattgaaaacgtattttattccgatataaatagtacgaaaaagttttcttttgattttgtttaagaaagtaagtaagtacttgtaagcgaaatatttctctcagtgcagcgtggagcagaccatgtaaattccaataggaaaaacaattgagagctcgtcgacacgtgaatttaatcaggcagcccgcagcgtgcgattttcgagtccggattcgagtccgatttgggattgtgttcaggatgcgatgtatgtatgtgcgacggatataaataacatgttgattgctgcaaattgcaactcatccgattcgccgccccatcatccaaacggaccaacgcccacttgattctcccatccgatttgatagcacttcatccaatgcgattgtctattgcattgtgtggtgtggtgtggtgtagcaatgggtttcccaggtcgcttctcgaccggaagtggttgcacgcgcgaaaagaagaggttgaacgcattagtgccacgctgcgcctgaaaacaggcaacagtgtcttaaagtcggtatctttataccggcgtccacttgacactcggcctgcactctgcactccaattgaatccacgagtcgtggtcaatcaaattttgaaaatttttaaatgagtagaaagcctattgtttgcatataaaaacaggatgtctttgggataatctaacaagtgcaactacattttaataatcctccctttgatttcctatttccagaactggagctctccaacgacgattcggatatagacattgaggatcgatctacgccggactcgacggctgcgggctgccagcaggagctactgctgtcgcaccatcaccgcagattcacccaccacgacgaatccagtgtggagtcctgcctatcggccacaaggggccccggctctggcacaggatcgggtggtggcggaggtggtggtggtggaggaggagtagccagcggactgagcgccgctgcagcggcggcgggcgtggctgctggactcctggcagcggcggccagtggtgccaatggggatcgggatgccaacggtggcagtggcccgggatccggtggcggtacaagtggcggctatgcggagcacaagctgcagctgagcaaaagtggccggaagccgcgacgccgccgaaccgccttcacccacgcccagctcgcctacttggagcggaagttccggtgccagaagtacctgagcgtggccgatcgcagcgatgtggccgaaacgctcaatctgtccgagacgcaggtgaaaacctggtaccagaatcgccggtgagtgttgatcgagagcaaatccccaagttggaaaggagccactttattaattgctttttaaattaaaacgataatggataatgaaacaataagttttgattagaaaagaatcaaatatcttccattcgcggatagaataatgaactatttgattttgtttcactattttaaattgcagtaagtacagttgcgctcatagtgcttcaaccgatcgcaaacgtctggcaacgcaaaaccttgtattttgcgcagtacaaattgtatttttaagtatatacatattaatattaataatggcttgttattatagtttaccaaagccaattttatgttgagtaagattactaaaaaaatatagaatttattggtacaatcacgctaaagtgatcccatattcaattctaaccgtgtggcaacgattgtaagcgcttcatttgccttttccattgcaggaccaaatggaagcgacagaatcaactgcgtctggagcagctgcgtcatcaggcgaccatggagaaggattttgtggtccaggatggcggcggtgcgggcggactcggctgctgtcccagcggactgagcagttcttttagtgccgccgccgctgctgcagcggctgccagcaatccttgcaattttctcacttccgccgcagcggcggccattttccgtaatgtcggctatgtccacggatgtcccatgtaggagccacgccccaaactctcccataataccattttccccagctgcctgtgtatataatgcgtatgaagaaaaccgtttttgtgcaataaccgatcgggacaaattaatgaaagtcaagcgatgtgctgatatttaccaagcatacccgatattattattataatacgtacttaacaatataatcataaaaataagcgtagtcgaattaattaattgtattataaaactaaaaaattttttttttcacatcgcactctatggaatttttttttggccagaataaacattcaattgcaagtctttaagcgttttcacttgggaggtgatctaattgaaattaattataaaaaaacttaatcaaagctaactagtataaataataggtcttatttactttactggttttgttacagaattaagctccatttgcgaataacaaatcaaacgttcaacttccgataaatttgagaaacgataatgatcgatcactaaaatcgatcgttaccgattgttcaattttaccaaaagtcttttatacatgtgctgtgttggctgcaatttaatatttaataattcacaaaggaatcgaatgcaacgtatcggttaaatgccgctcgcccatctgcgtatctgcaaatcggtgagctgtgagtcatgcttgaaaatcaacttgagcgaatcgcacaaaacgatatcaatttgtcgctatatagcaaatagcccgcgacatatgcccacccaacgggcaggatatcgcgtctacagctacatatgtatatagatccactctatatatattatttgcatggagctgtgagagagagggcgatatagagtgagaaagagaggaaggatgaagcagccaaccggaaaacaagcaacaactctggtcgcaattataacgggccaacggagcgcagagagcgcatgagcgggggcgtgcgacagaaagagatggcagcagtgcgtcctggcaaacgaggatgcgatagcaccgtca

SEQ ID NO: 23144 - DNA, 828 bp, DROSOPHILA
atgggtttcccagaactggagctctccaacgacgattcggatatagacattgaggatcgatctacgccggactcgacggctgcgggctgccagcaggagctactgctgtcgcaccatcaccgcagattcacccaccacgacgaatccagtgtggagtcctgcctatcggccacaaggggccccggctctggcacaggatcgggtggtggcggaggtggtggtggtggaggaggagtagccagcggactgagcgccgctgcagcggcggcgggcgtggctgctggactcctggcagcggcggccagtggtgccaatggggatcgggatgccaacggtggcagtggcccgggatccggtggcggtacaagtggcggctatgcggagcacaagctgcagctgagcaaaagtggccggaagccgcgacgccgccgaaccgccttcacccacgcccagctcgcctacttggagcggaagttccggtgccagaagtacctgagcgtggccgatcgcagcgatgtggccgaaacgctcaatctgtccgagacgcaggtgaaaacctggtaccagaatcgccggaccaaatggaagcgacagaatcaactgcgtctggagcagctgcgtcatcaggcgaccatggagaaggattttgtggtccaggatggcggcggtgcgggcggactcggctgctgtcccagcggactgagcagttcttttagtgccgccgccgctgctgcagcggctgccagcaatccttgcaattttctcacttccgccgcagcggcggccattttccgtaatgtcggctatgtccacggatgtcccatgtag

SEQ ID NO: 23145 - protein, 275 aa, DROSOPHILA
MGFPELELSNDDSDIDIEDRSTPDSTAAGCQQELLLSHHHRRFTHHDESSVESCLSATRGPGSGTGSGGGGGGGGGGGVASGLSAAAAAAGVAAGLLAAAASGANGDRDANGGSGPGSGGGTSGGYAEHKLQLSKSGRKPRRRRTAFTHAQLAYLERKFRCQKYLSVADRSDVAETLNLSETQVKTWYQNRRTKWKRQNQLRLEQLRHQATMEKDFVVQDGGGAGGLGCCPSGLSSSFSAAAAAAAAASNPCNFLTSAAAAAIFRNVGYVHGCPM

SEQ ID NO: 23146 - DNA, 2613 bp, DROSOPHILA
tgtgttaaattttttaactaaaatcgagtatactttcttttatcaaactataagatgtaacttcaataatgagaaatattacgtatataaaatatacgttccaaatatattataaaagtggaccgaaatcttaaaacaaacaaaaataatacacacaatttaagaaacttcacaaaaaaaactgtgttaataaggcgaaatgaatctaaacggaacttgaacgtaagtcaacaagtgttaacaaatttatctaacaaatatagaaaatacgcgcacaaatgttcataaaacaaaaagttcgtctgaccccacatcattaaggatttcctaaatatttaaattttaatgtggacataaggccacatagtgacgaaataaacattttggttggtttctctgtctgtctgcaacaaaacgttattttaaatttcgaaaataaaatcattagttcgaaaaatcaatacttacaatcgcttaaaacagtgcaaaatgtcgtaaaaagtctataccaatgcgtatatattccatatagcataaacaagtgtaaattgtactcttcggtaaattgtatacggtaaatcggtaagttgtatactccttcagaacattgaatactatctggctaaaatgttctataaattgtatactaaactcaaaataaaacgtaatcgagcttatcggtttaaagtgatatttaaaaaaatatatattgttttatttattcttatatttttgtacccgttagtcgtaggataaaagggtatattagattcggttaaaagtatgaaaggaagtgtttccgaccatatattaagcaggatcgagtcgggtcgatctgaccctgtccgtctgtccgtatgaatgtctcgagctcaggaactgtaaaagctagaatgttgagattgaggatgcagcttccagagacatagacacatcgacacacacaaaactgctactcccacactttaaaaccgcccaaaatgccacgcccacgcttttgaaattttttttcgtaattttaggagtcttgtgtatttctattcatttgccaaaaaacctgttgccacgcccacaataacgccctaaagcgttagacgcgtttgcgacgcaaacacttttgaatttttttagatttttctttgttttattgtttgtcttgcgaattttctgagtctatggcagcatggatattcacagccattttattcactttagcagttttcaaaacacaaaagccaaatagatatagtttagtgctgcccgcctctggcacgtcttgtggaaagtgtagaatctgttgtagatgcaggaccactgggcagcgacccttagtggtattgtagttcctgtggtgcttcaacttggtgtagttaatcagacagaagaacgtcatgctggcgacggtcagctggaagaagggagcgatcacggcgcgcttcgggaacacgtagttgtactgccagcgccagcatgcacggttcacggctccggccacagcgttgggcgtcttgttgcggcgtcccagccaggctttaccgtagaagcgagcggggtcttagggcccgtgcaccttggggttgtactcacctggatagtcaccaaatgacaccgcgttccttcgatactgacagtatgtacagtttgtcaaaaaactttttacacactgtgaaataggttgaatttttgattttaaaggtaaaaattaagggttctttgcttaattaaacgcaattttttataaaatataattaaacaatatttatttttaagtcaaaaaagaaattaaaaatattaattatacaagaaaagaaaaaacaaattccaagtttacacaattttgagatttataagtaaaataaatattcgacaattcacaaactatatgtacaagtgtgagttagtcttgcgtatttttatcggtataccaaaaacactgtggccacgcccctcctttgacctacaaaactcccaaaattttcacgaccacacttctaaacaatttttataatttatatgacgaaatatttttttgttataaaaagggttagttctttcatatttgcaaaggggctgtttaatgttgcttaaacttttaaacctgcgatgttagggaattacaagggctctacagcattaaaaaaaattcgtgataaaaacgtatttttttgctgagttttttatttcttgtattgtttttaaacaacgggtgacgaaatattgctattgccgttactcatatactcatttcgatctaaaatttggacaagatgaaatcgtactcagcatacgcatatcgagatcgaaacattttcagtgtgcaaatagctatcgaaatgagaatgtcttctcgatgtccagaagaagtcggtatcgagaagaaccgatctcggcttagagaagatccgatctcagtataaaggagagccaatctcgcttttgggaacaacaacattctttttatagttatttaatcaataatttaactaaaaagaaaaaagcatgactgttaatttaaaacaaaccttgtttggtacatccccaggtgactttgacaatgctcctggcgaggcttatcaaacctctgatggacatcggtcttcttgaaatattaca

SEQ ID NO: 23147 - DNA, 453 bp, DROSOPHILA
aaattttttttctctatggcagcatggatattcacagccattttattcactttagcagttttcaaaacacaaaagccaaatagatatagtttagtgctgcccgcctctggcacgtcttgtggaaagtgtagaatctgttgtagatgcaggaccactgggcagcgacccttagtggtattgtagttcctgtggtgcttcaacttggtgtagttaatcagacagaagaacgtcatgctggcgacggtcagctggaagaagggagcgatcacggcgcgcttcgggaacacgtagttgtactgccagcgccagcatgcacggttcacggctccggccacagcgttgggcgtcttgttgcggcgtcccagccaggctttaccgtagaagcgagcggggtcttagggcccgtgcaccttggggttgtactcacctggatagtcaccaaatgacaccgcg

SEQ ID NO: 23148 - protein, 100 aa, DROSOPHILA
MQDHWAATLSGIVVPVVLQLGVVNQTEERHAGDGQLEEGSDHGALREHVVVLPAPACTVHGSGHSVGRLVAASQPGFTVEASGVLGPVHLGVVLTWIVTK

SEQ ID NO: 23149 - DNA, 5460 bp, DROSOPHILA
tccccgtaaaaactccttttcattttgagaaaacactttcccaactgtattgtgttgtttgaattttattatatttatgattataaatcgttatttttggttactgacgcaattaccttttcatttgctttgttatgatttcaacgccattaattaataataataagaattcactcttgcagtactcgggcttccagcagacggcggaaaagtgcgccatctgtggccatctgatcatggaaatggttcgtactgcaccccattcgtttctatcccactctaattgggcaacttgtactcacattgacgtcgctctcgctctttccctcttgcagatcttgcaggccatgggcaagtcgtatcatccgggctgcttccggtgctgtgtgtgcaatgagtgcttagacggggtgcccttcaccgtggacgtggaccacaagatctactgcgtcaacgactaccatcgaatgtttgcgcccaagtgcgctagctgcggcaaaggtgggttcacaacttcattccgaataatacgtcaatgctaatctcgcaatcgtcggcaattctcggcaggcatcacacccgtcgagggcaccgacgaaactgtgcgcgtcgtctcgatggacaaggacttccacgtggactgctacatctgcgaggagtgcggcatgcagctgaccgatgagccggacaaacgctgttacccgctggacgggcgcctgctctgccgcggttgccacctgcaacgtctggcgctgcaatcctcgccacacgctcgtcatcaggagcccgtctgcgcttcgtaccagtatatgggataagcggaacggagtgtggctgggagaggcggcgcggcgcagaccgaccttccgaccttcgactgagtggcgcacaaaaccagaacaaactatcgcaatcaacttattccaattaacaatattatcttaaatagacagaagtgaaaacaaatgcatttatacgaaacgagggccaagctaatggcttttttttttcttcatttttatggcagtgtactaggatctcgaaacggatctgttagaaactatgtaatggattcctaaaatctccgacagttggcagccattgttggcaatactattttgatacaagtatattgatgtgttcttcatatgtatgtcctggggtgttcctgagacctcttgaggtttcaatgcaatagcaaacggtgtctcaaattatgcaataaaatacttaatacttcttatctgaaagtcttttgtggatattccagtgggttagtggcttgttgtgatacataccatacattcggttattaagtagcgaaaatgcaaaattttaattgtttgcctaaaccgtgagtaattaacatatacgtgtgacattttgaattttgtttagttttcttataacacatacatacaaaatattttcttttaaatttttcgaatgcttaatgctttaaatgcgttgcgcttaacagaaaaattccaataaaattattggaaagaaaaaaatataatcatcaataaaattttaaacgaactgaatgaaatgcatataaacgataactaggtattaatctggctaatgttagtgcataaggatctccagctggacgagccgctggttggtggtcgatggcattcggtatggaacgctggcagccatgttggtgaatgccttggccctgtctcgcaaatgtttcacggcgggctccttattgacgcacttgctttcatcaaagaaaccggaagctgtttcattcgagtccattagcttcacatactcctggtatacaatgtccatggacgccagcaggatatcgggcagcactttaatgacctcgggacccatccgctttatgttcgtcacacactcgtccacttccaatgagctggcgggtatcagatgattgttggtcaggatttctaatgccgaacgcaatgcgccttcgtgatagtggtcaaagaacttcatgacctttgtcagcaccgtatatgtgacaacaacttgaacctctacgtccgatttacgcacgaccagcgccgcatctagtcgattgataatatcgcccagccggttacgcacgcttccattctgcgttggttggtggaccacctgtgccagtagcgagttcaccaaacgcagtgccttgtccagctggccaccaataaagtagagctcgatggccaattcgtagtcgccgcgtttcgacaactcatcgcccaccatttcggccagagagtacttatcgcattcatgaatttgaaattccgcatatatgccgctaaataaaggggaatgaataaaccattagctatttgccaaaaggattttgaaatcttttaagagtaccaaaaacgtaacatacccatagcgcaagccgtttttcttatcctccgtcccgaaaatcagctctagcatttcgtcgtcgcatttctcaactagcagatcgcagacgcaggtgagcatcacgttgccgcgtccgttctcggatttaaagttgcgcaacaggtaatagtaatgcagcgcctgcgtggtgtccgttctctcaaagcacttggtgtacatgacgatcagacgcacaagattgagtcgtttcattggttttgggtcgtcagggtcggagctcagaagggattgttccacggaacgtggtgttcccagcatggatatctcgtttagggcaatggccatgtggatagcgtgcgttcgatttttctcggtgcgggcgaggaattcaatggcggcctcaaattggccggtaagcgtcagcacctggaagtatagcgccgccttctcgcgcgcattgaagtagttctcgccgtacttttctaaaatgagcgattgcaggccgctgaacgttagctgctccgtgttgctgtcgctttggtccgacctgcgcagaatggacagttgcatccacaggaagtcgtcgatgctgcgcattagttctacgtgagtgaagtgcggatcacacgccaacaatacgacgtatacctaatggaaaagagaaaaacatatgattagcacgaatatacgcaacaagttgtagcaaaagatgagcactcaccgcctttttgtagggatccgtacaggcgcgcagtctactgttgtactccaactttagctgaccctcaagctttaccatcaagttgtccctatcgccgttctttcgcaacgtcaatagcgtaagcaggtcggggcaggttcccgattccttgagatacaacgcagccgcgtccatatcgccactccgcaagctatagtaaacatgtggccacaatggctggccattgttcacgtcatgcagcccgtagagggctcgctgcccctggagagtaacgcccacataggagcggaccatatggtacacgctggggattcctccccgccgcgctttggccaaattcgcgacgataaactttctcatatacgtcctatatctgcgctccaagtacgtgcgggcctgctcaacgaattgcggtgatgtctgacgattcttgattggatcgatggtgctcgagactggcggcaacgcggtcataaactgcaatacattccacatctcggctacggactcatcgttgaaggagtcttggaccacgtgggcaagggtcgacagcaagttagggcgtctgcccaggatgatcgactggttgtggatggcgatctgttcagcgtacatctgctcatggccattcagttgggagtacggagtgggctcatcagccatggccgtgggcactatctgaaactggacgtcggggaagtcctgttggtttggtccgaccagagcgtttagcagcgcttccttctcctcgccccactccgagtagatgcaacgccacttctgtcgctccacagatttaaatatctgcaatggattggttaatggagatagaaagttcagaattttgggtgtctgcctgaagcatgtcatttggcgcactcacactgcgattcgtctcatcgataactgagagtatggcgttctcccgctcgttcttcagataggcctgcacattggtctccgtcaccggatcaatcggctcgaaggtttggcgggcgctgagcgactccagcttctgtgtaagcttgggcaggtccacgcccttagagccgagcagtatgtggctgcatttgaatgaccggttaatatgacaatttttggcgcctggcctatagcgaactactcacgcctgcagatcattggtgcccatttgggtgacacgcgagtgaaactccttggttgcctgcagaacctgggacatggtccgttccacgcccggcacctccgtgtccgtattggtctcgttcgtcaggcgctgggcctgcttcagcagttccatcagatccatgtcgtgatattgggatggaaaagccggtgccaataaaatgatatttccaacgaagcgcacaccaagctgctagtgctgccacctggtcgcagtccggattatttcggcgccataaaatgtttgcaatcggtggtattctttttggtatatttaatagtacaactgttatatgttagaataactataataatgtctacagatggtatataatttaaaaggaatatttgataattaaaatcattaaattgaaaaatttatatagatagcagactaagaaattatttctcaatacctaaaagttgttataaaaacaaagaaaatagtcgatttccccgaacgcgaaatttcaaaatttttatggaatatcgatatattggggaataaattgagaacaaatgggagttttgtaggtataaggtatttttggtattacgcaatctgttattgaaatgtcccaataacaactgttattgagagggagttgtaagtacaactttaaaaacatttggtattagcttggtatttataggccggccgaaaggcaggaccgtctggtaacactgaacagcaggcgttagtgtatttcgcgcagtgcagattggtttattcagcggctaaccaattcaatcgtgaatagactttagcagcgcgcaaatcgtagaacagaacggcatattttttttaaacactgcgaggcgagcttcttcttccctccgtctctctgtgtgtgtgtgagtgtgctgcctgtgtgtgttacagcttgtgtacgtgagtgtgtgtattggcaaaggaaattagcacaacaaaagcgaaaaggaaacgaacacgcacgcacctcgtcacgcggataaagaaaaaaactcttcgatctgatcagagatatcgagaataaacgataaaaataataacaatatcgcaatgtcggaagttgaatcgcagcagagccaggagacgaacggcagcagtaaattcgatgtgcccgagatagaattgatcataaaggtgagcgaacagcgacatttgcatacccctgcagttttccatttcgctctgcgcaaatttccgtgcagagtgaaaatgcagccggggcaaaagcaga

SEQ ID NO: 23150 - DNA, 2779 bp, DROSOPHILA
atccggactgcgaccaggtggcagcactagcagcttggtgtgcgcttcgttggaaatatcattttattggcaccggcttttccatcccaatatcacgacatggatctgatggaactgctgaagcaggcccagcgcctgacgaacgagaccaatacggacacggaggtgccgggcgtggaacggaccatgtcccaggttctgcaggcaaccaaggagtttcactcgcgtgtcacccaaatgggcaccaatgatctgcaggcccacatactgctcggctctaagggcgtggacctgcccaagcttacacagaagctggagtcgctcagcgcccgccaaaccttcgagccgattgatccggtgacggagaccaatgtgcaggcctatctgaagaacgagcgggagaacgccatactctcagttatcgatgagacgaatcgcagtatatttaaatctgtggagcgacagaagtggcgttgcatctactcggagtggggcgaggagaaggaagcgctgctaaacgctctggtcggaccaaaccaacaggacttccccgacgtccagtttcagatagtgcccacggccatggctgatgagcccactccgtactcccaactgaatggccatgagcagatgtacgctgaacagatcgccatccacaaccagtcgatcatcctgggcagacgccctaacttgctgtcgacccttgcccacgtggtccaagactccttcaacgatgagtccgtagccgagatgtggaatgtattgcagtttatgaccgcgttgccgccagtctcgagcaccatcgatccaatcaagaatcgtcagacatcaccgcaattcgttgagcaggcccgcacgtacttggagcgcagatataggacgtatatgagaaagtttatcgtcgcgaatttggccaaagcgcggcggggaggaatccccagcgtgtaccatatggtccgctcctatgtgggcgttactctccaggggcagcgagccctctacgggctgcatgacgtgaacaatggccagccattgtggccacatgtttactatagcttgcggagtggcgatatggacgcggctgcgttgtatctcaaggaatcgggaacctgccccgacctgcttacgctattgacgttgcgaaagaacggcgatagggacaacttgatggtaaagcttgagggtcagctaaagttggagtacaacagtagactgcgcgcctgtacggatccctacaaaaaggcggtatacgtcgtattgttggcgtgtgatccgcacttcactcacgtagaactaatgcgcagcatcgacgacttcctgtggatgcaactgtccattctgcgcaggtcggaccaaagcgacagcaacacggagcagctaacgttcagcggcctgcaatcgctcattttagaaaagtacggcgagaactacttcaatgcgcgcgagaaggcggcgctatacttccaggtgctgacgcttaccggccaatttgaggccgccattgaattcctcgcccgcaccgagaaaaatcgaacgcacgctatccacatggccattgccctaaacgagatatccatgctgggaacaccacgttccgtggaacaatcccttctgagctccgaccctgacgacccaaaaccaatgaaacgactcaatcttgtgcgtctgatcgtcatgtacaccaagtgctttgagagaacggacaccacgcaggcgctgcattactattacctgttgcgcaactttaaatccgagaacggacgcggcaacgtgatgctcacctgcgtctgcgatctgctagttgagaaatgcgacgacgaaatgctagagctgattttcgggacggaggataagaaaaacggcttgcgctatggcggcatatatgcggaatttcaaattcatgaatgcgataagtactctctggccgaaatggtgggcgatgagttgtcgaaacgcggcgactacgaattggccatcgagctctactttattggtggccagctggacaaggcactgcgtttggtgaactcgctactggcacaggtggtccaccaaccaacgcagaatggaagcgtgcgtaaccggctgggcgatattatcaatcgactagatgcggcgctggtcgtgcgtaaatcggacgtagaggttcaagttgttgtcacatatacggtgctgacaaaggtcatgaagttctttgaccactatcacgaaggcgcattgcgttcggcattagaaatcctgaccaacaatcatctgatacccgccagctcattggaagtggacgagtgtgtgacgaacataaagcggatgggtcccgaggtcattaaagtgctgcccgatatcctgctggcgtccatggacattgtataccaggagtatgtgaagctaatggactcgaatgaaacagcttccggtttctttgatgaaagcaagtgcgtcaataaggagcccgccgtgaaacatttgcgagacagggccaaggcattcaccaacatggctgccagcgttccataccgaatgccatcgaccaccaaccagcggctcgtccagctggagatccttatgcactaacattagccagattaatacctagttatcgtttatatgcatttcattcagttcgtttaaaattttattgatgattatatttttttctttccaataattttattggaatttttctgttaagcgcaacgcatttaaagcattaagcattcgaaaaatttaaaagaaaatattttgtatgtatgtgttataagaaaactaaacaaaaaaaaaa

SEQ ID NO: 23151 - protein, 823 aa, DROSOPHILA
MDLMELLKQAQRLTNETNTDTEVPGVERTMSQVLQATKEFHSRVTQMGTNDLQAHILLGSKGVDLPKLTQKLESLSARQTFEPIDPVTETNVQAYLKNERENAILSVIDETNRSIFKSVERQKWRCIYSEWGEEKEALLNALVGPNQQDFPDVQFQIVPTAMADEPTPYSQLNGHEQMYAEQIAIHNQSIILGRRPNLLSTLAHVVQDSFNDESVAEMWNVLQFMTALPPVSSTIDPIKNRQTSPQFVEQARTYLERRYRTYMRKFIVANLAKARRGGIPSVYHMVRSYVGVTLQGQRALYGLHDVNNGQPLWPHVYYSLRSGDMDAAALYLKESGTCPDLLTLLTLRKNGDRDNLMVKLEGQLKLEYNSRLRACTDPYKKAVYVVLLACDPHFTHVELMRSIDDFLWMQLSILRRSDQSDSNTEQLTFSGLQSLILEKYGENYFNAREKAALYFQVLTLTGQFEAAIEFLARTEKNRTHAIHMAIALNEISMLGTPRSVEQSLLSSDPDDPKPMKRLNLVRLIVMYTKCFERTDTTQALHYYYLLRNFKSENGRGNVMLTCVCDLLVEKCDDEMLELIFGTEDKKNGLRYGGIYAEFQIHECDKYSLAEMVGDELSKRGDYELAIELYFIGGQLDKALRLVNSLLAQVVHQPTQNGSVRNRLGDIINRLDAALVVRKSDVEVQVVVTYTVLTKVMKFFDHYHEGALRSALEILTNNHLIPASSLEVDECVTNIKRMGPEVIKVLPDILLASMDIVYQEYVKLMDSNETASGFFDESKCVNKEPAVKHLRDRAKAFTNMAASVPYRMPSTTNQRLVQLEILMH

SEQ ID NO: 23152 - DNA, 4154 bp, DROSOPHILA
gccaagagctcgagcggacaacatgaaccttttgtgagttaataagccatgaagtgttatttttagtttccactgacatatcatctactctaatatagggcgaaaatcatactgttccttttcactctcgaggctgtgagtgctttagaggccaatctcacttcgtggcgacatcacagaaggcaaaagcggttcctgatttatcagaatggcggtgtaatcaaggttggacatcaaatatttattgagtattgatcgatatacaataatacatatgtgtcactacagttcgtttcgggatgtgcatttccggctccgtttatggagaaaaaggcatggcgccagttggtttggctgatgaactttcactatcagttcaatgagccgcaaactccaatctactggtggaaactttgggatggctcccgaaatctcaagggaccattgacccaacctgctcctccatccgttccagctcgtcttttggtggacgagcctcaacttctgctattcaagttcgccgaggcctatatgaaccagttgggtcaaaatggtagtgcctgtctggatcgtctgatctgcgagaatggtcaggtggatgagcatagtggactctacgcccaactgctccacaggttgttaaggtaagttgactttcgcgtaagcttaagccatagataactctatgtaacctttagacctcatcaaacgctggacgtgagatatttggatgcctacaggatgggtcgccatggcgttgactgccgaaatgcctttccagaggcccatcattgcattttggatgactacctacacctccatgagcgaggaccgaaacagagttttctttagccgaaaaattcgatttctctttggacacgtggcgctggctgtcagtagttcgataacatttacatgacatgtacaaaactaattaataataattaaatataataactaaataattatatacagcgagtttatctcaattactgcagctctatttgttgctggccatgtgttcttcctcatcatcgtcgtcatcatctgagactcgccaagccaattggtagtacttcttatcattgctagtcaaccaaaggagaccacatcggttggtgcagaagttgcaggtgaagagctgtttggatgtactgccacgcctataaagggtaattggttatcaatcattcaagacaaactataatatggcagtgtaagagctaaacccgcaatttgaagaaaggattacgattgaagtataatcttgagaaagcatttccttcgtaagctgtcttcactgtacttcttgcgataggtccgtttctcccaattagaaagcggaccggtttgggcagtatcaaaacaattaccacatgactaacgccaagcaaacattagcgtaaccccaacccaccttttcacaaccatgaagtagtacgaggtatagagacatctggagcaggtggagttcgtgcagcgggcgatgggtccattgttgatgtgggaactgatgtacggttctgggagcagacgatgcatggctacattctcatatacgggcgtgaagcggttcagcgtctgcagagcgtgcagacagtcatcgtagagcgaaacgcggttctccaccgacggaaccggaaatactgtgcgggtgccaaccggaagaagcaacctggtgctggtctccagctcgcggacccaaaacaaacccttgcgatgcacggcgctagaaagaggatatgtttgcaaattacttaatttcttgtttttttttactttgcttgctacaatttaactgaaatccctttgtcatgattaaaggcaatctgccaggaaatgcacatcaccgacaaacagttcgaatttattaagacccaattttgtttacgaaactcaaagacattgggctgccaaataaatcaatcaaatatttatcatagcagctccaattcaatagcgctagagttaatgcaattacttacacgggagtattcctctggcggttgtcgtaaaagttttgatagaacctctcatagaccatgggtatgtagttgatagcggtgttgtggaagatgcgcacatggttcatgaacttggagagagctgccggcaagtagacgagcgcacaacctgccaacgagagcagacattagtgtgctctacttaccccgatctcacgatccggataccgatacccgggtgtacttacgatctgcggcgagggactgcagcatgggcaggttggagatgcgctcggggatgtggacaagcgcctcgttgtcgctcacattcagctcgttgaggcggacgcactcgctcagctgaaccggcaggcgtcgaaattggttcttgccaatgttcaggtgctccagattgcgcaaaccacttagctctgcaagcggtacaagtgaatggattccatggtggggactgtaaaccatcctactcacccactggtagttcggtgagctgattccccgacacattcagctgctggagattcaacaggagacccagtgtggggggcagctccttgagctcattgttggatacgtccaggaactccagattctccagcatatagatgtccaccggcagttcactcagattattgccagccaaatgaataaacttcagtgtggtgatgttcagcagccatttgggtatcaccgagatgaagttctccttgaggtagacttcctcgagatcctcgtagaggaacagatccatcgggacatccttgaaattcaggtagctccagtgcagaatcgttttgttcattttgacgataccgttgcagttacacaattggcgtatttgcttatagtttgatcgtgtttcaattatatttatttgcgtctctacgcggtcatgatcatcatttggcaccgccgcccgccaaacaaaaactgccaccgccaccagcgccaccacagccacccagtggctcaggcccagtggcagcaccactagaatcagcagcaacagtttgctctccaccaagaatctctatctatctcggctaaatttgtctcactggccgcctgtcgcaatttctcgcgagcaccgccttcgaattttattttcttcttacttatttattgttgcaataacaaatcgcccatcatagcacctttcactgaccagcgcggcgtatacgtaatgcgatgaatgcccgaaagtataccgtttagttttgtaggcggttaaatgccttccgagctttggcactgacattgaattttcctggtgcattgattcgccctccccttttcgggttgtagctgtgcattcaaggtcgttgctgcaagccaaatgcaaagggcaagctttcgaagctcccatgttgcaagagctttgtggcaaataaaaggggttatggcaagtttccataaaatttcttaaggaaagttaactaggttggataaatctacctgagcttttacttttacatgttactgaagtgccatagtcttcatgttgttaattgtgatttatttgtataaatagtttaataaataaataaaattccataaaattttaaattccagtcagtggttcctcaatatccatagtttccatatccatagtttccataaccgtagtcatagccatatccatgattatgatgatggtgatggtgatgtggatacgaatagtatccgtacgacggaggtggaggctgtggtattccgaatcccacgccaattggcagcggaagaggcagtccaacaacaacaggtgtacccatcgctccagcaatggcgaacagcacgattccgataagagcgactatagctttcatgtttcttggcaagatttcgcaaacgactgacaaatctgcggagaggctatcggcttttaagcattatgatggtggcgttacgattttgggaatttcaatcgcagcgtggacaaacagaataaattgaatttcacctgccgaaaggtgcgaattgctccatgatatgtatttcccccgcaatgttattcaccgaattgttggctttattttgcagatgacttttttggatagtttagtagataacttttatctagcccttattgaatactaaaagttgatttttgttttgatagtttttattgtatttttacattgttgaataacatgttttactttttactaatga

SEQ ID NO: 23153 - DNA, 1507 bp, DROSOPHILA
cgcgctggtcagtgaaaggtgctatgatgggcgatttgttattgcaacaataaataagtaagaagaaaataaaattcgaaggcggtgctcgcgagaaattgcgacaggcggccagtgagacaaatttagccgagatagatagagattcttggtggagagcaaactgttgctgctgattctagtggtgctgccactgggcctgagccactgggtggctgtggtggcgctggtggcggtggcagtttttgtttggcgggcggcggtgccaaatgatgatcatgaccgcgtagagacgcaaataaatataattgaaacacgatcaaactataagcaaatacgccaattgtgtaactgcaacggtatcgtcaaaatgaacaaaacgattctgcactggagctacctgaatttcaaggatgtcccgatggatctgttcctctacgaggatctcgaggaagtctacctcaaggagaacttcatctcggtgatacccaaatggctgctgaacatcaccacactgaagtttattcatttggctggcaataatctgagtgaactgccggtggacatctatatgctggagaatctggagttcctggacgtatccaacaatgagctcaaggagctgccccccacactgggtctcctgttgaatctccagcagctgaatgtgtcggggaatcagctcaccgaactaccagtggagctaagtggtttgcgcaatctggagcacctgaacattggcaagaaccaatttcgacgcctgccggttcagctgagcgagtgcgtccgcctcaacgagctgaatgtgagcgacaacgaggcgcttgtccacatccccgagcgcatctccaacctgcccatgctgcagtccctcgccgcagatcgttgtgcgctcgtctacttgccggcagctctctccaagttcatgaaccatgtgcgcatcttccacaacaccgctatcaactacatacccatggtctatgagaggttctatcaaaacttttacgacaaccgccagaggaatactcccgtcgccgtgcatcgcaagggtttgttttgggtccgcgagctggagaccagcaccaggttgcttcttccggttggcacccgcacagtatttccggttccgtcggtggagaaccgcgtttcgctctacgatgactgtctgcacgctctgcagacgctgaaccgcttcacgcccgtatatgagaatgtagccatgcatcgtctgctcccagaaccgtacatcagttcccacatcaacaatggacccatcgcccgctgcacgaactccacctgctccagatgtctctatacctcgtactacttcatggttgtgaaaaggcgtggcagtacatccaaacagctcttcacctgcaacttctgcaccaaccgatgtggtctcctttggttgactagcaatgataagaagtactaccaattggcttggcgagtctcagatgatgacgacgatgatgaggaagaacacatggccagcaacaaatag

SEQ ID NO: 23154 - protein, 378 aa, DROSOPHILA
MNKTILHWSYLNFKDVPMDLFLYEDLEEVYLKENFISVIPKWLLNITTLKFIHLAGNNLSELPVDIYMLENLEFLDVSNNELKELPPTLGLLLNLQQLNVSGNQLTELPVELSGLRNLEHLNIGKNQFRRLPVQLSECVRLNELNVSDNEALVHIPERISNLPMLQSLAADRCALVYLPAALSKFMNHVRIFHNTAINYIPMVYERFYQNFYDNRQRNTPVAVHRKGLFWVRELETSTRLLLPVGTRTVFPVPSVENRVSLYDDCLHALQTLNRFTPVYENVAMHRLLPEPYISSHINNGPIARCTNSTCSRCLYTSYYFMVVKRRGSTSKQLFTCNFCTNRCGLLWLTSNDKKYYQLAWRVSDDDDDDEEEHMASNK

SEQ ID NO: 23155 - DNA, 6757 bp, DROSOPHILA
ggaccatgatgagaaataaaaaattatcggagaaatagttttcacgtctttattcttttgatctcagctagagacaaaaatctttcttatactgccctgatgtttacattatttcaggagcgagatctcccgcttgggatattgattgtatacaatgattgaatggcataagtatttggacaaattatttaaatgttataaattgaaaaaaaaaaagtcaactacaaaattatgacaaattaataaaaaatataccctcccttagcgtctatcaccttttgcagacgttttggtacagactgtaccaagctgtggatataatctattgaaatatccttccataaggtttgaatttccaaaatcgtttcttcgcgacttctagataagtttgcactcctttttttttaaaatatgaccagaggttttccattatgttgaggtctggactttgtgttacgccaacatctttcagtaacttcgtaatcagtttggccttatgacagggagcattatcctgctggagtatgaaggactctccaatcaatttatcaccaggggggaatgcatgattattaaggacatctaaatattttccttgattcatggttccatcaacaggaaccaaatctcccaagccagtgaaggctacgcatccccaaaacataacagaccctcctgaatgatttactctctgacatactggtgccacttttttccgatattggttcagtaatctaacaaaaatttatttttttgagcagtgaaactcaaaagagctttcatcgctccacaaaacatttttccagaatgatgcaggctggccaacatattttttggcaaagtcgaggcgctttaacttatttcgtggagtgattagtggtataactttgctaacatatgttccaaaatcggcttccttaagacgtctgcgaaccgttctttcactgatatcgatttctgctccttcttttagttctttggcaaccgatcggggagtttgtagaacattctgcttaaacatccgtacatatacccaactccttttgagttgttttacgtggtcggccactacgcgcaacgttttttggttgggtgtgtttttttatatttatttatttggtaatacaccgttgcccgtggaattttgtataaatcaatgatattttgtaccgaaataccagaattatacttaattattatttcattttttataaattcgctcagttcctttgttttccccatgtttaacaaatttatgaatgaaataaaagtacgtagtaacacgttatcaagaacaaatgttcaaatgatctaaaaaagtcaaaaatttgatattcatcgaacaacagatcaatgcgaactaattaaatgtgatgtctaaatacttttgtcaccgcccaaatcgttgtctgtctagctttcttatcagcagaaggaaaattgaaaaggtaaaaagcaaaacatacctctcgcgtgtaactgtaattgcactctttgttttatcatcaatagtttacttatttatttgactgtactatgaaaagcatagcccggcagttgcaagctaatggtgtcaaaatacttatgcccactagtgtatatgcacatatataagcctttgttattactattgattgttatgtactattaaagctcacgcctgttgttatgactacacgaattaaaattaaaaaattgtctgatactgaaaagtgaaaccctatagttagataattaggagtaatgcattgaatggtagaagaaaaaatgaagtatttgtccctttgctatttcaggaatcgcaaaaaaaaattaacttgaaacgtggtagtaatggttgggtatacatcaactaagctcaaacatccgagctttacacataaataaaactaaagggctaccgtggatcgtcatatccctatgtagagtattaggaatttccacagaaatttctctacctattatttttgccccttgatcgatccaacggtccgcaaatgttttttttttaaatttataaactttcgagggagtagctgaaaaatgaatgggaatcccacattcttttcaatagtgacgattttttagcgtagaaaatgggatattactaatgctgcctttgtctaaacacagtagcttaatactcgttgagtaaaggtatgtaatagattcatcgaaaaatatctagtcccagaatatagtctttaccactaggcgagtatctacgataactaaaagtaatcctgttttaaatttatacgtacaaatcaagaaatgtattcaaaaattatccatttattgattaaattagcaactcaaatatagaactaaaccctttatattatgtttaatggacactagatgagtcagtatgtcgcgatgtaattaatgtatctggtccgcttcaatggtgggagtgggaaacaaaactaagtacgcatcacgaaaattgtcacgcctataaaccgcttaaaactatcacgcacactttaaaaataaatgtatttatttcccaatagtactcccagtgtgataggtacggatatctgattgtactttattttgtttttgtaacatgataagtatcggatgtgttaacttcccgtgctgtaaacaaccacattctagacaaagtgttatccttttttcctacgcttaaatattttgtatatcctcccaaaggtttaggacactaactttagcaaatcaacttggaaatcttgcatataccgtcctggcctttgatgctgaaatgtgaggaccaatgtgaggcaagtatggactctcacaataatactccagtaaaaacattttaacatttccgatgtgctatccagggcccagttcacgcctgctgcagctagtgtatatgattgtatgatgaatatttcatcatccttcctaacccaataactgaaactactttctgttcgtcttggggcccttctaagattttgtggtttaactaggagttaaagtgggcatgtctacctgctgaaaccaacttccaatccgtctttcgaatgcgtttgcttatctaacctttttaatgtttagagtttccgagatctcctcagtggttatacatagacgaaaaaacagacggacatgtccagatcgactcggccagagatcttggattataatttatatactttaaatggttagaatagctttcttctttttatctttcagcgaatatctggaagttgtggaaattgataccataagactttaatttgagtttggcagagatatccaaatttgctatgacatgatccaatatttgatttgccaacacttgggcactggtcagggatttattacatgttacgtgtttattaagttttctgttaaacagatcaaggtaaagagttttagattgatgggaaatcacctgttaatatatatatttcctacgccgatgacttataaacacctggggttgtagacctttactatatgtcgttaaaaatgcattttactttacaattacttctatgctatttaaccgtatgttgtctaactatggacaaaaggaaaaaattttattattttaatttttcttggatttttccatagtagtttaagcatcaacatatttagtaagaattccctgttgaattttgttaataaatgaaaaaataacgggcactaaaagagaacgctatagtcgtgtttcccgacaatcagatacctgttatttagctggtgggattacaagaaagaattttctttattttttgaaaatcgatagaaataggcaataaaaaattaaaataaattaaaaatataaataaataaataaatttttcaagtgagggcgttgcagttttcgtctggttgtgagcttttttgggaaatcgatgaaaaatttaaaagacataaaaaaatatgaaaatatgaaaatattaaaaatattgaaaatattgagcttaattaagaatggatggtcggaaatgctttcttctatctgttacatactagccaatgaatctagtgtataacagcaagcttattcaccaaattactttgtatggtcttgaccaagcggtatttgagtgtcatggactactcaaataatgcaaaatacctctgtataagatattttggttttccaacattaaaaaaaaccctaaaaaataaataattaatatttatatattacatatattaatagttaagatcgatagagcaatatccctgaactcctacagttacagacttgtgtagaatgtagataaaaactaattttcaatctttggttttaaaaagtgttttgccccaataccataaataacgaattatggaatttttcatattttcgttgaaaacgacttcaatgatttcatttcaaattaaacttcctagcacttcagatttccctttcatcgcaccgtcaacatacaaaaatgcatggcttacacttaaggtaatatgaccttacattttgtgtacatccttcccttaaaaacttacttctaaacttaaaaataaaattatttttaagtatggggcgctaatctaataaggtttttgggtcttatgggggcgtccattcataatctgaactttatgcttttatagttttatagacaaacggacggacgtgcccaaatcgactgggtaaatggtcctgatcaggaatatgtatactttttacctgttcatatttaacataaaataaattgtataattttgtaatattttaataataaaagcttcatatttgtaggtaagctccgttttgctgtacggagtgcagattgtatccctgcacattgaaggtcaagagcgcctttgcttggcgcaaatttcaaatacattactaaaacaattcagttacaacgagatacacaacaggagagttgctcttggcattacttgtgtacaatgtacacccgtgcaattggaaatattgagaagagctggcgccatgccagtgagttcccgacgatgtggcatgattacccgcagggaagcggagcgtctatgcaaaagtttcttgggcgacaatacaccaccacgactacctgacgactttgcgtttaacgtccagcacaaatgtgcttggggctgccgcggatcctttctaccctcgcgttacaactcatcaagggctaagtgcattaagtgttcatattgcggaatgtttttctcgcccaataaatttatttttcactcacatcgcataacaactaatgacaggtacgttcagcctgatgcagcgaactttaattcctggcgtcgacacatgtctctgagtggaaatgattacgatgagaaaataattcatgcatgggaagatgtcaaggccatgtttaatggcggcacaagaaagcggcttgttggcagcagcattaaccctcgaagtcctggctcaccaacacaatccactgcggtaagttccggagttggcagcagttcctgtggctccccaacgagtttcgaaagagataccaatgaagtcgacgggaaatcggggtcctcgctcccacaacgctcgcagatcgacagccagtacaactacggaacagtagctgcagccgctgctgtagttggagtaacggcggtagcagctgcaacagtcggtgttccctttaacttacatggctcaaccgtcttatcacctttgcattcccttcgcaatgaacgtgatctttctataatgccaatttccaggaactttgtagtggactacatgtggcagcagaaggaccaacattatcagcagccttacgcaagaaaaatccctagcggcgacaacagcgactctagcctagacttcgattcctgggttaaaccagactcaaacaatccaataccgaatgcgaattcagttcgaacttcggataattgttcttttaatattaaaaacgagtcccattcctcaatttatggcattataaagaaccataagctctctggagtgccaaacagcgggcttaacctgtccgattataacattccttccattcttaattgctctgcgtttaaaccagtcgtcgcttcgacagcgattgtgtcaacttccctgtacacaagatccaatgaatcaacacgaactgactgtaacaacccagcacaatctacaagaaccacaacggttctaacgcacaatagtatttcagcctcttcccaccagatagtgggtcataagactttttcgccaattttaggaaaaattcattctaatccggagagtaagcaaaattttcatatagaagaaattttgttataataaacgtattttcagagaatagaatagtatctgttttcgcaagtagttcgactggaaatgcagatgataatgatgatgacgacgaagtagtagacatcgaaacaactgaagatgaagggaaattcacagttcaacacgctgacagccccaaaacacaatacgacgctattagcggaagcgacagtcccagccgttctccgtctacaagtacaaatatagatgtagagcaagatgtcgatgtagatattattacaacagacactgaggaccaactagagttaagtgtcggccggtactcaactgagaacacaagtcattccttatcatttttccaagctgagaaaatacaaatttcagatttatctcccaatacaaaaacgtcgagcggcgataatgaaactaacactttaaaggcaagtaacaatcttactttgaaatcagcaaaaaaacaaatgttacttttaaacagctttttaataagcgagaggtctttaaattgggttgaaacaaacactt

SEQ ID NO: 23156 - DNA, 1270 bp, DROSOPHILA
tagaacattctgcttaaacatccgtacatatacccaactccttttgagttgttttacgtggtcggccactacgcgcaacgttttttggttgggtgtgtttttttatatttatttatttgttcctttgttttccccatgtttaacaaatttatgaatgaaataaaagtacgtagtaacacgttatcaagaacaaatgttcaaatgatctaaaaaagtcaaaaatttgatattcatcgaacaacagatcaatgcgaactaattaaatgtgatgtctaaatacttttgtcaccgcccaaatcgttgtctgtctagctttcttatcagcagaaggaaaattgaaaaggtaagctccgttttgctgtacggagtgcagattgtatccctgcacattgaaggtcaagagcgcctttgcttggcgcaaatttcaaatacattactaaaacaattcagttacaacgagatacacaacaggagagttgctcttggcattacttgtgtacaatgtacacccgtgcaattggaaatattgagaagagctggcgccatgccagtgagttcccgacgatgtggcatgattacccgcagggaagcggagcgtctatgcaaaagtttcttgggcgacaatacaccaccacgactacctgacgactttgcgtttaacgtccagcacaaatgtgcttggggctgccgcggatcctttctaccctcgcgttacaactcatcaagggctaagtgcattaagtgttcatattgcggaatgtttttctcgcccaataaatttatttttcactcacatcgcataacaactaatgacaggtacgttcagcctgatgcagcgaactttaattcctggcgtcgacacatgtctctgagtggaaatgattacgatgagaaaataattcatgcatgggaagatgtcaaggccatgtttaatggcggcacaagaaagcggcttgttggcagcagcattaaccctcgaagtcctggctcaccaacacaatccactgcggtaagttccggagttggcagcagttcctgtggctccccaacgagtttcgaaagagataccaatgaagtcgacgggaaatcggggtcctcgctcccacaacgctcgcagatcgacagccagtacaactacggaacagtagctgcagccgctgctgtagttggagtaacggcggtagcagctgcaacagaactttgtagtggactacatgtggcagcagaaggaccaacattatcagcagccttacgcaagaaaaatccctag

SEQ ID NO: 23157 - protein, 241 aa, DROSOPHILA
MPVSSRRCGMITRREAERLCKSFLGDNTPPRLPDDFAFNVQHKCAWGCRGSFLPSRYNSSRAKCIKCSYCGMFFSPNKFIFHSHRITTNDRYVQPDAANFNSWRRHMSLSGNDYDEKIIHAWEDVKAMFNGGTRKRLVGSSINPRSPGSPTQSTAVSSGVGSSSCGSPTSFERDTNEVDGKSGSSLPQRSQIDSQYNYGTVAAAAAVVGVTAVAAATELCSGLHVAAEGPTLSAALRKKNP

SEQ ID NO: 23158 - DNA, 3847 bp, DROSOPHILA
cattttaaaacgcaagatcggtgctccggttttcaaattcgtaaggatttttcgatttgtaaaacggacacttttgtctggccgaaatgaaaagtatatgcccatttttatatcacgtaagatattatttaccaagggaaaaaatagtttactcagtggtctattgatttatattaattatttatattcattatttattttatatacaatttatttctgaccccattaaaaatttgacatacaaaattttgccgtcggcaaaaaaaattttcgatttggcatggggtcatgcgtgcgtcgactaaacttacttataaaatataaaagaattaattatcttaatttaaaagatggcctatagtgttcgtaagtaatgctatttaatttaattaattaaacggtcaaaatgcagtaaaaaattaaatgcgaacatcggaattaaaattgtgaaaaaggtgtccgctggaaaacagcttaaacagctgtttactgtacagaaaacactccgacagcaaaaaattttacgaaatcaaatcgaattcggaaacaaattacgattattcggtaatgcatgcctgattataatttcttgatttgttttatattaaatttaaaatttaatagtttaataatataaaaatattcttatttatattatatattatgagtatttcaaatgtaaataatcatataaactattttataaaacatcgacgttacataaataaaatttattttttgtttttcaagtgtaaataataatattaatcattttagaaaacattcggcacctttactcgacgctcatacgaacggacagatatgcttagtctggtatcgctttagcaccagtaggaaaaacctagaatttcttttcccacaaatgtcacaacttcaaaattccattgtttcacggtgtttctcttttaatgtttcaatattaatatatataatgccttaaggttcaataagaacaaaatattttcaatgtctatatcccactccaatttagcgtgatattcacaaagctaatcgcaacattgtgagcattaaaaattgttatatatgtatgtaagcgtcttgggattatattctcatgaaactcaacagtcatatatatggccttaaaatacgtatatatatatatatatattaatttttcaaagtgtgtgtttgcataagtggtgtgtactatttgtatattcattgtacaatttctcccgttcatataggagagtgttctgtttttaataattttggatatcttaactttttcgactttctgtaataagttagattacacagtgaactatagtccttagcaatggatacatcaaagattagtgccaggtatgtggattaaatattggtaaattttagtcaactttttcgatattattctcgcgtactgtttttttaaacttgtatatgtactaacattgttttaacaatctgtttcacattaggtactcgaaagtagacctgttagctctaagatatgaaggtaaaagtcgacagcgcccgcaatgttcaacacgacttgaattgcagacgctaggtttttggaaaattaatctgaacacagctgcgttaaccgtgtccagcgcctattctaatcaaaacaagaatcgactttctccagaagcagataactcgagcttaatttgttccaatagtagctcaataagttcacgtcgcgctatgagaaatcgagaacgggcaaacaactattaccagcgcttcgtacctaccgattctcttctaataagtggggaggataaagataaggatgcgctttctcatggacagccctataagttgaatatcatcgatcaccgtagcatatcatcttcacatttaatgccggcatttgcaaagaggcgttttgtcatatcgaaaggcagcaacagcgaggaaagcaacgaggggataaacacttgtgcaagcaagggcaaggcagccagttcgcctagccgtaagggtagcgagttggatactgctgagacatgtttgaattttgttcagccggatcacgaccaatgcatgtcatcttcacctacattttcaacatcccgccaagaaaggcggattggtagcggtcggctgttgccaagaagtgataattgggattacaaaaacgaaaagaccgtagaagccagcattgagaatgaaaaggaaacatctccaaatggatctggaagtacaagcagtcttaatcagcacaatcaaagccaacatcgttctcgaacattcagtggaaggttagttgaacgtgttcccgaagtcacagatcgtcgttttcaatatgactccaaaaagtcttttgatcgtcagggaattaataatcgacgcatttctggtaaggagcctttcagtactcaaagccgaagcaagcgtggcaattcctatctcattcacgaagaacctgaatggttcagtgcaggacctaaatcacagctagaaactattgatctacacgggtttgaagacctggaaaaaaacgaagagcgatccgtaactgaagataaaaataatcaaattcaacaacttgataaaaatttagacgcgcaagcaagcaaagatgaagcttcgatgagaaacagcaatgatagtttaaatttccgcgaagtcattccaagtgatgaaaagaagcacactgacgaaaatgtagtgacttctattcaaaactcaacagatctcggccatcccaataaaaacaaaccaattcagatgcagcccagtcagaatcctgaaagtgaatttaattttgatgcctttcttaatatgcatcccttggataattccgttttggtaaatatattgcaaaaactagattttaaggaatgagtacctaatccattcagacattacatggacaacttccgggttaccttttattgacggatcaataatagtattcaaataagctgtaaataatgatattaactcccgttactcaagtaaagggtaaagagttaaagggtatactagattcgttgaaaagtatgtaaactatatattcttgatcaggatcaatagccgagtcgaactggccatgtccgtctgtccgtatgaacgtcgagatctcaggaactaaaaaaactagtatgttgcaatttagcatacagattatagatacgaagacgcagcacaagcaaagacactagaataacaagatgcgtaacggccatacattggttttgcactatgcagccaattttttagtgacggccaaaattgctctctttccgctcgctcccgctgagagcataagaaatctaaaaatagaatttgcttgcttgtgtgagtaaaaacaagagacgagaacgcatatatgtgtgcgtgttgtgctagaagacgattttcgggaccgaaatcaattctgatcaaagaaacgaatttacattgtacatattagggtagtttttgtcaatttcgtagcaatatgataaaataaaataatttttaaaaattcgcgccctgactattatcattttaaagctttttaaatttgtttgttaaaatcgccgctcgaattagctaccgtttacacatttatatttatgtttaattccaatttgtctctcatctgacaattttttaaaagcgaaatatttttttttttaaacacttttaatgttaatgttacatcatattaagtcaaatgacataataaatatagtaaataattaaatatgcaattaactggttaattgcaaaagtcatatcaaagacactagaattattctagtgtctttgctttgttcatatcttgaagcacgaagtacggacacaagcactcaacaatcattgccttattaatttttcacacgccgcaagatgaata

SEQ ID NO: 23159 - DNA, 1272 bp, DROSOPHILA
actccaatttagcgtgatattcacaaagctaatcgcaacattgtgagcattaaaaattgttatatataagcagataactcgagcttaatttgttccaatagtagctcaataagttcacgtcgcgctatgagaaatcgagaacgggcaaacaactattaccagcgcttcgtacctaccgattctcttctaataagtggggaggataaagataaggatgcgctttctcatggacagccctataagttgaatatcatcgatcaccgtagcatatcatcttcacatttaatgccggcatttgcaaagaggcgttttgtcatatcgaaaggcagcaacagcgaggaaagcaacgaggggataaacacttgtgcaagcaagggcaaggcagccagttcgcctagccgtaagggtagcgagttggatactgctgagacatgtttgaattttgttcagccggatcacgaccaatgcatgtcatcttcacctacattttcaacatcccgccaagaaaggcggattggtagcggtcggctgttgccaagaagtgataattgggattacaaaaacgaaaagaccgtagaagccagcattgagaatgaaaaggaaacatctccaaatggatctggaagtacaagcagtcttaatcagcacaatcaaagccaacatcgttctcgaacattcagtggaaggttagttgaacgtgttcccgaagtcacagatcgtcgttttcaatatgactccaaaaagtcttttgatcgtcagggaattaataatcgacgcatttctggtaaggagcctttcagtactcaaagccgaagcaagcgtggcaattcctatctcattcacgaagaacctgaatggttcagtgcaggacctaaatcacagctagaaactattgatctacacgggtttgaagacctggaaaaaaacgaagagcgatccgtaactgaagataaaaataatcaaattcaacaacttgataaaaatttagacgcgcaagcaagcaaagatgaagcttcgatgagaaacagcaatgatagtttaaatttccgcgaagtcattccaagtgatgaaaagaagcacactgacgaaaatgtagtgacttctattcaaaactcaacagatctcggccatcccaataaaaacaaaccaattcagatgcagcccagtcagaatcctgaaagtgaatttaattttgatgcctttcttaatatgcatcccttggataattccgttttggtaaatatattgcaaaaactagattttaaggaatga

SEQ ID NO: 23160 - protein, 381 aa, DROSOPHILA
MRNRERANNYYQRFVPTDSLLISGEDKDKDALSHGQPYKLNIIDHRSISSSHLMPAFAKRRFVISKGSNSEESNEGINTCASKGKAASSPSRKGSELDTAETCLNFVQPDHDQCMSSSPTFSTSRQERRIGSGRLLPRSDNWDYKNEKTVEASIENEKETSPNGSGSTSSLNQHNQSQHRSRTFSGRLVERVPEVTDRRFQYDSKKSFDRQGINNRRISGKEPFSTQSRSKRGNSYLIHEEPEWFSAGPKSQLETIDLHGFEDLEKNEERSVTEDKNNQIQQLDKNLDAQASKDEASMRNSNDSLNFREVIPSDEKKHTDENVVTSIQNSTDLGHPNKNKPIQMQPSQNPESEFNFDAFLNMHPLDNSVLVNILQKLDFKE

SEQ ID NO: 23161 - DNA, 2977 bp, DROSOPHILA
tacagcaatcgcaaccacaatattttggacaattttacaacagcagcaactctgaggactatacatagatgtatacttaacggatataactacccatgcatatattatatataaatatatatataaacctactatatataacaagcataacaacaagtgttctttaagcagccgcgttgcctttcttcagctatgcttaatttaaaccccatttggaaaaaaaaaaaaagaaacaccagccacaatctatcgagaaggctttgacttacttggcccgcctgcatgtttgtttgcttaattaatattaaaacatttgtgtttgacatacagatgtccacaggcaaacgcatgaatataattacgtagctcgctgtcaattaaaatgtatcgatcgcctgaaggagcgcttcccgttcctttaaaatgtttattttaatttataattttttattctgcaaggagcttttttgttgtattcgaagacaaatcttttttttctattgcaaaattatgattttgaatttttttttgctccctggcgaaagttttccattttgttcgcttttaatttttatttaaatattttattttatcataacaagaaaaacaaaacaaaaaaaaaaaaaaagaaaattagaggaggaaatgaagagtattttttgtatttaagtgaaaattacaaataaaaaaaaaacacaaaaagacaattattgccttttacttaacatgttcatttcatgataagccttatcaaagatataaatcattaaatggcatcgtcttagctcgaataaagagctcctcttcgatttcaacataatggtcaacagttttattataaatctctccgagaattaacaattaacgcgtacactaaaacaaagaacaccatcagaattggccaattgttcggttcgagcgaagcacatttggcccaatcacagtaccagattgttgctagcctgagtaggattacggtcggcggatcgcggatgtctcgtcaggtgcgcatcgagggatccccggcggagtgctcgcgatgatgcggcagcttgggcggtagcttaaagggccgaatgaacttgatgttcgtcttgaggcaatcgggcagcaaattgggtggcagcaggcagtgcaggaagaggtgcgtcagatagccggtgatgccccagatgcgataatggtctacaacaaatactggaccgctgtagccgctacgaaactgtgtgtgcctggtggccttgggcagcattagcgaagtgagcggcacactaaacgcctcctccacctcctcccagttgagacgcagctcggagaggctaaagtccggcaccacgcccaccactggcacaatcgacgaggtcctcggcagctgtagctgcttggcctcgccccacacctggatgcgatggcgcggtaggccgatctcctcctctgtttcgcgcagcgcacagtccacgtagctcgagtcgtgatcatcgcgccttccgcccggaaaggagatctgaaagctgtggctgcgcaggtgtcgcgatcgtcgggtgtatagtagggatatttcattcctgaaagagcaaagcgatgcagcttattcaaatggtcgcattcctagtttaactggctatactgacgtgccgcgctcctggcagagggcgataagaaccgcggatgtctgcttttcccggcgactgggcgtgagcgccttgggacgcgggaatgccggcaggctgcgcatcttctccatgcacctgcgctgcgattccggtccgaggagctggtcggcagtgatcgactggtcgacatccggcggtttcgaggacgtggcggatgcggcgcttgagcaggaggtgaccagatggcggttcaagtgcaacagtagctgcggcactgtgcgactcgcctgggcaatcagggacatcgtttttggctatagaacaccgaatcgagcaatgatgtaaacaaatgcgaacgcaacgaactttggaattggacaaaaaaccaaaacagagccgttaacagccgatagtgtactgttgtgcgccacagtgagctgttagcggttaacagtgcggtgaactcaaccactttcaaaataccatattccaactaagcaaaaaaccgttacactttaaagtttgaagttttttgtgccattttcctaatcaacgacattacagagtattcattttttaaaacgttttattaaaatttctcgtcgcttggggcttggctgcacaaaaaaatatatatttatatatctgtatataaatatacatattgcatttagttaatagtaaacgcttgtgtgttaatgctaaatgttgttccttaggtaatcggtatgcaaaatgttagattccttgtgagttcctttaatttgtaatcaactggttttgtgtatgtatcgcttgtgtgaaagcaatggcaacggcataattgtcgactttgggctgaaatcgcatctgtgtgtccaggtgaaggtactgcttgcaacttacaactattaaacgttactttcgttattgccggcagcctgtttggctgccaatcctccggcggccacgcgcgtgcgggtaaatttactaatggacgtgggcgatgcggaagcggaggcgacagcggcagcagcgtccaaacggagactattcccggccggatagacgcagcccttggcccgacgtcgtcccgccggagagccggtacacctatcaccgatttgtactaggctaggcagatcctcgctccgggagaagacgaactcctcggacgagagccgtttcctcacccggccaccaaccacatccggtcgtttgccattgctgagcggcgatggtgaggctggggccaccaaagccggtgtctctatcgcgctgccaccgccaagaacgggaaaatgcgattccaacacgccgggccgtatgagtatctcctccaggtggttgccagacgccccagtgccaccgttctgccgagccgg

SEQ ID NO: 23162 - DNA, 911 bp, DROSOPHILA
tcgttgcgttcgcatttgtttacatcattgctcgattcggtgttctatagccaaaaacgatgtccctgattgcccaggcgagtcgcacagtgccgcagctactgttgcacttgaaccgccatctggtcacctcctgctcaagcgccgcatccgccacgtcctcgaaaccgccggatgtcgaccagtcgatcactgccgaccagctcctcggaccggaatcgcagcgcaggtgcatggagaagatgcgcagcctgccggcattcccgcgtcccaaggcgctcacgcccagtcgccgggaaaagcagacatccgcggttcttatcgccctctgccaggagcgcggcacgaatgaaatatccctactatacacccgacgatcgcgacacctgcgcagccacagctttcagatctcctttccgggcggaaggcgcgatgatcacgactcgagctacgtggactgtgcgctgcgcgaaacagaggaggagatcggcctaccgcgccatcgcatccaggtgtggggcgaggccaagcagctacagctgccgaggacctcgtcgattgtgccagtggtgggcgtggtgccggactttagcctctccgagctgcgtctcaactgggaggaggtggaggaggcgtttagtgtgccgctcacttcgctaatgctgcccaaggccaccaggcacacacagtttcgtagcggctacagcggtccagtatttgttgtagaccattatcgcatctggggcatcaccggctatctgacgcacctcttcctgcactgcctgctgccacccaatttgctgcccgattgcctcaagacgaacatcaagttcattcggccctttaagctaccgcccaagctgccgcatcatcgcgagcactccgccggggatccctcgatgcgcacctga

SEQ ID NO: 23163 - protein, 283 aa, DROSOPHILA
MSLIAQASRTVPQLLLHLNRHLVTSCSSAASATSSKPPDVDQSITADQLLGPESQRRCMEKMRSLPAFPRPKALTPSRREKQTSAVLIALCQERGTNEISLLYTRRSRHLRSHSFQISFPGGRRDDHDSSYVDCALRETEEEIGLPRHRIQVWGEAKQLQLPRTSSIVPVVGVVPDFSLSELRLNWEEVEEAFSVPLTSLMLPKATRHTQFRSGYSGPVFVVDHYRIWGITGYLTHLFLHCLLPPNLLPDCLKTNIKFIRPFKLPPKLPHHREHSAGDPSMRT

SEQ ID NO: 23164 - DNA, 3849 bp, DROSOPHILA
ggcattttaaaacgcaagatcggtgctccggttttcaaattcgtaaggatttttcgatttgtaaaacggacacttttgtctggccgaaatgaaaagtatatgcccatttttatatcacgtaagatattatttaccaagggaaaaaatagtttactcagtggtctattgatttatattaattatttatattcattatttattttatatacaatttatttctgaccccattaaaaatttgacatacaaaattttgccgtcggcaaaaaaaattttcgatttggcatggggtcatgcgtgcgtcgactaaacttacttataaaatataaaagaattaattatcttaatttaaaagatggcctatagtgttcgtaagtaatgctatttaatttaattaattaaacggtcaaaatgcagtaaaaaattaaatgcgaacatcggaattaaaattgtgaaaaaggtgtccgctggaaaacagcttaaacagctgtttactgtacagaaaacactccgacagcaaaaaattttacgaaatcaaatcgaattcggaaacaaattacgattattcggtaatgcatgcctgattataatttcttgatttgttttatattaaatttaaaatttaatagtttaataatataaaaatattcttatttatattatatattatgagtatttcaaatgtaaataatcatataaactattttataaaacatcgacgttacataaataaaatttattttttgtttttcaagtgtaaataataatattaatcattttagaaaacattcggcacctttactcgacgctcatacgaacggacagatatgcttagtctggtatcgctttagcaccagtaggaaaaacctagaatttcttttcccacaaatgtcacaacttcaaaattccattgtttcacggtgtttctcttttaatgtttcaatattaatatatataatgccttaaggttcaataagaacaaaatattttcaatgtctatatcccactccaatttagcgtgatattcacaaagctaatcgcaacattgtgagcattaaaaattgttatatatgtatgtaagcgtcttgggattatattctcatgaaactcaacagtcatatatatggccttaaaatacgtatatatatatatatatattaatttttcaaagtgtgtgtttgcataagtggtgtgtactatttgtatattcattgtacaatttctcccgttcatataggagagtgttctgtttttaataattttggatatcttaactttttcgactttctgtaataagttagattacacagtgaactatagtccttagcaatggatacatcaaagattagtgccaggtatgtggattaaatattggtaaattttagtcaactttttcgatattattctcgcgtactgtttttttaaacttgtatatgtactaacattgttttaacaatctgtttcacattaggtactcgaaagtagacctgttagctctaagatatgaaggtaaaagtcgacagcgcccgcaatgttcaacacgacttgaattgcagacgctaggtttttggaaaattaatctgaacacagctgcgttaaccgtgtccagcgcctattctaatcaaaacaagaatcgactttctccagaagcagataactcgagcttaatttgttccaatagtagctcaataagttcacgtcgcgctatgagaaatcgagaacgggcaaacaactattaccagcgcttcgtacctaccgattctcttctaataagtggggaggataaagataaggatgcgctttctcatggacagccctataagttgaatatcatcgatcaccgtagcatatcatcttcacatttaatgccggcatttgcaaagaggcgttttgtcatatcgaaaggcagcaacagcgaggaaagcaacgaggggataaacacttgtgcaagcaagggcaaggcagccagttcgcctagccgtaagggtagcgagttggatactgctgagacatgtttgaattttgttcagccggatcacgaccaatgcatgtcatcttcacctacattttcaacatcccgccaagaaaggcggattggtagcggtcggctgttgccaagaagtgataattgggattacaaaaacgaaaagaccgtagaagccagcattgagaatgaaaaggaaacatctccaaatggatctggaagtacaagcagtcttaatcagcacaatcaaagccaacatcgttctcgaacattcagtggaaggttagttgaacgtgttcccgaagtcacagatcgtcgttttcaatatgactccaaaaagtcttttgatcgtcagggaattaataatcgacgcatttctggtaaggagcctttcagtactcaaagccgaagcaagcgtggcaattcctatctcattcacgaagaacctgaatggttcagtgcaggacctaaatcacagctagaaactattgatctacacgggtttgaagacctggaaaaaaacgaagagcgatccgtaactgaagataaaaataatcaaattcaacaacttgataaaaatttagacgcgcaagcaagcaaagatgaagcttcgatgagaaacagcaatgatagtttaaatttccgcgaagtcattccaagtgatgaaaagaagcacactgacgaaaatgtagtgacttctattcaaaactcaacagatctcggccatcccaataaaaacaaaccaattcagatgcagcccagtcagaatcctgaaagtgaatttaattttgatgcctttcttaatatgcatcccttggataattccgttttggtaaatatattgcaaaaactagattttaaggaatgagtacctaatccattcagacattacatggacaacttccgggttaccttttattgacggatcaataatagtattcaaataagctgtaaataatgatattaactcccgttactcaagtaaagggtaaagagttaaagggtatactagattcgttgaaaagtatgtaaactatatattcttgatcaggatcaatagccgagtcgaactggccatgtccgtctgtccgtatgaacgtcgagatctcaggaactaaaaaaactagtatgttgcaatttagcatacagattatagatacgaagacgcagcacaagcaaagacactagaataacaagatgcgtaacggccatacattggttttgcactatgcagccaattttttagtgacggccaaaattgctctctttccgctcgctcccgctgagagcataagaaatctaaaaatagaatttgcttgcttgtgtgagtaaaaacaagagacgagaacgcatatatgtgtgcgtgttgtgctagaagacgattttcgggaccgaaatcaattctgatcaaagaaacgaatttacattgtacatattagggtagtttttgtcaatttcgtagcaatatgataaaataaaataatttttaaaaattcgcgccctgactattatcattttaaagctttttaaatttgtttgttaaaatcgccgctcgaattagctaccgtttacacatttatatttatgtttaattccaatttgtctctcatctgacaattttttaaaagcgaaatatttttttttttaaacacttttaatgttaatgttacatcatattaagtcaaatgacataataaatatagtaaataattaaatatgcaattaactggttaattgcaaaagtcatatcaaagacactagaattattctagtgtctttgctttgttcatatcttgaagcacgaagtacggacacaagcactcaacaatcattgccttattaatttttcacacgccgcaagatgaata

SEQ ID NO: 23165 - DNA, 1733 bp, DROSOPHILA
ccactccaatttagcgtgatattcacaaagctaatcgcaacattgtgagcattaaaaattgttatatatgtatgtaagcgtcttgggattatattctcatgaaactcaacagtcatatatatggccttaaaatacgtatatatatatatatatattaatttttcaaagtgtgtgtttgcataagtggtgtgtactatttgtatattcattgtacaatttctcccgttcatataggagagtgttctgtttttaataattttggatatcttaactttttcgactttctgtaataagttagattacacagtgaactatagtccttagcaatggatacatcaaagattagtgccaggtactcgaaagtagacctgttagctctaagatatgaaggtaaaagtcgacagcgcccgcaatgttcaacacgacttgaattgcagacgctaggtttttggaaaattaatctgaacacagctgcgttaaccgtgtccagcgcctattctaatcaaaacaagaatcgactttctccagaagcagataactcgagcttaatttgttccaatagtagctcaataagttcacgtcgcgctatgagaaatcgagaacgggcaaacaactattaccagcgcttcgtacctaccgattctcttctaataagtggggaggataaagataaggatgcgctttctcatggacagccctataagttgaatatcatcgatcaccgtagcatatcatcttcacatttaatgccggcatttgcaaagaggcgttttgtcatatcgaaaggcagcaacagcgaggaaagcaacgaggggataaacacttgtgcaagcaagggcaaggcagccagttcgcctagccgtaagggtagcgagttggatactgctgagacatgtttgaattttgttcagccggatcacgaccaatgcatgtcatcttcacctacattttcaacatcccgccaagaaaggcggattggtagcggtcggctgttgccaagaagtgataattgggattacaaaaacgaaaagaccgtagaagccagcattgagaatgaaaaggaaacatctccaaatggatctggaagtacaagcagtcttaatcagcacaatcaaagccaacatcgttctcgaacattcagtggaaggttagttgaacgtgttcccgaagtcacagatcgtcgttttcaatatgactccaaaaagtcttttgatcgtcagggaattaataatcgacgcatttctggtaaggagcctttcagtactcaaagccgaagcaagcgtggcaattcctatctcattcacgaagaacctgaatggttcagtgcaggacctaaatcacagctagaaactattgatctacacgggtttgaagacctggaaaaaaacgaagagcgatccgtaactgaagataaaaataatcaaattcaacaacttgataaaaatttagacgcgcaagcaagcaaagatgaagcttcgatgagaaacagcaatgatagtttaaatttccgcgaagtcattccaagtgatgaaaagaagcacactgacgaaaatgtagtgacttctattcaaaactcaacagatctcggccatcccaataaaaacaaaccaattcagatgcagcccagtcagaatcctgaaagtgaatttaattttgatgcctttcttaatatgcatcccttggataattccgttttggtaaatatattgcaaaaactagattttaaggaatga

SEQ ID NO: 23166 - protein, 381 aa, DROSOPHILA; identical to SEQ ID NO: 23160

SEQ ID NO: 23167 - DNA, 3960 bp, DROSOPHILA
cagtagtctattgatttatattcattagttattttatatacaatttatttctgaccccatcaaaaatttgatatacaaaattttgctgtcggcaacaaaaattttcgatttggcattttaaaacgcaagatcggtgctccggttttcaaattcgtaaggatttttcgatttgtaaaacggacacttttgtctggccgaaatgaaaagtatatgcccatttttatatcacgtaagatattatttaccaagggaaaaaatagtttactcagtggtctattgatttatattaattatttatattcattatttattttatatacaatttatttctgaccccattaaaaatttgacatacaaaattttgccgtcggcaaaaaaaattttcgatttggcatggggtcatgcgtgcgtcgactaaacttacttataaaatataaaagaattaattatcttaatttaaaagatggcctatagtgttcgtaagtaatgctatttaatttaattaattaaacggtcaaaatgcagtaaaaaattaaatgcgaacatcggaattaaaattgtgaaaaaggtgtccgctggaaaacagcttaaacagctgtttactgtacagaaaacactccgacagcaaaaaattttacgaaatcaaatcgaattcggaaacaaattacgattattcggtaatgcatgcctgattataatttcttgatttgttttatattaaatttaaaatttaatagtttaataatataaaaatattcttatttatattatatattatgagtatttcaaatgtaaataatcatataaactattttataaaacatcgacgttacataaataaaatttattttttgtttttcaagtgtaaataataatattaatcattttagaaaacattcggcacctttactcgacgctcatacgaacggacagatatgcttagtctggtatcgctttagcaccagtaggaaaaacctagaatttcttttcccacaaatgtcacaacttcaaaattccattgtttcacggtgtttctcttttaatgtttcaatattaatatatataatgccttaaggttcaataagaacaaaatattttcaatgtctatatcccactccaatttagcgtgatattcacaaagctaatcgcaacattgtgagcattaaaaattgttatatatgtatgtaagcgtcttgggattatattctcatgaaactcaacagtcatatatatggccttaaaatacgtatatatatatatatatattaatttttcaaagtgtgtgtttgcataagtggtgtgtactatttgtatattcattgtacaatttctcccgttcatataggagagtgttctgtttttaataattttggatatcttaactttttcgactttctgtaataagttagattacacagtgaactatagtccttagcaatggatacatcaaagattagtgccaggtatgtggattaaatattggtaaattttagtcaactttttcgatattattctcgcgtactgtttttttaaacttgtatatgtactaacattgttttaacaatctgtttcacattaggtactcgaaagtagacctgttagctctaagatatgaaggtaaaagtcgacagcgcccgcaatgttcaacacgacttgaattgcagacgctaggtttttggaaaattaatctgaacacagctgcgttaaccgtgtccagcgcctattctaatcaaaacaagaatcgactttctccagaagcagataactcgagcttaatttgttccaatagtagctcaataagttcacgtcgcgctatgagaaatcgagaacgggcaaacaactattaccagcgcttcgtacctaccgattctcttctaataagtggggaggataaagataaggatgcgctttctcatggacagccctataagttgaatatcatcgatcaccgtagcatatcatcttcacatttaatgccggcatttgcaaagaggcgttttgtcatatcgaaaggcagcaacagcgaggaaagcaacgaggggataaacacttgtgcaagcaagggcaaggcagccagttcgcctagccgtaagggtagcgagttggatactgctgagacatgtttgaattttgttcagccggatcacgaccaatgcatgtcatcttcacctacattttcaacatcccgccaagaaaggcggattggtagcggtcggctgttgccaagaagtgataattgggattacaaaaacgaaaagaccgtagaagccagcattgagaatgaaaaggaaacatctccaaatggatctggaagtacaagcagtcttaatcagcacaatcaaagccaacatcgttctcgaacattcagtggaaggttagttgaacgtgttcccgaagtcacagatcgtcgttttcaatatgactccaaaaagtcttttgatcgtcagggaattaataatcgacgcatttctggtaaggagcctttcagtactcaaagccgaagcaagcgtggcaattcctatctcattcacgaagaacctgaatggttcagtgcaggacctaaatcacagctagaaactattgatctacacgggtttgaagacctggaaaaaaacgaagagcgatccgtaactgaagataaaaataatcaaattcaacaacttgataaaaatttagacgcgcaagcaagcaaagatgaagcttcgatgagaaacagcaatgatagtttaaatttccgcgaagtcattccaagtgatgaaaagaagcacactgacgaaaatgtagtgacttctattcaaaactcaacagatctcggccatcccaataaaaacaaaccaattcagatgcagcccagtcagaatcctgaaagtgaatttaattttgatgcctttcttaatatgcatcccttggataattccgttttggtaaatatattgcaaaaactagattttaaggaatgagtacctaatccattcagacattacatggacaacttccgggttaccttttattgacggatcaataatagtattcaaataagctgtaaataatgatattaactcccgttactcaagtaaagggtaaagagttaaagggtatactagattcgttgaaaagtatgtaaactatatattcttgatcaggatcaatagccgagtcgaactggccatgtccgtctgtccgtatgaacgtcgagatctcaggaactaaaaaaactagtatgttgcaatttagcatacagattatagatacgaagacgcagcacaagcaaagacactagaataacaagatgcgtaacggccatacattggttttgcactatgcagccaattttttagtgacggccaaaattgctctctttccgctcgctcccgctgagagcataagaaatctaaaaatagaatttgcttgcttgtgtgagtaaaaacaagagacgagaacgcatatatgtgtgcgtgttgtgctagaagacgattttcgggaccgaaatcaattctgatcaaagaaacgaatttacattgtacatattagggtagtttttgtcaatttcgtagcaatatgataaaataaaataatttttaaaaattcgcgccctgactattatcattttaaagctttttaaatttgtttgttaaaatcgccgctcgaattagctaccgtttacacatttatatttatgtttaattccaatttgtctctcatctgacaattttttaaaagcgaaatatttttttttttaaacacttttaatgttaatgttacatcatattaagtcaaatgacataataaatatagtaaataattaaatatgcaattaactggttaattgcaaaagtcatatcaaagacactagaattattctagtgtctttgctttgttcatatcttgaagcacgaagtacggacacaagcactcaacaatcattgccttattaatttttcacacgccgcaagatgaata

SEQ ID NO: 23168 - DNA, 1654 bp, DROSOPHILA
cacaacttcaaaattccattgtttcacggtgtttctcttttaatgtttcaatattaatatatataatgccttaaggttcaataagaacaaaatattttcaatgtctatatcccactccaatttagcgtgatattcacaaagctaatcgcaacattgagagtgttctgtttttaataattttggatatcttaactttttcgactttctgtaataagttagattacacagtgaactatagtccttagcaatggatacatcaaagattagtgccaggtactcgaaagtagacctgttagctctaagatatgaaggtaaaagtcgacagcgcccgcaatgttcaacacgacttgaattgcagacgctaggtttttggaaaattaatctgaacacagctgcgttaaccgtgtccagcgcctattctaatcaaaacaagaatcgactttctccagaagcagataactcgagcttaatttgttccaatagtagctcaataagttcacgtcgcgctatgagaaatcgagaacgggcaaacaactattaccagcgcttcgtacctaccgattctcttctaataagtggggaggataaagataaggatgcgctttctcatggacagccctataagttgaatatcatcgatcaccgtagcatatcatcttcacatttaatgccggcatttgcaaagaggcgttttgtcatatcgaaaggcagcaacagcgaggaaagcaacgaggggataaacacttgtgcaagcaagggcaaggcagccagttcgcctagccgtaagggtagcgagttggatactgctgagacatgtttgaattttgttcagccggatcacgaccaatgcatgtcatcttcacctacattttcaacatcccgccaagaaaggcggattggtagcggtcggctgttgccaagaagtgataattgggattacaaaaacgaaaagaccgtagaagccagcattgagaatgaaaaggaaacatctccaaatggatctggaagtacaagcagtcttaatcagcacaatcaaagccaacatcgttctcgaacattcagtggaaggttagttgaacgtgttcccgaagtcacagatcgtcgttttcaatatgactccaaaaagtcttttgatcgtcagggaattaataatcgacgcatttctggtaaggagcctttcagtactcaaagccgaagcaagcgtggcaattcctatctcattcacgaagaacctgaatggttcagtgcaggacctaaatcacagctagaaactattgatctacacgggtttgaagacctggaaaaaaacgaagagcgatccgtaactgaagataaaaataatcaaattcaacaacttgataaaaatttagacgcgcaagcaagcaaagatgaagcttcgatgagaaacagcaatgatagtttaaatttccgcgaagtcattccaagtgatgaaaagaagcacactgacgaaaatgtagtgacttctattcaaaactcaacagatctcggccatcccaataaaaacaaaccaattcagatgcagcccagtcagaatcctgaaagtgaatttaattttgatgcctttcttaatatgcatcccttggataattccgttttggtaaatatattgcaaaaactagattttaaggaatga

SEQ ID NO: 23169 - protein, 381 aa, DROSOPHILA; identical to SEQ ID NO: 23160

SEQ ID NO: 23170 - DNA, 3809 bp, DROSOPHILA
tctgaaagctgtggctgcgcaggtgtcgcgatcgtcgggtgtatagtagggatatttcattcctgaaagagcaaagcgatgcagcttattcaaatggtcgcattcctagtttaactggctatactgacgtgccgcgctcctggcagagggcgataagaaccgcggatgtctgcttttcccggcgactgggcgtgagcgccttgggacgcgggaatgccggcaggctgcgcatcttctccatgcacctgcgctgcgattccggtccgaggagctggtcggcagtgatcgactggtcgacatccggcggtttcgaggacgtggcggatgcggcgcttgagcaggaggtgaccagatggcggttcaagtgcaacagtagctgcggcactgtgcgactcgcctgggcaatcagggacatcgtttttggctatagaacaccgaatcgagcaatgatgtaaacaaatgcgaacgcaacgaactttggaattggacaaaaaaccaaaacagagccgttaacagccgatagtgtactgttgtgcgccacagtgagctgttagcggttaacagtgcggtgaactcaaccactttcaaaataccatattccaactaagcaaaaaaccgttacactttaaagtttgaagttttttgtgccattttcctaatcaacgacattacagagtattcattttttaaaacgttttattaaaatttctcgtcgcttggggcttggctgcacaaaaaaatatatatttatatatctgtatataaatatacatattgcatttagttaatagtaaacgcttgtgtgttaatgctaaatgttgttccttaggtaatcggtatgcaaaatgttagattccttgtgagttcctttaatttgtaatcaactggttttgtgtatgtatcgcttgtgtgaaagcaatggcaacggcataattgtcgactttgggctgaaatcgcatctgtgtgtccaggtgaaggtactgcttgcaacttacaactattaaacgttactttcgttattgccggcagcctgtttggctgccaatcctccggcggccacgcgcgtgcgggtaaatttactaatggacgtgggcgatgcggaagcggaggcgacagcggcagcagcgtccaaacggagactattcccggccggatagacgcagcccttggcccgacgtcgtcccgccggagagccggtacacctatcaccgatttgtactaggctaggcagatcctcgctccgggagaagacgaactcctcggacgagagccgtttcctcacccggccaccaaccacatccggtcgtttgccattgctgagcggcgatggtgaggctggggccaccaaagccggtgtctctatcgcgctgccaccgccaagaacgggaaaatgcgattccaacacgccgggccgtatgagtatctcctccaggtggttgccagacgccccagtgccaccgttctgccgagccggtgtggcaaactgttccagcgatgagctggcactgtagaaactagtatctgtggagcccaatcccatggcggcaccaccacaacccccggaaatctctgtgccgcacttcccgtgctccgagcgagtacagcagccacgctggacatcccgatcgcagggacagtgtggacacagtcgcaggcagtccgcgtccgtcaggatatcgctatcgctgaatgtcaacttcttggcgggctgcgtttgcctcgtcgcatcgggatccccgtccagcggatcggcggacttggaactctgcaccgcattggcaccgtgcggcagctgcaatctctgtaggctgtgggccgacgcagactcaaagctatcgtcgctggagtccagactatgcgccgctggcgattgatccggaaagatgcgcggaaaggtgatgaacacacgacccagccgtttgtactgatccagatttctggtgtcctctgcacagccagcaagattctcgctgaacttgggcgcccgcctcataaccttgggcgtatgcagctgcgactcgaagatgtcctcgagtggcaccttcggaccgccaacgcccacgcccatgtgctgcagatagcgctcaatgctgttggccaggctaatgggtacgctggttcgcgaggagacgctcgagatctcggacagcgtttcgggactggccagtggggccaggccataccagtcgtcgtgcagtaaatccactccaggtaccgcaccagcatccgaagctctacgaagggcctggacttgggccagcggcagagaacgtggctttttctcggagtgttgacgaccgagcatggacctctccggcagcgttggcggcggagtgagcgccatatcgaaggccaccgccttgagccgttgtggtatggcaatctcctcagcatccggttccggattaacaatcactgtagccgtcgtctcagcgctaatcagcgaggggctttgccgcagcgccactgtggccaggctgtcgtccagagcacttgatatgtcatacggcgtggttgccgagctcaggagcgacgaggccgccgacgtgagccgcggatttggctgtacaccggactggtgtggtgtcgatccgttggtgaatgacgtctccaaacaaagcttgtgctgggcggtcggcgtcaggacgaggcagttgctcaggttcgtgtaggaactttgcgagagtcgcttgcagtgttgcgactgcgacatcgagttctgcatctggccgggatcggttcgcgtctcgaatctcatggcatccgtcggcgcactgtggccgctacaatgcggcggttcaaggtccatatcgtgcgctgcttcgttcgatccggtggagaatgcattcgaggtctggcgctgcggcttgcgtggcccactcgttgttacaacctaaaggcgagtagcgagagtggtggggatcagtgtttgattgtacttgatcatttaacttagatctatgttgtggtcctactgaaatgttaaaccgattgattgattgataggtctgatttcgtaatatatatatattttgttttcttcttggttggcatttatacccttttttttcgactgcagttattttctctaatctataatcgaaacagatcaagcaatcaattaatcctgatcttcacaactggtggttacatataaatgcagaaagagacgagtagatgttgcgagcgagagtgggatgcatgtatgtacagtttcacagatgagcgagagtggaaagagacagtagcagatgcagttagcgagtgaagtggagtgactaagtacagttacgtcaaagttaagcgagtaggatgtgggtagaattgctaatggttcgatagttcgctgtggtgaggtgtggtttgagggtgggtgggagcttacgggtgcgagacacaatatcgatattggttttcgttgtacatacacagcgagtacgattacatttagagagtttagtttacaaaattggataggttgttggtttttttttttattgtttgaggttaggttgagagcgggagagagaaatatacatagagagagatagagagagagacttgtaattcggttgacatatttaaaaattttgtttggttttaacgagagcaaaatggaaagttggtttagtcttttgtttaatgataacaaatttatatagaaggcgggcggctgtacctggtatctgtattttgtgttgtcgtagttgttgttgtaactgttgtagttgtagttattgtcgtgttatcattacgtctacgagtggtacatgcctttacggttcgatctctacaagacacgacctgtg

SEQ ID NO: 23171 - DNA, 1809 bp, DROSOPHILA
atggaccttgaaccgccgcattgtagcggccacagtgcgccgacggatgccatgagattcgagacgcgaaccgatcccggccagatgcagaactcgatgtcgcagtcgcaacactgcaagcgactctcgcaaagttcctacacgaacctgagcaactgcctcgtcctgacgccgaccgcccagcacaagctttgtttggagacgtcattcaccaacggatcgacaccacaccagtccggtgtacagccaaatccgcggctcacgtcggcggcctcgtcgctcctgagctcggcaaccacgccgtatgacatatcaagtgctctggacgacagcctggccacagtggcgctgcggcaaagcccctcgctgattagcgctgagacgacggctacagtgattgttaatccggaaccggatgctgaggagattgccataccacaacggctcaaggcggtggccttcgatatggcgctcactccgccgccaacgctgccggagaggtccatgctcggtcgtcaacactccgagaaaaagccacgttctctgccgctggcccaagtccaggcccttcgtagagcttcggatgctggtgcggtacctggagtggatttactgcacgacgactggtatggcctggccccactggccagtcccgaaacgctgtccgagatctcgagcgtctcctcgcgaaccagcgtacccattagcctggccaacagcattgagcgctatctgcagcacatgggcgtgggcgttggcggtccgaaggtgccactcgaggacatcttcgagtcgcagctgcatacgcccaaggttatgaggcgggcgcccaagttcagcgagaatcttgctggctgtgcagaggacaccagaaatctggatcagtacaaacggctgggtcgtgtgttcatcacctttccgcgcatctttccggatcaatcgccagcggcgcatagtctggactccagcgacgatagctttgagtctgcgtcggcccacagcctacagagattgcagctgccgcacggtgccaatgcggtgcagagttccaagtccgccgatccgctggacggggatcccgatgcgacgaggcaaacgcagcccgccaagaagttgacattcagcgatagcgatatcctgacggacgcggactgcctgcgactgtgtccacactgtccctgcgatcgggatgtccagcgtggctgctgtactcgctcggagcacgggaagtgcggcacagagatttccgggggttgtggtggtgccgccatgggattgggctccacagatactagtttctacagtgccagctcatcgctggaacagtttgccacaccggctcggcagaacggtggcactggggcgtctggcaaccacctggaggagatactcatacggcccggcgtgttggaatcgcattttcccgttcttggcggtggcagcgcgatagagacaccggctttggtggccccagcctcaccatcgccgctcagcaatggcaaacgaccggatgtggttggtggccgggtgaggaaacggctctcgtccgaggagttcgtcttctcccggagcgaggatctgcctagcctagtacaaatcggtgataggtgtaccggctctccggcgggacgacgtcgggccaagggctgcgtctatccggccgggaatagtctccgtttggacgctgctgccgctgtcgcctccgcttccgcatcgcccacgtccattagtaaatttacccgcacgcgcgtggccgccggaggattggcagccaaacaggctgccggcaataacgaaagtaacgtttaa

SEQ ID NO: 23172 - protein, 602 aa, DROSOPHILA
MDLEPPHCSGHSAPTDAMRFETRTDPGQMQNSMSQSQHCKRLSQSSYTNLSNCLVLTPTAQHKLCLETSFTNGSTPHQSGVQPNPRLTSAASSLLSSATTPYDISSALDDSLATVALRQSPSLISAETTATVIVNPEPDAEEIAIPQRLKAVAFDMALTPPPTLPERSMLGRQHSEKKPRSLPLAQVQALRRASDAGAVPGVDLLHDDWYGLAPLASPETLSEISSVSSRTSVPISLANSIERYLQHMGVGVGGPKVPLEDIFESQLHTPKVMRRAPKFSENLAGCAEDTRNLDQYKRLGRVFITFPRIFPDQSPAAHSLDSSDDSFESASAHSLQRLQLPHGANAVQSSKSADPLDGDPDATRQTQPAKKLTFSDSDILTDADCLRLCPHCPCDRDVQRGCCTRSEHGKCGTEISGGCGGAAMGLGSTDTSFYSASSSLEQFATPARQNGGTGASGNHLEEILIRPGVLESHFPVLGGGSAIETPALVAPASPSPLSNGKRPDVVGGRVRKRLSSEEFVFSRSEDLPSLVQIGDRCTGSPAGRRRAKGCVYPAGNSLRLDAAAAVASASASPTSISKFTRTRVAAGGLAAKQAAGNNESNV

SEQ ID NO: 23173 - DNA, 5254 bp, DROSOPHILA
tgtctttgctttgttcatatcttgaagcacgaagtacggacacaagcactcaacaatcattgccttattaatttttcacacgccgcaagatgaatactctaatgacaaatattcttatataaagtcatttttgaaatttatttttgtgataatatgtacatagatttggctatttctaatctattttcaaataataataacggttaaggcaatgcaaaacatgaatttttcccatggtgccaattgatcaaaaataatatagatttaaagtcaaagaacttctaaggtgaagggcatattttgtcaaatttacaatgcatgagcatacgtgtgcacacatacagttgtctgctatcactgtatgcgatgaaaagagcggttcgctgtagcgctcttcgctctctcgctctctaacaaaaattcgagagagcctggagccacctctagagccacggccaaaaaatcggtgtgccaaaaaatcgtatggcgttacggcatcttgttattctagggtctttgactcaacaatcattgccttattaatttttcacacgccgcaagatgaatactctaatgacaaatattcttatataaagtcatttttgaaatttatttttgtgataatatgtacatagatttggctatttctaatctattttcatataataataacgttaaggcaatgcaaaacaagaatttttcgcatggtgccaattgatcaaaaataatatagatttaaagtcaaagaacttctaaggtgaagggcatattttgtgaaatttacaatgcatgagcatgcctgtgtacacatacagttgtctgctatcactttatgcgttaaaaacaaacaaacaaaccgcccagaactgccacgccaacatttttgaaaaatgttctgatattttttcatatttttattagtctagtaaatttctatggatttgcaaaaaaaaaagtttgccccggcaactctaataccctagaatttatattttaaaggtaagcttattaattttaagatatatttattgtacatttgcagagtaatgatgaaactggaaaaagtgactcaaaaggaacatcccgttttagccgatggtttcgacaaaaagaagctgcaaataataatgagtttccagggtttcgggaatcgcatgctcaagaaaaacgtggtatgtcaagatttgtaataatatatcaaaggccttatagttcactttgttcttaaggtattccaagtgttaaggatctggaagctcaaatgataaaagtggatatgaggactgatttaataaatccaatagcagggtcattatgtcagacagtgcaaatggaaaaacctattgctagagacactgaggcattcaaaaaacttttgcaacagttgggttctcaagccaggcagcatcatccatgcaacgacgattgtcgtacaataaacctctcaaatatagcaaatcatgtacaccttgagtcaaaattacatcaaaaaataaatgatggtcatttgcagcaaccagagttaagtgttaacgtgccaaccatgccaactagtagtcatgtatttttgcaaaagcgtttggaaatccaacatttaattcaaagtaagatatgtttcaaaattccatgtctataaactttttcttgaatacttaagtcctttttcttgtccttatggtaaaataatataaggtttctggctgataaaacacatgaatgttacagtttaccatatacatgtttaccatcagaacgggaacttatttaaagcgtatctggtaaaaaccacgtgttcttattttaatgcttttataccctgcgctgtatttaaatattatgaaaaacaaaatgtttaataataaataggacttcattgtggagacgtttcacatgattttttggaaaaagaattggataatcccagcaccccagcagccacaaaggatgtcattgccacagtgttgaatgaatattctcattctaaaagaaatccggtggtcacaggcgatcccaatatttttacccaacaatcgtttcttcagcctcaatcagtccatcagcactactctcaaggtaagtaattcttggttatatggtaactctttaaaattcaattaatataatatttgattcagttaaagtatcttatttattactaaaattatttgtaaaaattccttaatttttttctagaattgcattcgcaaaatactgctaaccatacgattaatcagctaatttcccacggtaactctccaactccgttggcatttactcctacttcagttttaagaaaaatgacagccgataaggatacgcaatcaccaagcacttattgtcagaacccacaatatcatgtacaccaacaaaatgccaagcaagtcggtactcgtgagaacgtacttgagccacagctgaccgcaacaatggctgtacagccccgaatgatattaggcggtggaaactttgccattggccaaaacaatcaacatttgtctcccaacatgtcacaaagtcgtaatcaacaagtgttaaagtggacttctggcaatatgcaaatggtccacggaaaaacatttggtaagttacacaaaaaagtgttagctattattaaagtacatttattagttaaagctttgtttttttttttttgctataagttttttttactcgttctcataaacttaatgtaaatgtatatgaatttcaagagaaattataaaaatcgttgagttaccataaaaagcgtgcaaatacgcaaatacaaaattcagttcttaaaagaggatagtataggataggagaaagtggatgctttttatacccgttacccgtagcgtaaaagcaaagacattagaataacaagatacgtaacggccatatattggttttgccaaagacattagaatgacgagtaacgccatacgttttttaggatttttgttgactttttcatcaatttattagtctcttaatcaagtaaattttcaaaagttttggtggctttgtgggcgtggcagttttggcctgtttgtgggccttagagtgtccgcagcatcatgactctctcaagcttctcaactctctagcttctatagctcctgagatctcgatggccagatcgactcggctattgatcctgatcaagaatatatatactttatatggtcggaaacgcttctttctgcctgttacattctttaaaacgaatatagtatatctctacgagaaccgggtgtaaatatacaacctgtagaatagctaaattggctttttgagacacgacgtgcgtgcacgtatatacttacataatatagagagtattttttaatagaccaaaaaataaatattcatatacacagtttgcttaatttatattctgtgcaagaagtgtaccctacaattttgattattcttgacttattggggtaatgaaaattacgattatttagtggaattttttgaagtggactttgttttaatgtagttatctgtgacccaaagcaatattttattctctaggaataaatatctttgttaaacaacgcgatataataaacttgagatcttcgacttctgtattaatgggttcaaagacttacacattattattttgacttacatattttaggccgacctattctgaaaggaggtcttaattcaatgccgcattccaattctgcacttccttttactgcccataaaattgaaatgcaacccattcatcaaccacatctacagcagcagcaacatagatttaaagcagttcaatctgtggaatcaaatctgaataccgaaagtgttcaccaaaacattacatctcctgttggatggcaccaactttacatgcaacatcagcaacaacatcatcacacacgacagcagcttagtcaaagagtgatttatggagaaatgcaccgtcaatcaaatccacaaatgtctccgccagtcccaggtcgaatattgcaaataaaattagttttataaatcatctaattagttgtctttatttaaggtttttctgacagctccgattccggtaatgtgatcaaagcaaacagcctcacatctcctagctaccagagagatgagaggatttcatcaccaaccaatcaattggcgcaatggttttcccctgagcttcttgcaaaagcctctgctggaaaactgccacttttaaatgtgaaccaagcactcagtttggaagaatttgaacgaagcattcaacattcctcaggcgtcgtgcataactaactcttgaagatagttttaagttcaatacagcaaattttaaaatgacaccgaaatcaaatatttttttgtctaaatttaatttcttctttatgttaaggagtatgtctgtatgggcacaaatctattaaataattctggaaacaaaatttttagcatataaaagtagttttctataaataaatatacattaacttaaactatttaatgtatttacagaatgtaattattatattgtacaaaactattttactgtaaataacacgcaattatataagtttaaaaatgtttacttttcttaaatctcagtatgttaaatagggtcttgcgctgggaattaactttatagttatacctattacgttgcacgttatgaaaaggagtgtgtaaaatttgtttaaagcacatttgtcataggaaaaaatatacagtttatatagttttagtttaggtttgcaaagtattggcccatattcgtatctatatttatgatcagtcgaatcgaatcaacagccgaatcaatatatccattaccgtcggaaaatcaacaaacaagtaactattttaaagcatatattttctaattggtgtttttatagctggcaggtcaaaaccccgaacatgattaactaaactagtttttgatgtttattttttttaaagtcagattgcatgaataataagtacaatatgttggctatctgagcaagaaatttgtactctctcaatggaacggttctttttgttattgggcacttgctgcaaaagcgcccgaaatgaggcggtaacaaaaatagcactgacccacgtatttgctgaataaaattattcaatgcaatgtcggttgttcaaacaaaatgatacgcaaagcactgctgtttgtcgaaaagaacgaaacacggcgaagaaagccctcaatgtccaacgtggacaagcgcttggtttggcaaagcaagaagaagttgtgttgtttggtgggaaaggctctcggtctaatgttcgg

SEQ ID NO: 23174 - DNA, 1704 bp, DROSOPHILA
taagcttattaattttaagatatatttattgtacatttgcagagtaatgatgaaactggaaaaagtgactcaaaaggaacatcccgttttagccgatggtttcgacaaaaagaagctgcaaataataatgagtttccagggtttcgggaatcgcatgctcaagaaaaacgtggtattccaagtgttaaggatctggaagctcaaatgataaaagtggatatgaggactgatttaataaatccaatagcagggtcattatgtcagacagtgcaaatggaaaaacctattgctagagacactgaggcattcaaaaaacttttgcaacagttgggttctcaagccaggcagcatcatccatgcaacgacgattgtcgtacaataaacctctcaaatatagcaaatcatgtacaccttgagtcaaaattacatcaaaaaataaatgatggtcatttgcagcaaccagagttaagtgttaacgtgccaaccatgccaactagtagtcatgtatttttgcaaaagcgtttggaaatccaacatttaattcaaagacttcattgtggagacgtttcacatgattttttggaaaaagaattggataatcccagcaccccagcagccacaaaggatgtcattgccacagtgttgaatgaatattctcattctaaaagaaatccggtggtcacaggcgatcccaatatttttacccaacaatcgtttcttcagcctcaatcagtccatcagcactactctcaagaattgcattcgcaaaatactgctaaccatacgattaatcagctaatttcccacggtaactctccaactccgttggcatttactcctacttcagttttaagaaaaatgacagccgataaggatacgcaatcaccaagcacttattgtcagaacccacaatatcatgtacaccaacaaaatgccaagcaagtcggtactcgtgagaacgtacttgagccacagctgaccgcaacaatggctgtacagccccgaatgatattaggcggtggaaactttgccattggccaaaacaatcaacatttgtctcccaacatgtcacaaagtcgtaatcaacaagtgttaaagtggacttctggcaatatgcaaatggtccacggaaaaacatttggccgacctattctgaaaggaggtcttaattcaatgccgcattccaattctgcacttccttttactgcccataaaattgaaatgcaacccattcatcaaccacatctacagcagcagcaacatagatttaaagcagttcaatctgtggaatcaaatctgaataccgaaagtgttcaccaaaacattacatctcctgttggatggcaccaactttacatgcaacatcagcaacaacatcatcacacacgacagcagcttagtcaaagagtgatttatggagaaatgcaccgtcaatcaaatccacaaatgtctccgccagtcccaggtttttctgacagctccgattccggtaatgtgatcaaagcaaacagcctcacatctcctagctaccagagagatgagaggatttcatcaccaaccaatcaattggcgcaatggttttcccctgagcttcttgcaaaagcctctgctggaaaactgccacttttaaatgtgaaccaagcactcagtttggaagaatttgaacgaagcattcaacattcctcaggcgtcgtgcataactaa

SEQ ID NO: 23175 - protein, 494 aa, DROSOPHILA
MRTDLINPIAGSLCQTVQMEKPIARDTEAFKKLLQQLGSQARQHHPCNDDCRTINLSNIANHVHLESKLHQKINDGHLQQPELSVNVPTMPTSSHVFLQKRLEIQHLIQRLHCGDVSHDFLEKELDNPSTPAATKDVIATVLNEYSHSKRNPVVTGDPNIFTQQSFLQPQSVHQHYSQELHSQNTANHTINQLISHGNSPTPLAFTPTSVLRKMTADKDTQSPSTYCQNPQYHVHQQNAKQVGTRENVLEPQLTATMAVQPRMILGGGNFAIGQNNQHLSPNMSQSRNQQVLKWTSGNMQMVHGKTFGRPILKGGLNSMPHSNSALPFTAHKIEMQPIHQPHLQQQQHRFKAVQSVESNLNTESVHQNITSPVGWHQLYMQHQQQHHHTRQQLSQRVIYGEMHRQSNPQMSPPVPGFSDSSDSGNVIKANSLTSPSYQRDERISSPTNQLAQWFSPELLAKASAGKLPLLNVNQALSLEEFERSIQHSSGVVHN

SEQ ID NO: 23176 - DNA, 4321 bp, DROSOPHILA
ttctattctcattgactggatttcgggatggggtggggcaaacagaaatcgatcaaacacgttcagcaacacaaaacataatgaaacaagacaaaaccgaaccaaaccaattgaaacgataacaagtgaaagtagtcgatgatcgagaactccgccgacagcagggtaccattcatacatacatacatgtgtacatacaacatcgttaactatcacccagcatatataaatacctagatcttccgagttttttttttttgtactaaatctcaatgcattgaaagatatattaaagtaaaatatcttatagtcttgttcgattatttagtctaagaaaaacgttataatttcgctatcatacttttataatacttttcctgtctgcgagttatgggctttctcatttaactaatatatttattaaagcatgtctgcgtttggaaattcaatatggccctacattctgttagtaatccgcgttacggccaacgaaatccccaaatctccacttgtgaacataataattgaagcagcacgtttcggccataagtcacgtgggtatgtcaaatcgtaggcgaatattagagtcagccaccgaatagcaaagggcgcgaactgaatagagagttcagtgcccgttcccgatgacgagatcatcagctgtatctccacggatgggcaaggcgatagattaacacacaagacattgccaagcgacgacaacacaactctgacgtcattgcgaatgagtcagttgcggatcagcttgacatttcactccatcactctcacttcgtcgataagcattgttggctatcgcacatcaattagcacagaccttggaccagaggcgcatctcgtatcgcgaatcaaacaaaaaaacatcaacaaataaatcaaggtatgtgggtcaggaggtcgggttgcgagatcgagaaggaaacaaatgcggatgcggccagctgcggcacttatttccagctcgtcggactcaggctactcactcgtcgggcttgggatgatgtcgcactatgtgaatgatgcgaccgggcggatataagggctggtgcagagttaaagctatcgagctgtccgtcggatgagcgctggtcgaacgggcagtgccacgctcctggaatatacagataaatacattttagtacgcagcacaaatggaatgagatgtgatcctaaatacctcctggtactgattgatgtgcgtgtcctggccggacatgttgaccacggaagtgggttcgggtccacagccacagcagatgaccgagcaggaaatggtcttccactaaaataaaaatatgacaaaaataaaacgtattaaatatatattagagagtatgttgtaattgttaatcaccttgggatccacgctgcgctgaatggcattgataaggtccgctcgcagggcctccatttgattgagaccgatgcgcggcactacatccttgcccagcaccaccgaggtgatgaacgactttgagtactccacggctggcatactgaaatgtaagcatacgtttcaatttgaaccaatacgcaagctcaatcataacccacctgagcagacctcctggcggagagtaactgaagcactggagcgttggatgctcgggcttaaggagaatggcgagtatggccgctgttccggcgcccagcgaatggcccaccagcaccagatcaaaggtgtgcgtctgacggtccggattccgttgcagtgccctctcgatgagattctcctcctgcagcttgttgcgtatgtagatcgccgcttgcaccattcccttgtggcccagccaatcgtcacgcggcggctgcagcggcagaacttcgccctcggcgttcagatccgtaagtatgtccttcatgctaagggtaccacgtatgctgatcacaaccgcccgatgtgtatagtcgatggccacaaagaagggcgtctcgcccacatccacgtgataggtggcgtaaacgatatcgatgtcgcccagctggagcgtcttcttcagcgctgcatagttgcacaggcagcaattgtcctggataacctctgtatcatcacttgtaccgcaacagcagccaaagcatctgagaataatgatatatttacaatttttttgctatatgccacaagcttcatactcacttcagttccggcaccaaatgccacatcttgctgcgattgatgatgacgtacatgggccaaccgtaggctccctgggcaaagtacatatagtggatgaccgtttgaaagaagtcatagtttttggcatcgttgagtgctaggaactgggttcgctccgtaatcggtacgccgctgaggaactcataggtgccatttttgcgctgcctcacaatggcctcgcgttcgagacgctgaaacttgcgaagcagaactaatccggccaccacatccgacggcaccacgtccaactcccgaaagaagtcgctcagcagacgggcgatgtccgtgaatgagtttcggttgcgctccgaggagcccatgcagcagaatagcaggcggcagcgatgatcccaactatcctggtaggctcgcatcactttcctgtgcgtttgtgcgaagacaattattaaattattaaatgatcgttcccatcatttggatgcaaattgacagactcacctttgtcgccagttgcggttcatactgttgctccgcttgtagttaaaccgagactctgtttcgcgcattgatcgctggtacttcttcatctttacccaggatcttccggcagcatcgaaggtgcaccatatcgtgattagggtgatcaccaccagagcccaattgcagatgataattgctgtgaggaaggaaggaggaaattaacttgaattaacttgatagtctggatcaatgggaaaaaccaaacaaggcacggtatttgcataaaaccgcatagtaacacctgcaagctataaaaatattgatactatataccgatgatttataatgattactctaagctacgttgataaagtggtaattattgttatttaagccttcaaaatgcataaatcagcacaatcactagctaaatctacgatttgactcacctatgtagacctttttgggatcatcgatcggtgcagtggtgtagtaatgccccagccaaacggatcccaccgccagccaggcaatatcgaacaggataaccactgcaatgaagataagaatgtgtatactacatacatataggattattctattagtgctaacttacagctcttgagatatatccaaatgttgattgaggtgcgcgcctcggcatccagaatactgccacgcatcgagatcacacatatacctatttctacacatattgaaactgcaaaataggatcaatatcaatacagaatccacagaaagtgattcagtatacttacaaaatagtatcaacaagtagcctattagatgatagaacaataattttacgcttaaaattcgtgtattatactcaaagataaccaacgagacgctaacaatcacaaaactgtcatagaaatcacatcgtttttttgtttttattttgttgttgaagaaaaagaagaagaaaaaaaacacgaaatagaattatgaacaataatcgatgactaagtaaaatggtacgtggctacttaccatataaaatgaatcgtcaggagaaatgcgcccggcaccacgagatcatcagagcccacagaccagcgacgtctgaagaccacaagtccaggcatctgaaatcgaaagaagcgagagtaattagttttaaactaaagagcatgtacaaatctaaataaccaaaaagtacaagatttataaataaattattgataaataatcagtagtagattaggttcgcaacaaaaaaaaagaaacctaatttcataacccacagaaatgtgattattatgcacttcaacgaggtgcaacactgcgtatgagtgataatcttaaactatatcactcatacgcagtgcatacgatatgatccgggaaagatcctgacaccaaaagcaatcatgattattttatgaacttatttatttatttacttatttactttggtcgcagctgttcaaaaattgcaccgcataaggttgcaagctgccgctccaaattgtaatcccgttggaaattaaggggcaacccttgcagcattcaaatgctcaatggtggtacagtacagtcatgcttgcatgcatatatgcaaagcgaacgactttggagcagcttaaggttccgcccacgaccacgcccgccacccacttcaacccacttggccgatgtcaaccaatagtgccatgtaaa

SEQ ID NO: 23177 - DNA, 1671 bp, DROSOPHILA
atgcgtggcagtattctggatgccgaggcgcgcacctcaatcaacatttggatatatctcaagagcttggttatcctgttcgatattgcctggctggcggtgggatccgtttggctggggcattactacaccactgcaccgatcgatgatcccaaaaaggtctacatagcaattatcatctgcaattgggctctggtggtgatcaccctaatcacgatatggtgcaccttcgatgctgccggaagatcctgggtaaagatgaagaagtaccagcgatcaatgcgcgaaacagagtctcggtttaactacaagcggagcaacagtatgaaccgcaactggcgacaaaggaaagtgatgcgagcctaccaggatagttgggatcatcgctgccgcctgctattctgctgcatgggctcctcggagcgcaaccgaaactcattcacggacatcgcccgtctgctgagcgacttctttcgggagttggacgtggtgccgtcggatgtggtggccggattagttctgcttcgcaagtttcagcgtctcgaacgcgaggccattgtgaggcagcgcaaaaatggcacctatgagttcctcagcggcgtaccgattacggagcgaacccagttcctagcactcaacgatgccaaaaactatgacttctttcaaacggtcatccactatatgtactttgcccagggagcctacggttggcccatgtacgtcatcatcaatcgcagcaagatgtggcatttggtgccggaactgaaatgctttggctgctgttgcggtacaagtgatgatacagaggttatccaggacaattgctgcctgtgcaactatgcagcgctgaagaagacgctccagctgggcgacatcgatatcgtttacgccacctatcacgtggatgtgggcgagacgcccttctttgtggccatcgactatacacatcgggcggttgtgatcagcatacgtggtacccttagcatgaaggacatacttacggatctgaacgccgagggcgaagttctgccgctgcagccgccgcgtgacgattggctgggccacaagggaatggtgcaagcggcgatctacatacgcaacaagctgcaggaggagaatctcatcgagagggcactgcaacggaatccggaccgtcagacgcacacctttgatctggtgctggtgggccattcgctgggcgccggaacagcggccatactcgccattctccttaagcccgagcatccaacgctccagtgcttcagttactctccgccaggaggtctgctcagtatgccagccgtggagtactcaaagtcgttcatcacctcggtggtgctgggcaaggatgtagtgccgcgcatcggtctcaatcaaatggaggccctgcgagcggaccttatcaatgccattcagcgcagcgtggatcccaagtggaagaccatttcctgctcggtcatctgctgtggctgtggacccgaacccacttccgtggtcaacatgtccggccaggacacgcacatcaatcagtaccaggaggagcgtggcactgcccgttcgaccagcgctcatccgacggacagctcgatagctttaactctgcaccagcccttatatccgcccggtcgcatcattcacatagtgcgacatcatcccaagcccgacgagtga

SEQ ID NO: 23178 - protein, 556 aa, DROSOPHILA
MRGSILDAEARTSINIWIYLKSLVILFDIAWLAVGSVWLGHYYTTAPIDDPKKVYIAIIICNWALVVITLITIWCTFDAAGRSWVKMKKYQRSMRETESRFNYKRSNSMNRNWRQRKVMRAYQDSWDHRCRLLFCCMGSSERNRNSFTDIARLLSDFFRELDVVPSDVVAGLVLLRKFQRLEREAIVRQRKNGTYEFLSGVPITERTQFLALNDAKNYDFFQTVIHYMYFAQGAYGWPMYVIINRSKMWHLVPELKCFGCCCGTSDDTEVIQDNCCLCNYAALKKTLQLGDIDIVYATYHVDVGETPFFVAIDYTHRAVVISIRGTLSMKDILTDLNAEGEVLPLQPPRDDWLGHKGMVQAAIYIRNKLQEENLIERALQRNPDRQTHTFDLVLVGHSLGAGTAAILAILLKPEHPTLQCFSYSPPGGLLSMPAVEYSKSFITSVVLGKDVVPRIGLNQMEALRADLINAIQRSVDPKWKTISCSVICCGCGPEPTSVVNMSGQDTHINQYQEERGTARSTSAHPTDSSIALTLHQPLYPPGRIIHIVRHHPKPDE

SEQ ID NO: 23179 - DNA, 4349 bp, DROSOPHILA
tcatccatttttttttacaattaatattaaagttttttttttgtggtttaatatactttgtttttccatcacagctaacgtcaatttatgtaactctaggacatctatcaacatttctaagaagacttttctggtcaaaaaatgatagaactcaagggaacataaagtaaacatttgaatgcttttcatatattttcgattttggttcacttttacttacatattctatagatttgtatacgtattttaagactataacacatttgacagtttgcaacatcaatcgatacacacagagaacgttttaaatttcttataaacttcatttggctaattacagtacaaattataggataaatcggaaacataatgcacaatcgggcggatctcagctttaacatccaattatattaaaaaaaaatatctatagttttgtatttacaattttgtagcttttttgtacaatttctttttttttttttttttgtaagtaggtaaacaaacagttaaaaaacttaaatttatgttgtatccttttaagaactaaagacaaatttgaatttaattactaaagacaatcaatatattatttttaataacaatcaacttgtgttgtaactttagttattgccgatttagattgttcagagatccaccctgaaacacacatatataatttatttaagcacaaaatatacatattgtatacatatatttaaacaccgaaacggaaaagcgttttactggggaatgccacacagatctctaggggcttaaaataatttaaaatcgcctcatgggtccaaaattgaattctatggataaataccgatagtctattcactcttgcattcgctcagacgttagttatcaatttaaaaatgattttaagcatctagagatatcagtgccatcctttcaagtggattttgactggggtgcaaagtggcttgttggttggttggttggtgctggcaaggatactcactgctcaccgcgattagcaggagacaccctgcttggccaccgtgtaccaggtgctcacggtgaccagcgacggcgagtcgggggtggtgggcggctgtggctgctgcggatcgacctcgacctcggccccgcccacaatcacgttgaggggtgcaagggggtgctgttcggagggcggtagctgtgacggatctgctggtggcgcaggtggtgcaggtggaccaggtgctgctgcagctgctgctgctccagctttcgatagcgaagcaggtgggcatgcccggtgcttccgcggccgggacttgctcttggccttctggctctgcgactggggatgatggaagtgcatgggctggggggtgtggaggtcgcgacccacctgcggccccacctgcggacaccggaagcgaatggcctgctcgttggccacattgatttccggccaccgggtcagctgctgaccatggtgaccctgatggccctgctggccctgatggtgaccctgtttgctctgatggcgcttcctgctcttgctgcgcttgcgcgacttggactgcgattgcgatcgacgattggatctgggctgctgcaccactgactgtgacctttggcagtggcggcagacaaaggatctgtactcctcatcggagtcctcatcatcctcgtcctggtcgtcgtcatcctcctccgccgctccgtaatcatataggacattgcaattgagtgttgttccagtggccgccgaggcggtggtggtgcttgtggtgctatcgccatccatgtcgattatgtgacaacagttttgatgtctagtgctatgtggttgctgctgtttttgctgttgcttgttcttcgtcttgtggttggacttacgtttctctggctcctgctgctgatgcttctgatgctgcagatgctgctgctgtgccgacagctgatgtcgccgccgccggggcaccgtgtactcatcgcccttgtccgtcggatatggtcagaacgctgtgtcaaacacggacatcgaccgggagatggcgtcgtcattgcgacaggcctccagaaactcctccagcgtgaccacgccatcgcgattggtatccattttctgtaggcaagaagacaagtagaaacacattagcaaatacattatatacatgctaatgggtatttttattttaatggacaatagttctttacttctaatttcaatccatatttctgctgcatattaaagaaagcaacagaccgctgagtgctgactgcttgccaatggcactgctttgacaaactgcttccgcttccggcccccaaacgcgtactatggaattttgatttagagcgtcggacagaggacaactttcggaatgcgccatgaatgatcctggccatctatcatcaatttcactctcgcatgccgctgtttaagagcttttgccggtcgcatttgatgcgctcaatttattcggaatgccaacgaccgctaatgacaacgcgtgactggcaagccaaacaggacgatgtcctgcagatgaagccattctacgctgcccatccattttggccagcctgagtttgctggccggcaaattgaaatagacaatttgaatttgcataatgcaaagtaaataagtttcatgttcgcgagtcaaattcaaattgtacgcgcgtaattagcataaataatggccgcgaatcgaccgtgtatttgaaattcgaagattttgagtttcagcggtggcggcaacgaacccacctggaagatctgctccaccttgcccttgatcttctcctcctcgggacactcgtccggcaggcggcccatcagctcgtatatggcagttacaatgtcagtcatttcctccctcgtaatgaagccgtcgccattgatgtcgtacagcgagaaggtccagcgcagcttctcctccacggagccgcgagacagtatcgaaagtccttgaacaaagtcctgtgacaggaagagaaataagttggcataaatacggccggtggtggtggtggtggtggtggtggtgttggtgtgaggtggaattacaggtataaaagaaattgaaaatatgttttaagaaattgctcgtaaaccgcagtgaagtacacctgcgttcagcattctagttccaggcgcgcacacaatattccatgaatttatacactaaagaattaactattatttcgaactattatctttttctgtactatcctactaatatttctaactttattttcatgtaattgctaaactaaataggttatttggcattgaatcgatagctttattagctgagcctcgactgtacttcttcttcttatttccggctgctgttactgccgctgctgaagtggacatttatttctatgctttgtatgacaaatgtacctagataagaacttgcaaggagaatggggaaaagtttttacgaccccccaccccctttttctgtgcctcaggaggtgttgaggcatttttgggaaggccacagctgacggtgaactgaatcttgcttttgcataccgaatgggcaaagtttgggggcgaaatgaagacaaaaaaaaaaaaaagaaaagaaaagcaagaaataagttgaaaaaaacaggagcaggaatacgaattcggacaggagcatcatttgtgtcttgttctctggccatttgggcaattgcagcgtccgactaatttatcaaaccgaaatagaatggcacacacaaaaacaaaaaaagaaaaaaagaattgtacgaaattcaccggaaacgaggcaagaaactttcactattcgacgtggacaaattgccaagtggcaagctggcaaaacaagctgaaaattgaaaattcgaagtgaagtttgcactctggccgagtgattaagcggatttatgatagtttttccatgctggccaatgctttgcactgcttaatgggagtgaattggaccatggaatgaatggctaacaaggcaatcgagtgactttgagcctctctttgttttgtccccatcgttttggccaaatggcaacgatagtcgcacagaacggagaaataatccttcaattagacagaaattccgttcaaatttcttgaccatattgagatgtgaatgcatgcttaatgaccagtatttagctatgcacaaaataatacttgaaaataatccgtaacatatttctagagaatattggcttcattgtcagactaacattgttcgatatttagatagctattcattgaataaaggccttaatttgttcgaggcaaatcaaaagtttcccatttcattggcgccattcgaagaatggctagtgcgaattgaccagcagttttagttttcagtcgtttattttagggtttggtt

SEQ ID NO: 23180 - DNA, 1275 bp, DROSOPHILA
atgtccacttcagcagcggcagactttgttcaaggactttcgatactgtctcgcggctccgtggaggagaagctgcgctggaccttctcgctgtacgacatcaatggcgacggcttcattacgagggaggaaatgactgacattgtaactgccatatacgagctgatgggccgcctgccggacgagtgtcccgaggaggagaagatcaagggcaaggtggagcagatcttccagaaaatggataccaatcgcgatggcgtggtcacgctggaggagtttctggaggcctgtcgcaatgacgacgccatctcccggtcgatgtcctacacggtgccccggcggcggcgacatcagctgtcggcacagcagcagcatctgcagcatcagaagcatcagcagcaggagccagagaaacgtaagtccaaccacaagacgaagaacaagcaacagcaaaaacagcagcaaccacatagcactagacatcaaaactgttgtcacataatcgacatggatggcgatagcaccacaagcaccaccaccgcctcggcggccactggaacaacactcaattgcaatgtcctatatgattacggagcggcggaggaggatgacgacgaccaggacgaggatgatgaggactccgatgaggagtacagatcctttgtctgccgccactgccaaaggtcacagtcagtggtgcagcagcccagatccaatcgtcgatcgcaatcgcagtccaagtcgcgcaagcgcagcaagagcaggaagcgccatcagagcaaacagggtcaccatcagggccagcagggccatcagggtcaccatggtcagcagctgacccggtggccggaaatcaatgtggccaacgagcaggccattcgcttccggtgtccgcaggtggggccgcaggtgggtcgcgacctccacaccccccagcccatgcacttccatcatccccagtcgcagagccagaaggccaagagcaagtcccggccgcggaagcaccgggcatgcccacctgcttcgctatcgaaagctggagcagcagcagctgcagcagcacctggtccacctgcaccacctgcgccaccagcagatccgtcacagctaccgccctccgaacagcacccccttgcacccctcaacgtgattgtgggcggggccgaggtcgaggtcgatccgcagcagccacagccgcccaccacccccgactcgccgtcgctggtcaccgtgagcacctggtacacggtggccaagcagggtgtctcctgctaa

SEQ ID NO: 23181 - protein, 424 aa, DROSOPHILA
MSTSAAADFVQGLSILSRGSVEEKLRWTFSLYDINGDGFITREEMTDIVTAIYELMGRLPDECPEEEKIKGKVEQIFQKMDTNRDGVVTLEEFLEACRNDDAISRSMSYTVPRRRRHQLSAQQQHLQHQKHQQQEPEKRKSNHKTKNKQQQKQQQPHSTRHQNCCHIIDMDGDSTTSTTTASAATGTTLNCNVLYDYGAAEEDDDDQDEDDEDSDEEYRSFVCRHCQRSQSVVQQPRSNRRSQSQSKSRKRSKSRKRHQSKQGHHQGQQGHQGHHGQQLTRWPEINVANEQAIRFRCPQVGPQVGRDLHTPQPMHFHHPQSQSQKAKSKSRPRKHRACPPASLSKAGAAAAAAAPGPPAPPAPPADPSQLPPSEQHPLAPLNVIVGGAEVEVDPQQPQPPTTPDSPSLVTVSTWYTVAKQGVSC

SEQ ID NO: 23182 - DNA, 7095 bp, DROSOPHILA
tcgactatcagcgtctgctagtaggagaccgagaagaaatggctaaattcctgtaaaattattatatctatctattatggtttcttagatcttagcgttcgtaaggatgtacagatggacatggtcggatcgacttgggtagttctcctgatcaagaggatgtgaactttacatacttgtcgaccaaccaagtatactaccacccagcatacaaacaacgggtaagaaaatcaacgaaatatcaaagagttagaaaagttatggaaatcagaatagcaatttaatttattttatagatacttttgtttttattcccaatatttaaattatatgacaaaaacgcgcatacccatttgaaaaatgtttgctacaattttaaatagttgatatcacaaaagttcttctttaaatatgaatttttcaaattttgaatttactatttaaaattgcgcgccattccaaatgtggcactacaatagctatctcgctctttcactcaaccagtagtcgtccctctctagcaagcccattgatttatgcagcactaagtctccaagttagagcgagctagagccatgcacttgaaagtcttacagttttgcagccactgtgtaaacccatgtcgttggtaaattttgatcttttattcatttatatacatacataaatagacattcctactgtgcgaacttaactagtttacagatattaacatagtgaaataagctaggcaactactttacgggtcttgacttcgagtggacagcagtgaaataatttaaacgtttaaaatagctttaaatgtaatgattagttgttgtttgcatcgcttaaacctagatggagcctacgtatagtcctaaatctactttctcatcctcaaaaacgcgtctcagctgcagtcgccgcggggactggcagtggaaaagtgttttagtctcctctagatctagattgcatatgtacaaggttggggttgcgggttcccttcggccaggggtcacttcatgtagtagctgctgggagctcgcccggaggtgtacgtgctcatcgggatgccctggggtcccgggatgtggctgtggcctgatgagtgcgtcacggactgattttgcgacccgtacaggtggtccacgctggagttgccgatcccattcccggacggctcgtagtccacatcgtagtagatgccagattggttctgttcgaaatcgagagaacgaggaaataattagtacgggtacatcaatatgatttggaggagcctaagatatttccagtagttccagtatactcgaattggataactgaatgtagcaacaatatttcaacttttaaatgtttagattcctaccgctatgctgccattgctgcgactcttgggacgtggcacttggaagttgcgtcccagcaaatcggcgcgatcctcctcctcgctggaactggagttctccagtgtgcgcattccattcgagcggggaccaaggccaagtcttctaagtcaaagaaaagcacattcagtaggggctacgaatattggttaaccacggcgattcatacctgggcaatggcactggaggagccagagtggcactggggtgcatctgcatggtgctctgcagagacatcccgcccagggtgcccattcccatggcgcccaagttcgggtaggcaaacatcgccgacgagggtctagtgggtccgatgggctcagcctgctggtacagaatatggtacagtggaatagtaattagtattcgtaaggcacaagttagcaatcaaaacttatcatgtatgttattaaaggttattattcttgatgcaagaagaaataagagttttagtccaagaacatgtgttctgtatctctgtccttaaaatctagatttactccatggctgagtggcaggtacctaccccgtagtgattcgtttgcgccatgacatcggctatctgggcccagcgcatgcggtcctccagggtcacctggtaacccgcctgtggcaaaccggcggacttcaggggtgcagtgttcatatatccaaacacaggtgaacccatggcgttcttctgctctcgctgccagcgccgcgaccacatgatcaggcacaccagggtcaggacgatgatgataatggccgccacggaggcgccgatagccacgcccaacacctcgccgtcgatttcacactgggcgccatagtgactggagtcgcaggtgcacagctgagcaccatcctcggcgtagctgcaggtaccgtggttgttgcagacggagtcggcgcaggcctggcactcgcgtccagaccgcgccggctggtcagcccacggatcgcggagtcccgcctcgcaggcgcagcggaagctgccccaggtgttgctgcaactggcgccggaatggcagtcatttagctccggtgactgacactcatccagatcctgcagagccgacactgcgccctccggggagctcacgtacagcacggagttgccgatgttgttgttccgccgatggagcacacccagaagatgcttctgaacgtcactgcgcagattgggtcgcaatgtttctacactttcatccagctggagaaggaggataataatcagtacgactccattagcactgcttggataatacacaccttgatggtcatgttcacgtagacgccgctgccgcccagattaggatcgccccggtagatgttgttcaccttcgcctccatgaactcatccgagtagggcgtcatggacatggcagagtccagctggaagaggttacatttaagttatgttttaaatcagtgagtattaagtcgctttaattgattaattcagtcttcagctgtatattcagctaactgaaatacatgtatataataactaaccgctcttattgattcatagctaagttgtccaaagggttcgctgtgtttgtccatgagcttggtgtcccacacaattcggtgctcgtaaatgcgatctacgcgcatgcccagatggaatgagatgacccgccggcatggctcccgatgctttcgccgggagtatcctaaagaattcgaatttaataagcatatatagatcatccaactccatgcattcccctgggatcttacctggtctgcagtgacagctggaaacgccgttgtccgtcttgcatcgctcgtgctgcgcctgatcgcaggtggaatcatcgcccacgatacaggtgtcaatcctcaccggcggctgcgttggtctctggcggtagtgaggcctcgtgggtccggcattcgttgtgggcgctccgccttggggcttgctgtgcccctgtaggtccaccacctccgtttcgggcacaacgtagccaccactgctctgggtgacagcgttggcaggagcagcaggagagatggaggaaccactaccaccaccaccaccactgctgacgccaactcccggcgtggatgcacctcctgaacctgtacctgatcctgaacctgatcctgatccggagcccggcaactggggaaggcgcgtggctggagttgtggcgcccgctggaggatctgtggggtcaccaaagagattgatgtaagtgcgcttgccgtcgatcgagacaaagccgtcgtcacctgatgccgacacgatgatgtcgccctgacctccgcccgccgcatagcttccatatggcttaatgttgatcgtctgctgggatccactgcccttgggacccggtccctggatggcggacagggtgacgtcgaagatctccccgtagccggggggcagatgctggcgagtgggctgcaccgctggcaagggaagggtctgctgggcgggtggtcgctggacaggtgggcgtggccgaccgccgggcttaaactcgggatcatcgaggactatcccaggacggggatggtagggggcgggcggagtggcattggtgttagcattggaactattaggcgacacactttcagtagatggcggggtagtggttgaggttgtggttgaggtggagctgctggtggtagtagtagtggtagtggtggttttggtatgttctttggaggacgtaggttgaatggctgaggccgggttggaggacgaggaggtgcccagcgaggatgtgacacttggttctaaagtgggcgttcgattggcggtcatgaagatcacctcctcggtggagggatccagaccaaggctctccgaactgtccatggacatgggcacataagtggaggacatgcccatcacggtgtgcaccacggaactggtctcaataatggtgctgaagccctcatcctgaggagactcctctggtagcttctttttctcgcttcctggctttggcttgtgctttttctttgagggatttgttggtgtagttggtggattgttggttgtggacggtggaggaggaggcggctgcagttcgtcttctacttctccgccagtggcatccgtatcctgatcggacacttcgatgtactgggcattggcatcttcattggagaactccgagtcgtatgtggtgtcggtgggcagcacaacatcatcagttggctgcggctgctcctgatgattctgctccttctcctgttcgttctttctatccagtggatcctgcggctgaagaggcgcttgcactggaggagctggaagaggcttatattggggcaggggtctccgattgccgcccacactggtggcaataggtgggcgtggcttgttgcggtaccagggcggacgattgctcacgaatcccggtcgtacgggtacaatctgctcgggaataggcacgccggtaatgaagggtcgttccggacgatcgaagggatatggcggcgggcgcatggaagtgcccggcttctgagcctcgtagtcgattggcaggttctgggcctcggagatccgcggtgggccgcgattgttaatcctactggccgagggacgcctaatgccctgcgtattagcatggacattgacattgccattcagcagcttgacgatgcctgtgatgatgtcctggatgtcggggtttccgttctggcgcggactatgcggcgcctgggtggcactggctgccgtagctgaggtggcagtattgctcggactcggccgaatcggggaccccgacactagcggtcgcaggtccccccgccctaaaaaagactgctctgagctgctgccaccttgcgacagggtcttcccagccctgatcccctggtgcgtacgctccggctgctcatcctggttgtcgaaggtgcccgtgggcttgatgttgtagtggaagtaccgtccggcggacacgtccttttccagatcctcagggaagtgcacatcgttgggtccgattggctgccgatcatgcagaatgggcgacgccgagcgctccactcgctccgcccgcgtttcgttatcgttcacatccaggggcgatgattggccttcggccagaccgtttacggagtccgccatggtgctctcgatcctctgacggtccggactgcggtggctgctcgatttgggtgagatctgtgagacgctctcgtgctggccagctgcagaaaattgataggaaatatgttagacaatatgataccagtgtaaaacagttaaaagtataagtatagaatctattcttatcgaggcgattcaatggcattataatattagcatcaggcgttgatcctgtaccgtaaatataattgattgctacttaatatacaatcacttagagatatttacatctttattgaaaatgcatatttaaaagttatgttcggtcgtaaaagagagccacacttgcttcgaatcaataagaaatcaaatttaatgggccgcttttttcaaattattcaatcaaatcaatttcaaaatatgggtcttatacttcaatgggtacaatgtgctataccgcaagaaaacgaaaagaaagggaaagagttgagtgaaaagagcgttgaattccgacgttcgttttccctcgaatccatcatcgcatcgacagaatcttcacattggggtttcacttttcacatgcccatgcacctgccctttcccttacgctccctctcgatcccgaccagcagccactccgtcattgtcaacgcgactcatttccatgtggggggaaacaatgcccaacccatccaaagtcggctcggatcagtttcaatctctgtcgcaggcttgccaggcatcatttgttttcgatgtcaagtctgagtcgcagtctttgtcttttttctgcccggcctctcggattcttttcactctctttgcatataattgtgtttgttttccttcgaaattgtgggtttgcgcacccagtgtgtgtggatgcaagctgatggctgcatatctgtcacaatgctagggttatattgttgattgccctgggtactcggcgcacacagatgcataagctcttggccacatagatactcgtacttggtttggtggcctcgggccagatctgcactcgcttggcagcctaggaagaatttcacaaattgctacgtcaagcgttgaaaagatgccaggccgagttgttgttgcccgattttcatcatttcctcggatatggcagataaatgagcagagcccgccacaagcaacttaaatatagattgttaacttgtagaatgcagatggcaatcgaatggggacaagcactcaaacccaccttgtcgatcgctgagatcgcgaatgggcaccccttatcgcatcgttactgcaattttccactctcatccagtcgccaatcacacagggagaaatgcatcgaatatgcaatctatatcatatataaatatatctatatatagatctgatcattcagatcggagtaactttgcatgccttcaaagcaatggttataaattataattgaatgtagagatgttatagatggccaggagtagtacatatactcgtgtgttcctacaatgggttttaagtaaacgaggtcaaaatgaaacattttattgattcccttcggcacagcatttgaatccatcaacactcaagctgtgaattttccataccgtaccgtaaacacatatctcactgagcactcaagtgtgacccagctattctttg

SEQ ID NO: 23183 - DNA, 3924 bp, DROSOPHILA
atgacggagtggctgctggtcgggatcgagagggagcctggccagcacgagagcgtctcacagatctcacccaaatcgagcagccaccgcagtccggaccgtcagaggatcgagagcaccatggcggactccgtaaacggtctggccgaaggccaatcatcgcccctggatgtgaacgataacgaaacgcgggcggagcgagtggagcgctcggcgtcgcccattctgcatgatcggcagccaatcggacccaacgatgtgcacttccctgaggatctggaaaaggacgtgtccgccggacggtacttccactacaacatcaagcccacgggcaccttcgacaaccaggatgagcagccggagcgtacgcaccaggggatcagggctgggaagaccctgtcgcaaggtggcagcagctcagagcagtcttttttagggcggggggacctgcgaccgctagtgtcggggtccccgattcggccgagtccgagcaatactgccacctcagctacggcagccagtgccacccaggcgccgcatagtccgcgccagaacggaaaccccgacatccaggacatcatcacaggcatcgtcaagctgctgaatggcaatgtcaatgtccatgctaatacgcagggcattaggcgtccctcggccagtaggattaacaatcgcggcccaccgcggatctccgaggcccagaacctgccaatcgactacgaggctcagaagccgggcacttccatgcgcccgccgccatatcccttcgatcgtccggaacgacccttcattaccggcgtgcctattcccgagcagattgtacccgtacgaccgggattcgtgagcaatcgtccgccctggtaccgcaacaagccacgcccacctattgccaccagtgtgggcggcaatcggagacccctgccccaatataagcctcttccagctcctccagtgcaagcgcctcttcagccgcaggatccactggatagaaagaacgaacaggagaaggagcagaatcatcaggagcagccgcagccaactgatgatgttgtgctgcccaccgacaccacatacgactcggagttctccaatgaagatgccaatgcccagtacatcgaagtgtccgatcaggatacggatgccactggcggagaagtagaagacgaactgcagccgcctcctcctccaccgtccacaaccaacaatccaccaactacaccaacaaatccctcaaagaaaaagcacaagccaaagccaggaagcgagaaaaagaagctaccagaggagtctcctcaggatgagggcttcagcaccattattgagaccagttccgtggtgcacaccgtgatgggcatgtcctccacttatgtgcccatgtccatggacagttcggagagccttggtctggatccctccaccgaggaggtgatcttcatgaccgccaatcgaacgcccactttagaaccaagtgtcacatcctcgctgggcacctcctcgtcctccaacccggcctcagccattcaacctacgtcctccaaagaacataccaaaaccaccactaccactactactaccaccagcagctccacctcaaccacaacctcaaccactaccccgccatctactgaaagtgtgtcgcctaatagttccaatgctaacaccaatgccactccgcccgccccctaccatccccgtcctgggatagtcctcgatgatcccgagtttaagcccggcggtcggccacgcccacctgtccagcgaccacccgcccagcagacccttcccttgccagcggtgcagcccactcgccagcatctgccccccggctacggggagatcttcgacgtcaccctgtccgccatccagggaccgggtcccaagggcagtggatcccagcagacgatcaacattaagccatatggaagctatgcggcgggcggaggtcagggcgacatcatcgtgtcggcatcaggtgacgacggctttgtctcgatcgacggcaagcgcacttacatcaatctctttggtgaccccacagatcctccagcgggcgccacaactccagccacgcgccttccccagttgccgggctccggatcaggatcaggttcaggatcaggtacaggttcaggaggtgcatccacgccgggagttggcgtcagcagtggtggtggtggtggtagtggttcctccatctctcctgctgctcctgccaacgctgtcacccagagcagtggtggctacgttgtgcccgaaacggaggtggtggacctacaggggcacagcaagccccaaggcggagcgcccacaacgaatgccggacccacgaggcctcactaccgccagagaccaacgcagccgccggtgaggattgacacctgtatcgtgggcgatgattccacctgcgatcaggcgcagcacgagcgatgcaagacggacaacggcgtttccagctgtcactgcagaccaggatactcccggcgaaagcatcgggagccatgccggcgggtcatctcattccatctgggcatgcgcgtagatcgcatttacgagcaccgaattgtgtgggacaccaagctcatggacaaacacagcgaaccctttggacaacttagctatgaatcaataagagcgctggactctgccatgtccatgacgccctactcggatgagttcatggaggcgaaggtgaacaacatctaccggggcgatcctaatctgggcggcagcggcgtctacgtgaacatgaccatcaagctggatgaaagtgtagaaacattgcgacccaatctgcgcagtgacgttcagaagcatcttctgggtgtgctccatcggcggaacaacaacatcggcaactccgtgctgtacgtgagctccccggagggcgcagtgtcggctctgcaggatctggatgagtgtcagtcaccggagctaaatgactgccattccggcgccagttgcagcaacacctggggcagcttccgctgcgcctgcgaggcgggactccgcgatccgtgggctgaccagccggcgcggtctggacgcgagtgccaggcctgcgccgactccgtctgcaacaaccacggtacctgcagctacgccgaggatggtgctcagctgtgcacctgcgactccagtcactatggcgcccagtgtgaaatcgacggcgaggtgttgggcgtggctatcggcgcctccgtggcggccattatcatcatcgtcctgaccctggtgtgcctgatcatgtggtcgcggcgctggcagcgagagcagaagaacgccatgggttcacctgtgtttggatatatgaacactgcacccctgaagtccgccggtttgccacaggcgggttaccaggtgaccctggaggaccgcatgcgctgggcccagatagccgatgtcatggcgcaaacgaatcactacggggctgagcccatcggacccactagaccctcgtcggcgatgtttgcctacccgaacttgggcgccatgggaatgggcaccctgggcgggatgtctctgcagagcaccatgcagatgcaccccagtgccactctggctcctccagtgccattgcccagaagacttggccttggtccccgctcgaatggaatgcgcacactggagaactccagttccagcgaggaggaggatcgcgccgatttgctgggacgcaacttccaagtgccacgtcccaagagtcgcagcaatggcagcatagcgaaccaatctggcatctactacgatgtggactacgagccgtccgggaatgggatcggcaactccagcgtggaccacctgtacgggtcgcaaaatcagtccgtgacgcactcatcaggccacagccacatcccgggaccccagggcatcccgatgagcacgtacacctccgggcgagctcccagcagctactacatgaagtga

SEQ ID NO: 23184 - protein, 1307 aa, DROSOPHILA
MTEWLLVGIEREPGQHESVSQISPKSSSHRSPDRQRIESTMADSVNGLAEGQSSPLDVNDNETRAERVERSASPILHDRQPIGPNDVHFPEDLEKDVSAGRYFHYNIKPTGTFDNQDEQPERTHQGIRAGKTLSQGGSSSEQSFLGRGDLRPLVSGSPIRPSPSNTATSATAASATQAPHSPRQNGNPDIQDIITGIVKLLNGNVNVHANTQGIRRPSASRINNRGPPRISEAQNLPIDYEAQKPGTSMRPPPYPFDRPERPFITGVPIPEQIVPVRPGFVSNRPPWYRNKPRPPIATSVGGNRRPLPQYKPLPAPPVQAPLQPQDPLDRKNEQEKEQNHQEQPQPTDDVVLPTDTTYDSEFSNEDANAQYIEVSDQDTDATGGEVEDELQPPPPPPSTTNNPPTTPTNPSKKKHKPKPGSEKKKLPEESPQDEGFSTIIETSSVVHTVMGMSSTYVPMSMDSSESLGLDPSTEEVIFMTANRTPTLEPSVTSSLGTSSSSNPASAIQPTSSKEHTKTTTTTTTTTSSSTSTTTSTTTPPSTESVSPNSSNANTNATPPAPYHPRPGIVLDDPEFKPGGRPRPPVQRPPAQQTLPLPAVQPTRQHLPPGYGEIFDVTLSAIQGPGPKGSGSQQTINIKPYGSYAAGGGQGDIIVSASGDDGFVSIDGKRTYINLFGDPTDPPAGATTPATRLPQLPGSGSGSGSGSGTGSGGASTPGVGVSSGGGGGSGSSISPAAPANAVTQSSGGYVVPETEVVDLQGHSKPQGGAPTTNAGPTRPHYRQRPTQPPVRIDTCIVGDDSTCDQAQHERCKTDNGVSSCHCRPGYSRRKHREPCRRVISFHLGMRVDRIYEHRIVWDTKLMDKHSEPFGQLSYESIRALDSAMSMTPYSDEFMEAKVNNIYRGDPNLGGSGVYVNMTIKLDESVETLRPNLRSDVQKHLLGVLHRRNNNIGNSVLYVSSPEGAVSALQDLDECQSPELNDCHSGASCSNTWGSFRCACEAGLRDPWADQPARSGRECQACADSVCNNHGTCSYAEDGAQLCTCDSSHYGAQCEIDGEVLGVAIGASVAAIIIIVLTLVCLIMWSRRWQREQKNAMGSPVFGYMNTAPLKSAGLPQAGYQVTLEDRMRWAQIADVMAQTNHYGAEPIGPTRPSSAMFAYPNLGAMGMGTLGGMSLQSTMQMHPSATLAPPVPLPRRLGLGPRSNGMRTLENSSSSEEEDRADLLGRNFQVPRPKSRSNGSIANQSGIYYDVDYEPSGNGIGNSSVDHLYGSQNQSVTHSSGHSHIPGPQGIPMSTYTSGRAPSSYYMK

SEQ ID NO: 23185 - DNA, 9648 bp, DROSOPHILA; identical to SEQ ID NO: 6682

SEQ ID NO: 23186 - DNA, 3169 bp, DROSOPHILA
gtacaatcgcctcgaagaatttattattattcgggaataattacaaaaaaaatgcaataaaaaagcaaacacgagtgcagttctaccaaattaacgaggctcccttgcgtgagcttgtgaaccgctgggcgaatcagtgcacagtgactttgtggctcgttttcacgtgaggcaacaggaaaacccaatcaaaacgtaaacaatggacgaaataaagctcgccaaggtggaaaatgtgcggatgatagatcgctacaataccaaaaatcccacggttggcacactctatctaacggccacccatctgatattcgtggagcccgacagcaacaaggagacctgggtaagtggcccataatgacatcatcaatacgctagctcccgactaaaattcgcgtcccctttgctaacaactttgtcggctggagtggcaaatgtggatttgcgtttgtgggccacgcaaaacgcttatgtgagtcaccactgtgctggcaactaagtccgctgcctgcgaacgtgctcaaatgggtttcttttcggtttagcaccgacctcgcagctgtcaaaaagtttagagcccctctggcagccagccgactgatgtcttaggtgctctgcacctttcctttctcgagaggaggaagacagcggttgagtggggaaaagtttcctttaacgagtttgcagcatgtttcctgcgctttaagattcttatttacctaacagatcctgcacatgcacgtggccagcattgagaagcttcccttgagcacgacaggatctccgctactcatccgctgcaagaccttcctctccgtaactttcgtcattcccaaggactccgagtgccacgatgtctacacttcgctgctgaaactcttccagccggtgtccatcaacaaattgtactgcttcaactaccagccgaacaaggatgatttccccaagaacgctggctgggattactttaaactggaggcggagttcaagcacatgctggtgcccaacgaggcctggacgctgtgctccatgaacgagaagtacgagctgtgcgacacctatccgcgtcagatttacgtgcccaaggaggccaccacgctgatgctcatcagcagctcgcgattccgctccaaggggcggctgccagtgctcacctatctgcacaacaacaaggcttccatctgccgctgcagtcagcccctgtccggattcagtgcccgctgtctggaggatgagcagatgctggaggccatacgcaagacgaattccaacacggactacatgtatgtggtggacacgcgaccgcggattaatgccatggcaaacagagccgccggcaagggatacgagaacgaggccttctacgagaacatcaaattccacttcctcggcattgagaacatccacgtccagcgtgccagtctgcaaaaggtgcttgaggcctgcgaacagaagtcgcccacgatgagcgccttcataaatgccctggagtcatccggctggctgaagcacattcgctccatattggacacgtcgagcttcatcgccaacgccgtggacaagggcgtctcggtggtggtccactgctccgacggctgggaccgcacggcccaggtctgttcactggcgcagctgatgctgaacccctactaccgaaccatcaagggcttccaggcgctaatcgagaaggactggctggcattcgggcacaagttcagcgagcgctgcggtcacatccagacggatgcccgcgaggtgtcgccgatcttcacacagttcctggactgtacctggcagctaatgtcgcagcgcagcgaggccttcgagttcaacgagcggttcctgctcatcctgcacgaccatgtgcactcatgtcaattcggcaccttcgtgggcaactgcgagaaggatcgcttggacctaaagctggccgagcgcaccttctcgctgtggggctatatggccaatcacctgaacgagtatatcaacccgctgtacaaaccaaatgtagacgaggccattaaggccaacctggcaccgcagtgcatcaagttctggcgcggcatgtacagtcgcttcgagagcggcattcatccgcgggagccactgggcgacgtgctgctcgatagcaaggagcactgcaactcgctggaggaccacgtgcagcatctgaccaagcgcatagccagcttcaagaactacatttccaagtcggccaagaaactgcaagacgccaccagcgcccctggcaaagtgaacaaggagctctccagcaacgagatcaatgacaacaaatacaactacgataagaagcttagcgaactgtctgccgccgacgacgatcatccgctgaaggccagcaacatgtccttcgccagtctgtcgctgagcgcggaacaatccagtccgccgcaggcgctgcccgaggagatcaactccgtggccgtagactggaagcccatgcgcaacgtaaccacctgctcctgctccacgcccttcgatcagttcagcaaaaagactcactgctggcgctgcggggacatcttctgcgagcgctgcatagacaagaacgtggctctgccaggacacgacagtggaaagccggtgccggtgtgccggggctgcttccggcaaatgcaaaagcaaagcccgtagaggcaaggcaggcaggatcgaggaatggagcggagctagggtgtgcaatcgatatggaaacgctattaaatttattgtgtgtatttattgttgcatttgtagacttagctgcttgtagaagctcattcaagttgttgcaaatggaaatcaaaagagcaaaaccaaatcaatccaccagcgattggcttccaggcatcgtcctagtctataagccgggcacaaaactgtattttgttattagaatctagagctacatatttgctaatcccagccccacccgcacggaaagtacaattgcatgtcagagcgcagacttgctcttgatcaaaatatttataatttccgaggaactcggcggtctgccggatgtacagacacttgggcctagccctccttcgcagcagcggtccctggcatcaagcatattccactagcatacccgtaaattatgaactacgcatcaatcttgtttgtcgatttgatcaaagtgtaataaaacttatttattcaacaa

SEQ ID NO: 23187 - protein, 639 aa, DROSOPHILA
MHVASIEKLPLSTTGSPLLIRCKTFLSVTFVIPKDSECHDVYTSLLKLFQPVSINKLYCFNYQPNKDDFPKNAGWDYFKLEAEFKHMLVPNEAWTLCSMNEKYELCDTYPRQIYVPKEATTLMLISSSRFRSKGRLPVLTYLHNNKASICRCSQPLSGFSARCLEDEQMLEAIRKTNSNTDYMYVVDTRPRINAMANRAAGKGYENEAFYENIKFHFLGIENIHVQRASLQKVLEACEQKSPTMSAFINALESSGWLKHIRSILDTSSFIANAVDKGVSVVVHCSDGWDRTAQVCSLAQLMLNPYYRTIKGFQALIEKDWLAFGHKFSERCGHIQTDAREVSPIFTQFLDCTWQLMSQRSEAFEFNERFLLILHDHVHSCQFGTFVGNCEKDRLDLKLAERTFSLWGYMANHLNEYINPLYKPNVDEAIKANLAPQCIKFWRGMYSRFESGIHPREPLGDVLLDSKEHCNSLEDHVQHLTKRIASFKNYISKSAKKLQDATSAPGKVNKELSSNEINDNKYNYDKKLSELSAADDDHPLKASNMSFASLSLSAEQSSPPQALPEEINSVAVDWKPMRNVTTCSCSTPFDQFSKKTHCWRCGDIFCERCIDKNVALPGHDSGKPVPVCRGCFRQMQKQSP

SEQ ID NO: 23188 - DNA, 2675 bp, DROSOPHILA
tccaaagatattcgaattgtcttgccgctaccgctgccggcgtcgcagtcgctgtctgcttcgacgtcggcgtcctcatgttgttgttcttgtacttcttgtacactgctgcttcctcttccttccttagctttttccccatggaatttgcacacacgactttgtgtttacgttcttgtgccgcgatttaagtactgttataacttttgcctgtcatcactagtttgctttttttgtcttgtttatttttgtgtattttgcataaattcccggctaacaattatatattttcgtttgttttatttatgcaccgcgcagtgcttattgttgttgccgtttcttgcgggagagatgcgacgcgcacgcagcgtcgtcaatggagaaaaataaaagagaaagcgcccgctcagctcagccagtctccgttgaccgcgcggttggcgagctttcttgcaactgactttcgagtttgaacgcgaaactttcgatttccatttcccgatggcgaaggacgatagccatcatacgataacgatagcccaatggaaagcagctgtcggaaatgcaatggatccactgaacaaattttggaacagctgtggcgctacattcgaattgaacaaaatatactttaaaattaaaaataaaaacgattgtgcaaagtcaaaacgtcccttttgatgctatgcgggcatttttgcacggatcaaagctgtagttttggtgtaagctaaaaaaacaattggtttaagaggcagtcatttgattgtcttaggcatataaaaactatttaactgtacttctaaatatttatttatccttactttacatctaatagatatgtatgaaattattaatttcaatgattttataacaaaggtatttataatgaaataaggggcaagttaatttaatttcctaacactacgaattaatcagtgaacaagattaatcttatttaactacttaaagctatgacacagaggcatatcacacacgtctagacatagggattccaattgctgccgtcctcgggcagcaaattgttggtgatcaggaggatgacgtcgatgatccaccaaacgcccacgccgcccatggtaagcagtttgcccacagccgtgcccgtttgaccgagacagaagcgatccataccgaggaaacccagcagcatgctgtagatcagtgtggtcacaaagtagtgatccgtgtagcggacacagggcactccggcgcgcagaaaggtgcgattaccgtagcactcgatgtcggcaaacacggtgcaccagaccatggcgtgctccacctcttcgtacgtggaaccaccgaacttcaggcatccgtatttcttttcctgctgcgccgtggcgttctcccgatgatcgacgggatccttgcaatcgagaaagtcgcgcggcagaaacgagcacatcacattcggtcccagtggatagaaggccgagtttccagctccgcccgaggcggaagatgccgaagatgacgatgaggagggtcccatgccggagcccagttgcgcctgaacgggcaccaccgattgcaccgccgtgccggagaccacagtctgcggctgctccttgtcgctgcgtgcctgtatcgcttgggcatcgtgttgtctggccaccaggaacgccagtagtccgtagaaaatccgcatctttgcgagctccttatcaaaatatagctagccagtgtggccacaccttagcacagctaacagagctctgttatctgcgatggcctaccgatagttctgattttaagcaccacgacaacgaatggaaataaataaatgcaaataaaccacctttcaagtaacagtgctccttagcatatttattggcattagtgtgatcgtagtctttagttaagtacatttagtgaagtgctatttagtataatgcgtttatttatttcagactagttaccaatcacgcgcccatctctacattcgataggcaacggccctgttgcattggtgtgcacacactggccgcgtaatcagcgggcgcgaaccatttttttttttttttgtgcgacagaacaaaaacaagagaataatagacgcttaaagagcattacccgtccgaatttcacgggcagtacgaaaacaagaacggagcagagagcccgcttaatacgacgcgtcattttccaccattttactgctgtgatttgtttgaattttgctgtgtcagcgcattggaaattcgttggacaagaataatgaatctattgctcctggtggccaccgcggcctccgtggcggcactcacgtccggtgagccgtcactgctctcggatgagttcatcgaggtggtgcgcagtaaggccaaaacctggacggtaaattcctttgtttccaacccttttcttgctgacgtgacaagaaaattgcattttcccgtttcctatccgccaggtgggtcgcaatttcgatgcatccgtaacggagggacatattcgccgcctgatgggcgtccatccggatgcgcacaagttcgcactgcccgacaagcgtgaagttcttggcgatctatacgtgaatagcgttgacgaacttcccgaagagttcgattcccgcaagcaatggccaaactgcccaaccattggcgagattcgcgaccagggttcatgcggctcctgctgggcctttg

SEQ ID NO: 23189 - DNA, 675 bp, DROSOPHILA
atgcggattttctacggactactggcgttcctggtggccagacaacacgatgcccaagcgatacaggcacgcagcgacaaggagcagccgcagactgtggtctccggcacggcggtgcaatcggtggtgcccgttcaggcgcaactgggctccggcatgggaccctcctcatcgtcatcttcggcatcttccgcctcgggcggagctggaaactcggccttctatccactgggaccgaatgtgatgtgctcgtttctgccgcgcgactttctcgattgcaaggatcccgtcgatcatcgggagaacgccacggcgcagcaggaaaagaaatacggatgcctgaagttcggtggttccacgtacgaagaggtggagcacgccatggtctggtgcaccgtgtttgccgacatcgagtgctacggtaatcgcacctttctgcgcgccggagtgccctgtgtccgctacacggatcactactttgtgaccacactgatctacagcatgctgctgggtttcctcggtatggatcgcttctgtctcggtcaaacgggcacggctgtgggcaaactgcttaccatgggcggcgtgggcgtttggtggatcatcgacgtcatcctcctgatcaccaacaatttgctgcccgaggacggcagcaattggaatccctatgtctag

SEQ ID NO: 23190 - protein, 224 aa, DROSOPHILA
MRIFYGLLAFLVARQHDAQAIQARSDKEQPQTVVSGTAVQSVVPVQAQLGSGMGPSSSSSSASSASGGAGNSAFYPLGPNVMCSFLPRDFLDCKDPVDHRENATAQQEKKYGCLKFGGSTYEEVEHAMVWCTVFADIECYGNRTFLRAGVPCVRYTDHYFVTTLIYSMLLGFLGMDRFCLGQTGTAVGKLLTMGGVGVWWIIDVILLITNNLLPEDGSNWNPYV

SEQ ID NO: 23191 - DNA, 4220 bp, DROSOPHILA
ctacacacgcttgggttactaaaaaaaattgattttcactgaaaatatttggtttaattggttgggctgtccatgtttgccagctttcaaaattgaaatattcgatctcagctgccttaacttacatgtataagcatgtacaaaaggctaattaagctacaaattcattgatttattccattcgatgatataatggacccatggtccaataaatgtgattgaaatgctaacaaacgaaccaatgcatccattaaaattaatttcactaatcggtcggtggattcgcctttccattatgcaattgaagtgaattattttgtggaacgaggctcgttccaatttcccgtcgactgtcaaactttgaagtacatatgtagtttcgtttctttttgtgtgcttattatgctgtgtctacaatttggcaaaattacaaaccaaacagtaaaatcagcagtctgtgaatgtgtgaatgtgtgtgtgcggcagaaagaatcagtaaatatatatatttatatatataatataaacttatatagatggatgagtgtagccagatggaagacaagtgtgtacaccgagaaaataatatttgtgagtttatcctacttcgaattgccttcaaagttttaaattttaagtttttgaaattacaaatttttcttttcaatcggaacttggaagttgcgcattaaagtgatgtgctttaattatcttgatatgtaatagtataaggttttaagtttgttttttttttttaaattataaaaattgttttaggaaaaatgatacgaatggttagaaataaataccagttttgaaatcaaatcaaatcacttctttgtgtaaggaatgcaattgtatagggcttccctttttttaattttttcagacaatggaaaagtgtgcaaaaaatgcttaccgcaatttgttgttgccagcgcgacgctggctgcagtcgggcgtcgctgctgacgccgctgcttcttcggatgctgcggtcgcaagagaaaaaagttggcaacttttgatgtttgttgttttggctgtttgtttttgttttttttttacttttttccttggcttcggttaacgcttttcaccgatccgctgctttttgcaatattttatggcttttattttccactgctttgctacttcgcttgcactttaacacacaaaattccaaaacattaaaaaaaaaaatatagagaaaaaacatttcacgcttggcttcattagcattattgttcgtttatttgttattcgtgttgttttcctttaacactttctcgttcgcgaaagtaaaattatacggagttagatggaaagaaggagagataataggagcaactaaactagctggattccatagaattttgttgtttgtggatagctatcatttacgcgatttctactaattgttgttgattgcgtttttagaacgaaaccataattatcaacttaaacttgcaaattacattgtatagctaaacttttagcaaaacttagcgactaaattgtcttttggccactcgaaattcaaacacgttcaaggaaataaagcacagctgtcattacaaatggactttccctctaactttagtgtaccaagtacattgggttaatggctctataagaacatttttcattcagcgtttaatgtgcccataaaagttaagctatgctgtaatttaagcagaattaattcagtttcttagcgtctggaaaaccgcgaagctatttcattgatcgacttcaaaatttaaaacctattactaagtgctctaaaaactaggcaccatttaggagccaacatgtttgccatttatctgatagacttgagtgtttcctttagattaaggggaactccgattcaggatgctgctaattattaaggaagctactggattcgcttaatctcgttttcatcgtcgtcgttagccgagtaccgagtaacggtatcggatggtatcgagtaccggtaccgaatgccgagcaccgttaggcagctgcttttaatgagcctgaactttcacaccgctgcagcagaatgtaaaactattatgcacactgcaaaaaacaagcgctggtcattcgctacaattactaaaaaaaaaataatactatttccttgagaatagcattttaataaattagaaattggatctgtgaaataagaaatgaactattaaccaaaagctatgtttaagagcattttagaaaacttgagagaaatgctcgatcgatttgcaactttgtattgatcaaatggcactatagagaccaattctacctttacatttctttctgtgtagcgccgacggccttggcggctaattaccggcgaccggtaatgcggtcgctgcgccgtcgaccctgcgtgggcggcgcagccttaatcccgctcgaacggattaagtcgatgatgctggtatggaatggaatggcttcggctgcaggtgaatcgataaatggaaatcgctactcctctcgctccctctctctctctctctgtcactctctctctttctcccaccctatctccgctactctttggcttcttctttcttttgctttctgtttacacttatttaccattcagtttttgctgcttttccgctttacacacaaacacacacatacacacatagacgcggttatgtagaacaaccactaaagcaccgttagtctaacagcatccaaagatattcgaattgtcttgccgctaccgctgccggcgtcgcagtcgctgtctgcttcgacgtcggcgtcctcatgttgttgttcttgtacttcttgtacactgctgcttcctcttccttccttagctttttccccatggaatttgcacacacgactttgtgtttacgttcttgtgccgcgatttaagtactgttataacttttgcctgtcatcactagtttgctttttttgtcttgtttatttttgtgtattttgcataaattcccggctaacaattatatattttcgtttgttttatttatgcaccgcgcagtgcttattgttgttgccgtttcttgcgggagagatgcgacgcgcacgcagcgtcgtcaatggagaaaaataaaagagaaagcgcccgctcagctcagccagtctccgttgaccgcgcggttggcgagctttcttgcaactgactttcgagtttgaacgcgaaactttcgatttccatttcccgatggcgaaggacgatagccatcatacgataacgatagcccaatggaaagcagctgtcggaaatgcaatggatccactgaacaaattttggaacagctgtggcgctacattcgaattgaacaaaatatactttaaaattaaaaataaaaacgattgtgcaaagtcaaaacgtcccttttgatgctatgcgggcatttttgcacggatcaaagctgtagttttggtgtaagctaaaaaaacaattggtttaagaggcagtcatttgattgtcttaggcatataaaaactatttaactgtacttctaaatatttatttatccttactttacatctaatagatatgtatgaaattattaatttcaatgattttataacaaaggtatttataatgaaataaggggcaagttaatttaatttcctaacactacgaattaatcagtgaacaagattaatcttatttaactacttaaagctatgacacagaggcatatcacacacgtctagacatagggattccaattgctgccgtcctcgggcagcaaattgttggtgatcaggaggatgacgtcgatgatccaccaaacgcccacgccgcccatggtaagcagtttgcccacagccgtgcccgtttgaccgagacagaagcgatccataccgaggaaacccagcagcatgctgtagatcagtgtggtcacaaagtagtgatccgtgtagcggacacagggcactccggcgcgcagaaaggtgcgattaccgtagcactcgatgtcggcaaacacggtgcaccagaccatggcgtgctccacctcttcgtacgtggaaccaccgaacttcaggcatccgtatttcttttcctgctgcgccgtggcgttctcccgatgatcgacgggatccttgcaatcgagaaagtcgcgcggcagaaacgagcacatcacattcggtcccagtggatagaaggccgagtttccagctccgcccgaggcggaagatgccgaagatgacgatgaggagggtcccatgcc

SEQ ID NO: 23192 - DNA, 636 bp, DROSOPHILA
atggctatcgtccttcgccatcgggaaatggaaatcgaaagtttcgcgttcaaactcgaaactaaggaaggaagaggaagcagcagtgtacaagaagtacaagaacaacaacatgaggacgccgacgtcgaagcagacagcgactgcgacgccggcagcggtagcggcaagacaattcgaatatctttggatgctgttagactaacgcgatttccatttatcgattcacctgcagccgaagccattccattccataccagcatcatcgacttaatccgttcgagcgggattaaggctgcgccgcccacgcagggtcgacggcgcagcgaccgcattaccggtcgccggctcattaaaagcagctgcctaacggtgctcggcattcggtaccggtactcgataccatccgataccgttactcggtactcggctaacgacgacgatgaaaacgagattaagcgaatccagtagtgcaagcgaagtagcaaagcagtggaaaataaaagccataaaatattgcaaaaagcagcggatcggtgaaaagcgttaaccgaagccaaggaaaaaagtaaaaaaaaaacaaaaacaaacagccaaaacaacaaacatcaaaagttgccaacttttttctcttgc

SEQ ID NO: 23193 - protein, 156 aa, DROSOPHILA
MAIVLRHREMEIESFAFKLETKEGRGSSSVQEVQEQQHEDADVEADSDCDAGSGSGKTIRISLDAVRLTRFPFIDSPAAEAIPFHTSIIDLIRSSGIKAAPPTQGRRRSDRITGRRLIKSSCLTVLGIRYRYSIPSDTVTRYSANDDDENEIKRIQ

SEQ ID NO: 23194 - DNA, 12833 bp, DROSOPHILA
ccgcaataaacttgtcttgcaagaagtgggcgtggtccaccagcatggtgataaaagtgtatggcagcggcacaccctccggcagattgggcagatggatgtgaagatggcagatccacactgcaaggccactctcattaatcaggtatttggagtagttagttagtatactttacttacttacctgcaagaaggtcaagttcctcaattatcctgcccatgcgaagcaagcctcgcccgtaaacgaatcgttgcctcaacagagcatctgtttccaggagcacctgggcagtcgtttgtgagtccagcatggagcgattgggcagttcgtcttgcttcggctgaaacttgagcagtccatcccggctcttgggaatgatgtggtagcctccttccacgccgacgtgctcacggattttcttcgccactgtgcttggtattgggagttggataagtggacgataatgtggaggtttacccgcggttaccatctgccatcgtgcccgagcggtgccccgaatccagcagctccctcccggattccatgaacgagtgacgaattgcacccagttggtgccacgggtgtcgcacggcgatcacccttctgccaaagtgctggctcaaattcatttaaattttgggtttgtgtgctccgctatattcatatgtatagttgtcaaataataagatacagtacgttaaaatcgtttgcacttaattttttaaatttgtaacagaataacggcttttatgtaatcgaaatcttaagaatcacaagtactagtttccaaagttatcacgttccaggcttagctactttctgttgtcaaaagtaaatgtcgtagcgcattattaataaattcgctgttttgtttaggaatcaaagaattaactatttgaaagctgtataagtcgcagatcagtgtttgtcaacactggtcaatccatcctccatcttccaccattcgctttcggtattttttcctattcctgtcctgcttactcatcgtagcagcgccgaataacggatcctaagatcgaacgaacctgtgctaaacgtgatttcgttcaatttctcatacatttcaatatatttgacccgatcaaaagtactcgttttaagttttaaccaaaaaaaaaaccaacaattagtgagtatggaccctatgaaagaggaggcgatcgaattgaatggccatgctatgcaaatggccgaagctgagcaagaaaatggcgctggcgccctgaaaattgccaccaatgcgggtgcaaccgatcgtccagcgcatcagcagcttccgctgccagtcgaagatcagcaggatgaggtgctgacccccgctgagaagggcaagttcgagtacccgccccctccaccgccaccaactccagtccaggctccgctagccaccaaggccaccgctctgaatgccagtcaagagcatgacgacgacgaggccaactccgagaagtgggaggatccgtgcgctccgcccccgcctcctccgctgccgactagcgctttcctggccaccggactgggctacctcaagctgcccgccttcaagctgaaggacgcactggagaaggccatcaccaagttggaggccaacaagcggacgctaaaggccagccctgaggtgagttcattacatataacatttttaattttattattagcagtgcacactgttgtcagattatatatttatattgaaatacattttaaatttaacttttcttgagtcaaacttgatattagtctaaaatcttcgcaatatttattggccaacaaagcacagtattaaacacgtaaatggtattaggaatcagagcagctctgatacaaatgtcgttaaaaatttagttaaagaaactttgacttggcattcatatattcgacacttattttacatcgagtacagacaggcactctcatatatcatgaagttttttcaatgttgtttttattttggcaaacagtcttctcgttccatcaaaaacaagaatgtggtggccctggagatgttacccaggcgctcaaacccagaaacgatcggcgatggatccatgttggcatccacatccacggctgttatgctgcagaccaaaaagcccgccgttattgtggagatggagaggcgttgtaagatcatcaatttactggccaaacagaatcaaatcctcgaatccatttcgggggaggccattccgatgcatggaccctcgaagcatctgcacgaggacgagggtctgaccctgcaagttctctcggcccgagcatccacaccgtacacacagccctccagcatgttgtcctgcacggccgttagttgtgacctggagcacgattcgccgcggaagcaagtggccagcaaggaggccgtgccggagcagcagtctagtcaggtgcagcaaaagcgtccacccagcacaggcattcacaagccaggaagtctgcgagcacccaaggctgttcgtcctactactgctccggtggtcagcagcaagccggtcaagagctatacccgctcccgcctgatggacattcgcaacgggatgttcaatgccctgatgcacaggtccaaggagagctttgtgatgcctcgcatcgccacctgcgacgacattgagttggagggaaggcttcgccgcatgaatatttggcgcacctcggacggcacaagattccggacccgctccaccacagctaacttaaacatgaacaacaacaacaacaatgagtgcatgcctgccttcttcaaaaacaaaaataagccgaacctaatcagtgacgagtccatcatccagagccaaccgccccagccgcaaacggagttccaagtaagctagttaaacttatactattctactcaattttgccatatattctatataaaatagacttggttagcttaatggaaaacttatgatttgaaaaggaaaaagtgattgtgacagtgcggtaattgttacagttacacatggcgtcgattcatttgagtacctcgaccatctgataccccttcctttgtaggccaaattgtctttttggtctgctcagaaaagctcttttatgaaaaatcatatttcccgccttttctgcttagaaaaaatcgcttaatcgattaagaacattttccccacttttgcattaggtaacacaaagtcgcattattcctgagcttatctgataaatcaatgattgcattgcatgacctccagaggtctttggcaatcatgctgatcattggctggaccctcgccacagtcaaatcactaatctagaacattttacaactgattgcgaataagtatgaagtaattactacagtcgtattagactatttccttttattgaattctaaaccatctgggattctacaaataccctcgagcgaaatcacttctctagataatgacactttccatcgacctcccgcaacctttgggctgcctgttcgggagtcagatcccgctgggccatggccagcagctcaaatcccaccatgaacttgcgcacggaggcagaacgaagcagcggcggatagtagatggcgtgcagggtccaatgagcactggatgcgtgggcatgctccggcccagtcggtgctccatgccaacccatcgagtaggggaatgaacactggaacagattgtcatacttggtggtcagctcctttatggtcagcgccaagttgtatcgctgttctgcggtaagatcattgatccgcttattgttgttgcgtgagatgagcatggtttcgaagggccaagtggcccagaagggcaccaccaccaaccagtcgcgattctcaatgacaatccgctcctggcgctgcagctcacgctccacatagtcggccagcatgggccgctcgttggtggcgtagtaggcacgcagacgctcctgcttcagttgcggttccgtcggcagaaacgagcatgaccagatctggcagtgcggatggggattggaacaccccatggcggctcccttgttctcgaatatctgcacccacgcgtacttggcgctaagctcgttgaactggctgatccacctagataggcagttagataaaaagtgggtttattattttgagtatcttctgatataaaccataaatcctccacttactcgtcgataacaacgacgatttccgctgcactcatcgtgggcaaagtcagattcgatttgggatggaagcacatcactcggcagttgccacgggcgggagctatctggaacagtggatcatcgttgttgggcggaacgggcaccacctccaccagggccgggaagtcgttctcaaacacataggtgctctcatattccggagtttgctgatcatttacaaaatatacacgtgagaatgcttaaaacatttgcgaggatttagtttggtcgcttacgattccattgggtctggtgacgccagggcacagaggattggtgggatcgaattcgggcagctcgttcttctgcgccttctcctgctgacccgaccaagggcgttgggtgcgatgtgggcacactaggacccattggccgttcaacggatttagacgtcggtgcgggtgctctgcaatgacattcgattttaattaagattgagcagcgataaaccagaccattgatttggaactaattgttgatcaacatatgaccattcgccatagaaactgaatcaaattggcatggtggaacttcttttaaacctaccactggccacaaactgcatcgtgtcgaaagactggcgctccgtatcactccgatcggattatgactacttcagattcacgggacaagcccaatgtcaacctgccgcgttgcgattacagctcctaatgctgctgatattggtgttccgattgtgattctgcttttgcttctgaatccgattccagttgagctgtttttcgcttagcaaagcgcgcttcttcagctacattcctctcttttctctcttcggattattccgctcactctgccggcgagcgtttagtttgagtttggcacgcattccgcctttcagtggaagaattttccatcagccttatctctcccactcagctgggcgttctgatatgggtgtgtaaacagtgtgagcgcgattgtgtgtgccgctagtgatgcgcggtggtcgataagacgtccatagagatggctgtttaatgtttaaataagtatagttatatttatattttatgcagtatctgtttgcctaattattgtgattggaacaaactgtttcctaaagtctattcagctatattgcaatcactgtaatctaatttctttaaaacttattagctaagtaagaggtatatgatagccgagagaattttaaagttttatggaaaaatctacagatattcgaataattatttcaggatccggccattgttaaccaaagacgcattggcagcggtcgcttaaaccattccaagtggggttacaacgacgaagactaccactcgtaccacaatggcaagtcgcagcatatggaggaggtcaactcgaagaacagcaaaaacatgacggtgctgcagttcttcgacaacggcgagatcagcagtcagcctcaaagacggccgaacactcctgtgatggggatgtctatcaatcgatccgagaacgacaccctgcactcgaacgagtccagtgaagatttgagtcgcgccaacgagaactatgtaaagcgcgtaatgtctggattcctggttgtatcgaagcccaagtcacgagatgtcgaggatagacatcaccggcggtacaggaaccagaacgaggagcctgagtggtttagctgtggacccacgtctagactggacactatagagttgtgtgggttcgatgaggacgaggagaaaatgctaaaggagggcaacaaaaaccacggattaggcgaaacagagcgagaaacgtcaaaacaaaaggttagtattatgcacttagttcaatccatgacgcaatctataagataactcgtttcagatggaccataagtacaaatggacgcatgcggagccgatgggtcgaagcaaatacatgcccaaacacgacactaacaataatcataacgtggagaacatgaataatgttatggctaccgagcatcagcaacaaaaggaagagaaacgcccaggcagtggccgttcgtttcagtttgataagttcaatcaaagccaacagaattacgagagtagcagttatgttaatcaccaacagccgccgcaaacgcagcctcagcaaatgcagcagcagtcgaacacaaacacgaacaactctaaattcatgtcattctttgccaatgaggggaactcctcgtcttcttcgctgaacgagtttttcaagcaggccattaaccagggtcatggcaacaatccggagcagcccaaatcgttgggccacatcggacagatgccttcggtggatcagctggaggccaaatggcgtcgaaactcactgaacaatgttggcgagactgccaacaagcagactgataacttccagaagctaattgggtctctttcttcggctaagccacagtcacaggcggttggctatgatgccatctccaactttataatgcagcaacagcagtaccagcagcagcaacagaagcagcacctcatcatacagcagcagcagcaacataccgcctttttggcgagcctgcagctgaaggcgatcctcggccgggccgacacccaattgctactgctccgtctgactaaaggtgacgattggatgatgaaaacaaagttagttccatgttttcaatatgattctttggtttgtttacttcccaggggaaatatccaagcacggattgctggtgcagttggccaacccacgcttgacggacatggatcgcgaggccatcactgctgtattgcagttcaccaacacccagcagcagcagcagcagcacaagcagcagctggacatgctctcaagcacggtcatcgccagccagttgcagaatctccacaacttggccattgtccagcagactcttgcagccaggcagcagccgcagcataatccacagacgcaggcgccgcaccaactgtcgcaggaggacttgcaagcgcatgccaatgtgataatgcgaaacgccgtaatgaagcgaaaaattgaggagcagacctcgaagcttatcaatggcggtgccaagcatcaggcacagcagcaatatctaaaccgtggccagcaacgccaggctcgaccagatgccaactcgaatgccttgctccatgccttgatctctggcggtggcaataaccacgcctctggttatcctatgaatggacagccgcagaagcatcattccaatttgagattcggtgataaccaaaacttccaatcttttgagtccaaccagccgcacttcgccacgcagtacaagcagcaataccaacagtctcagcagcaacatccccatcagcagccccaacagctgaattcgcttcatcagaacaacgctggagctgtcaatagcttcaataaggcccaaatgcaagctcaatcagctatttccatgctgcccaacagcgggggtaagtcattttagtacctaatttagaagatctattatattatgatacaatcgtacagtgggtactctccgttaagtttaccctatcatttgtgctttgaaagcaaagtcatcacatataacagttagatttgtagtttcttgacagcgttatggtcatagttctaaaagtcgggttaatacccaagggaggaaatttatatttttacatttgtgctgagttgttatcatttacggtaatattatagttaataagctgcctaatggcctccccttcttggtatttcgcttatgtgtctgagtcagacggtcaattttcaggctgatttttcgaaagcagagcaaatatgcactttgatgaccactttcacgtattatctgtaaacgggtttttgttactgcaaacattgcacactttgcaatgcacttgatcacatctgcgatatatttacaagctgttgattcagattatcacttgaacgcctctacaaggatgagctggctggagtttcgaatcagaaagataaataaaacatgagagatagggcatttagtcgagcttaatatatatatatatatatgttttttcttttaaactaatagaccttgtttacacttttcgttaatacatcgtttagccctagaaaacattaggacttttataatgatttcattgatgaatagcaattgaattgtattaagctaacaaactttatcatatacttgtttctaagctgcgcttaaattcccaagcttagctggcttccttgtttgttcaagagatcaccagaacgtggctaactacgcaaacttaagatttcccagtcgaacaacatctcagccagccccctgagtcatgggttctatttgccgtcgactatgtgcgcaatcggttacccatcgatctccccattggatattgccgatgttacgttcgtgggacattcccagagttagcaggtatttgcatctctcacttgattgctgccttttgctttcaattgttcgtggcatgcctgggcgaggcataaatataaaaacaaacatttaacgacagcaccagtggctttatcagccagcggaatgttgtggcctgtagatgggaaccgactcgctgggggaatcgtcgccacgcacgattactgaaaaaggggtcaagagcacagattcgtttctcgtttgtaggattcagcaaaatgtattagaaagcttatccacttgcaacacttttcacatcatattaaggttaactgaagcgcagagactctcatttgtttgtatatttattgcgtatttaaagataaaaccgcctgagaggcttagttctgggtggtgggtgagtggactttgccggcaaacagtatgttaccagtggactcctcctcgataaagaacacaaacggccggtttacgttgaattcctcgatggcggtgctgccaccgaacttgttttcgatctccacaacggtggctgcgtaggcctccgttcccttctcgttcacattaatgccggccttctgcaggatgttagacacctttactttgccggcgacatcagcgccgcgggttaatcccggcagcgaggcgctgtcctcaaagatttcgcgcacacccaggctgcgcaacgtctccttaaggttctgctggtagtcgaaatggaacttgggcagcgtcaccttcactttcacctcctccatggcccactgagcgctctttagctcgtcgttttccaggttcttgaccaagtcatggatgccattcagggcgtagggcagcaggacgaacagggagttcttgcccttgtagggcagacgcagaatctgcgccttcagcttctccgaggtggtgtagtagaagtagtcggtctgctccatgaactccgcccgcgactggtcgtccttgctgcggaagaaggatccctggaatgtggtggcaaactgccgccgccacagaccgttgaagtagatcagattggtcagcaacattacgctgctgcgcacgttgtccggggctactagctgctgaagtctgccctgcgtgatgttggcggcccaggcgttgatggcatctgccgccgcctcgggattggtgaagtctagcgcctccacctcgctgtcgtagaagtgtttcagcgtggccgtgaacttctgctgtgtctcgatgaagctgtccgtgaagagcttggtgcgcacactgagcgtctcgtggagctggttctccttcttgaaggaattaagtgtcttgcggtagaactcccgcacattattttgcgatcgaatgtctgtttgcgtgttggccagctccacttgcgtctgggttccggctccggccgcctcagccagcagggccagcaccagtttgacggagaacggcgagatgatcacattcttgtcggctgtctcgttctgcagcaccgtcttcagtagatgccatgagaacggatcgtgcgagtcgctccggaagggcacaaaggtatctatatcgtcgtagatacccgctccactgggcacgctggcagcgccaccgggcagcttgtccgtacgggtttcgaatacgccctggggcgtcgtggtcgtcggtatggagttgccgttgcccgtggctaacgcactcaaaaacagcgacagcagcatcactgccaaatttccgcccatctttgtcatctgtgcttccctaagcttctgcgtctcgatcttcctcgggtctttgctttcagcctcttattcgcagcaaaacaactgttaaatgcgggctttggtggggcgagcggcgagagagcgccggtggagcgagcgataaccgtttcacgcgccgttccaactgagagtgactggtgcgccgagcgggctggccattttaaaatcgagctccagcttcaagccgctcttgacgccgtcctctgctgctgtgctgccgcgtcgacggggcagcgcatgtgtgttttttttgttgggactcccaaagcatacgtacgtcattatcgcaaagtgatgagtgtggttaagtgatgagggaagtgaagggaaacgactagactatacagtgcatcagtgcactcagagaatttccatgcctgtattgacaggattaaccaaaaaacctatacaaatatttaaggatcattcatcattatgaatgttattttgttattttgtacaaattagttgcgaacaatatccgcctttattaggctttccccacttcagctatttgtgaattattgcatagtcatcaaagaggaaagtttgcaaatgttattattcttaaactacgtcacagtttctttcacgcccgctgcaaatactcaagccagtttatgaatagctattaatagaaatttgaatttcaaataagcttaagttgtgtcggggatagtctggccacgctgacaactattatagaactcagtgttggtaagtgtcggctaaacaaaacagctgatctgaaataaattctcatggtgcgttgatgtaacagcagccggcgaaagaaacttgtgcatttaatgagaaataaatataaatagccaaagtaaccgcacgtgccatgcaaattcgtcgtccgcgtggtgtcactgttccgcaattgatggtggtcacggccattgggctgctaggcggtatttacatttggcaaccgctgattttgaagtacaaaaacgagaagaaaaccgaggcagaaacgccagcagtaactgaaactagtggaaccacaaagttagcccgcacactaaaccctaatctgctggctaaagtcatatattaattgaattccgttctcgcccacagatgagtttcattaacggcttcaaaagattcgccacaacgacggttggtctgatggccatcggtattggatcgactgttatattctacaccacccatcgccttgtcatcaaaccctatcttctcgagaaacgacgcctggaagccgaggccagtgcggagtacctcttccagcaggaggttcactcccagattggcgagtcaagacccaaacggagcgaatattgagccaaggctgccagtgccgtcatagacatctttacatacttatagcctagtgattagttaccaaatttcaacgctgtaacatggtgaacaatgaatggacttttactttcttaccttcactttgggtggagaggcccatcttcttgtgttcattttagagttaaacagaatggattttttatgaaagtaatatgaattgaataaataatgaaaagcacaaatggtttgaataaaagactagaaacataaacaattaaaaatcactgtgctctgttcaccgtatgcctttgtacaggctcagggagctgcacttgtccttggccttttgctcttgctttctcaatatcgcctcgcgcttataggtgggaaagaagttccacagcgaaaaggtgtcgtccagtccgccggtggcaattttcgttccatccggattccacatcaggaagagggtgccgcgatcctgatgggacatcaagtcaaccacgcggtttaaggaggccaagaccagaatttcgcacactgcaaggtccgcatcatctgtagatattagaatacattatttttagcaagcattaaggatccagtgcagttctcaccacgccgaataacgttgaccagcaactcgcccgtgattttgctgtatgttagtgtctttataacgattctgtcatccctgcgcctgtacgaagccacaaattgtcggcgcgggatgttgaatatgaagatcgacgcagggcttcgctccgctgttaagataatattcatgttgcagatactctaataattaatctgccactatcttaccaacggctaaatcctctccagtccacggatgccagtcaaagactatggacctgccgtccaacttgagcaggcgaacctttagcaccgcatcgaagatgaaaatcttgccatccgtatcactggatgcgaaatacttatgggtgggagcaaacttcattttcttcaccgtgtgtcgatgctcgcgcaactgcatcagggtgtttagcgtgggcatggccagcacgatgatgacgccgcactgagtgccgcagatgacctctttgccgtcgtgggaccactcaatgcaacttatgtagcccatggacttgaagaacagcttgcggtaggagaccaagaactccgtaggcgacctcacctcccagaggtccagaacttgtacgaaagaggagggttagggctttacaaagttattgcttagggtctgttatacctggatagtttctatccatgc

SEQ ID NO: 23195 - DNA, 4022 bp, DROSOPHILA
tactcatcgtagcagcgccgaataacggatcctaagatcgaacgaacctgtgctaaacgtgatttcgttcaatttctcatacatttcaatatatttgacccgatcaaaagtactcgttttaagttttaaccaaaaaaaaaaccaacaattagtgagtatggaccctatgaaagaggaggcgatcgaattgaatggccatgctatgcaaatggccgaagctgagcaagaaaatggcgctggcgccctgaaaattgccaccaatgcgggtgcaaccgatcgtccagcgcatcagcagcttccgctgccagtcgaagatcagcaggatgaggtgctgacccccgctgagaagggcaagttcgagtacccgccccctccaccgccaccaactccagtccaggctccgctagccaccaaggccaccgctctgaatgccagtcaagagcatgacgacgacgaggccaactccgagaagtgggaggatccgtgcgctccgcccccgcctcctccgctgccgactagcgctttcctggccaccggactgggctacctcaagctgcccgccttcaagctgaaggacgcactggagaaggccatcaccaagttggaggccaacaagcggacgctaaaggccagccctgagtcttctcgttccatcaaaaacaagaatgtggtggccctggagatgttacccaggcgctcaaacccagaaacgatcggcgatggatccatgttggcatccacatccacggctgttatgctgcagaccaaaaagcccgccgttattgtggagatggagaggcgttgtaagatcatcaatttactggccaaacagaatcaaatcctcgaatccatttcgggggaggccattccgatgcatggaccctcgaagcatctgcacgaggacgagggtctgaccctgcaagttctctcggcccgagcatccacaccgtacacacagccctccagcatgttgtcctgcacggccgttagttgtgacctggagcacgattcgccgcggaagcaagtggccagcaaggaggccgtgccggagcagcagtctagtcaggtgcagcaaaagcgtccacccagcacaggcattcacaagccaggaagtctgcgagcacccaaggctgttcgtcctactactgctccggtggtcagcagcaagccggtcaagagctatacccgctcccgcctgatggacattcgcaacgggatgttcaatgccctgatgcacaggtccaaggagagctttgtgatgcctcgcatcgccacctgcgacgacattgagttggagggaaggcttcgccgcatgaatatttggcgcacctcggacggcacaagattccggacccgctccaccacagctaacttaaacatgaacaacaacaacaacaatgagtgcatgcctgccttcttcaaaaacaaaaataagccgaacctaatcagtgacgagtccatcatccagagccaaccgccccagccgcaaacggagttccaagatccggccattgttaaccaaagacgcattggcagcggtcgcttaaaccattccaagtggggttacaacgacgaagactaccactcgtaccacaatggcaagtcgcagcatatggaggaggtcaactcgaagaacagcaaaaacatgacggtgctgcagttcttcgacaacggcgagatcagcagtcagcctcaaagacggccgaacactcctgtgatggggatgtctatcaatcgatccgagaacgacaccctgcactcgaacgagtccagtgaagatttgagtcgcgccaacgagaactatgtaaagcgcgtaatgtctggattcctggttgtatcgaagcccaagtcacgagatgtcgaggatagacatcaccggcggtacaggaaccagaacgaggagcctgagtggtttagctgtggacccacgtctagactggacactatagagttgtgtgggttcgatgaggacgaggagaaaatgctaaaggagggcaacaaaaaccacggattaggcgaaacagagcgagaaacgtcaaaacaaaagatggaccataagtacaaatggacgcatgcggagccgatgggtcgaagcaaatacatgcccaaacacgacactaacaataatcataacgtggagaacatgaataatgttatggctaccgagcatcagcaacaaaaggaagagaaacgcccaggcagtggccgttcgtttcagtttgataagttcaatcaaagccaacagaattacgagagtagcagttatgttaatcaccaacagccgccgcaaacgcagcctcagcaaatgcagcagcagtcgaacacaaacacgaacaactctaaattcatgtcattctttgccaatgaggggaactcctcgtcttcttcgctgaacgagtttttcaagcaggccattaaccagggtcatggcaacaatccggagcagcccaaatcgttgggccacatcggacagatgccttcggtggatcagctggaggccaaatggcgtcgaaactcactgaacaatgttggcgagactgccaacaagcagactgataacttccagaagctaattgggtctctttcttcggctaagccacagtcacaggcggttggctatgatgccatctccaactttataatgcagcaacagcagtaccagcagcagcaacagaagcagcacctcatcatacagcagcagcagcaacataccgcctttttggcgagcctgcagctgaaggcgatcctcggccgggccgacacccaattgctactgctccgtctgactaaaggggaaatatccaagcacggattgctggtgcagttggccaacccacgcttgacggacatggatcgcgaggccatcactgctgtattgcagttcaccaacacccagcagcagcagcagcagcacaagcagcagctggacatgctctcaagcacggtcatcgccagccagttgcagaatctccacaacttggccattgtccagcagactcttgcagccaggcagcagccgcagcataatccacagacgcaggcgccgcaccaactgtcgcaggaggacttgcaagcgcatgccaatgtgataatgcgaaacgccgtaatgaagcgaaaaattgaggagcagacctcgaagcttatcaatggcggtgccaagcatcaggcacagcagcaatatctaaaccgtggccagcaacgccaggctcgaccagatgccaactcgaatgccttgctccatgccttgatctctggcggtggcaataaccacgcctctggttatcctatgaatggacagccgcagaagcatcattccaatttgagattcggtgataaccaaaacttccaatcttttgagtccaaccagccgcacttcgccacgcagtacaagcagcaataccaacagtctcagcagcaacatccccatcagcagccccaacagctgaattcgcttcatcagaacaacgctggagctgtcaatagcttcaataaggcccaaatgcaagctcaatcagctatttccatgctgcccaacagcggggatgagtttcattaacggcttcaaaagattcgccacaacgacggttggtctgatggccatcggtattggatcgactgttatattctacaccacccatcgccttgtcatcaaaccctatcttctcgagaaacgacgcctggaagccgaggccagtgcggagtacctcttccagcaggaggttcactcccagattggcgagtcaagacccaaacggagcgaatattgagccaaggctgccagtgccgtcatagacatctttacatacttatagcctagtgattagttaccaaatttcaacgctgtaacatggtgaacaatgaatggacttttactttcttaccttcactttgggtggagaggcccatcttcttgtgttcattttagagttaaacagaatggattttttatgaaagtaatatgaattgaataaataatgaaaagcacaaatggtttgaataaaagactagaaacataaacaatt

SEQ ID NO: 23196 - protein, 1132 aa, DROSOPHILA
MDPMKEEAIELNGHAMQMAEAEQENGAGALKIATNAGATDRPAHQQLPLPVEDQQDEVLTPAEKGKFEYPPPPPPPTPVQAPLATKATALNASQEHDDDEANSEKWEDPCAPPPPPPLPTSAFLATGLGYLKLPAFKLKDALEKAITKLEANKRTLKASPESSRSIKNKNVVALEMLPRRSNPETIGDGSMLASTSTAVMLQTKKPAVIVEMERRCKIINLLAKQNQILESISGEAIPMHGPSKHLHEDEGLTLQVLSARASTPYTQPSSMLSCTAVSCDLEHDSPRKQVASKEAVPEQQSSQVQQKRPPSTGIHKPGSLRAPKAVRPTTAPVVSSKPVKSYTRSRLMDIRNGMFNALMHRSKESFVMPRIATCDDIELEGRLRRMNIWRTSDGTRFRTRSTTANLNMNNNNNNECMPAFFKNKNKPNLISDESIIQSQPPQPQTEFQDPAIVNQRRIGSGRLNHSKWGYNDEDYHSYHNGKSQHMEEVNSKNSKNMTVLQFFDNGEISSQPQRRPNTPVMGMSINRSENDTLHSNESSEDLSRANENYVKRVMSGFLVVSKPKSRDVEDRHHRRYRNQNEEPEWFSCGPTSRLDTIELCGFDEDEEKMLKEGNKNHGLGETERETSKQKMDHKYKWTHAEPMGRSKYMPKHDTNNNHNVENMNNVMATEHQQQKEEKRPGSGRSFQFDKFNQSQQNYESSSYVNHQQPPQTQPQQMQQQSNTNTNNSKFMSFFANEGNSSSSSLNEFFKQAINQGHGNNPEQPKSLGHIGQMPSVDQLEAKWRRNSLNNVGETANKQTDNFQKLIGSLSSAKPQSQAVGYDAISNFIMQQQQYQQQQQKQHLIIQQQQQHTAFLASLQLKAILGRADTQLLLLRLTKGEISKHGLLVQLANPRLTDMDREAITAVLQFTNTQQQQQQHKQQLDMLSSTVIASQLQNLHNLAIVQQTLAARQQPQHNPQTQAPHQLSQEDLQAHANVIMRNAVMKRKIEEQTSKLINGGAKHQAQQQYLNRGQQRQARPDANSNALLHALISGGGNNHASGYPMNGQPQKHHSNLRFGDNQNFQSFESNQPHFATQYKQQYQQSQQQHPHQQPQQLNSLHQNNAGAVNSFNKAQMQAQSAISMLPNSGDEFH

SEQ ID NO: 23197 - DNA, 5595 bp, DROSOPHILA
gtacattccattctatagtctttacttcatcctcacgggcttgcaggttaacattgccaacacggcctatggactaggaaggcgctttggccgtctgaaccgaatgctttcgagcagctttcttgcaggtaagtggtaatttaaatttccaggatttttgattagttgtaaaccacccaacagagaacaatgcaaccagtgccatcaagccacaaaaggtcagcaccgtgaagaacgttagcgtaaatcggccagcgatgccatcggcactccacgcgagcctgacgaagctgaacggcgaaaccttgcccagtgaagccgcaggtgacaaggcagccgcacgcagtctaatcctcaacgtggagttactcaaattgggttattttccagccaagaacaaggggttgctcctcaaatccctggcggacagtcacgagtcgctgggaaaatgtgtccacctcctgtccaagtaaagttattccacatcccatgttttcgtgcttcttaccttcccgcacttgacagctccttcggcattgcggttctcttcatcctggtgtcctgtctgctgcacctcgtggctacggcctacttcctctttctggaactgctcagcaagcgggataacggctacctgtgggtgcagatgctctggatttgctttcacttcctgcgactgctcatggtggtggagccgtgccacttggctgcccgagagtcccgtaaaacgatccagattgtttgcgaaatcgagcggaaagtgcacgagcccattctcgcggaggcagttaagaagttttggcagcagttactcgtcgtagatgctgacttctccgcctgcggattgtgccgcgtgaaccgcaccattctgacatcggtaaggatttagactacacttaaataatatccatgtattattctaatgctatctggttgcagtttgcatccgccatagccacctatctcgtgattctcattcagtttcaacggaccaatggctaaagttatacaaaaagtggcttgttttttattaacactattaactaaacggagttcttggatattattgatctgttaaagtgtctatgtgcttgaatcaagttagcaaacaataaaaagcaaacgggttatttttcttagaacttgctaaaattcacacactcttatccatgatccattctccatcatattacaactagccatactctggggggacttagaaacccttctggtactgcttggtctccaaccgctgttgcaacaactccagctgtcgtttcgcctcgcactgggggaagttgttcaagtcataatattggggcgccaggcagcacaaccattcagctataaatgtaagaaatgcttacaaaaatgaccctgaaatgcggaagttgctactcacgtttgacatctgtcaccgtgcgaatgtagttctttgtagtcagcacgaactcattgtagatgacccaatcgggcttgtggtcgagacaagtcgacggatgcagctgcacgttctggttgtccttgatggtcagatagtagccagtgcgctccaggtgggccacctgcatgaagaagccctgcacgagggcctttcggatgtttacatagtagtccttcgaggtgaattcagtgctcgtgcgccgcaagttgaagcggtccatgattctagccagctgctggcgcacgttatccgcactctttagcgagcggaagtttatgaagttctcgtagcaccagtttggatcctcactgcctgaaagaaataaagaaatatgtctttatgtttccatttcgagtataggttggtttagtttacttactctgcttaaaggcgtgatagacattaagcaacgtcaggtggtctccgtcaatgtgggcgaatcgcatcttggcctcatcggcagctttcttcgcctcgttggggcgaacgaagcattgtggaactttggcacgtttgaattggtttagtttcgattaagcgcaagttcaaaacaatttttaacataaacaaatagattgtgctttcattttgtcagctaggcaatctagaggcttgattcaaagattgattgcatttgtgagttgcaagtgcgttcgcggaacattaaaagataaaaacactatttattcgggcatattttgcacatcaatccattcaaataatgggcttggacttttaaacgcatgtgcaacttttcttttcgagttgaatgcaaagaacaaataaattgaaaaactttttcctttgcattgttgcttaagaaattacataaatcccttcaagaatatagaatatacttccccgaaacctcagactttcaatttataacgtagaaagtattcacggcagccactttaacggaaataaatgaaagtatgcatcggcacaaatcgaaattaggtacaagtcgtatttacgtatttgaaaaacgaaaagtgacagccatgaaagtataagtgcgacccccaacttatcgaagacagtttcttagatttgtgttttatctcacccgacaacatggccgttatggaaagtatttcattagagcagttatgttggcagctggcaatcagcattttggccagctgcggatccaatggaaactcggacataacggcacccaggtctgtaagatttccgtcatcatccagggcggccagatagttgagcaactccagggcacgcatcaaggtctctggagcaggggggtccataaaatcgaaatgcaccagatcatcgatgcccaacttcttgagctgcagaaccacagtgcctgctcaaaaataagaaacaagatattagaaatcgagtaatacttccaggggatctaggcattacccaaattggagcgcagaatttcggggtaggtgttgtcctgcatctcgtttttaaacgccttttccgtgtacagacggaaacacttgccaggacgcgtacgtccagcacgaccggatctctgctgcgcagacgcttttgaaatgggtgagacgagcagactctccactcgaatgcgaggattgtacaccttttgcttggcgaagcctggatcaatcacgaacaccactccgtcaatggtcagcgaggtttcggcaatgttggtggacaccacgaccttgcgtccaattgcgccattagcatttggcggcggggccggttcgaagatgcgctgctgcaaattgggcggcagcgtcgagtacaggggaatgcatttcagctctccaatttctgagcccaaattgtcgatctcgcgcttgatgcgcttgcaagcctcctcaatctcctcctggcccgtgaggaacattaggatatcacctagagtagcaaaatcaagttggggtttagtttacaatggaaaaagcgaatgcgtcttttccggcattgaataggatcatattcaaaagtcgtaaacacttgaatgattacaataccattaaagcaaatacgaagcatttgccgcccttcggcactcggaaagtttatattttgcctggcacttttacattgtaaacatatgatcgataaatgcttcttagaacaatgaactagcaagctattaaatgaactccaagctaaactcatttaccaacttaccctcaatttcctcgcacatgtgtatctggattaccgtgcgaatagcagcctctaggtaatctctttctggttcgggcgtgtagaagatctccacgggatgtgtgcgaccgggcactttcatgagcggtgcgttgtcgaaatactgctggaacttgccggcgtccagtgtggcggacatgaccaccagcttaaggtcgctgcgctgacgaatgacctccttgagcacgcccattagaatgtcagtggccaaggtccgctcgtgagcctcgtcaagcagaatgacctggtactggtccagcatgggatcagacatggcctcgcgcaacaacataccatcggtcatgtacttgagcagcgtcttggccgtggagcagtcctcgaaacggatggagtagccgacctcttcgcccagttttacgtccatctcctccgaaacgcgctgggccacggacatggcggcaactcgacgtggctgtgtgcaggagactcccttgcgccccttggatactgcgaagtccacgcaccactgcgggatctgggtcgtcttgccggagccagtctcgcccaccagcacaatacactggtgcaggctgagcagccgcataaagtccgcctggtactcgaacacgggcagcgcaatgcgcttcttgtagagattctggtaccgttgtgagtacggcgtgttggtcagcgggttcatcgtgggcggttgcttgttgggcacgaatccgcccaggatttgagccactgtgccggcagcggctgccgccgacgaggaggacgcctccgggtccctggtgagaaaggagcgttacattactgccgtatgttggcctcgggtcacttacttcttcgccttgctgccgtaggtctcccccacttcgattcgacgcttggacatgctaatttatggtgattactgcacttaattctcaaaacgaagcgtttagcacaaaaaaaaacacgcgctcagtgagacctttagcatataccgaccatgctgatcgcaacttttaaaataccaaagtttactgtctgtgtatactatataagcccatggttagcgaagatcacaaccaacagcacggcagcaatttggcatttaaaaaaaaacagcagttcaagcttaagtcttttgacgagaatctatctatagaattcggttttactcaccagtttgaagaatagttgtgagctcacagtcttaaaattgacatttgacagcaatttgattggaaactgattttgatttttacagtaacaaactgttacatggattcggtattttcggcttgggttggcgctttagcgtcggccacactatcacattgtatcgattcggagggagttgaatttttgcacgtatttgaaagcgcaaagatgcgaaacaaagagcaggatatcgaatgaaagagctcctgcgagaccaggactagttgcctaaccaccatggaaatacccattcaggtagcggtgcgcatcttcccgcatagagagctcaaggacttgttgaggagcttcggccccacagagcccaaaaaggatgcgcaggcggtggatgagggggcggactccaaggactccgaggctcaagttccggcggctgagaaggacaatccgtcaatttcagagacggacccaaacgggaatgctgagcaggacagtgcggccgattcgaagacaattccagatgccaatggcaacgacagtggtcagaaggattacccagactccgcatattgcgttcaggctattcccatcagcgcttcggccctgggattgcccagtgccctgccaggcggagatcccatggacagcattgcagctggactgatacaagtcggtccccacacggttccggtcacccacgccctgcccagcagcagctcccaggagcaagtgtaccaccagacggtctttccgctcatcaccctgttcctggaaggtttcgacgcatctgtagtcacctatggccagaggggccagggcaaaagctacac

SEQ ID NO: 23198 - DNA, 2505 bp, DROSOPHILA
catggtcggtatatgctaaaggtctcactgagcgcgtgtttttttttgtgctaaacgcttcgttttgagaattaagtgcagtaatcaccataaattagcatgtccaagcgtcgaatcgaagtgggggagacctacggcagcaaggcgaagaaggacccggaggcgtcctcctcgtcggcggcagccgctgccggcacagtggctcaaatcctgggcggattcgtgcccaacaagcaaccgcccacgatgaacccgctgaccaacacgccgtactcacaacggtaccagaatctctacaagaagcgcattgcgctgcccgtgttcgagtaccaggcggactttatgcggctgctcagcctgcaccagtgtattgtgctggtgggcgagactggctccggcaagacgacccagatcccgcagtggtgcgtggacttcgcagtatccaaggggcgcaagggagtctcctgcacacagccacgtcgagttgccgccatgtccgtggcccagcgcgtttcggaggagatggacgtaaaactgggcgaagaggtcggctactccatccgtttcgaggactgctccacggccaagacgctgctcaagtacatgaccgatggtatgttgttgcgcgaggccatgtctgatcccatgctggaccagtaccaggtcattctgcttgacgaggctcacgagcggaccttggccactgacattctaatgggcgtgctcaaggaggtcattcgtcagcgcagcgaccttaagctggtggtcatgtccgccacactggacgccggcaagttccagcagtatttcgacaacgcaccgctcatgaaagtgcccggtcgcacacatcccgtggagatcttctacacgcccgaaccagaaagagattacctagaggctgctattcgcacggtaatccagatacacatgtgcgaggaaattgagggtgatatcctaatgttcctcacgggccaggaggagattgaggaggcttgcaagcgcatcaagcgcgagatcgacaatttgggctcagaaattggagagctgaaatgcattcccctgtactcgacgctgccgcccaatttgcagcagcgcatcttcgaaccggccccgccgccaaatgctaatggcgcaattggacgcaaggtcgtggtgtccaccaacattgccgaaacctcgctgaccattgacggagtggtgttcgtgattgatccaggcttcgccaagcaaaaggtgtacaatcctcgcattcgagtggagagtctgctcgtctcacccatttcaaaagcgtctgcgcagcagagatccggtcgtgctggacgtacgcgtcctggcaagtgtttccgtctgtacacggaaaaggcgtttaaaaacgagatgcaggacaacacctaccccgaaattctgcgctccaatttgggcactgtggttctgcagctcaagaagttgggcatcgatgatctggtgcatttcgattttatggacccccctgctccagagaccttgatgcgtgccctggagttgctcaactatctggccgccctggatgatgacggaaatcttacagacctgggtgccgttatgtccgagtttccattggatccgcagctggccaaaatgctgattgccagctgccaacataactgctctaatgaaatactttccataacggccatgttgtcggttccacaatgcttcgttcgccccaacgaggcgaagaaagctgccgatgaggccaagatgcgattcgcccacattgacggagaccacctgacgttgcttaatgtctatcacgcctttaagcagagcagtgaggatccaaactggtgctacgagaacttcataaacttccgctcgctaaagagtgcggataacgtgcgccagcagctggctagaatcatggaccgcttcaacttgcggcgcacgagcactgaattcacctcgaaggactactatgtaaacatccgaaaggccctcgtgcagggcttcttcatgcaggtggcccacctggagcgcactggctactatctgaccatcaaggacaaccagaacgtgcagctgcatccgtcgacttgtctcgaccacaagcccgattgggtcatctacaatgagttcgtgctgactacaaagaactacattcgcacggtgacagatgtcaaacctgaatggttgtgctgcctggcgccccaatattatgacttgaacaacttcccccagtgcgaggcgaaacgacagctggagttgttgcaacagcggttggagaccaagcagtaccagaagggtttctaagtccccccagagtatggctagttgtaatatgatggagaatggatcatggataagagtgtgtgaattttagcaagttctaagaaaaataacccgtttgctttttattgtttgctaacttgattcaagcacatagacactttaacagatcaataatatccaagaactccgtttagttaatagtgttaataaaaaacaagccactttttgtataacttt

SEQ ID NO: 23199 - protein, 729 aa, DROSOPHILA
MSKRRIEVGETYGSKAKKDPEASSSSAAAAAGTVAQILGGFVPNKQPPTMNPLTNTPYSQRYQNLYKKRIALPVFEYQADFMRLLSLHQCIVLVGETGSGKTTQIPQWCVDFAVSKGRKGVSCTQPRRVAAMSVAQRVSEEMDVKLGEEVGYSIRFEDCSTAKTLLKYMTDGMLLREAMSDPMLDQYQVILLDEAHERTLATDILMGVLKEVIRQRSDLKLVVMSATLDAGKFQQYFDNAPLMKVPGRTHPVEIFYTPEPERDYLEAAIRTVIQIHMCEEIEGDILMFLTGQEEIEEACKRIKREIDNLGSEIGELKCIPLYSTLPPNLQQRIFEPAPPPNANGAIGRKVVVSTNIAETSLTIDGVVFVIDPGFAKQKVYNPRIRVESLLVSPISKASAQQRSGRAGRTRPGKCFRLYTEKAFKNEMQDNTYPEILRSNLGTVVLQLKKLGIDDLVHFDFMDPPAPETLMRALELLNYLAALDDDGNLTDLGAVMSEFPLDPQLAKMLIASCQHNCSNEILSITAMLSVPQCFVRPNEAKKAADEAKMRFAHIDGDHLTLLNVYHAFKQSSEDPNWCYENFINFRSLKSADNVRQQLARIMDRFNLRRTSTEFTSKDYYVNIRKALVQGFFMQVAHLERTGYYLTIKDNQNVQLHPSTCLDHKPDWVIYNEFVLTTKNYIRTVTDVKPEWLCCLAPQYYDLNNFPQCEAKRQLELLQQRLETKQYQKGF

SEQ ID NO: 23200 - DNA, 9931 bp, DROSOPHILA
actaactaaattccctggcaacttcgaatcctttaaaagtagtctgcataaagtataaaatatttcatacttttagacacccattttgaagtcaccagaaatttctagcaccgctgctcgtaatttctatctacttcatagtttagtaactataactagttaattttcaaatatagatatgcaattagaatctgtgctttatatgcatactcaccgcgtgacacatttgacttttgttaaatgttgtacaattgtttttttttttctcatttgcaaattttggtatttgatatatatatatgtatatattacaccattaaactttcaatatatcgcgcatagtatataaatatatatttatatggtatatacacagatgtggcatatggaggcatcggtcttgttgtccattggctctaatatatatgttttttttttcgctatgtcgaaaggagttctattttggggttctgaggactgtggtttcacttctatctgatggatcgatctatatagctgcatagctgtatctgcatctctgctgctgctctagtggtggctcaggtaggtcttgcgcttcaggtaaccactgcgtatgggtgatgagagtcctgtctcgttgctgtgtttatcgagtatcgattatcgatgacagacacggtcgatggcagtgtgtgcgtggtgtgaggtgtgtgtgttggtgtggtgttggatttgtttttgttttgtttttttcaggcaaattttggatattttttgtttggaaaaagaaagacagagttaacgttgagaaagagttgaattttggctctaagatggaaacgtttctaagatcgataattatcgtatttttttttacccacctctagtgtgtggggcttatcaattttgtttcttttttcacaacaccaattaatcaatcaataaaatgctcagctaggtatgcttcaaaatacataacaaagaaactgaaaaattgtgtggggagtgtggggtatattctagaacactaattctaacatcaattgtctgtaatgttttgtttttggttttaacgcttctatctgtttacaagatgctttaattgttgtttttcattgctctaaacaattggtttgcttgagttgcaattcaattttcattcgttgcttgttcatgcagcctgatgatggtgtgtatttggcgtgaggtgtatttgtcggcgtggtgggttttgaacagcgtggtgggttttgaaggccgtgaagcattaagcgatttttttttgtttgtattattattattatttgttcgtatcggttatccgtaaatcaaggaacaaacaaagaaaagataaaaatcgtaatcgaaacattataaatcatatatatactatgtaagatatatatttccaacaggcccatttaactgtacgtttttttttattcggcactaaatactggcgcacatattttttatgttttgttgcattttggcttttgttcgcaatcaaaataatatcatacaaatacaaattaagatagtacatgaatgcaatcataatattaataataataataataatcataatagtatatagcttatagcataaataatacggcatttgttctacaacaaaacttaagaatgtaaaataaagtacaatacgattcgtgaaggactagttttgagaagattggtgagacacaagaagattgcttctgttacttttacgctggtgataaacttaaaaacatacaaaaaaaatatgtatttccatctacacatataagtttcctagccagctggcgtgtccttttcaatggcattctcaatcagttgggccagtaggatgtggttgccgctgctgggactgttgatgttgctgctgctgggactgatgttggccaattgcagctcgaaagcattgctgcagattgtcatggcaagggaaaagggcatgattaggtaggttggaactggaggttcgcgcattggcaagagattactcgttccgaagaaggcgcacacaacaaacattttagtgggtatgggaatgctggatgggttaccactgcctcgactcgatggcggaagcggaaaacacggctggcggacaaaataaacggtcatgcgacccagaacacaaaaacaaaaaaaaaaaacagagaacaacagaaagtcacagaaaaatgtctaaacaccaacaaagcagtttccaatggaatacagatataatgccttcagctgaatcaatttcactctatttacaactttgaatattccataatttggaaaaaaaaaacatcctattgtcaacaaacagtagcaaatatcaagataaattcaattataaactaaccctgatacattcctttggtcaatatattcttatacaagtttacaaaagctacaacctgctatatgcatgtttgcatccttatttcgaatcagctaaaggcagtacactgtgcacaaaacacataacattaacacacacgaatgcttgttgacctatttacactaaacacaaacacaggatacatatatacacagcgaggatcgggcgttacagtgggtgcgctctgtacagtggatcgtctctagcagcgccagccagtggcatcagcgtcttaccttctgcgccgcggatttgcggtctggccgggaagattgaagcatccgcgtggaatgaccatgcgggcattgcccttcgccggacgcgaaccacccacagcctgcaaaccggccaagtgggcggcatagccatcgctaagcacggtggcattcgactgcagcttcttgccaacctgtgaaaggaacgtttaatggcttataaaatagctgattgtaactgattaccttgcccacgatgaagatttgatcggttcgcatgccaacattcgtgtagacactaatgtccttgctgctgccgtaggcggcagtaattgagattccatggttctgaaccaaattgttgagataggccgtcttgtggcccaatggatcggtggacaggccgtcggcgaacgagatcaggccgtgcgggaagttgtgctggctcagccaggacaccacgcgttgctgctgcatatccggtcgtccggtgatgtagatgagcaggtagcccagctcctgccagtggcggcaaacatcgacagctccggcacgcaccttgggatccctacccgtcaccgacatcgaagcggtgaaggagccatcaatgctgaagaccacgcattcggttaacggcggcaccaccgccatatagcaatccaccgaggtgtgatcgccacggaccaccatcttaaccggatatataccatagccaagggatacctgatccggaatgctgtacgaaatgcgtccattcttgtccgtcacctcggtgctgaggaatgtccactcgcccgccggcggatccttcataatgtgcacatccaccttttcaccgtgcagcgtgatcatgtccaggggtccgtacataaatctcgcattcaatcgctgctccctgccctcctgcacgattacatcgttggcccgatgattggcggctacatttttcagcttaaccgaggtccgtttcttaatccacttctccctcggctgtccgggatggaaggaggcattgtccttgtcatcgtttgagcccacaaagggtatgccctcgaatttgccaatctgccgtagaataaaggcaatcacatccggactctcccagtagctggcatggaagaggtgcggcaaggcgtgagcagggaaattactcaatccctccgggcaatataatgcgtaatccaagcgctttgtgccccaccatttgttttgcactgcgaatagaaatgtttaatcagttagttggcaatacgaatttaatcaattaaagctgctttcttagcgggcaactacgagcttcttacgggcatggatcgtactaagcgagacattctcaatcagacccgatatcgtgctctgcatggatgcgtccgacaaacggcgaccagccaataggttattgccatcgttaaagtgctgcggatgcgattgaatgacctccactgaaaaggataacaaacagtttcaatcaaaactattacaaatccatgtgtaactagtacaggaggactcacataaatgcaatggctgtccattacccagcggatacttggcgtaccgtgggacattgactggcgccaatatagaaaaccgggcgctcagaagcggctccaggcgcgaggcgatcggatcggttggatggaacagattgtagacctggtggcagttgggccgcggcagggcggccttggcatcgtgaagtttccttgcagccagcaccacagatagcggcgatccgaacatgaagaagtcacagacctcaaagtccaatttggtggcacgcgaatcgctggatgagctggaacggcgtctacgtggcgatggggcaaccagcaaacgcttggcatccagatcggcttcgatgaaacgctcgtcatcgtccaatcgcgaattacgtgggctcaacggattgtgggtatttatatttgtggccgcatctccgccggaattcgaggcacccgaagccgtgcccggctggctgccattcgatcggcagagagcctcgtacgccagcagcgaacccatcgaatcgcccagcatgacaatctggccggagaatccgtgaccctcctccgatttcaaaaactcatggtagacaatattggcagcggcaaccgtcttgttgaccgtctcgtggaattctggcgatgccacagatagtagtggtatagctccaatggggacatcggctatattcggtatatccgccgccgagggcgacgcatcaaaggagtacggactcaggctggagagaatgcccagggcgtcggtgcatattgaggggcacggcaccatcttgatggtcacatgggtgaggaggctgggatagtgctgtcgcataaccgcctcgaaggagccacggaatgtggtcacatcggatttcttggcggtcagctcgctggccgcatccaaaacgctgcccgcatggacaaccaggatcagaatggttgtgggacacgacggtgtactcggcgatcccggcggcgatgaatcgtgactgcgatccacgctggccgaggaacgtaactgccgcttgttgccgcgctccgaggccacgcgcatcagaaagtcctgattgaatatgctgtcctcttgccgcgagttgccacgcccacccaccgatgctgcactagagggtccgccatgtggcggcggactgtcgtcgccctcgccaagcagctccagcgagctccacttggccagcgagttcgtctcattggtgtctatgaaatgaaaatacatattagtttctctattattttagtttctctagaatattcataatgcaatgcttacccaggcaatcaaagaattcctcatccgaattggatttggagtccacttccaatcgctccatacgccagttagccacctgaggtgtgcgtaaattgaattaatacttgcatatagacacaattgtttatttataggcatggatatatgtatatttcttcgaatctgttctacaaaaaacggcatcgaatggctaagctaagctaatggaacttggctaatcaaaaactgcgactaagcaaattactaagggaatggatgaggggtaggaggctttaatatgggtcattggaggttttatactatctataatgacgcgctattagctgggcaattgctagtaatgaaaaagaaagagagagggcgtaaaagggagcgacagagagggcgagaggaacttacatgtctgcgtggcgctgtctttgcatgcggctttttggactgattttggattgttttcgatttaattgagcgagtaatttggtttataatttttatatatatttaatttattcggttttttttttatcgatttgtgtcgtttgtgttgtagttgttgtcgttggatcgtgttggatggaaggtaaattaaagattatttggtaagacgcagcacatttaaaggacatagcgacacacataacacacagaaaattgaacacagagacagaataaaggtgtttttgaatgaaaatattgaaaactagattaaaattgaagtttaagtgcaacaaaaaattgcacatcaaacttgaaacgctttgaaattcgaattaaactagttttgtcaaagttaaagacatatttttcttgctggattcagtaagcaattaagtaagattgttattcttattctatagaaaactctagtagatatcttttaaagtagcccttttaaatgggaaatttccctgacttttcagtcatgttaataacaaacacacaatagtaatttgcattaaggaacaccgaacttgtttaaacattcatttgcagaattaacacacgaaatccaccaaaggacacaggacaaagataatagataatcatctggccgtgctcacctggagatcgaagctatgggcagatcccaccggcgagtgaagggcaccctttgacccgaacttgcccttctgggccatctgaatactttgggagcgcgagcgctgcgcggatccgccttggttggctgacagatccacgcccgtgccaatggcatcgttctcgtcctcgtcgtcatcctcctcctcctcgccctcctcatccgaactggcctcggcgctcggcggctgctgggtgacaataggcggcacagccggagcggacttctttcgctcgctgcccgttgtggaggcggcggtggccgccgtgctgacgtacggctccgagacgctgtctgaaatggatgaatacgaataataaatacattgattacattggttcattttccagtcgatggattgatgtccgaatgaatacgaaaggtttcactgcctttctcaactacatatccttcaaattcaatatgtgaatgacatcattcattttttgctttatctttatgcaaacttatactttttacaatttagcaagtgtatgtggtgaggctgaagtggatgataggatagtggaggtggccaaagcggactgaccgtcgctgcactcctcgccgccgcccattttcttggccagcgccagttgcgtctgtcgctccagctcgcgtatatcctcgatggtcaagccgaaccactcgtcctgccatgcccacgcctgccgatgggcccgcagcatcatcttgcgcagcgccacatcgtggatgaacttctccagctttgtctgcatgccccagtagcggaactccacgcggcagatcttgtaggcggtcatcagggacatgttgcgcggtgtcggttgctttttgcccttcacttcgcgccaatactcctccagccaatcctcggccaagggtccacggcccgtcttgtccgacacaaagtgcttgggatcctcctccttcacatagtcaccgccccacagctgatccttgacaatgtcaattacgtctgcaagaacaaaatgtgctgattagataaaatccccaaacaagtagctaatattattcattattcgcaaaacaacaactcacctacgatacgattacgcaaatcgcttccggacagctggaagacattgtcctgatagccattgtccggataatagtatgtctcaatatccagcgagaatttctccacaaacggacaggtgtagcgagtcctggtatacggataggcattccatgcctcctcctccacggttaaagcgcttttcggcaagagacctgtggcgggcacatacgattcattatagcatacaaacgttattaacacaagatattcaactcacttttaatccagccaggcagatgattgcccacgtgatagatcttctttgtgtattgaccattaccgccgggtccatccttgtacggctcattgatgattatctcaacgccactgccctcgccatggctctcctcgcgactctttttctgtggatcggaaatcagtttggcacgattattattatggttctaatcaaaataaactgcagttcgttcgattgagcaacattgcgtgaatttccggtgtaaacgtttcatatattattgccattgtaaacaatttgtaaatatgtccaatgtgcaaagacgaataaacaattccgggcgcattgtacattttgtgacgatcaaagattgtatttgaaaactattgaacttttacaccggaaatggccaacgttaaatttgtatttatttttgttgcgaaagtgcttaattttttttttaactactttacacaactatttccaaaccaatcaagcgtaagtcgaactgcctttgaaaaactatttttaaatcaaagatttaggctgcatataattttagatggctgtttatcgattagggaattaccgaaagtatttagaagatgactaggcgaactgatatttacatatgtataataggaattggaataggattcctcaccgcaatcatgtagagctgggcgatgcggtactcctcgacggtgaggggcagcggaatgcggtactccttgatcagcatgttgacaccgcgtgacttgggtccttgtcgttgaaatggcggactcccctccggctattgacgttctgcgaatggcgcactcttccgacggtaccgactgactattccggcgtcctcctttccggctgcctctattggctctcgttggctgagggaatggcaatcatcgattgccgccgctggtcatggctggatgatgtgaaggcgcgacgcggctgtcgtccgacgttttttttttgttttttgtggcgaggggggtgattggcgtggggtggcggcacgtcgtctatgacctggtcggaatgatggaattggaaaaaacgaagcggggtcagtcagcggttgttctatggataattttccggggccgtaggtgtacaggtccagatgtgtgtccgtgtgtttgtttgtttgtgtgtgtgtaggtgtgctagaacagttgctatggcttctgcctggtgcctatctgacatttaagtgaatgggctcccagcaaactaaaattgcacagccctatgcgaagttgaaatgttcacttcaaggtagggcgaaattttagaattttcatctcagtgaagaatgaatatgtgtattttatattttgttgtgcgattatctaaaagtatatacattttaagctatttactgctgcgtactttcagaaatacgcgcagccaaatgaaaaattaactaataatcccgaaagttattagctaataaacacgctgaaaaagatttgaagagcacgcaaaatgttttgcaaatgtaatttaaacaggatataaacattctactccccatattcacaatcattggctttaaacaaagggcaaataaaggccatcatttttaaaatagaccacatgagctatatagtgagttctcaaatgcaaattaacattttctttattgatttcgaatgacagcagcgaaatggaatgggcaagtctttgacaagcactttggataatcggatgtgacctgcgggtgagggctctcgggggttccttccttctttatttttttttttttttcgatgcgaatcggtggtcaatgtcagcgaaatgccaacaaaaagaagtgattctcccccctgataaggtcaagtaaggtacatatcggtacatttcacaaggaacagccaaagaactactagttcaaccttcttcactcgcatgtccctttgcccatttcgctttcagttgcataaataatcaatttgttacttgaatggttgtatattatgatagtgattagaagttattaccaaacttttggctcgcttgcaattgaaactggccaaaattccgtttattgtgcataattgggttgctcttcttaccttgaaccatttctacttttcctatctttttgctaattggatttattgttgactgctgacaacagcaataccaa

SEQ ID NO: 23201 - DNA, 4300 bp, DROSOPHILA
cacaaacaaacaaacacacggacacacatctggacctgtacacctacggccccggaaaattatccatagaacaaccgctgactgaccccgcttcgttttttccaattccatcattccgaccaggtcatagacgacgtgccgccaccccacgccaatcacccccctcgccacaaaaaacaaaaaaaaaacgtcggacgacagccgcgtcgcgccttcacatcatccagccatgaccagcggcggcaatcgatgattgccattccctcagccaacgagagccaatagaggcagccggaaaggaggacgccggaatagtcagtcggtaccgtcggaagagtgcgccattcgcagaacgtcaatagccggaggggagtccgccatttcaacgacaaggacccaagtcacgcggtgtcaacatgctgatcaaggagtaccgcattccgctgcccctcaccgtcgaggagtaccgcatcgcccagctctacatgattgcgaaaaagagtcgcgaggagagccatggcgagggcagtggcgttgagataatcatcaatgagccgtacaaggatggacccggcggtaatggtcaatacacaaagaagatctatcacgtgggcaatcatctgcctggctggattaaaagtctcttgccgaaaagcgctttaaccgtggaggaggaggcatggaatgcctatccgtataccaggactcgctacacctgtccgtttgtggagaaattctcgctggatattgagacatactattatccggacaatggctatcaggacaatgtcttccagctgtccggaagcgatttgcgtaatcgtatcgtagacgtaattgacattgtcaaggatcagctgtggggcggtgactatgtgaaggaggaggatcccaagcactttgtgtcggacaagacgggccgtggacccttggccgaggattggctggaggagtattggcgcgaagtgaagggcaaaaagcaaccgacaccgcgcaacatgtccctgatgaccgcctacaagatctgccgcgtggagttccgctactggggcatgcagacaaagctggagaagttcatccacgatgtggcgctgcgcaagatgatgctgcgggcccatcggcaggcgtgggcatggcaggacgagtggttcggcttgaccatcgaggatatacgcgagctggagcgacagacgcaactggcgctggccaagaaaatgggcggcggcgaggagtgcagcgacgacagcgtctcggagccgtacgtcagcacggcggccaccgccgcctccacaacgggcagcgagcgaaagaagtccgctccggctgtgccgcctattgtcacccagcagccgccgagcgccgaggccagttcggatgaggagggcgaggaggaggaggatgacgacgaggacgagaacgatgccattggcacgggcgtggatctgtcagccaaccaaggcggatccgcgcagcgctcgcgctcccaaagtattcagatggcccagaagggcaagttcgggtcaaagggtgcccttcactcgccggtgggatctgcccatagcttcgatctccaggtggctaactggcgtatggagcgattggaagtggactccaaatccaattcggatgaggaattctttgattgcctggacaccaatgagacgaactcgctggccaagtggagctcgctggagctgcttggcgagggcgacgacagtccgccgccacatggcggaccctctagtgcagcatcggtgggtgggcgtggcaactcgcggcaagaggacagcatattcaatcaggactttctgatgcgcgtggcctcggagcgcggcaacaagcggcagttacgttcctcggccagcgtggatcgcagtcacgattcatcgccgccgggatcgccgagtacaccgtcgtgtcccacaaccattctgatcctggttgtccatgcgggcagcgttttggatgcggccagcgagctgaccgccaagaaatccgatgtgaccacattccgtggctccttcgaggcggttatgcgacagcactatcccagcctcctcacccatgtgaccatcaagatggtgccgtgcccctcaatatgcaccgacgccctgggcattctctccagcctgagtccgtactcctttgatgcgtcgccctcggcggcggatataccgaatatagccgatgtccccattggagctataccactactatctgtggcatcgccagaattccacgagacggtcaacaagacggttgccgctgccaatattgtctaccatgagtttttgaaatcggaggagggtcacggattctccggccagattgtcatgctgggcgattcgatgggttcgctgctggcgtacgaggctctctgccgatcgaatggcagccagccgggcacggcttcgggtgcctcgaattccggcggagatgcggccacaaatataaatacccacaatccgttgagcccacgtaattcgcgattggacgatgacgagcgtttcatcgaagccgatctggatgccaagcgtttgctggttgccccatcgccacgtagacgccgttccagctcatccagcgattcgcgtgccaccaaattggactttgaggtctgtgacttcttcatgttcggatcgccgctatctgtggtgctggctgcaaggaaacttcacgatgccaaggccgccctgccgcggcccaactgccaccaggtctacaatctgttccatccaaccgatccgatcgcctcgcgcctggagccgcttctgagcgcccggttttctatattggcgccagtcaatgtcccacggtacgccaagtatccgctgggtaatggacagccattgcatttattggaggtcattcaatcgcatccgcagcactttaacgatggcaataacctattggctggtcgccgtttgtcggacgcatccatgcagagcacgatatcgggtctgattgagaatgtctcgcttagtacgatccatgccctgcaaaacaaatggtggggcacaaagcgcttggattacgcattatattgcccggagggattgagtaatttccctgctcacgccttgccgcacctcttccatgccagctactgggagagtccggatgtgattgcctttattctacggcagattggcaaattcgagggcataccctttgtgggctcaaacgatgacaaggacaatgcctccttccatcccggacagccgagggagaagtggattaagaaacggacctcggttaagctgaaaaatgtagccgccaatcatcgggccaacgatgtaatcgtgcaggagggcagggagcagcgattgaatgcgagatttatgtacggacccctggacatgatcacgctgcacggtgaaaaggtggatgtgcacattatgaaggatccgccggcgggcgagtggacattcctcagcaccgaggtgacggacaagaatggacgcatttcgtacagcattccggatcaggtatcccttggctatggtatatatccggttaagatggtggtccgtggcgatcacacctcggtggattgctatatggcggtggtgccgccgttaaccgaatgcgtggtcttcagcattgatggctccttcaccgcttcgatgtcggtgacgggtagggatcccaaggtgcgtgccggagctgtcgatgtttgccgccactggcaggagctgggctacctgctcatctacatcaccggacgaccggatatgcagcagcaacgcgtggtgtcctggctgagccagcacaacttcccgcacggcctgatctcgttcgccgacggcctgtccaccgatccattgggccacaagacggcctatctcaacaatttggttcagaaccatggaatctcaattactgccgcctacggcagcagcaaggacattagtgtctacacgaatgttggcatgcgaaccgatcaaatcttcatcgtgggcaaggttggcaagaagctgcagtcgaatgccaccgtgcttagcgatggctatgccgcccacttggccggtttgcaggctgtgggtggttcgcgtccggcgaagggcaatgcccgcatggtcattccacgcggatgcttcaatcttcccggccagaccgcaaatccgcggcgcagaaggctgcatgaacaagcaacgaatgaaaattgaattgcaactcaagcaaaccaattgtttagagcaatgaaaaacaacaattaaagcatcttgtaaacagatagaagcgttaaaaccaaaaacaaaacattacagacaattgatgttagaattagtgttctaga

SEQ ID NO: 23202 - protein, 1250 aa, DROSOPHILA
MLIKEYRIPLPLTVEEYRIAQLYMIAKKSREESHGEGSGVEIIINEPYKDGPGGNGQYTKKIYHVGNHLPGWIKSLLPKSALTVEEEAWNAYPYTRTRYTCPFVEKFSLDIETYYYPDNGYQDNVFQLSGSDLRNRIVDVIDIVKDQLWGGDYVKEEDPKHFVSDKTGRGPLAEDWLEEYWREVKGKKQPTPRNMSLMTAYKICRVEFRYWGMQTKLEKFIHDVALRKMMLRAHRQAWAWQDEWFGLTIEDIRELERQTQLALAKKMGGGEECSDDSVSEPYVSTAATAASTTGSERKKSAPAVPPIVTQQPPSAEASSDEEGEEEEDDDEDENDAIGTGVDLSANQGGSAQRSRSQSIQMAQKGKFGSKGALHSPVGSAHSFDLQVANWRMERLEVDSKSNSDEEFFDCLDTNETNSLAKWSSLELLGEGDDSPPPHGGPSSAASVGGRGNSRQEDSIFNQDFLMRVASERGNKRQLRSSASVDRSHDSSPPGSPSTPSCPTTILILVVHAGSVLDAASELTAKKSDVTTFRGSFEAVMRQHYPSLLTHVTIKMVPCPSICTDALGILSSLSPYSFDASPSAADIPNIADVPIGAIPLLSVASPEFHETVNKTVAAANIVYHEFLKSEEGHGFSGQIVMLGDSMGSLLAYEALCRSNGSQPGTASGASNSGGDAATNINTHNPLSPRNSRLDDDERFIEADLDAKRLLVAPSPRRRRSSSSSDSRATKLDFEVCDFFMFGSPLSVVLAARKLHDAKAALPRPNCHQVYNLFHPTDPIASRLEPLLSARFSILAPVNVPRYAKYPLGNGQPLHLLEVIQSHPQHFNDGNNLLAGRRLSDASMQSTISGLIENVSLSTIHALQNKWWGTKRLDYALYCPEGLSNFPAHALPHLFHASYWESPDVIAFILRQIGKFEGIPFVGSNDDKDNASFHPGQPREKWIKKRTSVKLKNVAANHRANDVIVQEGREQRLNARFMYGPLDMITLHGEKVDVHIMKDPPAGEWTFLSTEVTDKNGRISYSIPDQVSLGYGIYPVKMVVRGDHTSVDCYMAVVPPLTECVVFSIDGSFTASMSVTGRDPKVRAGAVDVCRHWQELGYLLIYITGRPDMQQQRVVSWLSQHNFPHGLISFADGLSTDPLGHKTAYLNNLVQNHGISITAAYGSSKDISVYTNVGMRTDQIFIVGKVGKKLQSNATVLSDGYAAHLAGLQAVGGSRPAKGNARMVIPRGCFNLPGQTANPRRRRLHEQATNEN

SEQ ID NO: 23203 - DNA, 4129 bp, DROSOPHILA
gtttttatgtatacttaattaattgtgtgttgaatattttttgtttgcagatgatgaacgatggattcgtgttgaataattgtgatgaaaaggagctgcatcaggtccagtttccgactgcgccaattaacgagtgaagccttccagtgtcttccttctgtggtcctttgtgtttcttttccctctattgtttcttcccgattttaattaaaaggtatttccctttaaggttgtgattttattttgatctcactcccctcgagtgtagcttaagactgacttattacaaaggagaatcaagtattatgtatggctctgtgttgtcgcgaatctgctgacccagcggatttggggaatgcctccgttttgctgcgctgtttccgcctacactgttgcaacatgaggggacaacgaactagcggctcagcgtggaggtttaggggggtggggaagtagtggcgtggactgctgatgtggtcagatgtgggccaacgaactaatggttctggcgtggaggtttagggggtggggaagtagatgtagatgtggtaactctggcagttgcgaaacgaaactgaaaatgcgagtgggacacggattagggattgggttttgtgaactgggattcggcggcccctttacaatgccactttgcttaatggcccgatactgagcttaatcgttttgtttcaagttgccataaaaggccataaaaggaaatgcatacatcataaaatgtttcgctgcttcctgcgaattttaatgcgaatctctttatgaccagccacaaattagccatcgagcatgaaaacaggcgaaatattcgctctttgagttctatatccaggcattctaagttaaagtaactaaaatgttagcaaatagcagtacaagtagcccttgtgatcgctgtcatctcgatttggcctgatttcgagagagctggagtcagttgaaatccattctcgataccattcggatcgtagcccacaaaaaaaaactaccaaattccaaataaaattttttataaaaacaaaaaaaaaaacagttcgtaaatatttccgattccgtacaaatttttgagcatcatggtgtggaatacgctttccttctgggacggtcaaccagtcacttccccggtatatccccggatgggggatatgtggaaccccaataccgccggctaccagaattaccaacaccctcagaaccattcgcatagcaattactttcaacggatgggcatgggtgacattcgccagatgagctgtcccatgccgaactactgtcctcaattccgggagcccggattggacgatgtggatgccttttacgcttacaacggcatggatataactcaggcctacggcggtggatctggagctggtcacggagcaggatctggagcgcggggcgacttttggtagtaactcgtcaaccaatacctggcgtatgcttcttaattttctgtgcgtttgatatatggaactattaaaatgttttattgaatagtaataccttcaatatgtcaaattctgggggggtatccatttgtccatttgtaagtacatcatgacatgtgagatacatcgcttgcatgtgtcgcattcgcaaatgaaaagttaagaggtgcaattgcaatttgccaaaatgaaagtcctaaaacaatcgttgcatttcgattcaattcgtttcgattcgatggccttccttgggcatctcatatttctgcaattcccattttacggacagcctgcagcctgcggcctgtcatggctcgtccttaattgatatgcctgcgcaaatattttgctataattaaacagttgtccggctccaggatgccaggatctctggctgcactgcagcacttaatggcctggccacaaacatttgtccagacgcttgctgccactgccactaccgccgacgttgcctttcaccagcctttcacctgactgagtccttcgcctgagggcggtacggtacggtacggtatggaatggggggggggggggggcgtggccgggcatgccagtcggcggtttgtttcctttacggatcgaagagcaggactccgggcgagcaaattgcaggcggactgccgtttcggcaattccggaccaagtaaaacttgattaatgtccgctattcaatttcgtctttatcgtaccctggagcaaaacgatctcgcaaggggtatcacgagtctatcttcattcagctaaattgaagattaacgatgtgcatttccctaacaattataacaaagttggctacgaatctgttaccaacttctctttaatgatttcagtttataataattttaaattagtaaattattgaatacagcatacattgctattttaattgattaagatatgctgaatcacgagttcatcagcaaaaatggattttatcagccaaatatacaggaagtataaaaaacactattttctctgtataaagttttaatttcatttgtttctcaaaataacgcagacattaagaggtacgtaatgggcttaatcctttgttgttcttctatgcaattaagcccaaaagtatttaacaacaattccagttgagttttcagccgcttggctggaaaatgtaaatggaaatgggaaaagcggcgagtcgaaaggaaatggccaaacgcaaaaggcgttcaacttgaaacacatacacaaacatatatatatataaacttatatatttatatagaacgcttcgggggaattccgtgcgcttttccccctttctcctcgcctttcaccgcctttctccatccattgtccatcgctttgctgactgtgtcaaaaatgtgttgaaaagtaacagcaaaacagaaagtgacagccgtaaaaagcgttagacttgccatctagcagccattttgcgcgctgacaaatatggcggcaactgtggcgggcaggggcgtggcaaatcgggagcggctggcagatggaagagattttcgcatttcgtatcataaatcccggacgctcagcggcggaggaggcggatccgacgggcaaaaacgatttacgaccacacgaatgcagatatcagacaggagttacaggcagtcgcatctgtactgtgtatgatacagcggtacagtgaagacccgcaataaagcatcagctatgttagtctattcctattttatatttcatagattttttaagcctttttgccagtttttttctaagtacggaaagtagaaagagcattgaatgtttgtatttttaagatactttcatgcttcttacaaagatacatcgataatgggatcacgaacagaaaagttttcaagttaaagtgcaaaacttaatcactttttcattcaaagtcgatccgcactattctaatgcccaactatttccatttcattagttcgcccaaagagttttccctgtgcaaacaatacgtatctgtatgtaaataaatagcgctacaattgctgcgttttcattatcgcttccaattcgattgcttttggcttttgatatatgaaattggcaaaagttttttgtttatttggcgttcaatgttagggggctgaaatgaatttagaatgaaaatggctgtcagccgagcagataacttaaatgccaacagccatgaaatgtcggtctcaaaagtttttgtttaatttcgcatatagtttctgttgcctgtttgttccaattagatcacgtgaccttaaacgctttcgctggtaaaaattgtgcgaaattctcgacacttttgcaacggtggaaattacaaaaaaacattaactctgtctgtggtttgactttcaaaggccttcggctcatttcttattatatcccgcctgcaatttcactgattaattgctggggtagcattacctcctttgccaactggtcctttctacattttcgtttttattttttgtaattttatgtgttttcagatacaattgttaggcattttgggtagcttgggctatcagcttgcaagggggtttagctaaaggtatgcacaaaacaaatataaactattggaactaaaaaaatttatacaaatatcaaaaatagagtatataatacttaacacaattaaattgctcagaaattcttggtaattttcggctttt

SEQ ID NO: 23204 - DNA, 577 bp, DROSOPHILA
ctaccaaattccaaataaaattttttataaaaacaaaaaaaaaaacagttcgtaaatatttccgattccgtacaaatttttgagcatcatggtgtggaatacgctttccttctgggacggtcaaccagtcacttccccggtatatccccggatgggggatatgtggaaccccaataccgccggctaccagaattaccaacaccctcagaaccattcgcatagcaattactttcaacggatgggcatgggtgacattcgccagatgagctgtcccatgccgaactactgtcctcaattccgggagcccggattggacgatgtggatgccttttacgcttacaacggcatggatataactcaggcctacggcggtggatctggagctggggcgtggcaaatcgggagcggctggcagatggaagagattttcgcatttcgtatcataaatcccggacgctcagcggcggaggaggcggatccgacgggcaaaaacgatttacgaccacacgaatgcagatatcagacaggagttacaggcagtcgcatctgtactgtgtatgatacagcggtacagtga

SEQ ID NO: 23205 - protein, 162 aa, DROSOPHILA
MVWNTLSFWDGQPVTSPVYPRMGDMWNPNTAGYQNYQHPQNHSHSNYFQRMGMGDIRQMSCPMPNYCPQFREPGLDDVDAFYAYNGMDITQAYGGGSGAGAWQIGSGWQMEEIFAFRIINPGRSAAEEADPTGKNDLRPHECRYQTGVTGSRICTVYDTAVQ

SEQ ID NO: 23206 - DNA, 3427 bp, DROSOPHILA
gggatcagacaactttgaactttatacgtggttgcctgcgtctgtgtgagtgacgtacgctgtttttcttatgggttggtgaaatgcggctgccgccgtcccttgtttttacaagaatacagagaccggtccgaagttacttggacttcttttaactgagatccttttagctcagtgacactttacacgtccatttaccgattattctgccttttttcgtggacttttctttgattgaattttctatgctgccaaacacaccacacaccgaattgcgaatagaaagataatggagagaaatgtatcgatagcatccgctaccgatagtcgatgagcacaagtcactattgtctgccgaacagagattgtaaaatgttcccaattatataatttagctatcacttttgtaattaaaggagagcttgtccttgtctcctgttacgataatgctataaacaaagcaccgacgattaattcgtgcggcttccaatactaatacttccactattcaccacagccgcgtacgttgcgcgagtgttcgtggatagcccacactaaacactcacacgaacatctacattactgcggaacttcttaaaatcaagaaaagtatctctgccttgacataccaccccctttttcgactgaaaacgcatacgcaccaactaattgaatcaaatgcacacggctaggagcggaaattttaaaaacttctgcttggaaatgtctaaaatcacagagcaaaataaaacttgaccgagaatacacttgctgttgaaaaaactgcaaactcaccaacataaacgttgccgatagagatgggcgcagcgcatgagctagagcgggatgccgatgttgtgtagtcccgtggtgaaaactcgggaaatgctgccacgtctcttctccgccacctcggctagagttgccaacgatttggattaatcgattcatcattgtcgcacaatgctcactcgataaagttcactatccaggtgatttgaactaagttaaatgttaatatgttttacccaaaaacaccatttttggtgaacccgttgctggaagccgatatccttaaagtgaatgtatgtactttcaatgtgcacaaatacgtatttacaacaaaaactggcttgcaaattttattaactgttaattcctggttttgtcaagtctgctgcacttgctccgctgttggaatggctgtgccttactcccaaagtcaccacttacagggtgaacactcttaggtgttccgttgacgactttcggaaaaagttagaagaaaaactcgccattcgctacggtgtaaaatctccaaggatttactgcttgccaaacctacccgagatgttgtgcattgatccgctggactcacagctcaccaaagctgtggccgactccgagctcaaggaggtagtggttgacactaactgcggagctgcactactgcgaggcgcccacatatacgcccccggtgttttagctatggagtcaaacactgagcgggaggaactcgtcaatgtctacgcagatctggatggaaaatgcaagcgcgggacggtcaagcggtacgaaagcccaaataaggttttcctgggtacaggcaaggtgttaatgcagcggtatcagctgttcaacaacgcggagaagcccgcctctggagtggccgtggaaatgcagtccaacgtcagcggagtgcccacgctgggggatctaagcagcgaagacggcctgttgcaaaacctgccttctattgtttgcgtccgtgtcctggatccgcagcccggcgagcgcatactggacatgtgtgccgctccgggtaacaaaacaagccacatagccgagttgatgggcgatcggggatctgtggtggccctagacaattcggccagtcgcgtccgcagcatgctgcccaaattgggacactacaaaagcataacggcgcatgtttttaactccaccgaggcagtggcagcggacgctccatctgcacccgtgggagaattcactgggcctccgtttccatgtgaaagctttgaccgaatcttgctcgatgcaccctgcagtgggctgggcaaccggccacagttgtcctgcagcattaaacaggttaaggtcttgtcctcatatccccatattcagcgccggctatttgaacaggcagtgcagctcgttcgtcctggcggcatccttgtatatagcacgtgcaccgtcaccgaggatgagtgcgaatgtcttgtggcctgggcactaagaaaatttgtcgagctgcggctaacagatgccactccccggtggggcggtcccggacttccgcttcccggtttcgaggcatgtaaatctcgtctgttgcagcgcttcggtccaagcggagcaaatgcggacactgtgggcttttttattgcgaagtttcagaaaatataaataaattcaacttcactgaaattttttgtttattgggctcgataatttaaacattcgttttgatttgcaaaagtaagccggcttatgagtgatataagtgagacctacgctagtggtatttgatcaagaaaatttcaaccctacgcttagaaaagcatttgaaaaatgcagtctgataacatttaggctttgctctcccatagctgcttgtgctatcttaatggagatacataatgttatctttttgttttcgagttaaaaagaacttaaataatttacaattcataactaatgtaattttacttaaatctaagtccgtcattgttatttaacgattcttgttaaaagcaaaattatgcatttcgggaactttaaaactttctacgacaaagatttacttaatgattttacgagttgtaagttaaaaggaagtcaaaaatattaccaatcattgatgggaccccgataaatgcatgttttgtttgtgcttgaggaaattactaaatatgatgagaacatcgatgaaggcttttaacgctggcggaatctctcaccttgactgcagtgataattatcgtaaaactgcttgactcccacgataaaataatgttttaaataaggtattcgcataatttatttcatcgttcgatgccttttgtttccccggcgcagcattattgtttcgctagacgtttagcgttctggttcccggtatgctttcgccagaataatattcactactcgccaaacacggctctcagtcagtgctggtgcatacttatggccaagagaatggattggctaggaccaaacaaaagtggaaatgggaagaacccaccaacgtcaggttctttcaatataatagtcttaagaactaagcctaattatatgtacggatactattaacatgattttacgttgggatgttgagcgtcttaaactgatcttcgtgcatctcagtcatcatgaaggttccatcctgaagcaacaaaacaacgcg

SEQ ID NO: 23207 - DNA, 1427 bp, DROSOPHILA
aactaagttaaatgttaatatgttttacccaaaaacaccatttttggtgaacccgttgctggaagccgatatccttaaagtgaatgtatgtactttcaatgtgcacaaatacgtatttacaacaaaaactggcttgcaaattttattaactgttaattcctggttttgtcaagtctgctgcacttgctccgctgttggaatggctgtgccttactcccaaagtcaccacttacagggtgaacactcttaggtgttccgttgacgactttcggaaaaagttagaagaaaaactcgccattcgctacggtgtaaaatctccaaggatttactgcttgccaaacctacccgagatgttgtgcattgatccgctggactcacagctcaccaaagctgtggccgactccgagctcaaggaggtagtggttgacactaactgcggagctgcactactgcgaggcgcccacatatacgcccccggtgttttagctatggagtcaaacactgagcgggaggaactcgtcaatgtctacgcagatctggatggaaaatgcaagcgcgggacggtcaagcggtacgaaagcccaaataaggttttcctgggtacaggcaaggtgttaatgcagcggtatcagctgttcaacaacgcggagaagcccgcctctggagtggccgtggaaatgcagtccaacgtcagcggagtgcccacgctgggggatctaagcagcgaagacggcctgttgcaaaacctgccttctattgtttgcgtccgtgtcctggatccgcagcccggcgagcgcatactggacatgtgtgccgctccgggtaacaaaacaagccacatagccgagttgatgggcgatcggggatctgtggtggccctagacaattcggccagtcgcgtccgcagcatgctgcccaaattgggacactacaaaagcataacggcgcatgtttttaactccaccgaggcagtggcagcggacgctccatctgcacccgtgggagaattcactgggcctccgtttccatgtgaaagctttgaccgaatcttgctcgatgcaccctgcagtgggctgggcaaccggccacagttgtcctgcagcattaaacaggttaaggtcttgtcctcatatccccatattcagcgccggctatttgaacaggcagtgcagctcgttcgtcctggcggcatccttgtatatagcacgtgcaccgtcaccgaggatgagtgcgaatgtcttgtggcctgggcactaagaaaatttgtcgagctgcggctaacagatgccactccccggtggggcggtcccggacttccgcttcccggtttcgaggcatgtaaatctcgtctgttgcagcgcttcggtccaagcggagcaaatgcggacactgtgggcttttttattgcgaagtttcagaaaatataa

SEQ ID NO: 23208 - protein, 358 aa, DROSOPHILA
MLCIDPLDSQLTKAVADSELKEVVVDTNCGAALLRGAHIYAPGVLAMESNTEREELVNVYADLDGKCKRGTVKRYESPNKVFLGTGKVLMQRYQLFNNAEKPASGVAVEMQSNVSGVPTLGDLSSEDGLLQNLPSIVCVRVLDPQPGERILDMCAAPGNKTSHIAELMGDRGSVVALDNSASRVRSMLPKLGHYKSITAHVFNSTEAVAADAPSAPVGEFTGPPFPCESFDRILLDAPCSGLGNRPQLSCSIKQVKVLSSYPHIQRRLFEQAVQLVRPGGILVYSTCTVTEDECECLVAWALRKFVELRLTDATPRWGGPGLPLPGFEACKSRLLQRFGPSGANADTVGFFIAKFQKI

SEQ ID NO: 23209 - DNA, 2581 bp, DROSOPHILA
taactaagtaccttatgctacaaagcctaaaatctagggatcacgttagctttagtatatttaaattacccgctatttaccacagacgttttttgtctatctgccaactctatgcaatccatttcctgtgaatggcaaccagcaggtagagaggaagaagaagacacacaataacaacgcaaaaaaaaaaggtagaaaaatctagcaaattctaaaagtctccgtaaaaataaaatacaatcggccacaatggaagcaaagcgcgagagaaagtcatccctggtacgtaccttgtagatatatgcgaagaagaaagaaaaccctgatagaagtgcgattttcaggcaccactttcgccatgtccaattccggatattaccgatgacgatttggtgagcatttcggtaagggatcttaatcggaccctcaagatgcgtggcctgaaccgcgaggagatcgttcggatgaagcagcgccggagaaccttaaagaatcgcggatacgcagccagttgccgcatcaagagaatcgaacagaaggacgagctggagactaagaagtcgtacgagtggacggaactggagcagatgcacgaggacaacgagcaggtgcgccgcgaggtgtccaactggaagaacaagtacaaggcgctgctgcagttcgccatccagaacgagatacccattcccagcgagctggagggctgctgaacgattgcccagtcacattcctgtttctgtcaaaattacaataaacccaaaacggaaaaaaacacctgtaactaaagtacaatagctggcaaatatccttcctcaataaacgtaatctgctcaagaacctctgcatcgcctttattgaagcaccctgtatttagcataaacaaaacccgtgtcggcgctgcgctgcgaatgtcataagatccggagcgcacaaggaactcggcaaaaggctggtggttatgtattcatctcgatagctccgctctccaaccagttcatccatggcatttcggttctttggcaagtccttgctgtacgctctgccacttggcgtcactttcctggactgcgttggttatgtggccagggtggatggtgagtcgtccggagtttattcgctccatgttagtgtgcgctaattaatccacaactttttgcaggcatctccatgcagcccgctctcaatcccgtgccggatgaaaaggactatgtgttcctgctgcgctggggcacccacaacagtcaggtggagcgcggcgacataatatcgctcatttcacccaaggatcccgcccagaagattatcaagcgcgtggtggggctgcagggcgacgtcgtgtccacgctgggctacaagcacgagatcgttcgcgtacccgaaggacattgttgggtggagggcgatcacacaggccactccatggacagcaatacctttggacccgtcgccctgggcctgatgtccgcgcgggcagtggccatcgtgtggccaccggaacgctggcgaatactggagaacgaactgccgcggcgacggagacccatacaggcctccaagaactccagcaactactacaactagactgaccaactggcggagagcctgcgcccaagatagttccaattgtgtacatactgaaccgtatattttataaacaatttgttgtgttcccgcatgcaaagcaaagtaggatgttccaaagtaaaaattaaagttaaagccaaaggaatagctcttatactacatcatttttagctcccgaatgccgaactcctccatgaggctgagtgtcggcttgagagccacgccggcgcgcactatttcatagtagccaggagtggccaggtcaatgaccgtggaggccagtcgtcgctcctcggtcagaccgattcgaccggcatcgaagacggcgcccaattggggccatagggaacggaactcggacacctgcagactgctgggcgcactggagcgattggcgctggtcagggccaggggcttctcctgccacacggcgcacaggtcgcgcatgaagttgaagtccggaatgcgtatgccgattttggaggtgctgggattaaggaaacggttgctcagctgggacgtccgctcgatcacgatggtcagggggcccgggagcaaacgagttagcagctcgtcgctgagatgggcagcctgaccaaagcgtcgcaacgcatcgatgttgtgaacgcagatggccacgggcttgtgttcatcgcgacccttaatctcgtagagctgctgtatggctgtctcgttgttggcatcgcaggccaggccatacacggtatcggtgggcagggcaatcacttggccaccaagcaggcactggcgggccaactggagagcagcctcgtcgcccaccgcgcacactggagtcctcagctcgctcgcttggtgctgcattctgctggatgtgtggtgagcacggagcagtcgataaaggctcgtttgaaggcggcgcattagtctcgccaggtgtggttgcactcgtggttgcagcacttgtaaaacgtggtcatgggctcatccgccgaccgcgtctggatttgcataaagt

SEQ ID NO: 23210 - DNA, 516 bp, DROSOPHILA
atggcatttcggttctttggcaagtccttgctgtacgctctgccacttggcgtcactttcctggactgcgttggttatgtggccagggtggatggcatctccatgcagcccgctctcaatcccgtgccggatgaaaaggactatgtgttcctgctgcgctggggcacccacaacagtcaggtggagcgcggcgacataatatcgctcatttcacccaaggatcccgcccagaagattatcaagcgcgtggtggggctgcagggcgacgtcgtgtccacgctgggctacaagcacgagatcgttcgcgtacccgaaggacattgttgggtggagggcgatcacacaggccactccatggacagcaatacctttggacccgtcgccctgggcctgatgtccgcgcgggcagtggccatcgtgtggccaccggaacgctggcgaatactggagaacgaactgccgcggcgacggagacccatacaggcctccaagaactccagcaactactacaactag

SEQ ID NO: 23211 - protein, 171 aa, DROSOPHILA
MAFRFFGKSLLYALPLGVTFLDCVGYVARVDGISMQPALNPVPDEKDYVFLLRWGTHNSQVERGDIISLISPKDPAQKIIKRVVGLQGDVVSTLGYKHEIVRVPEGHCWVEGDHTGHSMDSNTFGPVALGLMSARAVAIVWPPERWRILENELPRRRRPIQASKNSSNYYN

SEQ ID NO: 23212 - DNA, 3524 bp, DROSOPHILA
aaaaaaacactaagtacattatgaaaagaacgagcctgccgcactgttgtagatatataatataataaaacacagaaaagcacgaactatgcgtaatgcgactttattagttacttaaacttatctgttacaaatgcatttgaacttcaacacagctaaaaattaaaataaataaaaccctatggttcgatcctatttgttttcatttaaaaaaaaggattacatatagtttaaataatatcaaagttcacaatttcattttgcccgctaaaccttgcaggcactagatataggccaggtatgattgcaaataagcctattccacatatcattaaattaaaagatttctctagaacactttggtacacaccttcataaacaattttggataaatatcaaactgaatgttgtttcaaacggttattttaatttaactgactcccgatttttcaacacgagcagctccactgctgctcacagttgtacgcgcgaactctgaatgccaaaagcgaaattcggctgcacggaaattgtccagagatgatttggttccggctgtgcggaccttagaatgctcttctgtgctaagctatttaaatcctaatattactgggagtgtattgcctgtcgatagctttaaactaactgcagtccagtaaattttaagatttcgaaggttttttcgaatatagtatatgatataaaacgcgggtttcaatgcttgcacggttttaagtgcccaaacttagggtgtagcgcccttttcagttcgcccgtgtggcggtgcacttagttagccaattacgcgtcgtggtgggtatatttattgatgtggcaactttgggcgcaataataataatattgtactttttttgttcatattaggtaagaaattcgaaattattttttattatttcattttattatgtcattcttttgtagatatttattgatataaatacttacccagggttgccacccagtgtattgtatttaacgtaggccctgtgtgtacacactgttacattagccggcgcattttatttagcgttaattgcttttctttcttgatttgacttggtagtgcatcaggactgcaagtatggccgacgatgagcaagaggaccagaaggagtaccgctgggaaacgggctatgaaaagacatggtgcgatggtgtgcgtgacaatgtaagcccgcacttacttttaatcctattagggaggccatcaaggacgacgaggatgggatgctggatggagccattgcagagatcattcagaaggccaaacgccagaggcaggctcaaaagtccaagcagaaccgcctgggcatgatgcgccacatgttcgttgtgctcgattgctctgagtccatgagcgtgcctgatttgaaacccacacgactgcggtgcaccgtcaagctgctggagctgtttatcgaggagttcttcgatcagaaccccatcagccaattaggactcatagcgctaaaagctaagcgagcggagaaggtgaccgaacttaccggcacttcgcgcgtgcacctcaaagcgctagagaggtaagaaccgaatcaaaccagcgttctccatttatatcccctttttgtttagcttggctaacgtgtccttgaccagcgagccttcgctgcaaaatggcctagatctggccctaaaatcgcttaaggtggtgccgtcgcacgcctcccgagagatcgtcattatcatgggctcgctcaccacatgtgatcctgtcgatattaacctcaccatcgacgagttaaaaaaggagggcatacgctgctcggttatttccctgtccgctgagattcacgtggcccgctacctcactcagcaaacaatgggcaccttcggggctgttttggatgatgcacattttcgggatcaactcatgtctcaggtagatccaccgcccgccgctaagactcagcacaactcgcttattcgcatgggcttcccgcacacaaagaatgaagttgagggcaaggacgcgccattgtccatgtgcatgtgccacatagagaacttggaggagcccagtgaactgaccactactggccaccactgcccgcaatgcaacagcaagtactgcgagctgcccgtggagtgccagtcttgcggcctcaccctggtctccgcgccgcacttggcgcgttcctaccaccaccttttcccggtgccaaattttgaggaactgccgtttgaggcgatgcctgcttcgtcatccgacctcaccagcgatgtcagggaatgttacggctgcgccaaagctcttgggcaaggcgttgacaaggtcgccgataaagtcgtcttcagatgcggtttctgcaagcagttcttctgcgttgactgcgacatcttcattcacgacacattgcacgcctgcgtgggatgcaacaccattcccggcgtagacggtctggtttaccagcaaagttccaagtctgaccaggttgatgcacacccagggccctcaaagcagcgcggccagtgtgggatgtaactgactttctatagatagatatttcgaacttccacataactacgcatttggggcaaacaaaatacagttcgtttcgaaacggtggttatgagttgtatcaattaaaatctggttttatgcttaataattgtgaaggcgagcgtagcattattatggccgttgtgtgagaccctctcaattgtattgctaattacttggtcataggctctctgtgccgcttcatgcgaacttggcgcacttttgtctagagctcgcttgagttcatcatcagcgtttgccgcattcggtcgggtttagttgcgattcaatccaaaagctctcggcacccacaggtgttctcgttggaactttagctttatagatgttaacccgcgttggtgttgtgaattttgaagagccagaacttttgttcagtgggagaccgatgtgacgtggatatactgctctgtgacaccataaacaatttatgaagatcaatgacgctgctttaaactagtattaaaccagttagaggccagctaaaccgccacaactgtctattaccttataaagttcaacatttaattgaagattcataagcattccgaaggtctaccataaaaatcaaaaatgtatgtacatatattgtgttattgttattaataattggttgtttttaaagtttctaaatttttttaaaaagataactattagacttatgctttttgattttagagttacaatacaaattctttatgcggtttctaaaagatgcgagcaaatggcatcaataatagataataaaacataaataaaagcttttaatttgtatatataaattggtctaaatgtagcttgtaaataataggttcaaatggtatgtaacttgcggcaaaatgcaataggataaaaaatcaacaaagcgagccgtgcgggctttaagatatgtacggctatgtatggctagatcggtaatcaagaatgtaaatactttatatactgttatacattgtaactttat

SEQ ID NO: 23213 - DNA, 1419 bp, DROSOPHILA
aggccctgtgtgtacacactgttacattagccggcgcattttatttagcgttaattgcttttctttcttgatttgacttggtagtgcatcaggactgcaagtatggccgacgatgagcaagaggaccagaaggagtaccgctgggaaacgggctatgaaaagacatgggaggccatcaaggacgacgaggatgggatgctggatggagccattgcagagatcattcagaaggccaaacgccagaggcaggctcaaaagtccaagcagaaccgcctgggcatgatgcgccacatgttcgttgtgctcgattgctctgagtccatgagcgtgcctgatttgaaacccacacgactgcggtgcaccgtcaagctgctggagctgtttatcgaggagttcttcgatcagaaccccatcagccaattaggactcatagcgctaaaagctaagcgagcggagaaggtgaccgaacttaccggcacttcgcgcgtgcacctcaaagcgctagagagcttggctaacgtgtccttgaccagcgagccttcgctgcaaaatggcctagatctggccctaaaatcgcttaaggtggtgccgtcgcacgcctcccgagagatcgtcattatcatgggctcgctcaccacatgtgatcctgtcgatattaacctcaccatcgacgagttaaaaaaggagggcatacgctgctcggttatttccctgtccgctgagattcacgtggcccgctacctcactcagcaaacaatgggcaccttcggggctgttttggatgatgcacattttcgggatcaactcatgtctcaggtagatccaccgcccgccgctaagactcagcacaactcgcttattcgcatgggcttcccgcacacaaagaatgaagttgagggcaaggacgcgccattgtccatgtgcatgtgccacatagagaacttggaggagcccagtgaactgaccactactggccaccactgcccgcaatgcaacagcaagtactgcgagctgcccgtggagtgccagtcttgcggcctcaccctggtctccgcgccgcacttggcgcgttcctaccaccaccttttcccggtgccaaattttgaggaactgccgtttgaggcgatgcctgcttcgtcatccgacctcaccagcgatgtcagggaatgttacggctgcgccaaagctcttgggcaaggcgttgacaaggtcgccgataaagtcgtcttcagatgcggtttctgcaagcagttcttctgcgttgactgcgacatcttcattcacgacacattgcacgcctgcgtgggatgcaacaccattcccggcgtagacggtctggtttaccagcaaagttccaagtctgaccaggttgatgcacacccagggccctcaaagcagcgcggccagtgtgggatgtaa

SEQ ID NO: 23214 - protein, 438 aa, DROSOPHILA
MADDEQEDQKEYRWETGYEKTWEAIKDDEDGMLDGAIAEIIQKAKRQRQAQKSKQNRLGMMRHMFVVLDCSESMSVPDLKPTRLRCTVKLLELFIEEFFDQNPISQLGLIALKAKRAEKVTELTGTSRVHLKALESLANVSLTSEPSLQNGLDLALKSLKVVPSHASREIVIIMGSLTTCDPVDINLTIDELKKEGIRCSVISLSAEIHVARYLTQQTMGTFGAVLDDAHFRDQLMSQVDPPPAAKTQHNSLIRMGFPHTKNEVEGKDAPLSMCMCHIENLEEPSELTTTGHHCPQCNSKYCELPVECQSCGLTLVSAPHLARSYHHLFPVPNFEELPFEAMPASSSDLTSDVRECYGCAKALGQGVDKVADKVVFRCGFCKQFFCVDCDIFIHDTLHACVGCNTIPGVDGLVYQQSSKSDQVDAHPGPSKQRGQCGM

SEQ ID NO: 23215 - DNA, 3812 bp, DROSOPHILA
ggccacgggcttgtgttcatcgcgacccttaatctcgtagagctgctgtatggctgtctcgttgttggcatcgcaggccaggccatacacggtatcggtgggcagggcaatcacttggccaccaagcaggcactggcgggccaactggagagcagcctcgtcgcccaccgcgcacactggagtcctcagctcgctcgcttggtgctgcattctgctggatgtgtggtgagcacggagcagtcgataaaggctcgtttgaaggcggcgcattagtctcgccaggtgtggttgcactcgtggttgcagcacttgtaaaacgtggtcatgggctcatccgccgaccgcgtctggatttgcataaagtacgcccgcttatggccgcacgttggacactctgcgtccgtggagtctacgttctcccacgccgccttgccgcccagcacgtgatccacctcctggaaacacagattatcagagatattatcataaattcgtagcaaattgcatcatccagtggaaaatgatcataccttgaggcgtggaaaggttttcgtggagatcttgcgcctgatcttcgatatgtacgggcaggtgttgcacgtgaagcgatggcagttggtgtcctcctcgataatcaatatatttccgcacgacgggcagaaaaacaacatagtttcggagaatccgaatccgcgctgtttagttttttgatttgagcacgttgaattctcagtgtgaccgcgtatacgcttagatatactaactcaataacatcacaatgtatactgcaataccatatgttccaccgttcctccatagatgctaatttgaagcacattataataattaattaataaattaattatttgtaataaataaaaaatattttcaaatactgtttgaaaatttcatgttcggaatttagtgaatttattacttagccctagcatatactaactgtatattttatggtgaaataaacgtatttaccatcttatagtttacggtcatactaatagcattataagaaattttgttcgttttgcaaaaaactatcaaaataaacaataagcaactcaatttttagcagacattagagtagcaaaagttttaaatcatgtcggccgatgtgcgtgatattctggacatggagcgtgccaacacgcccgaggtgacgcgggattcgtttctggccaccaagaagcgcaactttgagcggtaaacaaatgcatttacatgtgtgcgattctctaatttacaatttaatcattttaggaccaagactgcgtcccggcgtccggagggcatgcatagggaggtgtttgccctgctctacacagacaagaaagatgctccgcctctcctgcccacggataccgctctgggaatcggagcgggatacaaagagacgaaggcccgcctgggcatgaagaaggtgcgcaagtgggagtgggcgcccttttcgaatccggcacgtaacgattcggcggtttttcaccactggaaacgagtcaccgacaattccaccgactatccgttcgccaagttcaacaagcaactggaggtgccctcgtacacgatgacggagtacaatgcccacttaaggaacaacatcaacaactggagcaaggtgcagaccgatcacctattcgacctggccagaaggtagactcttcattagacttcttattaagtagccaaaattgtaagccatttgatttgcaggttcgatcttcgcttcattgtgatggcagatcgttggaaccgtcagcagcatggaaccaaaactgtggaggagctcaaagaacgctactatgaggtggtcgctctgctcgccaaggccaagaatcagacgagtgagaagaaagtatttgtgtatgacgtcgagcacgaacggcgccgcaaggagcagctggagaagctgttcaaacgcacgacacaacaggtggaggaggagaatatgcttatcaacgagatgaagaaaatcgaggcgcgcaaaaaggaacgcgagcgcaagacacaagacttgcagaagcttatttcgcaagcggatcagcagaatgagcacgcatcgaatacgccgagtacgcgaaagtacgagaagaagctgcacaaaaagaaggtacatcagcagccgcgaccctccagggtggactcggtggttaatgccatagagatcggtagcagcggcatcaagttcgccgacctgcgcggttccggggtttctctgcgctcgcagaggatgaagctgccggcgaatatcggccagcgcaaagtgaaagccctcgagcaggcaatccaggagtttaaagttggtgagtcaaagcatgaaaaaacattgctagctgtcgctaattaaaacttttctttgtagatcccgctccgccgcccacggaggacatttgcacctccttcaacgagcttcgttccgatatggtattgctctgcgagcttcgcaccgccctatccacctgcgtctacgaaatggagagcctgaagcaccaatacgaagccgcctgcccgggaaaggtaagtcttctgaccacagtaatgacagctcaaccaatgcggctaattggttttcccttaatcaatgcagacactgaacataccgccctcgctggtgcccatcaagaccgaagccctggacaatagcacaaattaattaagttaacgcggcccgtttccactcagattccccagacgccgaagtgtgtgcggcgtgctaatcattgtaacccgttttccactgtccatatttgtgcatttgcgctactcccagtccgcatggggaaataaatggataaacaagaaaattgttttgcggcacactcaatgtgaaaatcaaatagcccacggccaacgttggccaagcagatgccatgtcgagtgtgagaactttttcccaactgcttgatttattttccagccaagaaatgctcgcttagtttagtagtggctcgcttatttgggttaggccagcaaacagcaaacagtacggtatgcgatctttggcgagccgaaaaagagaaccgagccatgttcaattcgacaatgcacgatgcccgctgcccgcttctcgattcctgatgcctgcccacacaattcggatgtagatgcagaggcggtggcggcagcccattcatcggaccagtatttgtgaatgaaccgactgcgaaggcaaacacacacagaacacaacacagacgaaccaaaaaaaaaaaaaaaaagaagaaaaaaagagaggaaaacgcacatgaaatcattctgttggcggctcgacctgccttacctgagcgtaggccgctcagtcgagtttcagacgtcgtcgggatcagttcgtggctgttgattgctcctaccatttcagtgtttctgtgttttgccgcatgcaactcgaagagtacggctctgtgaaaatgctaatttaaccaaatactcaagtggtcgttgctgacgtcggtcggtggaattggaattgctcgccaagcgctacctgttcgtcatcatcatcatcatccctatcccagtcgtctaaaactctgggaatcctggcggggggcaagacaaacaacgcatccgtttccggttctttctgttgattgttaccatcatatacatatatatatatataagtacatacctacctgcagttcctgccgcttttcatgaatgaaattttaatttcgtgtgtgcgcgagtgtgtttgtgtgcgagcggcgagtccagcttgagcccgaactccaggggtgtcaactgacggcccaccgatcgcattgtcgccggtgcaccgtaaagatctttatcgcatt

SEQ ID NO: 23216 - DNA, 1566 bp, DROSOPHILA
tttacggtcatactaatagcattataagaaattttgttcgttttgcaaaaaactatcaaaataaacaataagcaactcaatttttagcagacattagagtagcaaaagttttaaatcatgtcggccgatgtgcgtgatattctggacatggagcgtgccaacacgcccgaggtgacgcgggattcgtttctggccaccaagaagcgcaactttgagcggaccaagactgcgtcccggcgtccggagggcatgcatagggaggtgtttgccctgctctacacagacaagaaagatgctccgcctctcctgcccacggataccgctctgggaatcggagcgggatacaaagagacgaaggcccgcctgggcatgaagaaggtgcgcaagtgggagtgggcgcccttttcgaatccggcacgtaacgattcggcggtttttcaccactggaaacgagtcaccgacaattccaccgactatccgttcgccaagttcaacaagcaactggaggtgccctcgtacacgatgacggagtacaatgcccacttaaggaacaacatcaacaactggagcaaggtgcagaccgatcacctattcgacctggccagaaggttcgatcttcgcttcattgtgatggcagatcgttggaaccgtcagcagcatggaaccaaaactgtggaggagctcaaagaacgctactatgaggtggtcgctctgctcgccaaggccaagaatcagacgagtgagaagaaagtatttgtgtatgacgtcgagcacgaacggcgccgcaaggagcagctggagaagctgttcaaacgcacgacacaacaggtggaggaggagaatatgcttatcaacgagatgaagaaaatcgaggcgcgcaaaaaggaacgcgagcgcaagacacaagacttgcagaagcttatttcgcaagcggatcagcagaatgagcacgcatcgaatacgccgagtacgcgaaagtacgagaagaagctgcacaaaaagaaggtacatcagcagccgcgaccctccagggtggactcggtggttaatgccatagagatcggtagcagcggcatcaagttcgccgacctgcgcggttccggggtttctctgcgctcgcagaggatgaagctgccggcgaatatcggccagcgcaaagtgaaagccctcgagcaggcaatccaggagtttaaagttgatcccgctccgccgcccacggaggacatttgcacctccttcaacgagcttcgttccgatatggtattgctctgcgagcttcgcaccgccctatccacctgcgtctacgaaatggagagcctgaagcaccaatacgaagccgcctgcccgggaaagacactgaacataccgccctcgctggtgcccatcaagaccgaagccctggacaatagcacaaattaattaagttaacgcggcccgtttccactcagattccccagacgccgaagtgtgtgcggcgtgctaatcattgtaacccgttttccactgtccatatttgtgcatttgcgctactcccagtccgcatggggaaataaatggataaacaag

SEQ ID NO: 23217 - protein, 433 aa, DROSOPHILA
MSADVRDILDMERANTPEVTRDSFLATKKRNFERTKTASRRPEGMHREVFALLYTDKKDAPPLLPTDTALGIGAGYKETKARLGMKKVRKWEWAPFSNPARNDSAVFHHWKRVTDNSTDYPFAKFNKQLEVPSYTMTEYNAHLRNNINNWSKVQTDHLFDLARRFDLRFIVMADRWNRQQHGTKTVEELKERYYEVVALLAKAKNQTSEKKVFVYDVEHERRRKEQLEKLFKRTTQQVEEENMLINEMKKIEARKKERERKTQDLQKLISQADQQNEHASNTPSTRKYEKKLHKKKVHQQPRPSRVDSVVNAIEIGSSGIKFADLRGSGVSLRSQRMKLPANIGQRKVKALEQAIQEFKVDPAPPPTEDICTSFNELRSDMVLLCELRTALSTCVYEMESLKHQYEAACPGKTLNIPPSLVPIKTEALDNSTN

SEQ ID NO: 23218 - DNA, 4507 bp, DROSOPHILA
atttatctatggcgaaattcgatactctctgtttgtgagtatgatttgccataagtatttaaattaaatacttcaaacctataaatgttttgcagtatcttggctcaacggtcattcgaaaactgcaaggaaccctttccactcgaaaatctatccagaaactgaagattgatgagaacttaaagtcggcggcgagcgttagtgatttcagcttgctggaaaactgcacaacctccacaaagtatttgaaggcagccaaccatcagacacgactcaatgtggacattgctgtatcctgcgttggcgtcaagttcatagaccacgataaaaaggtgagcatatttcaattccttgatatatattgtatgtatatttgtcaacttgcttttagactgccatctgttgccatgacattgagaacataaattgtgtttgccaggactcggaggacttgcgctactttgcgtacataaccaaagaacaggacctgcactactgtcacgtctttatggtggatagcttggttcgtacttatggactggtgaatctcaacatgctaacgaattattaattctcaggaactggccaaggaaatcatcatgacgctgggacaggccttcgaagttgcctaccagctagctctgagcagacagggcacgtccctcaacgaagagtgctaattctaagccatggaagtgccacaattgccaccgagcgtggttttttattatttatttcattgcatttcacacgtaaagttattttttttactcatttgctagtcgttgatgccatctcgatgctggctttgctccacataaggcagctcacatgttaagtattttgagagttttttaataaatttacaacattgcttttaaaagcaaaattttgaatttaggggtaaagcgggatattttatcgaatttttcgtttatcgataccagttagtgggaaataaatagcagcgcctggtaacactacgagatcagcttcaaaaaaaacgtacagattgaatatcattggcattttatttttaaacataaactaaagatccagctaaaaatggaacttaatattggtaaatagttagtgaacgtcatatgcttgctagtacctacattgttttcacctcattactgaagataatcgcccaaacgatgtcggcgtcttggcgccgaacgatcaggaaaatgaggacgccaatcggaggatggaaaatacagacgctgttaagactccagtggccaggaaaacgcgacgagcggtcctcaagcggatgaatgccacttcggaaaagaattcgcccacgcatcccgatcctccgaagacaccgggcactccaggccatcttagccaaaacaccgaaactccgagacgtagttgccggaaaagtgtgcgtccagcgatcgattacgatgacattatagtgcgatccgccaagaaggctatcgtcgaagcactttcagccgatcccgagggcgaggagccttccgtccagaagtggaccaccgcggaggtgggaaaaaattcgcgcaaacggggtcgcaagtccaagcgcatggtcgccaagaagcagaaaacagagcacatagttgcagaggatgatgaggagcaggacacggagttggaggtcccacagaaaaaggtggatccttctcaggatgctgaaggaaatgcagaggttcaagcagacatagtagaggaagtggcactatccacgaagaagtcttctaaaaagtctaaaactaaagatccagatcacgcaaatgatattacggacattgtagtgaatctggagcaaccaatatcgataaagaagtcttctagggcgtctaaaaatccagacaccaaggagcaaaatgtagctgatgaactaggtttatgcccactggatatggacagccaggaagaagatgagaaggatattcaaggtggagaagcaaaaacaaacgcagaggtatttgaagatgaagcccaaacgagtgcagccgatacggatggtcagaaacatgaagagaaagatgagcaagcagatgaagcaactaaaccagctgcgcttgataaagacaaagaagtaacagctgaagataaactaaaagaagctagtgcagtagatgagcaagcagaggaagaaatgccctcactactgatggaaagtgatggcctggatgaaccaaatcagtcgcctctcaataccacatacgatgcagaagacaagaaagattttgatggaagtgttattctggttgttagtcccgacaagcagccaaaggctagctcctccgacctcgatgcaagtgttattctggtcggcattaccgatatgcagcctgttgtttgcgctccgaagccggaaattccggaggagaagccggttattaaagttgtgctcaccacatcagatgatcaggaccaaacccttttagatttacccgctgaagcttcgccaaatgtatcaaagtcgaagaaatcgaagggctatcgattccctacgccctataaggcaaggcctatgtttaactttacaggaacagaggaggcagttcatcatgatcacgaagttaaagaagatgaaccgcattacacacgcaaacgttccaagtcagccagcaattggaaagatatcatgtcacgaactgtatcctttcagagtcctattgaggttgccaatgtcgaagacattgataagcgctgggcaggacttcaaaagaccagtaagttctgtttaatggttatttttagccccttctaaacgtacaattccagatgtcaataaccggcgtaggcgctcaaagtcattggacgaaaaacgctgcaagatgagcaggatccccaagcccaatagaggtatgtatagaaaactaaagcagttctgttcgtgctaatatacgtttttttttcttcttaggtgttataccgctaaacaaaaccatcacacccagcaaggtgaataagcgcaccaagatgcccaattttgctgccatgcatgagagacagtttgccaagatggagagtctggtggaccacgtcgaacggaaggcggaacgcgccaaggtgctaaccaattctgtacagaagcaagtgccaggatcggcggcgaagaaaatgcagagcaccacgtctgtggaggatcgtgctcgtccaagggcaatgaagaagatcgacatgtccgccgatcggaccgtggtaatggatcatccgtccgataagctgaactcatcacgtttgcctttgaaggccaccgctcccgcttctaatgtagctccaaagccagctttcaatttgtccacctccacggtgaagacattcaacgccacgttttccagcagaccggccgattcgcacgacaacaagctggctgagcgacgccagcggcgcattgacatgttcaagggtagaacaaccaaggaccagaaggagaaaggagagtttatccgcggagtgcgcctcaaccgacgttttgaactccaaatgcagcaccgtcgacacctggaggaggattagtttcttaacttgattcgttaattttactgcttactacctatgcttactcatatatgtatattcgctttaacatgtcagatttgtcggcgattcgtcagaaaacatttaaattttgctggttccaataaagttgtttaccatttctgtattttgcactttcccactctttttattcaaactttaagtaagagcgatgcccaacactggccgcatagaatccgtcaacgcagcaggctttgttttttgtttccgatacattccggactttttggtagccataagttcataggacttaaacctattacacatcactcgccagttcttgtgttatttttttttaaatttgacttatcttttattcaaattgagaaaactttgactactacgttcttttacaccaaaaggaatcagttggcattccagttcggataacggcactattcgcgttttacagattccttcgtttctcgtccgtattcttctttctatctccgtcacacttatatttttctttctctcaattcctttttcgcgtaaagcaatacgcgggacgcaaaatgtgtgacgaagcgaatccagcgaagccgtggcagcttcccgatgtggtgtacggcaatgggattccggcgctgtgcctgctgcaccaggagatcgagcagttctacaactacatccggtccacgccaacagagttctgcttgcgggcaggtgcagtgcgtcgcatcgaggatgtggtgctttccatttggccaagcgcatccgtcgatctctttggctcatttcggaccgggctaaatctgccggactcggacattgatctggttgtgtactataagttctggaaccccaggctgctgcatgagcttcaaaacgaactagtcagccaaggagtaactgatccggacactgtgaccgtcctcgacaaggcctctgtgccagtggtcaagtttacggacctcatttcccgcatcaggttcgatgtgaccttcaactccgtagc

SEQ ID NO: 23219 - DNA, 2334 bp, DROSOPHILA
aaaacgtacagattgaatatcattggcattttatttttaaacataaactaaagatccagctaaaaatggaacttaatattgataatcgcccaaacgatgtcggcgtcttggcgccgaacgatcaggaaaatgaggacgccaatcggaggatggaaaatacagacgctgttaagactccagtggccaggaaaacgcgacgagcggtcctcaagcggatgaatgccacttcggaaaagaattcgcccacgcatcccgatcctccgaagacaccgggcactccaggccatcttagccaaaacaccgaaactccgagacgtagttgccggaaaagtgtgcgtccagcgatcgattacgatgacattatagtgcgatccgccaagaaggctatcgtcgaagcactttcagccgatcccgagggcgaggagccttccgtccagaagtggaccaccgcggaggtgggaaaaaattcgcgcaaacggggtcgcaagtccaagcgcatggtcgccaagaagcagaaaacagagcacatagttgcagaggatgatgaggagcaggacacggagttggaggtcccacagaaaaaggtggatccttctcaggatgctgaaggaaatgcagaggttcaagcagacatagtagaggaagtggcactatccacgaagaagtcttctaaaaagtctaaaactaaagatccagatcacgcaaatgatattacggacattgtagtgaatctggagcaaccaatatcgataaagaagtcttctagggcgtctaaaaatccagacaccaaggagcaaaatgtagctgatgaactaggtttatgcccactggatatggacagccaggaagaagatgagaaggatattcaaggtggagaagcaaaaacaaacgcagaggtatttgaagatgaagcccaaacgagtgcagccgatacggatggtcagaaacatgaagagaaagatgagcaagcagatgaagcaactaaaccagctgcgcttgataaagacaaagaagtaacagctgaagataaactaaaagaagctagtgcagtagatgagcaagcagaggaagaaatgccctcactactgatggaaagtgatggcctggatgaaccaaatcagtcgcctctcaataccacatacgatgcagaagacaagaaagattttgatggaagtgttattctggttgttagtcccgacaagcagccaaaggctagctcctccgacctcgatgcaagtgttattctggtcggcattaccgatatgcagcctgttgtttgcgctccgaagccggaaattccggaggagaagccggttattaaagttgtgctcaccacatcagatgatcaggaccaaacccttttagatttacccgctgaagcttcgccaaatgtatcaaagtcgaagaaatcgaagggctatcgattccctacgccctataaggcaaggcctatgtttaactttacaggaacagaggaggcagttcatcatgatcacgaagttaaagaagatgaaccgcattacacacgcaaacgttccaagtcagccagcaattggaaagatatcatgtcacgaactgtatcctttcagagtcctattgaggttgccaatgtcgaagacattgataagcgctgggcaggacttcaaaagaccaatgtcaataaccggcgtaggcgctcaaagtcattggacgaaaaacgctgcaagatgagcaggatccccaagcccaatagaggtatgtgttataccgctaaacaaaaccatcacacccagcaaggtgaataagcgcaccaagatgcccaattttgctgccatgcatgagagacagtttgccaagatggagagtctggtggaccacgtcgaacggaaggcggaacgcgccaaggtgctaaccaattctgtacagaagcaagtgccaggatcggcggcgaagaaaatgcagagcaccacgtctgtggaggatcgtgctcgtccaagggcaatgaagaagatcgacatgtccgccgatcggaccgtggtaatggatcatccgtccgataagctgaactcatcacgtttgcctttgaaggccaccgctcccgcttctaatgtagctccaaagccagctttcaatttgtccacctccacggtgaagacattcaacgccacgttttccagcagaccggccgattcgcacgacaacaagctggctgagcgacgccagcggcgcattgacatgttcaagggtagaacaaccaaggaccagaaggagaaaggagagtttatccgcggagtgcgcctcaaccgacgttttgaactccaaatgcagcaccgtcgacacctggaggaggattag

SEQ ID NO: 23220 - protein, 572 aa, DROSOPHILA
MELNIDNRPNDVGVLAPNDQENEDANRRMENTDAVKTPVARKTRRAVLKRMNATSEKNSPTHPDPPKTPGTPGHLSQNTETPRRSCRKSVRPAIDYDDIIVRSAKKAIVEALSADPEGEEPSVQKWTTAEVGKNSRKRGRKSKRMVAKKQKTEHIVAEDDEEQDTELEVPQKKVDPSQDAEGNAEVQADIVEEVALSTKKSSKKSKTKDPDHANDITDIVVNLEQPISIKKSSRASKNPDTKEQNVADELGLCPLDMDSQEEDEKDIQGGEAKTNAEVFEDEAQTSAADTDGQKHEEKDEQADEATKPAALDKDKEVTAEDKLKEASAVDEQAEEEMPSLLMESDGLDEPNQSPLNTTYDAEDKKDFDGSVILVVSPDKQPKASSSDLDASVILVGITDMQPVVCAPKPEIPEEKPVIKVVLTTSDDQDQTLLDLPAEASPNVSKSKKSKGYRFPTPYKARPMFNFTGTEEAVHHDHEVKEDEPHYTRKRSKSASNWKDIMSRTVSFQSPIEVANVEDIDKRWAGLQKTNVNNRRRRSKSLDEKRCKMSRIPKPNRGMCYTAKQNHHTQQGE

SEQ ID NO: 23221 - DNA, 5973 bp, DROSOPHILA
tgccacttggagagccggtctcgtctcagtttgggccaggcttcgcgggcgagaagtattttgacaagtcattggtcatgggtctgtagccgccgcttgaaatttgaaatcggagaaccagcggcagtggcagctcgcttggtgaatttgttgtgattggcgattgggagagctcagaagagccgtctcgtccaagtccaagtcaaggtgtggaaaataactgagctgcgtgatgagtgaaaagttttcgtaagccaaatgtgtttccctatcgagcagagcagctggcaggtgtttttagaacatttagtgcatttcgatgttcgggctcggaattgcaggtcaagataacggcgcccaacggggtcaaggtcggatggcaggcgttcgccaacattcattggtatgcgtttaatgcgacttggctgtatagtgtttacgccgcgcctacgtcaaaaatttcatggctaacgggggcgaagctcgctttactcgcatttttcggcgtaccaacgtgccgatagacactcgatagaccctcgggggaggtggggcggtgcggtgagactgttcacactagccgtcctgcaagccacacaaatatgtggccgacaatggtcgctcgaaactggcttatcaatggcacgagcgacggtggaaaacagcttatcgcggtgacgtcaggccggcaaagcaggtggagctgctaacacccgcattaaggcgacatatacatattaaatatttatgtaattgggagttgttgtcccaatacaacatgtctgtacggctgagcccgagcctcggtcagtcctaccggcccgaaaataaatgttatattgccctcggtcacgaatcggattgaaccggaaatccagggcgacacggctttcgtttcgctgggaaaaagttgttagcaatcaggcgacgcgtcggccaaatgcgaaaccaaagctttaaccgatccgccagcagcgcacgacgatcagaagcattttggagagcgtcgcgcgcggttacttgatcggcagttattttgttggccttctgagaagttaaacgtgactgaagtgaaacggggactttcgactcgagccggcggacgaataaaaagtaaaaagtatgtgtatttcaggaccaaacttatccactagggtattggccaggactatgctacctgaagagtgaaagaactcggtgtctcgatagctggcggctgttcgttccaagatttgttatcattcggcctaatccccaatccgtctgaaagcaaagagaatgatcgtaaacttaatggcgagccaataaaattgtgtaatttataattgccatccaaaacaacgtgagcttttggatcaaggcaatcctcaaaataatgagcaagaattgtaaaaacagagaaagactacaaaaaatcaacaccaacgctaaaaattccgtgtttgaagattgccttctggttgtagacaactcttaatttggtatagatacgattcaattttattgtctaggttgcctcggcactccaagcgctgttctatcgaccaccagatttttatccattagaatgttgagagtttcatacagtgcaatacattcagggattcacttttgttttaacagcccagttcagctagtagataactcagtgaaaacaggttatcgatatcagtgcgagcattggctacaaacttgtaaccactccgatctgacggtttgtgagtactcgcactttgaaacggcaccagcgaaagcttatcgatcctcggaagaatcaaggccgactttcgcttggcaccctcgaaatccaagcgatccaatctgccgtctcttgagctcctcgacattggtcctcgcttttacagcgatttcgccagctaatctgagattcctacattgaactctgcccgataagataaagcctggcgcgtgcttcactggcccctaagcggcttatcggccggtggggttgggctaagccaaataatgtcaaattacttatagcgcgggcagattattagaccgaatactgcaattatgttgtaaataatatgattattactgggattcccgaatacaagtcatgagctgacagaaggcaaacacaagaactaactgctcttgcaaacattagttactggcgcatctgatgtattcgagataaagacatttttgttttagcaaattcaacaacaaatccatttttaaatacagatggcgttctatgactcatagactatacatttaaacggcaataatggcaaaagatttatcgaccctaaaatgtactcgagtgtcgatcaactttactttttataccccttactcgtagagtaaaagggtatactagattcgttgaaaagtatgtaacaggcacaagaaagcgtttccgactatataaagtctatatattctggatcaagatcaataactgagtcgatctagccctttccgtctgtccgtctgaacgtcgagatatgtacgaaccacaggaactacaatataaaagccaggaggctgagattcagcatacagattctaatattcattatgaaaattaaaattaatcaatgatttgatgactgctaagctttgagagtttcaagtgaatgctagattccgctttcatacatatttcttattattttcttacggtaattttggaattctgccaatatttgtttactgtatactaatactggttttgcaatcaaataattcatcaaatatccacatttcaatggcaatcgcaacaagcattcataaaccaaaatcaccagtcatcgtacattgccggaccagtttagactgatgaataactcaatccaatccggacatagccaaacaaaaacaaatgataaccaacagcaagcttgaataagaaattaaatttggtttcctgtctgttctattgatcagcttacgcaactgttttcttatcgagtggactgatataataattgttctgattaatttaggaccttagtatgacgaccaataacataagtatgttattatgattagatttaattatctaacacggttagatgttaaacaaatatgtcattaaccgatcttattcttcccagccatgaccaatctctggaaggcattgacgcgtcgcaagacggaggacgtgaacgaaggcgagtcccagttggcgcgagtgctgaaccttttcgatctgacggctttgggagtgggcagtactttgggactgggagtctatgtgctggctggtcaggtggccttcaatattgccgggccagcggtgaccatttccttcctgattgcggccatcgcgtctgccttcgcggggatctgctatgcggagttcgccgcgcgagtgcccaaggcgggaagcgcctacgtatacagctacgtgaccattggagagttcgtcgccttcaccataggatggaatctcattctggagtatgtgattggcacagcctcagttgcgcgcggcctgagcggatatttcgactctctgatcaacaacaacatgtcgaaggcattgaatgagtcgatgcacatcgacgtcgactttctgggtgactaccccgattttttgtccttcggcatggtgctgctcctggcggccatcctcgcctttggcgccaaagagtcaagcttcctgaacaacatcttcaccacagtcaatctggttacgatcgctatcgtcctggtggctggcgccatgaacgccaacgtcgacaattggcgcatcccgaagaaagatgttcccgagggctttggcacgggaggcttcatgccgttcggcattgctggagtgatggccggagctgccaaatgcttctacggcttcgtggggttcgactgcatcgccaccacgggcgaggaggccatcaacccaaagcgcaacattccgctctctatcgtggtgtcgctgatcataatcttcctatcctactttggagtgtccacggtgctgactatgatgctgccctactacaaacaggacaaggatgcaccttttcctcacgctttcgattccgtcgagtggtacaccatcaagtggattgtgaccataggtgctgtgtttgcgctctgcactagtttgttgggcgccatgttcccactgcctcgcatcctctacgccatgggcaaggacggcatattgttcaagaggctgtccacagtgaacagctacacgaagaccccgctcctggccaccattgtgtctggaatctttgcgtgtaagtacgctgtcagaaagtgtcctctgtccccttatttatgactctacgtccatccctttctcagccataatggccatgctctttaacctggaccagcttgtggacatgatgtccatcggaaccctgttagcatacaccatcgtggcaatttgcgtgctagtgctgcgctaccaggacgaggagatgaccaagctggtgtctgtcaaggcaccgaatgttttccggcaattcttcaacggcaactccttccgggagcccaattctatgacctcgtccatcaccaaagtcggcattgtggtgttcgccatcttttgcctggtctggtgctccctccagaaagtcttcgacctggacagcaccggcggaattgtggcgctcagcttggtgggcgctgtgctaatcctcatctgcgttgtgatcggcatgcagccggtgtcgaccattgagctcacgttcaaggtgccgctagtgccgttcgtgccgtgcctcagcgtctttgcgaatttgtacctgatgtttcagctggacctgaacacatggatccgcttcctcatctggatcgtgatcggctacgtgatttacttctgttacggcatgcggaactccacgcagataagtaggagccgcagtcacgccgaggtggcggcaagcgctctgcagaaccagggacagcacgtgaatcccggcttcgagccggactacaaggtcgaaaatgggggtcgaccctacgagttctccgagaagctgtaagggccagctcttctagccgcgtactgtaaaccttttctacagcttaaacttcgttcacctttgcatcttcttctgaatagtaacaagactcctctgccttcttagctagcacgtttatgtgagagagatgaatagattgcgcatggaaattaaatggatctgccatgggtcggctttgttgttccggccctggggatctgttatttctgtgcgcctcaggacttctagagggagctcagagcaaactctattttaccattttaatgttttatccccatttcaacaatccaattttaatcagcccaaacgattccgccgcaatgccccgtttgttgtgatatttgtaaatatacctatatatagattaatattggtcgcatatttgtatgtttgtcacaattactatcgttatgtaaatggaattgtatcatattatgtgtgtcatcgccccgcgtagccgcatttagtgtttaagctctttagctgctaagcctcccgcccacatttgttattattagccaaaagagaaacgaattttgtcccttcttgattattaaaaatgcaataatgttcaacataacgtgtttggtatatttaattgagatgtgaacccagccaccacagacaaatccttgcgacccgaaaccggaatgagatatggggttcataaatatttatccacggactagagctccattctttgcaactttgcaggcctcagcgacagaactaaaacttctccatgggcttgagcagccccttccgaacgtatttatttgttctttttggcaactaggactgggtgtggcgtagagtcccgaaccaagtccaggacccactctgtttgctaaccggcttagttaaatggcaaagaatctggcctccgacgctcttctcctcctccgctttctccactcctcacaaatatctaagccctgggaaacttcaagagtaaatagtcggggcgggtcgaaaaaatcgcagcgcagagccaaaaagc

SEQ ID NO: 23222 - DNA, 1937 bp, DROSOPHILA
agagcgtcgcgcgcggttacttgatcggcagttattttgttggccttctgagaagttaaacgtgactgaagtgaaacggggactttcgactcgagccggcggacgaataaaaagtaaaaaccatgaccaatctctggaaggcattgacgcgtcgcaagacggaggacgtgaacgaaggcgagtcccagttggcgcgagtgctgaaccttttcgatctgacggctttgggagtgggcagtactttgggactgggagtctatgtgctggctggtcaggtggccttcaatattgccgggccagcggtgaccatttccttcctgattgcggccatcgcgtctgccttcgcggggatctgctatgcggagttcgccgcgcgagtgcccaaggcgggaagcgcctacgtatacagctacgtgaccattggagagttcgtcgccttcaccataggatggaatctcattctggagtatgtgattggcacagcctcagttgcgcgcggcctgagcggatatttcgactctctgatcaacaacaacatgtcgaaggcattgaatgagtcgatgcacatcgacgtcgactttctgggtgactaccccgattttttgtccttcggcatggtgctgctcctggcggccatcctcgcctttggcgccaaagagtcaagcttcctgaacaacatcttcaccacagtcaatctggttacgatcgctatcgtcctggtggctggcgccatgaacgccaacgtcgacaattggcgcatcccgaagaaagatgttcccgagggctttggcacgggaggcttcatgccgttcggcattgctggagtgatggccggagctgccaaatgcttctacggcttcgtggggttcgactgcatcgccaccacgggcgaggaggccatcaacccaaagcgcaacattccgctctctatcgtggtgtcgctgatcataatcttcctatcctactttggagtgtccacggtgctgactatgatgctgccctactacaaacaggacaaggatgcaccttttcctcacgctttcgattccgtcgagtggtacaccatcaagtggattgtgaccataggtgctgtgtttgcgctctgcactagtttgttgggcgccatgttcccactgcctcgcatcctctacgccatgggcaaggacggcatattgttcaagaggctgtccacagtgaacagctacacgaagaccccgctcctggccaccattgtgtctggaatctttgcgtccataatggccatgctctttaacctggaccagcttgtggacatgatgtccatcggaaccctgttagcatacaccatcgtggcaatttgcgtgctagtgctgcgctaccaggacgaggagatgaccaagctggtgtctgtcaaggcaccgaatgttttccggcaattcttcaacggcaactccttccgggagcccaattctatgacctcgtccatcaccaaagtcggcattgtggtgttcgccatcttttgcctggtctggtgctccctccagaaagtcttcgacctggacagcaccggcggaattgtggcgctcagcttggtgggcgctgtgctaatcctcatctgcgttgtgatcggcatgcagccggtgtcgaccattgagctcacgttcaaggtgccgctagtgccgttcgtgccgtgcctcagcgtctttgcgaatttgtacctgatgtttcagctggacctgaacacatggatccgcttcctcatctggatcgtgatcggctacgtgatttacttctgttacggcatgcggaactccacgcagataagtaggagccgcagtcacgccgaggtggcggcaagcgctctgcagaaccagggacagcacgtgaatcccggcttcgagccggactacaaggtcgaaaatgggggtcgaccctacgagttctccgagaagctgtaa

SEQ ID NO: 23223 - protein, 604 aa, DROSOPHILA
MTNLWKALTRRKTEDVNEGESQLARVLNLFDLTALGVGSTLGLGVYVLAGQVAFNIAGPAVTISFLIAAIASAFAGICYAEFAARVPKAGSAYVYSYVTIGEFVAFTIGWNLILEYVIGTASVARGLSGYFDSLINNNMSKALNESMHIDVDFLGDYPDFLSFGMVLLLAAILAFGAKESSFLNNIFTTVNLVTIAIVLVAGAMNANVDNWRIPKKDVPEGFGTGGFMPFGIAGVMAGAAKCFYGFVGFDCIATTGEEAINPKRNIPLSIVVSLIIIFLSYFGVSTVLTMMLPYYKQDKDAPFPHAFDSVEWYTIKWIVTIGAVFALCTSLLGAMFPLPRILYAMGKDGILFKRLSTVNSYTKTPLLATIVSGIFASIMAMLFNLDQLVDMMSIGTLLAYTIVAICVLVLRYQDEEMTKLVSVKAPNVFRQFFNGNSFREPNSMTSSITKVGIVVFAIFCLVWCSLQKVFDLDSTGGIVALSLVGAVLILICVVIGMQPVSTIELTFKVPLVPFVPCLSVFANLYLMFQLDLNTWIRFLIWIVIGYVIYFCYGMRNSTQISRSRSHAEVAASALQNQGQHVNPGFEPDYKVENGGRPYEFSEKL

SEQ ID NO: 23224 - DNA, 10016 bp, DROSOPHILA
aaatacatacatatgtatttttcatgttcttgctgtctatatccgataatcaagatgttaagaagtaatattaaatattaatattaatataaagttattttaccccttactcttagagtaaaagggtagtacaaaatcgcacagctggtaaatgaactattgaaaaataaattttaaaaaaaaatgtaccttcgttgtctttgatcagaaattgttttgattctgaactcaaccgttctgtaacaacacgtaatttattcttgaattttagtgtattcttataggtgccataggaaacgttcaaaagaccaatgcagaagccgtaattgttgtttataacaacaacacaacaatatgtacatatatgtatgtatatatgtaatcttgatcaggatcaatagccgagtcgaactggccctttccgtccgcctgtacttccgtccgtccgtatgaacgtcaagatctcagaactacactagctagaaagttgggatttagcataaagattttagagaaacactagggggcgtaagagtgggcgtggcaatattgtcaaaaatcttgcgctgcgtctttgtctcaagaatctgtatgctcaatctcaaccttctagcttttatatttcctgagatgtcgacgttcatacgaacacggtcaggttgattcggctattgatcctgatcaagtatatatatacatactttaaatagtcggaaacgcttccttctgccagttacatactttgcaacaaatcgagtataccctttcactcgacaagtaacgggtattacaagatggaaatgggctgttcgattcttcagcgggaaatctaatattacagactgagttgtcccgttagtttctgcgcggatcgtcagacctcctctttatcggattcctctttgcgctgctcgctaaaaccaagtgcggctcaggtaatttgactgcagtttgcttcgtctcagattgggcttaatacatttcgcgaagagcgcgtgaatgagagttcagttaatttctgtttttgtggcttgtcgcgatcgcaggcgtgtatgcaaaataaagcgcgaatgatttacggaaagcgctattaataaagtctcgtttgactgtcgattgctgtaatttcaatccgcactaccacatctcacgcaaaagttataacctatcgaacctgaaacccagaaacttttacttaaactacggtaattccggttttggagagcagtagactgcttttttcggcattctgaatttttattacctctggaactttctttttgtttttgtattccgcaaagcgttggcccacatgacatcattgttgtacccttgaagtggcttacatatacaagtacatatgtatgtgtgcaatatacagtaattgcgacaccgaaaatgcaaagatttgttaatatttgtgcatatttttaactattgcagtctacagccccattaaaataaataagaattatgtaggaaataagggttttaaaattacgttaacttttatacccgttacttgaagagtacattaaattaggattgaataagcttgtttagattttggaatcacagagcaaaagtatttaatttttatgtgggtaaaaggtcgtcatcactgggtacatcgaaggctatcagcgatgacttcactagcgcagctctggccatgatgatccgtactttaagtagcccaacaccgggttgaagggctattttcccgtgatctgataatttacgactccgcatcggtcgtatcgattatcagcgataattaagacggtaaacggcacttggcaaccgtagctgataaaataatctgttcaggcacaggagtgatttgttgttgcccccgaaatcagattttaatcgttaatttcaacaggcaatcttagctgacttactataaatttttctgtatcattttaaaggacttaaagtacgccacaagcaggtatatgaaaagaaagagattacgttgtaatcggggattcgcagagataaaaaaaataggctttggtccggacttagatggctgtgactcaccccttttgaatttgtacgcgaatgtgcatgttctttcccctatgcattccatatgacttgcttttcagctcaccattttgcagttccaactggctccgcgaatgtcaagttaagaaaactcctcccgctcgacgaaaaaggcagcgtcaaagtcacaaacaatttgcaagcaacactgagcactcaacaaggcgtattgaaacaaaccccattggtataggcaggttaactcccaacataccgagcgcccacgtaggctaatgaaaaatagttaagatatggagtatgcaagatgcgaaatgctgtttaaaactttctgaaacaagcgaaaatgcataaagttcggtgactgtaacgtaattagacgccttgggatcttgggtggtaaatgctttctcggcgcaaagagataaacatccatcgcggcctagacggcacttgcccggtaataacgtctaaaggtattgacacataaatcgcacaaacagccaatcgatcaaattcaagctcattttctaccttttgttcattcacaagtgtcaatgcagcctgtgagcttgaaaactgttgataatggaaaacaaattctgacaaagtatttgccctaatctttttttacgcaagacagtcatgtagacacttcgtatgaagcacgattgacaggaatatcagaccaagggatgggctcatacattgtctattcttatttccttggagctgtgagggtggcctcagggattgataaaggccgtgtcagatagtgttgcagatagtatgccgaggagtgggcacaactctctccctttctgttatctcttatcgggcgaactcacgagtcgcggccaagtggccaaatacaatatgggaattgcttgctccagtgcagttatctcttatcgcgagtcttgccaaatggatgagggcctactttaattgcatcagatattaggcgaatgaaattatatagcaccgccgacacgacagaggccgactttgcactaagccaacgcatgggcgcctcttctcgccccacggattttcgcaggccaaaaattctcgagcgattaatctgccaacgttggtccgctgggaaagataacgtacatatgcttgtgtgctccagaacccgcgggattatacaatttgactaatttttattgaccgtctgggaaacgttataaaaatgctctgatcccatctaatgaaaaggtgagatgaaataaaattgagaagatatttacaatcctttaaccaattgaggaccataaaggcaagaagtgtcaaaggaagtgtttatggagttttcattgaaacgagccagtcgagtgctctgaaaagttggctggtggagggcaatcgagccggaatcgtaaatgctaggccgcagttggggtctcataaattagaaggcaaatatattgtgcggatcataaaccgatttggcatgccacaatcccgccgatatcgccacccgactgctccgttttggccacgtagtggtgacgttggctggagccaccaccaagtaccctacacacgggccacggcgtctggcgaaggtgtgaaaatgcttaactatggtcaatgaattgatcaaatatttgcaggcgaacgaatcaaattagtgatcaattaccccatctccgggctgtcatttattgtgcacaccagtgacgtcacaacacaaccatctgacgtcaaaatgtctcgacgagcactgagagaagagtggtactgccacgagatggccgttaatgacacatcaaatagagacgttgggacttcactgttcatttattcgccgccaccgcacaggtgcactggcgcagatgtaatcgcggcttggcggttggagtccatgtccatgtctcactgcgattcacgttgcaaagaagtaggtctacatctggactatggactgactaacgagattttaaggtgttgggggcttcgtaatttgtttttcgagtttgactggcccctgccaccccctctgccacttggagagccggtctcgtctcagtttgggccaggcttcgcgggcgagaagtattttgacaagtcattggtcatgggtctgtagccgccgcttgaaatttgaaatcggagaaccagcggcagtggcagctcgcttggtgaatttgttgtgattggcgattgggagagctcagaagagccgtctcgtccaagtccaagtcaaggtgtggaaaataactgagctgcgtgatgagtgaaaagttttcgtaagccaaatgtgtttccctatcgagcagagcagctggcaggtgtttttagaacatttagtgcatttcgatgttcgggctcggaattgcaggtcaagataacggcgcccaacggggtcaaggtcggatggcaggcgttcgccaacattcattggtatgcgtttaatgcgacttggctgtatagtgtttacgccgcgcctacgtcaaaaatttcatggctaacgggggcgaagctcgctttactcgcatttttcggcgtaccaacgtgccgatagacactcgatagaccctcgggggaggtggggcggtgcggtgagactgttcacactagccgtcctgcaagccacacaaatatgtggccgacaatggtcgctcgaaactggcttatcaatggcacgagcgacggtggaaaacagcttatcgcggtgacgtcaggccggcaaagcaggtggagctgctaacacccgcattaaggcgacatatacatattaaatatttatgtaattgggagttgttgtcccaatacaacatgtctgtacggctgagcccgagcctcggtcagtcctaccggcccgaaaataaatgttatattgccctcggtcacgaatcggattgaaccggaaatccagggcgacacggctttcgtttcgctgggaaaaagttgttagcaatcaggcgacgcgtcggccaaatgcgaaaccaaagctttaaccgatccgccagcagcgcacgacgatcagaagcattttggagagcgtcgcgcgcggttacttgatcggcagttattttgttggccttctgagaagttaaacgtgactgaagtgaaacggggactttcgactcgagccggcggacgaataaaaagtaaaaagtatgtgtatttcaggaccaaacttatccactagggtattggccaggactatgctacctgaagagtgaaagaactcggtgtctcgatagctggcggctgttcgttccaagatttgttatcattcggcctaatccccaatccgtctgaaagcaaagagaatgatcgtaaacttaatggcgagccaataaaattgtgtaatttataattgccatccaaaacaacgtgagcttttggatcaaggcaatcctcaaaataatgagcaagaattgtaaaaacagagaaagactacaaaaaatcaacaccaacgctaaaaattccgtgtttgaagattgccttctggttgtagacaactcttaatttggtatagatacgattcaattttattgtctaggttgcctcggcactccaagcgctgttctatcgaccaccagatttttatccattagaatgttgagagtttcatacagtgcaatacattcagggattcacttttgttttaacagcccagttcagctagtagataactcagtgaaaacaggttatcgatatcagtgcgagcattggctacaaacttgtaaccactccgatctgacggtttgtgagtactcgcactttgaaacggcaccagcgaaagcttatcgatcctcggaagaatcaaggccgactttcgcttggcaccctcgaaatccaagcgatccaatctgccgtctcttgagctcctcgacattggtcctcgcttttacagcgatttcgccagctaatctgagattcctacattgaactctgcccgataagataaagcctggcgcgtgcttcactggcccctaagcggcttatcggccggtggggttgggctaagccaaataatgtcaaattacttatagcgcgggcagattattagaccgaatactgcaattatgttgtaaataatatgattattactgggattcccgaatacaagtcatgagctgacagaaggcaaacacaagaactaactgctcttgcaaacattagttactggcgcatctgatgtattcgagataaagacatttttgttttagcaaattcaacaacaaatccatttttaaatacagatggcgttctatgactcatagactatacatttaaacggcaataatggcaaaagatttatcgaccctaaaatgtactcgagtgtcgatcaactttactttttataccccttactcgtagagtaaaagggtatactagattcgttgaaaagtatgtaacaggcacaagaaagcgtttccgactatataaagtctatatattctggatcaagatcaataactgagtcgatctagccctttccgtctgtccgtctgaacgtcgagatatgtacgaaccacaggaactacaatataaaagccaggaggctgagattcagcatacagattctaatattcattatgaaaattaaaattaatcaatgatttgatgactgctaagctttgagagtttcaagtgaatgctagattccgctttcatacatatttcttattattttcttacggtaattttggaattctgccaatatttgtttactgtatactaatactggttttgcaatcaaataattcatcaaatatccacatttcaatggcaatcgcaacaagcattcataaaccaaaatcaccagtcatcgtacattgccggaccagtttagactgatgaataactcaatccaatccggacatagccaaacaaaaacaaatgataaccaacagcaagcttgaataagaaattaaatttggtttcctgtctgttctattgatcagcttacgcaactgttttcttatcgagtggactgatataataattgttctgattaatttaggaccttagtatgacgaccaataacataagtatgttattatgattagatttaattatctaacacggttagatgttaaacaaatatgtcattaaccgatcttattcttcccagccatgaccaatctctggaaggcattgacgcgtcgcaagacggaggacgtgaacgaaggcgagtcccagttggcgcgagtgctgaaccttttcgatctgacggctttgggagtgggcagtactttgggactgggagtctatgtgctggctggtcaggtggccttcaatattgccgggccagcggtgaccatttccttcctgattgcggccatcgcgtctgccttcgcggggatctgctatgcggagttcgccgcgcgagtgcccaaggcgggaagcgcctacgtatacagctacgtgaccattggagagttcgtcgccttcaccataggatggaatctcattctggagtatgtgattggcacagcctcagttgcgcgcggcctgagcggatatttcgactctctgatcaacaacaacatgtcgaaggcattgaatgagtcgatgcacatcgacgtcgactttctgggtgactaccccgattttttgtccttcggcatggtgctgctcctggcggccatcctcgcctttggcgccaaagagtcaagcttcctgaacaacatcttcaccacagtcaatctggttacgatcgctatcgtcctggtggctggcgccatgaacgccaacgtcgacaattggcgcatcccgaagaaagatgttcccgagggctttggcacgggaggcttcatgccgttcggcattgctggagtgatggccggagctgccaaatgcttctacggcttcgtggggttcgactgcatcgccaccacgggcgaggaggccatcaacccaaagcgcaacattccgctctctatcgtggtgtcgctgatcataatcttcctatcctactttggagtgtccacggtgctgactatgatgctgccctactacaaacaggacaaggatgcaccttttcctcacgctttcgattccgtcgagtggtacaccatcaagtggattgtgaccataggtgctgtgtttgcgctctgcactagtttgttgggcgccatgttcccactgcctcgcatcctctacgccatgggcaaggacggcatattgttcaagaggctgtccacagtgaacagctacacgaagaccccgctcctggccaccattgtgtctggaatctttgcgtgtaagtacgctgtcagaaagtgtcctctgtccccttatttatgactctacgtccatccctttctcagccataatggccatgctctttaacctggaccagcttgtggacatgatgtccatcggaaccctgttagcatacaccatcgtggcaatttgcgtgctagtgctgcgctaccaggacgaggagatgaccaagctggtgtctgtcaaggcaccgaatgttttccggcaattcttcaacggcaactccttccgggagcccaattctatgacctcgtccatcaccaaagtcggcattgtggtgttcgccatcttttgcctggtctggtgctccctccagaaagtcttcgacctggacagcaccggcggaattgtggcgctcagcttggtgggcgctgtgctaatcctcatctgcgttgtgatcggcatgcagccggtgtcgaccattgagctcacgttcaaggtgccgctagtgccgttcgtgccgtgcctcagcgtctttgcgaatttgtacctgatgtttcagctggacctgaacacatggatccgcttcctcatctggatcgtgatcggctacgtgatttacttctgttacggcatgcggaactccacgcagataagtaggagccgcagtcacgccgaggtggcggcaagcgctctgcagaaccagggacagcacgtgaatcccggcttcgagccggactacaaggtcgaaaatgggggtcgaccctacgagttctccgagaagctgtaagggccagctcttctagccgcgtactgtaaaccttttctacagcttaaacttcgttcacctttgcatcttcttctgaatagtaacaagactcctctgccttcttagctagcacgtttatgtgagagagatgaatagattgcgcatggaaattaaatggatctgccatgggtcggctttgttgttccggccctggggatctgttatttctgtgcgcctcaggacttctagagggagctcagagcaaactctattttaccattttaatgttttatccccatttcaacaatccaattttaatcagcccaaacgattccgccgcaatgccccgtttgttgtgatatttgtaaatatacctatatatagattaatattggtcgcatatttgtatgtttgtcacaattactatcgttatgtaaatggaattgtatcatattatgtgtgtcatcgccccgcgtagccgcatttagtgtttaagctctttagctgctaagcctcccgcccacatttgttattattagccaaaagagaaacgaattttgtcccttcttgattattaaaaatgcaataatgttcaacataacgtgtttggtatatttaattgagatgtgaacccagccaccacagacaaatccttgcgacccgaaaccggaatgagatatggggttcataaatatttatccacggactagagctccattctttgcaactttgcaggcctcagcgacagaactaaaacttctccatgggcttgagcagccccttccgaacgtatttatttgttctttttggcaactaggactgggtgtggcgtagagtcccgaaccaagtccaggacccactctgtttgctaaccggcttagttaaatggcaaagaatctggcctccgacgctcttctcctcctccgctttctccactcctcacaaatatctaagccctgggaaacttcaagagtaaatagtcggggcgggtcgaaaaaatcgcagcgcagagccaaaaagc

SEQ ID NO: 23225 - DNA, 2022 bp, DROSOPHILA
tgagagttcagttaatttctgtttttgtggcttgtcgcgatcgcaggcgtgtatgcaaaataaagcgcgaatgatttacggaaagcgctattaataaagtctcgtttgactgtcgattgctgtaatttcaatccgcactaccacatctcacgcaaaagttataacctatcgaacctgaaacccagaaacttttacttaaactacgccatgaccaatctctggaaggcattgacgcgtcgcaagacggaggacgtgaacgaaggcgagtcccagttggcgcgagtgctgaaccttttcgatctgacggctttgggagtgggcagtactttgggactgggagtctatgtgctggctggtcaggtggccttcaatattgccgggccagcggtgaccatttccttcctgattgcggccatcgcgtctgccttcgcggggatctgctatgcggagttcgccgcgcgagtgcccaaggcgggaagcgcctacgtatacagctacgtgaccattggagagttcgtcgccttcaccataggatggaatctcattctggagtatgtgattggcacagcctcagttgcgcgcggcctgagcggatatttcgactctctgatcaacaacaacatgtcgaaggcattgaatgagtcgatgcacatcgacgtcgactttctgggtgactaccccgattttttgtccttcggcatggtgctgctcctggcggccatcctcgcctttggcgccaaagagtcaagcttcctgaacaacatcttcaccacagtcaatctggttacgatcgctatcgtcctggtggctggcgccatgaacgccaacgtcgacaattggcgcatcccgaagaaagatgttcccgagggctttggcacgggaggcttcatgccgttcggcattgctggagtgatggccggagctgccaaatgcttctacggcttcgtggggttcgactgcatcgccaccacgggcgaggaggccatcaacccaaagcgcaacattccgctctctatcgtggtgtcgctgatcataatcttcctatcctactttggagtgtccacggtgctgactatgatgctgccctactacaaacaggacaaggatgcaccttttcctcacgctttcgattccgtcgagtggtacaccatcaagtggattgtgaccataggtgctgtgtttgcgctctgcactagtttgttgggcgccatgttcccactgcctcgcatcctctacgccatgggcaaggacggcatattgttcaagaggctgtccacagtgaacagctacacgaagaccccgctcctggccaccattgtgtctggaatctttgcgtccataatggccatgctctttaacctggaccagcttgtggacatgatgtccatcggaaccctgttagcatacaccatcgtggcaatttgcgtgctagtgctgcgctaccaggacgaggagatgaccaagctggtgtctgtcaaggcaccgaatgttttccggcaattcttcaacggcaactccttccgggagcccaattctatgacctcgtccatcaccaaagtcggcattgtggtgttcgccatcttttgcctggtctggtgctccctccagaaagtcttcgacctggacagcaccggcggaattgtggcgctcagcttggtgggcgctgtgctaatcctcatctgcgttgtgatcggcatgcagccggtgtcgaccattgagctcacgttcaaggtgccgctagtgccgttcgtgccgtgcctcagcgtctttgcgaatttgtacctgatgtttcagctggacctgaacacatggatccgcttcctcatctggatcgtgatcggctacgtgatttacttctgttacggcatgcggaactccacgcagataagtaggagccgcagtcacgccgaggtggcggcaagcgctctgcagaaccagggacagcacgtgaatcccggcttcgagccggactacaaggtcgaaaatgggggtcgaccctacgagttctccgagaagctgtaa

SEQ ID NO: 23226 - protein, 604 aa, DROSOPHILA; identical to SEQ ID NO: 23223

SEQ ID NO: 23227 - DNA, 14180 bp, DROSOPHILA
cggttatttccctgtccgctgagattcacgtggcccgctacctcactcagcaaacaatgggcaccttcggggctgttttggatgatgcacattttcgggatcaactcatgtctcaggtagatccaccgcccgccgctaagactcagcacaactcgcttattcgcatgggcttcccgcacacaaagaatgaagttgagggcaaggacgcgccattgtccatgtgcatgtgccacatagagaacttggaggagcccagtgaactgaccactactggccaccactgcccgcaatgcaacagcaagtactgcgagctgcccgtggagtgccagtcttgcggcctcaccctggtctccgcgccgcacttggcgcgttcctaccaccaccttttcccggtgccaaattttgaggaactgccgtttgaggcgatgcctgcttcgtcatccgacctcaccagcgatgtcagggaatgttacggctgcgccaaagctcttgggcaaggcgttgacaaggtcgccgataaagtcgtcttcagatgcggtttctgcaagcagttcttctgcgttgactgcgacatcttcattcacgacacattgcacgcctgcgtgggatgcaacaccattcccggcgtagacggtctggtttaccagcaaagttccaagtctgaccaggttgatgcacacccagggccctcaaagcagcgcggccagtgtgggatgtaactgactttctatagatagatatttcgaacttccacataactacgcatttggggcaaacaaaatacagttcgtttcgaaacggtggttatgagttgtatcaattaaaatctggttttatgcttaataattgtgaaggcgagcgtagcattattatggccgttgtgtgagaccctctcaattgtattgctaattacttggtcataggctctctgtgccgcttcatgcgaacttggcgcacttttgtctagagctcgcttgagttcatcatcagcgtttgccgcattcggtcgggtttagttgcgattcaatccaaaagctctcggcacccacaggtgttctcgttggaactttagctttatagatgttaacccgcgttggtgttgtgaattttgaagagccagaacttttgttcagtgggagaccgatgtgacgtggatatactgctctgtgacaccataaacaatttatgaagatcaatgacgctgctttaaactagtattaaaccagttagaggccagctaaaccgccacaactgtctattaccttataaagttcaacatttaattgaagattcataagcattccgaaggtctaccataaaaatcaaaaatgtatgtacatatattgtgttattgttattaataattggttgtttttaaagtttctaaatttttttaaaaagataactattagacttatgctttttgattttagagttacaatacaaattctttatgcggtttctaaaagatgcgagcaaatggcatcaataatagataataaaacataaataaaagcttttaatttgtatatataaattggtctaaatgtagcttgtaaataataggttcaaatggtatgtaacttgcggcaaaatgcaataggataaaaaatcaacaaagcgagccgtgcgggctttaagatatgtacggctatgtatggctagatcggtaatcaagaatgtaaatactttatatactgttatacattgtaactttataattcccagcggaacaagacgtactcgtagtaattttatataactccatatatctcttgaatagcgaacaagcaatggcgatgaaataaaagatattttataaactgtccgaattggatccacatattattagcgcttgagtctaacattcgcgatcatttataagcccatatgtgttttaaggtatacaatttctatttctttgttactattggttctaaagtctgtcatagaattcgttaactaagaacttgaccttcagagaccatctgggcaacagcagtcagaataatatccgtcaattaaagttgttttagacgcaaatagcacgactagtctctctcgttaattactgactagcccagcgactaacccatgccagctttcattaatttacccgtatgcatttgagcaatataaagacgcttccgcatcgcaccccgcacaaaagcgcgaaatcacaatcacaaatctggtgataattatatgtgaaagtggaatgaatcagataataaatgtcgctcttaattgtattttcatttgtgtgtacatatatatgtacatatgtacatatagtacatatgtatgtagttgaaggagtaaagagttcgcgtcctggtccagtccagccaatgcaggcaaaattgcttcgctaatttattcaacgctgcccgagaatgactaactgaaatttgagggactaggtcgcctttgatacgaaaaagttctgtgcggctaatcactttctaatcagtaagttatttctcgtgcaggcaacgcaactcattgattggtagagttatttgcattgttcagaagtcggttgaaattgctttgaatggcttgtaatttgccatcgctgtttaaaatttgatgtttccgagtcgactttgagcgcaataaaagtgaagtgataaatccaaatcaagccgcccagacggaagcgcaaatcggaggacgggaagctccacattggcattgtgtttatttcgttgggaggcacctccttcgagcttctggggtcgagcccatatcgtgctggtttaaatttaattgttgctaaatgaatgacacgagtgtcgaaaatgaaggggagcgtttattatcagatttaaataactatatcgcttcataattaaattagagcgcagtcggtgggagaatttttatttgcttgcggatgcattaactttacaaacaaatagaaattatccattctatttgtttttcagctgctttgaaaataaacctcaacaagaactcctccttcagcaacatcaactacatcaacaaatgacttccgggcaattaaaatgaaaatgataatcctatttccccaccccctttcgccacccaaacccacatggatattaattaattgtataaaaacaaggatttaacaaaaacccaccgattaatgtcggtaaactcggtttttttcacccacacacctccgaacgcaattatgcaataaatgcctcaaaatgtttgcacaacttttaattataaatgttgaattgctaatttgaaatatggcgaatgcaaatcgctgggcgttggacggcgtgaaagactagcctcgccacgcccctcgaggggcttgcatgcccttgcagagggtatactgacttctgttaaaagtcagtagagcagcgatataaatatatacatacatatatattattgatcagtatcaacagtcgagtcgatatgcccatcttcgtctgtaagtcaatcagtccctggttttggaagctacatgaaacatcttctttttttctataaatcggaaatggaactggtccgggactactatatcacatagctggtaaaggatctaacaaaaaataaatttaaaaaaaaaatgtaacttcgttgttatttctcagagacttttttgattctttatacgaactgttgttgtctgataacacctaatttatttttgaaatttagtatacccttatagctgtcataggatatttaatttatatttaatttaattatattaattatatttaatttaatataccagattcgtcgccttaagtatttcatctgtttagggtatataaactccagcaagggtatataagcatcggcttgacaaagcttttttttacctgaattcagctcaatcaaagtgtgagcagtagacttgtccgcttgcagtatgcagcggcacgtaacagccttaacctgcttttcacggagcgtggggaaaacgaaatactcgggaaaacctcctatttaaaagatgcgtctcgtagacgtacatacataagttattgctatgccaattgaataaaggaataaattgtcagaatttacttacatttttacacccttgttttgcataaagtggcttgtgttagcgcctattagcacattaaaacaaatataaaatcaattcgcagaattaaaatattttgtacaaacgtacataaatacatacatatgtatttttcatgttcttgctgtctatatccgataatcaagatgttaagaagtaatattaaatattaatattaatataaagttattttaccccttactcttagagtaaaagggtagtacaaaatcgcacagctggtaaatgaactattgaaaaataaattttaaaaaaaaatgtaccttcgttgtctttgatcagaaattgttttgattctgaactcaaccgttctgtaacaacacgtaatttattcttgaattttagtgtattcttataggtgccataggaaacgttcaaaagaccaatgcagaagccgtaattgttgtttataacaacaacacaacaatatgtacatatatgtatgtatatatgtaatcttgatcaggatcaatagccgagtcgaactggccctttccgtccgcctgtacttccgtccgtccgtatgaacgtcaagatctcagaactacactagctagaaagttgggatttagcataaagattttagagaaacactagggggcgtaagagtgggcgtggcaatattgtcaaaaatcttgcgctgcgtctttgtctcaagaatctgtatgctcaatctcaaccttctagcttttatatttcctgagatgtcgacgttcatacgaacacggtcaggttgattcggctattgatcctgatcaagtatatatatacatactttaaatagtcggaaacgcttccttctgccagttacatactttgcaacaaatcgagtataccctttcactcgacaagtaacgggtattacaagatggaaatgggctgttcgattcttcagcgggaaatctaatattacagactgagttgtcccgttagtttctgcgcggatcgtcagacctcctctttatcggattcctctttgcgctgctcgctaaaaccaagtgcggctcaggtaatttgactgcagtttgcttcgtctcagattgggcttaatacatttcgcgaagagcgcgtgaatgagagttcagttaatttctgtttttgtggcttgtcgcgatcgcaggcgtgtatgcaaaataaagcgcgaatgatttacggaaagcgctattaataaagtctcgtttgactgtcgattgctgtaatttcaatccgcactaccacatctcacgcaaaagttataacctatcgaacctgaaacccagaaacttttacttaaactacggtaattccggttttggagagcagtagactgcttttttcggcattctgaatttttattacctctggaactttctttttgtttttgtattccgcaaagcgttggcccacatgacatcattgttgtacccttgaagtggcttacatatacaagtacatatgtatgtgtgcaatatacagtaattgcgacaccgaaaatgcaaagatttgttaatatttgtgcatatttttaactattgcagtctacagccccattaaaataaataagaattatgtaggaaataagggttttaaaattacgttaacttttatacccgttacttgaagagtacattaaattaggattgaataagcttgtttagattttggaatcacagagcaaaagtatttaatttttatgtgggtaaaaggtcgtcatcactgggtacatcgaaggctatcagcgatgacttcactagcgcagctctggccatgatgatccgtactttaagtagcccaacaccgggttgaagggctattttcccgtgatctgataatttacgactccgcatcggtcgtatcgattatcagcgataattaagacggtaaacggcacttggcaaccgtagctgataaaataatctgttcaggcacaggagtgatttgttgttgcccccgaaatcagattttaatcgttaatttcaacaggcaatcttagctgacttactataaatttttctgtatcattttaaaggacttaaagtacgccacaagcaggtatatgaaaagaaagagattacgttgtaatcggggattcgcagagataaaaaaaataggctttggtccggacttagatggctgtgactcaccccttttgaatttgtacgcgaatgtgcatgttctttcccctatgcattccatatgacttgcttttcagctcaccattttgcagttccaactggctccgcgaatgtcaagttaagaaaactcctcccgctcgacgaaaaaggcagcgtcaaagtcacaaacaatttgcaagcaacactgagcactcaacaaggcgtattgaaacaaaccccattggtataggcaggttaactcccaacataccgagcgcccacgtaggctaatgaaaaatagttaagatatggagtatgcaagatgcgaaatgctgtttaaaactttctgaaacaagcgaaaatgcataaagttcggtgactgtaacgtaattagacgccttgggatcttgggtggtaaatgctttctcggcgcaaagagataaacatccatcgcggcctagacggcacttgcccggtaataacgtctaaaggtattgacacataaatcgcacaaacagccaatcgatcaaattcaagctcattttctaccttttgttcattcacaagtgtcaatgcagcctgtgagcttgaaaactgttgataatggaaaacaaattctgacaaagtatttgccctaatctttttttacgcaagacagtcatgtagacacttcgtatgaagcacgattgacaggaatatcagaccaagggatgggctcatacattgtctattcttatttccttggagctgtgagggtggcctcagggattgataaaggccgtgtcagatagtgttgcagatagtatgccgaggagtgggcacaactctctccctttctgttatctcttatcgggcgaactcacgagtcgcggccaagtggccaaatacaatatgggaattgcttgctccagtgcagttatctcttatcgcgagtcttgccaaatggatgagggcctactttaattgcatcagatattaggcgaatgaaattatatagcaccgccgacacgacagaggccgactttgcactaagccaacgcatgggcgcctcttctcgccccacggattttcgcaggccaaaaattctcgagcgattaatctgccaacgttggtccgctgggaaagataacgtacatatgcttgtgtgctccagaacccgcgggattatacaatttgactaatttttattgaccgtctgggaaacgttataaaaatgctctgatcccatctaatgaaaaggtgagatgaaataaaattgagaagatatttacaatcctttaaccaattgaggaccataaaggcaagaagtgtcaaaggaagtgtttatggagttttcattgaaacgagccagtcgagtgctctgaaaagttggctggtggagggcaatcgagccggaatcgtaaatgctaggccgcagttggggtctcataaattagaaggcaaatatattgtgcggatcataaaccgatttggcatgccacaatcccgccgatatcgccacccgactgctccgttttggccacgtagtggtgacgttggctggagccaccaccaagtaccctacacacgggccacggcgtctggcgaaggtgtgaaaatgcttaactatggtcaatgaattgatcaaatatttgcaggcgaacgaatcaaattagtgatcaattaccccatctccgggctgtcatttattgtgcacaccagtgacgtcacaacacaaccatctgacgtcaaaatgtctcgacgagcactgagagaagagtggtactgccacgagatggccgttaatgacacatcaaatagagacgttgggacttcactgttcatttattcgccgccaccgcacaggtgcactggcgcagatgtaatcgcggcttggcggttggagtccatgtccatgtctcactgcgattcacgttgcaaagaagtaggtctacatctggactatggactgactaacgagattttaaggtgttgggggcttcgtaatttgtttttcgagtttgactggcccctgccaccccctctgccacttggagagccggtctcgtctcagtttgggccaggcttcgcgggcgagaagtattttgacaagtcattggtcatgggtctgtagccgccgcttgaaatttgaaatcggagaaccagcggcagtggcagctcgcttggtgaatttgttgtgattggcgattgggagagctcagaagagccgtctcgtccaagtccaagtcaaggtgtggaaaataactgagctgcgtgatgagtgaaaagttttcgtaagccaaatgtgtttccctatcgagcagagcagctggcaggtgtttttagaacatttagtgcatttcgatgttcgggctcggaattgcaggtcaagataacggcgcccaacggggtcaaggtcggatggcaggcgttcgccaacattcattggtatgcgtttaatgcgacttggctgtatagtgtttacgccgcgcctacgtcaaaaatttcatggctaacgggggcgaagctcgctttactcgcatttttcggcgtaccaacgtgccgatagacactcgatagaccctcgggggaggtggggcggtgcggtgagactgttcacactagccgtcctgcaagccacacaaatatgtggccgacaatggtcgctcgaaactggcttatcaatggcacgagcgacggtggaaaacagcttatcgcggtgacgtcaggccggcaaagcaggtggagctgctaacacccgcattaaggcgacatatacatattaaatatttatgtaattgggagttgttgtcccaatacaacatgtctgtacggctgagcccgagcctcggtcagtcctaccggcccgaaaataaatgttatattgccctcggtcacgaatcggattgaaccggaaatccagggcgacacggctttcgtttcgctgggaaaaagttgttagcaatcaggcgacgcgtcggccaaatgcgaaaccaaagctttaaccgatccgccagcagcgcacgacgatcagaagcattttggagagcgtcgcgcgcggttacttgatcggcagttattttgttggccttctgagaagttaaacgtgactgaagtgaaacggggactttcgactcgagccggcggacgaataaaaagtaaaaagtatgtgtatttcaggaccaaacttatccactagggtattggccaggactatgctacctgaagagtgaaagaactcggtgtctcgatagctggcggctgttcgttccaagatttgttatcattcggcctaatccccaatccgtctgaaagcaaagagaatgatcgtaaacttaatggcgagccaataaaattgtgtaatttataattgccatccaaaacaacgtgagcttttggatcaaggcaatcctcaaaataatgagcaagaattgtaaaaacagagaaagactacaaaaaatcaacaccaacgctaaaaattccgtgtttgaagattgccttctggttgtagacaactcttaatttggtatagatacgattcaattttattgtctaggttgcctcggcactccaagcgctgttctatcgaccaccagatttttatccattagaatgttgagagtttcatacagtgcaatacattcagggattcacttttgttttaacagcccagttcagctagtagataactcagtgaaaacaggttatcgatatcagtgcgagcattggctacaaacttgtaaccactccgatctgacggtttgtgagtactcgcactttgaaacggcaccagcgaaagcttatcgatcctcggaagaatcaaggccgactttcgcttggcaccctcgaaatccaagcgatccaatctgccgtctcttgagctcctcgacattggtcctcgcttttacagcgatttcgccagctaatctgagattcctacattgaactctgcccgataagataaagcctggcgcgtgcttcactggcccctaagcggcttatcggccggtggggttgggctaagccaaataatgtcaaattacttatagcgcgggcagattattagaccgaatactgcaattatgttgtaaataatatgattattactgggattcccgaatacaagtcatgagctgacagaaggcaaacacaagaactaactgctcttgcaaacattagttactggcgcatctgatgtattcgagataaagacatttttgttttagcaaattcaacaacaaatccatttttaaatacagatggcgttctatgactcatagactatacatttaaacggcaataatggcaaaagatttatcgaccctaaaatgtactcgagtgtcgatcaactttactttttataccccttactcgtagagtaaaagggtatactagattcgttgaaaagtatgtaacaggcacaagaaagcgtttccgactatataaagtctatatattctggatcaagatcaataactgagtcgatctagccctttccgtctgtccgtctgaacgtcgagatatgtacgaaccacaggaactacaatataaaagccaggaggctgagattcagcatacagattctaatattcattatgaaaattaaaattaatcaatgatttgatgactgctaagctttgagagtttcaagtgaatgctagattccgctttcatacatatttcttattattttcttacggtaattttggaattctgccaatatttgtttactgtatactaatactggttttgcaatcaaataattcatcaaatatccacatttcaatggcaatcgcaacaagcattcataaaccaaaatcaccagtcatcgtacattgccggaccagtttagactgatgaataactcaatccaatccggacatagccaaacaaaaacaaatgataaccaacagcaagcttgaataagaaattaaatttggtttcctgtctgttctattgatcagcttacgcaactgttttcttatcgagtggactgatataataattgttctgattaatttaggaccttagtatgacgaccaataacataagtatgttattatgattagatttaattatctaacacggttagatgttaaacaaatatgtcattaaccgatcttattcttcccagccatgaccaatctctggaaggcattgacgcgtcgcaagacggaggacgtgaacgaaggcgagtcccagttggcgcgagtgctgaaccttttcgatctgacggctttgggagtgggcagtactttgggactgggagtctatgtgctggctggtcaggtggccttcaatattgccgggccagcggtgaccatttccttcctgattgcggccatcgcgtctgccttcgcggggatctgctatgcggagttcgccgcgcgagtgcccaaggcgggaagcgcctacgtatacagctacgtgaccattggagagttcgtcgccttcaccataggatggaatctcattctggagtatgtgattggcacagcctcagttgcgcgcggcctgagcggatatttcgactctctgatcaacaacaacatgtcgaaggcattgaatgagtcgatgcacatcgacgtcgactttctgggtgactaccccgattttttgtccttcggcatggtgctgctcctggcggccatcctcgcctttggcgccaaagagtcaagcttcctgaacaacatcttcaccacagtcaatctggttacgatcgctatcgtcctggtggctggcgccatgaacgccaacgtcgacaattggcgcatcccgaagaaagatgttcccgagggctttggcacgggaggcttcatgccgttcggcattgctggagtgatggccggagctgccaaatgcttctacggcttcgtggggttcgactgcatcgccaccacgggcgaggaggccatcaacccaaagcgcaacattccgctctctatcgtggtgtcgctgatcataatcttcctatcctactttggagtgtccacggtgctgactatgatgctgccctactacaaacaggacaaggatgcaccttttcctcacgctttcgattccgtcgagtggtacaccatcaagtggattgtgaccataggtgctgtgtttgcgctctgcactagtttgttgggcgccatgttcccactgcctcgcatcctctacgccatgggcaaggacggcatattgttcaagaggctgtccacagtgaacagctacacgaagaccccgctcctggccaccattgtgtctggaatctttgcgtgtaagtacgctgtcagaaagtgtcctctgtccccttatttatgactctacgtccatccctttctcagccataatggccatgctctttaacctggaccagcttgtggacatgatgtccatcggaaccctgttagcatacaccatcgtggcaatttgcgtgctagtgctgcgctaccaggacgaggagatgaccaagctggtgtctgtcaaggcaccgaatgttttccggcaattcttcaacggcaactccttccgggagcccaattctatgacctcgtccatcaccaaagtcggcattgtggtgttcgccatcttttgcctggtctggtgctccctccagaaagtcttcgacctggacagcaccggcggaattgtggcgctcagcttggtgggcgctgtgctaatcctcatctgcgttgtgatcggcatgcagccggtgtcgaccattgagctcacgttcaaggtgccgctagtgccgttcgtgccgtgcctcagcgtctttgcgaatttgtacctgatgtttcagctggacctgaacacatggatccgcttcctcatctggatcgtgatcggctacgtgatttacttctgttacggcatgcggaactccacgcagataagtaggagccgcagtcacgccgaggtggcggcaagcgctctgcagaaccagggacagcacgtgaatcccggcttcgagccggactacaaggtcgaaaatgggggtcgaccctacgagttctccgagaagctgtaagggccagctcttctagccgcgtactgtaaaccttttctacagcttaaacttcgttcacctttgcatcttcttctgaatagtaacaagactcctctgccttcttagctagcacgtttatgtgagagagatgaatagattgcgcatggaaattaaatggatctgccatgggtcggctttgttgttccggccctggggatctgttatttctgtgcgcctcaggacttctagagggagctcagagcaaactctattttaccattttaatgttttatccccatttcaacaatccaattttaatcagcccaaacgattccgccgcaatgccccgtttgttgtgatatttgtaaatatacctatatatagattaatattggtcgcatatttgtatgtttgtcacaattactatcgttatgtaaatggaattgtatcatattatgtgtgtcatcgccccgcgtagccgcatttagtgtttaagctctttagctgctaagcctcccgcccacatttgttattattagccaaaagagaaacgaattttgtcccttcttgattattaaaaatgcaataatgttcaacataacgtgtttggtatatttaattgagatgtgaacccagccaccacagacaaatccttgcgacccgaaaccggaatgagatatggggttcataaatatttatccacggactagagctccattctttgcaactttgcaggcctcagcgacagaactaaaacttctccatgggcttgagcagccccttccgaacgtatttatttgttctttttggcaactaggactgggtgtggcgtagagtcccgaaccaagtccaggacccactctgtttgctaaccggcttagttaaatggcaaagaatctggcctccgacgctcttctcctcctccgctttctccactcctcacaaatatctaagccctgggaaacttcaagagtaaatagtcggggcgggtcgaaaaaatcgcagcgcagagccaaaaagc

SEQ ID NO: 23228 - DNA, 2147 bp, DROSOPHILA
attcggtcgggtttagttgcgattcaatccaaaagctctcggcacccacaggtgttctcgttggaactttagctttatagatgttaacccgcgttggtgttgtgaattttgaagagccagaacttttgttcagtgggagaccgatgtgacgtggatatactgctctgtgacaccataaacaatttatgaagatcaatgacgctgctttaaactagtattaaaccagttagaggccagctaaaccgccacaactgtctattaccttataaagttcaacatttaattgaagattcataagcattccgaaggtctaccataaaaatcaaaaatccatgaccaatctctggaaggcattgacgcgtcgcaagacggaggacgtgaacgaaggcgagtcccagttggcgcgagtgctgaaccttttcgatctgacggctttgggagtgggcagtactttgggactgggagtctatgtgctggctggtcaggtggccttcaatattgccgggccagcggtgaccatttccttcctgattgcggccatcgcgtctgccttcgcggggatctgctatgcggagttcgccgcgcgagtgcccaaggcgggaagcgcctacgtatacagctacgtgaccattggagagttcgtcgccttcaccataggatggaatctcattctggagtatgtgattggcacagcctcagttgcgcgcggcctgagcggatatttcgactctctgatcaacaacaacatgtcgaaggcattgaatgagtcgatgcacatcgacgtcgactttctgggtgactaccccgattttttgtccttcggcatggtgctgctcctggcggccatcctcgcctttggcgccaaagagtcaagcttcctgaacaacatcttcaccacagtcaatctggttacgatcgctatcgtcctggtggctggcgccatgaacgccaacgtcgacaattggcgcatcccgaagaaagatgttcccgagggctttggcacgggaggcttcatgccgttcggcattgctggagtgatggccggagctgccaaatgcttctacggcttcgtggggttcgactgcatcgccaccacgggcgaggaggccatcaacccaaagcgcaacattccgctctctatcgtggtgtcgctgatcataatcttcctatcctactttggagtgtccacggtgctgactatgatgctgccctactacaaacaggacaaggatgcaccttttcctcacgctttcgattccgtcgagtggtacaccatcaagtggattgtgaccataggtgctgtgtttgcgctctgcactagtttgttgggcgccatgttcccactgcctcgcatcctctacgccatgggcaaggacggcatattgttcaagaggctgtccacagtgaacagctacacgaagaccccgctcctggccaccattgtgtctggaatctttgcgtccataatggccatgctctttaacctggaccagcttgtggacatgatgtccatcggaaccctgttagcatacaccatcgtggcaatttgcgtgctagtgctgcgctaccaggacgaggagatgaccaagctggtgtctgtcaaggcaccgaatgttttccggcaattcttcaacggcaactccttccgggagcccaattctatgacctcgtccatcaccaaagtcggcattgtggtgttcgccatcttttgcctggtctggtgctccctccagaaagtcttcgacctggacagcaccggcggaattgtggcgctcagcttggtgggcgctgtgctaatcctcatctgcgttgtgatcggcatgcagccggtgtcgaccattgagctcacgttcaaggtgccgctagtgccgttcgtgccgtgcctcagcgtctttgcgaatttgtacctgatgtttcagctggacctgaacacatggatccgcttcctcatctggatcgtgatcggctacgtgatttacttctgttacggcatgcggaactccacgcagataagtaggagccgcagtcacgccgaggtggcggcaagcgctctgcagaaccagggacagcacgtgaatcccggcttcgagccggactacaaggtcgaaaatgggggtcgaccctacgagttctccgagaagctgtaa

SEQ ID NO: 23229 - protein, 604 aa, DROSOPHILA; identical to SEQ ID NO: 23223

SEQ ID NO: 23230 - DNA, 12748 bp, DROSOPHILA
gcgtgtgcgaacgaaccaaatatatacacacacgagcgctggtaggacagtgaaatcgaatttgctgtttatatagcacaattcgatggctgataatgccgccgccgtcgccgaaaaatcgtttccccaatatcgctagcatcagaacgggaaagagaacgggtacgagtacgattccgattccgattccgagtacgtttcccacaaagtatcgttgtcgttgtcgtcgttgtcctgctgccgtgccccgccccctctggccgcgccgccgccccctctgcgccgtacgcacgcatcgatttgggctaaacgttagatacctcctaacgcagttgttagggtggaaagaacggccagggaaaattgaatgcgctacactggtggtcgagctgctgcaatgccgtgcttaaatttaagtgcaaggcactgatacggatccgttggcgctcctggtctggtccgtatccaagcgaaaagaacaaaatatacaagaaaaaaacaagaaacaaaacaacaaaacggaaagcaatcccgtgaaatcccggaatacagtgcaatacaacgaaccgaaacacagaacaaaacgaatagaacgaaacaaaacgaaacgtatttagatacgcaggagagaccaagtcgggatatccaagtggacagtgtggtcttgtgcagtggagtggtagttatgctatatatagctgttggccaaaacaatagtgtccgataacagagcgagatcaattcgaggagttgaaaatgtttattgtataatttccaattgagcaggtgtgcgtgcgagtgtgtgtgcgtacgtgtgtgtgagtagtttttgtttttcgctgcttcttcttgcggtttatttgtcaacaaaaagaagaaggaagaacgaagcagtgtgcgtgcagcagtaaattgttgtccgcacaccccgcactgcttgcaggagtggcgaagcagttaacttgtgcaacgcaaccacggacgacccagtggcctccacatgaagaccatgtcgcgcttcggcctgcgccgtggcttcaagttctcggaggagcaggtcaacggcaagaatccaattggaccggcaacggcaccagccacggccgctgcctcatctaatccgcgcaaaaaacgacagacccggcaggaggaggatgtggacgcggaacaggaagaggtggaaccgcacgaggatcagctggaagcggaacaagagccgctctcgctgatctgcagcctgccgctggagcggctgccccgtttggtggagaagctgcatcagatgacggaggaacgggaacgagaacgggagagggagcgcgagcgcgagcgggaagaggccgccggcctgggtggagccgcgcactcgaaggtcctgtgtctgtactgtgataggaagttcgcctccggcaagctgcaggccaagcatgtggacaagtttcacaccgagcggcaggaacgacgctgcagcggtcgttccaccagctccaattctcatcccgccggcggcttccccggctgccagtggtgtggccagcaaggcaatcgccgccaggccacgcccccgcagatctgcctgccggccaagcatttggagcagctattccagcacctcagcgagcagcatgcagataagtatttcgcctgccagccgtgtcgcctgcggttccaggacgcagatcacctgttgggacaccagcgccagcagcattcgcttcatcatccggaggatggccatgccaccaaaccgggtctgatgggcgccgacgagccggtgctctttcgcctcggccttacccagaaccgtctgcccagccatcggaatcgaaaccagcgcaaggaggaggagccgccgcccctggccacgcccagcagcaaatcccggagcagcagtcgggcggcgacgcagcgacagcaacagaatcagcatcagcatcaacagtcgcagtcgcatcagcagactgctgcagcgggtaacatggctctgcaggagtctgtcaatccggatgcagtcttccggctgccagccagcatggcctgcgtctcatcatccgcctccgtcgccaactcagtgttcgatgacaagttctacaaggatgtgatctctaatgtacggcacaacctccagaatcacctcgacggacggctgttcacctcgtcttcgacgtccacaacgtcagccacatcgtcgtccgcatcccataagtcagacctcattatgctgcacggacccagtcagctggggcctggcggcgcctcctatcccactctactgaccgcggatcaatttggcggcacgggggaactgctaccgctggccaaattccgccggagaccgcacacgaagcacagttggaagtggaagtgggactacgtgaagaagttcacgctgatcaacgagggcggacggctggtcaagaagctgaagcagccaaactacctgggactgcgcgatctctccaagttggacatgtggacgcagctgacgatgcggcaaaagcacgatctctcgctctcattgacggaggagcagaaccaggagcagcgccgcctgctggagcagctaaatctcatcctggaccaccgcctgctgccgcacatcattctcgagcagaacgaacaggcggtcatcaagtgcgaaaacgaggaggaggacgagggcctggactcgcatcccggtgacgatctgctgccgcaaacgttcgccgacgagagttttctctccctgctgcagctccaaccaagaggcgggagcagcgaacaggaacgacagcgggagcgggaccagcgagagcgtagcaggaaccaaaaggccgtcgtgctcagcggcgagtgggcacggccgcgtctctatttgtgcatctgttgcggcgccaagttcgaccagcgcaagtcgctggaggagcacaagaccttccgccactcgcacatctacgccacgcactacgaggtcgtgggacgcgagctgctggccggcaatctgttgcgccacctcttcatcccgaaacgggcgctgggtcgctttgccgccgcgagcaactgcatccgatggccgcagattgcgccggcagccacagtgcagcagcccaagcaggagcaggtgcaaccggaggaggagaccaggtcgtcggcctcgtcacgctcatcatacgaggtgtccacacccactccgctatcggcactggagcagcaacaaccatcacctgcttcgggatcgggcaatgcgtcttcatcgtcgtcctgttcgcccagctcatcatccgcctccacgctgctgtccaccgccacccgcacctcgatgtccaactccacctgcacctcctccgctgccaccacgacggtgtcgtccacctcgtccgctccttccagctgcaccaagtgcggtcgcaagtgcagcggcctcatggatctctatcgccacatgctggactgctccggcgactatgtgtggtcgctggccaagaagcgcaagtatcgctactactgcggcaccaagaagcgacgagccttctccaagaagctcaagcagctctccgcccgcaagaaggaaaagctggaggtggaagtggaggagggaacgggcgatggcgatggcgatgccgaggtagatggcgatggcgaggcggaggcggagggcgaggaaagcgtgtccagttcatccaagttgaagaactcgccacgccaaaggcccagcgatggtgagtatgctgtgagtttccaagttcccttgcacacatttaaatattacccaatttgtagctgaatccattcggaaaatgctggagaatctgcccgccaagcgcatctgcaagaagatatttcccgtggacaataaggccaagcgcaaggccaagaacaaggcgaaggccaagtctatggccaagtcgctggtcaagtcgaaatccaaatccaagcagcagcgcagcagcaccaagagaatctacaatcagcacctgctgcgcaccaccagatcccgttcacgttcatctgtggtggccaccggctcctcggccgctgctgtcgccgcacagcagcagcgcagtcgccgcaaacagaagcagcaacaacaaaagcagcaacaacaaaagcagcagcagaaaaagcaggaacagaaggccaagctggagaaagtaaaatccccgccagaaccgccggcagcagtcgaatcggatcaaatgccagccaagacggaggccagagcgcccgcaccgacagtcactgccaagtcacgatctcccgctgaggaaaagccatccctgcgtctggagctgccacaaactcttccggaggcagccgctccaaacgtctccgttcatgaaacggagcccgcgtcgcccacgcccagcaagcagctaatgcccacaccgcccactactccagcgccggccaccaaatccccgccagctgctgcagccgttgctccacccttctgcgccgccaatcgacagacgacgccgaattcgactgttaagcgcagcaagaggattagcgattgcatagccatgctcaccggcaaactggaggagaagctcaaaacggagcaagtgcctccgcctgggccgctgcaaaaggaaaaggagaaaccccagcaggataggccggctgagaagcaggacaagacaccgcaaccagtcgatcaccagtcacctgctgccgctgtggtcgccgaaaaggagcgggtgcagccaaagacgcccaaacgcaaggcggtgtcacggcgcataatcaagatggatgccacaccagagaccttggcggagccgatccaggagcggaaaccagttgccatgccacctgcagttccaccgcctgccgttgctccagccattttgaatgccgctcctgctcctccagcgctgcagcctcccatatttgccagcatgccagtggcagtgccagtagtgcctgcgccagttcctccgccaccagtcgcagcagcagctcctctgccagtcgctgccattgttcctctgcccgtcgctgcacctgctccgccgccagtcgccaccgctttggttcatccaccgacgagacgaacgcccaccaaggcggcggccaaacagatgggtgccccaccaccaaagccaccagcttcgttggccgccctcaaacagtatcctccgctggaagcgacgttgccagtgccgcctacgaattcagcgccgcccgttcctgtcgcagttcctctggtgcctgtgccggtgcctgtgcctgtgccggtggcaatgccgttgggcatgcagggaatgccagtgcctgtgaatgttaacatgctgcccaagctgccgctgtatatgacacaactgcaagcgccagcgaatcccaatcccaatccaaatcccgcaccgacagctatgttcgtgatggcggatcatcagcccctcaatctgaccagtcagcgcggagtgctacagaagccattgatatccggcaccacgggtgacccgggactcgtcggactgcagcatcatcgtgctggtggcatgcccgccaggcggcagacgatctgtggattcgaggcccggaatttgattggcttggacatggaaatggagccgctggatctgtcaaagaagtcgagcaggaaaccgtcaccggtgccgccgccgaggatgcagcaggagttgccgatgccactggtgccactgcccttggtgacgaatgcaaatgcgctggcgccgcaatcgcagccaggtggtgcaccacttcctacgccagttggtggtgctccagtgacctgccagctgcccatgtcgggagtgtcaggagtgccaggagtgccggcaccgctggcctcgcactattactccaatctggatctgctcaagattccacaggtgcgcaatcccggcactggcgttgtggtgccctccagtgggccaccagcagtgtcggcgtccgcagcggttgcagcgcccgttcatcccgtcaagagttcgggcggcaagaagcgctccaccgagggaacgggcagctccaaaaaggataacggaaagggacaggccaaggcgtgtcctcgcatggatgaggtggtcaacaatcatatcgacgatgccatcaactcggtcatcatggctgtccaggcgagttttccggacgacgatgaggaggagcagcaggccaagaaggaaaaggaaagagagagagaacgtgaaagggagagggagaaggaaaagctggaggaaccgcctctcaagccgagcaactgcatcatgccgttgcaagcctgcgcggaagtgctcccctccgctgtcctggagaaatcccaagctgtaaatgctattccagccattgttgctcctcccgttgctgtggtgccagtggtacttgctccgcagcctgtgcctgtcaagaatctgacgcccaagaagcgttccatgcgctcgcgaaccatcgactgtcgctccgccctgctcgcattggaggaaactctgccggcggcgtccttgccgcagtgcatcccgctgccggtgaatggcgatgcgaaggaagagatgccatcgctgccggatccaatcccagctcccacacccgctgtcgtcgagccccagcttcccgttcaggttcaaggtccaacaacgagtctcagggataagaagacggaaactgtaatgccgtgcaccaattcgacgaccattccgacagctactccgctagcggagtctccggaatcgccggatcctgtgcccgtaaacctgccacaggcggagacgtccgttccggcaccagtgcccgtgtccgtcatctcggtggcgcccgccgtgctgccactaccaacacgcacagcgacaccaccgcccaccacgatggccgagacgaactgcagctccctgatggaggagcacagcagcaatctgaacaacaacacctcgtcgggcttccacagtctcgcccaatcggagcagccgataccaacggcagcgacgacagctgaggaagcgccgccggtcaaggaggacgaggagctgcccgccaaaaagaagcaacgtcgtcggcgaaagaacgaactggccgccattgtggccgatcaattgctggaaagctttaagatcgacaatgcacgcagggataacctcaagaagctggagaatctggcgtacgagaagagcgaggatttgctgctcaccggaatgctgctgatgcccagcaccaagcggaatgcagccctaggaccatcatccgcggctgccgcaaagctggcgaagaaggaggcggccgacactgtggcggagtcaccagccaattcgcccgtgcgcggcaggccgaagcgtcgccagagttgctactatcgaaggggaaaggctggtggtgttggtggcgttggcaaggccaccaatgagaatataagtctgctcaaatcctctctagagtccttctccattggcatcgagaagcagctgctggccaaggaggccagggaggccaaggaggcgcagccggcgggtggaaacaatcaggcccagctgccggttagttccatcctgcggcccagcatcctgagcagcgccgttgccagggagcaacagctgacgaggcagcagcagagtaagctggataaacaggagcaactgccaccggcggccacctttagtcgagatccgcggcttaacaagaacatacacaaggagcaagcggaccacaaggcggcgcccaaggaacagtcagcgacggcgacaacaaacgagaatcccgaggaggatgacaactacctcacggagattgcgaagaacgttaacgagaagatcatgtcggccaccaccaacgaggactttgagtttgcccacgacgagttcgatggcgaaggtgatcccgaccaggatcaggatcaggaccaggacaaatactatcgcccgcccacctcgatgagtgtgcgtagtgctccgaatctgaacgatgagcattcgaacttcggttccatgtgcgacgacaacacaaacaccgaggtgatggacatggatctggacgatgagatgagcgtgtacactagctactcgcaggatctgggacgtggcggtcgcggccgccggagaaggaggcgtaggagtgtcctactcacgcgtcgtcccaagaaacggacgcagcgcagcgaactggatgccgagaagttcggttgcaagctgtgcggcaaaagcttcttcaccgccacctcgctgtccaagcacaacatgaccctggcccacgtgtccaaagtgtccgcgcaggagtacctgcagtcgcagacggcgccgtctagtccgcaggatgggcacgatctggaaaacaagagggaacgccaagcggagaccatgctgcagcatcaggaggagcagccggcggcagctcagcagcagatgcgagcctcggtgctcatggtgcccgctcagatggcccatcaggagagggagcgggtgcgggagctgcagagggtccaggagcaggagagaatgcagctgcaaagggagcaggagcatcgccatcagcaacagcagctgcagcagcagcagcagcatcagcagcagcaagagcaagtgcatcatgtcatcacggaggcaagtctgcggctgcacgacaaccagcacagtcccacagctccgaccgcctctcgtctcaatctcaatcccgacgagcgtctcttctacgagtgttgcaatatattgaagagtgcagagacgcctcgtccgcatcccggcggtggagccggtccagcccccacatcggtgatcgtgacggcgggcagaaagcaaccaccgccgcctccagcatcgccctcgccatctcggtcgtcctcgctgccgccaccggcatcaccatcgccatcgcttcctccgcccgcatctccatcgctttccctgccaccgccggcatcgccatcgccatcaccctcgccgccgccacccgccgaggcaactgctccggcgccagttcctgctgctgctcagccagcggctaacgtgtgccaccagccggttattcagcagctgttccggaacccgccagcagtcacccccaccaccacgcccacgtgagttaccatagttgcatatagcatagcacatatcattcatccttgaatccccctccatccacagcaaccacaatcggctctcgcccagctactcggctgtgtcgcagttttcggccaccacgacgtcccgcttcaagacgaaggccgcgatgaagggctatgagaacgtgaatctgcagatggacatgctggagctggccaagtcgggtcgtggcgtctgcaagctaacggaattggcggacattgcgttgggtagtgagaagcccggtggcgagtttctgccccatttgccgcctgcaccggcggctccaacggtgacatcactaccgccagtgaatcaacagacgccgacgccaacacccacgcccacgggcacgccaacagtgacgccaacgggaccgatggagcagcaacagagttccacatcctcgaagaccatcatgcatgcgtccattatcaaggcggcggcgggtgtggccagttcggccacgctgccaccggcatccggtaggattatcatacccgaccggccgttcaagaatattggactggaggagaaggcgcccataacgttccagaagcccaagacgtgcgtcaatctgctgcaggagcaggacaacaacagcgtctcgacggccagctactcggatcgtgatgactacgacttcggaaccctgagctgcgatggcgatgtggatccagagccagaaccagaggtcagaggtggagttgtagccgccgggcgagtggctcaaccgcaggcaggaggacgtgccgtctccacgtccagttcatcgtcctcatcatcctcgtcggcggataacagccggacgggcagtcggagtagcagcagcagttccagccgcgccacggccaaaactttcgagaacaagtcactgatcatgggacggatatttaagcacgccagcagtgccaaggcggcgccagtgatggctccatctgcggcactgcttccgggtcccagtgtggtgcccggaatggcgaagatcaaggcgttgcccaagaaccaagcgaatctcgaccagatcttcgatgagctgcgtggcggtagcggagcggccaagtcatcggaaatggaggctccacccacaatggtgcaagagaactgggatcggcatcatccgcagcagcagcagcagatgcagccacaccaccaccaccatcatcatcagcagcagccgcagcatcatcagcaccatcatcacccccaccaccaccatcatcaggtggagcccatggcggcgccagcagcaccggcagcgccggcggccatgccagcacccagtgcattgccaccgggcaggaagccgaagaactccacggccaacacggccaagaagccagccaacaaatccgcaccgaccaagacaaaggggaaatcaaaggtggaagccactgcacctgcttcctcctcgtccaatcgcaagccacgcaaggatttgagcaagctgcagtccgaactgggcatgagtcacgaagagatcgagcagctgatcgacgagggacagcgcaagtctaagcgtcgctgtgccaccaatcgtcccaagaagctggtagagacttggagctccgatgagtacgaggagttcttgtgcaccaaggacatcatagccctgatcgagcagaaggagcagcaggaacagaagcgcaagcgcaagaccagcgaggcgaacacccagccggagccagttgctccgccagtggccagcaagaaagcccagacgccacaggcgactgcaggtaaacgaaagaatcgcgccagcgaaaagaaggctgcacctgccgagccggagcaaccaaaaccacgtgccaggcaaaggaaccagccaccgccgccagcaccagcacatgtgcctcctgttgtccaggcaccgccagcgcctgcgccagaagtgctaactccgcctgcaaggggaaagtccaaagcagcggccaagagcaaaactccagtgaccaaggcgacaaacaatcgcaaaaagcgatttaatgagaagtcaagggtgcaggaaagtagggaggatgaggaggaggaggaggagcaggagcaggcggaggtggaagttgaaccaccagacaggacgcgcagctccaggcagcagcctaaggtgaaggccaatgaaacggagaaggaaccaatagcgccaacaccaccgccaccagcacaaccaccactgcccgcagctgcaccggaagcgcaaagagagaggagcaaggtgcggcagcacggcaatcagcagcagacactgccgcctgcaccgcatccgcggagtagctctgtcgccacccccagcagcaccaccaataacaacaacaacagcagcagcagcaataagaatctgaaggccaagcgaaaatcgcagaccagccgccagtcgccggcgcgcagaaagcggccagccagcgagaagcagctgtactactggagcagctccagcgacgatgagttcggacgcctggacgacgagacggaggccgctgacggtgaatcccgcggcgctggagctggcagcgagcagcgggatggcgaacgaacggaactggagccggaggaggcgtcaccgtcgccgggtaaacacttcgaggagaacgagacgtaccagaagcacggctggatcgtgggcgattcgcacaagaagctcgtgaagctgctggccatcgccaagggcagcaaaaaggtggacaactgcggtgtcaagcggcgcacgccaaagcgcaagtgctaggagtgggtggagcagcgtcaccagacgtagcaacagctggcgtaggagcacagcacagtctcctcccgccagacaagtcatagccataggcctcgaggggcggagtcggcgcgggcagccgacgacccatcgccgccatcgatcacatacgtactgccattgtgtcatcgttaatcgttaacgccggcgccaggaggggatcaggatcaggatcaggatctggttcgggatcgggatcagctggagtaggagcggcagcgggagcacccacttggcagaggccacctcctggccccgcacccattaaccgtatgcggagtatatgcaacatatttttctttcttttaaacatctaagcgttacattatttaggttttttttattaaatgtatttataattaataaacaaaagaaacaaaaaagcgaaagagcaacaaatataaatttgagcacaacaattcaaagcggacgaccgatcttctcatttgggatgccagtaacccagtagcgaaccgccagagatacaagccgtccaggtttttcctcaatttaacttcggatttatttaatatattttacaactagcggtatctttacatatataacatgtaaaaaaaaatagagttaaggaatagttaaaaaaacgtggagcacaatggaggcgacggcgtgtggcggagcgaacgctgcagtctcgacgagctcacacccagccggttgtgttggatttgtgtgctgatgttgcgctgctcttgccaaaggataaatgcgaagcaaaacaaagttccatcaaggattagaatgcgtgtcaaatggtgggtgatgtgtctccggctggatgcaccgatgtaagagatattggtgggtctcgctccgactgctgatgactgataactgatgagctgctttcgccgccgaccacgcgacgtcatcgttccacatcgtgacttaaacagtatgctggtttcggttctcatcacatctccctccccctctccgg

SEQ ID NO: 23231 - DNA, 10620 bp, DROSOPHILA
atgaagaccatgtcgcgcttcggcctgcgccgtggcttcaagttctcggaggagcaggtcaacggcaagaatccaattggaccggcaacggcaccagccacggccgctgcctcatctaatccgcgcaaaaaacgacagacccggcaggaggaggatgtggacgcggaacaggaagaggtggaaccgcacgaggatcagctggaagcggaacaagagccgctctcgctgatctgcagcctgccgctggagcggctgccccgtttggtggagaagctgcatcagatgacggaggaacgggaacgagaacgggagagggagcgcgagcgcgagcgggaagaggccgccggcctgggtggagccgcgcactcgaaggtcctgtgtctgtactgtgataggaagttcgcctccggcaagctgcaggccaagcatgtggacaagtttcacaccgagcggcaggaacgacgctgcagcggtcgttccaccagctccaattctcatcccgccggcggcttccccggctgccagtggtgtggccagcaaggcaatcgccgccaggccacgcccccgcagatctgcctgccggccaagcatttggagcagctattccagcacctcagcgagcagcatgcagataagtatttcgcctgccagccgtgtcgcctgcggttccaggacgcagatcacctgttgggacaccagcgccagcagcattcgcttcatcatccggaggatggccatgccaccaaaccgggtctgatgggcgccgacgagccggtgctctttcgcctcggccttacccagaaccgtctgcccagccatcggaatcgaaaccagcgcaaggaggaggagccgccgcccctggccacgcccagcagcaaatcccggagcagcagtcgggcggcgacgcagcgacagcaacagaatcagcatcagcatcaacagtcgcagtcgcatcagcagactgctgcagcgggtaacatggctctgcaggagtctgtcaatccggatgcagtcttccggctgccagccagcatggcctgcgtctcatcatccgcctccgtcgccaactcagtgttcgatgacaagttctacaaggatgtgatctctaatgtacggcacaacctccagaatcacctcgacggacggctgttcacctcgtcttcgacgtccacaacgtcagccacatcgtcgtccgcatcccataagtcagacctcattatgctgcacggacccagtcagctggggcctggcggcgcctcctatcccactctactgaccgcggatcaatttggcggcacgggggaactgctaccgctggccaaattccgccggagaccgcacacgaagcacagttggaagtggaagtgggactacgtgaagaagttcacgctgatcaacgagggcggacggctggtcaagaagctgaagcagccaaactacctgggactgcgcgatctctccaagttggacatgtggacgcagctgacgatgcggcaaaagcacgatctctcgctctcattgacggaggagcagaaccaggagcagcgccgcctgctggagcagctaaatctcatcctggaccaccgcctgctgccgcacatcattctcgagcagaacgaacaggcggtcatcaagtgcgaaaacgaggaggaggacgagggcctggactcgcatcccggtgacgatctgctgccgcaaacgttcgccgacgagagttttctctccctgctgcagctccaaccaagaggcgggagcagcgaacaggaacgacagcgggagcgggaccagcgagagcgtagcaggaaccaaaaggccgtcgtgctcagcggcgagtgggcacggccgcgtctctatttgtgcatctgttgcggcgccaagttcgaccagcgcaagtcgctggaggagcacaagaccttccgccactcgcacatctacgccacgcactacgaggtcgtgggacgcgagctgctggccggcaatctgttgcgccacctcttcatcccgaaacgggcgctgggtcgctttgccgccgcgagcaactgcatccgatggccgcagattgcgccggcagccacagtgcagcagcccaagcaggagcaggtgcaaccggaggaggagaccaggtcgtcggcctcgtcacgctcatcatacgaggtgtccacacccactccgctatcggcactggagcagcaacaaccatcacctgcttcgggatcgggcaatgcgtcttcatcgtcgtcctgttcgcccagctcatcatccgcctccacgctgctgtccaccgccacccgcacctcgatgtccaactccacctgcacctcctccgctgccaccacgacggtgtcgtccacctcgtccgctccttccagctgcaccaagtgcggtcgcaagtgcagcggcctcatggatctctatcgccacatgctggactgctccggcgactatgtgtggtcgctggccaagaagcgcaagtatcgctactactgcggcaccaagaagcgacgagccttctccaagaagctcaagcagctctccgcccgcaagaaggaaaagctggaggtggaagtggaggagggaacgggcgatggcgatggcgatgccgaggtagatggcgatggcgaggcggaggcggagggcgaggaaagcgtgtccagttcatccaagttgaagaactcgccacgccaaaggcccagcgatgctgaatccattcggaaaatgctggagaatctgcccgccaagcgcatctgcaagaagatatttcccgtggacaataaggccaagcgcaaggccaagaacaaggcgaaggccaagtctatggccaagtcgctggtcaagtcgaaatccaaatccaagcagcagcgcagcagcaccaagagaatctacaatcagcacctgctgcgcaccaccagatcccgttcacgttcatctgtggtggccaccggctcctcggccgctgctgtcgccgcacagcagcagcgcagtcgccgcaaacagaagcagcaacaacaaaagcagcaacaacaaaagcagcagcagaaaaagcaggaacagaaggccaagctggagaaagtaaaatccccgccagaaccgccggcagcagtcgaatcggatcaaatgccagccaagacggaggccagagcgcccgcaccgacagtcactgccaagtcacgatctcccgctgaggaaaagccatccctgcgtctggagctgccacaaactcttccggaggcagccgctccaaacgtctccgttcatgaaacggagcccgcgtcgcccacgcccagcaagcagctaatgcccacaccgcccactactccagcgccggccaccaaatccccgccagctgctgcagccgttgctccacccttctgcgccgccaatcgacagacgacgccgaattcgactgttaagcgcagcaagaggattagcgattgcatagccatgctcaccggcaaactggaggagaagctcaaaacggagcaagtgcctccgcctgggccgctgcaaaaggaaaaggagaaaccccagcaggataggccggctgagaagcaggacaagacaccgcaaccagtcgatcaccagtcacctgctgccgctgtggtcgccgaaaaggagcgggtgcagccaaagacgcccaaacgcaaggcggtgtcacggcgcataatcaagatggatgccacaccagagaccttggcggagccgatccaggagcggaaaccagttgccatgccacctgcagttccaccgcctgccgttgctccagccattttgaatgccgctcctgctcctccagcgctgcagcctcccatatttgccagcatgccagtggcagtgccagtagtgcctgcgccagttcctccgccaccagtcgcagcagcagctcctctgccagtcgctgccattgttcctctgcccgtcgctgcacctgctccgccgccagtcgccaccgctttggttcatccaccgacgagacgaacgcccaccaaggcggcggccaaacagatgggtgccccaccaccaaagccaccagcttcgttggccgccctcaaacagtatcctccgctggaagcgacgttgccagtgccgcctacgaattcagcgccgcccgttcctgtcgcagttcctctggtgcctgtgccggtgcctgtgcctgtgccggtggcaatgccgttgggcatgcagggaatgccagtgcctgtgaatgttaacatgctgcccaagctgccgctgtatatgacacaactgcaagcgccagcgaatcccaatcccaatccaaatcccgcaccgacagctatgttcgtgatggcggatcatcagcccctcaatctgaccagtcagcgcggagtgctacagaagccattgatatccggcaccacgggtgacccgggactcgtcggactgcagcatcatcgtgctggtggcatgcccgccaggcggcagacgatctgtggattcgaggcccggaatttgattggcttggacatggaaatggagccgctggatctgtcaaagaagtcgagcaggaaaccgtcaccggtgccgccgccgaggatgcagcaggagttgccgatgccactggtgccactgcccttggtgacgaatgcaaatgcgctggcgccgcaatcgcagccaggtggtgcaccacttcctacgccagttggtggtgctccagtgacctgccagctgcccatgtcgggagtgtcaggagtgccaggagtgccggcaccgctggcctcgcactattactccaatctggatctgctcaagattccacaggtgcgcaatcccggcactggcgttgtggtgccctccagtgggccaccagcagtgtcggcgtccgcagcggttgcagcgcccgttcatcccgtcaagagttcgggcggcaagaagcgctccaccgagggaacgggcagctccaaaaaggataacggaaagggacaggccaaggcgtgtcctcgcatggatgaggtggtcaacaatcatatcgacgatgccatcaactcggtcatcatggctgtccaggcgagttttccggacgacgatgaggaggagcagcaggccaagaaggaaaaggaaagagagagagaacgtgaaagggagagggagaaggaaaagctggaggaaccgcctctcaagccgagcaactgcatcatgccgttgcaagcctgcgcggaagtgctcccctccgctgtcctggagaaatcccaagctgtaaatgctattccagccattgttgctcctcccgttgctgtggtgccagtggtacttgctccgcagcctgtgcctgtcaagaatctgacgcccaagaagcgttccatgcgctcgcgaaccatcgactgtcgctccgccctgctcgcattggaggaaactctgccggcggcgtccttgccgcagtgcatcccgctgccggtgaatggcgatgcgaaggaagagatgccatcgctgccggatccaatcccagctcccacacccgctgtcgtcgagccccagcttcccgttcaggttcaaggtccaacaacgagtctcagggataagaagacggaaactgtaatgccgtgcaccaattcgacgaccattccgacagctactccgctagcggagtctccggaatcgccggatcctgtgcccgtaaacctgccacaggcggagacgtccgttccggcaccagtgcccgtgtccgtcatctcggtggcgcccgccgtgctgccactaccaacacgcacagcgacaccaccgcccaccacgatggccgagacgaactgcagctccctgatggaggagcacagcagcaatctgaacaacaacacctcgtcgggcttccacagtctcgcccaatcggagcagccgataccaacggcagcgacgacagctgaggaagcgccgccggtcaaggaggacgaggagctgcccgccaaaaagaagcaacgtcgtcggcgaaagaacgaactggccgccattgtggccgatcaattgctggaaagctttaagatcgacaatgcacgcagggataacctcaagaagctggagaatctggcgtacgagaagagcgaggatttgctgctcaccggaatgctgctgatgcccagcaccaagcggaatgcagccctaggaccatcatccgcggctgccgcaaagctggcgaagaaggaggcggccgacactgtggcggagtcaccagccaattcgcccgtgcgcggcaggccgaagcgtcgccagagttgctactatcgaaggggaaaggctggtggtgttggtggcgttggcaaggccaccaatgagaatataagtctgctcaaatcctctctagagtccttctccattggcatcgagaagcagctgctggccaaggaggccagggaggccaaggaggcgcagccggcgggtggaaacaatcaggcccagctgccggttagttccatcctgcggcccagcatcctgagcagcgccgttgccagggagcaacagctgacgaggcagcagcagagtaagctggataaacaggagcaactgccaccggcggccacctttagtcgagatccgcggcttaacaagaacatacacaaggagcaagcggaccacaaggcggcgcccaaggaacagtcagcgacggcgacaacaaacgagaatcccgaggaggatgacaactacctcacggagattgcgaagaacgttaacgagaagatcatgtcggccaccaccaacgaggactttgagtttgcccacgacgagttcgatggcgaaggtgatcccgaccaggatcaggatcaggaccaggacaaatactatcgcccgcccacctcgatgagtgtgcgtagtgctccgaatctgaacgatgagcattcgaacttcggttccatgtgcgacgacaacacaaacaccgaggtgatggacatggatctggacgatgagatgagcgtgtacactagctactcgcaggatctgggacgtggcggtcgcggccgccggagaaggaggcgtaggagtgtcctactcacgcgtcgtcccaagaaacggacgcagcgcagcgaactggatgccgagaagttcggttgcaagctgtgcggcaaaagcttcttcaccgccacctcgctgtccaagcacaacatgaccctggcccacgtgtccaaagtgtccgcgcaggagtacctgcagtcgcagacggcgccgtctagtccgcaggatgggcacgatctggaaaacaagagggaacgccaagcggagaccatgctgcagcatcaggaggagcagccggcggcagctcagcagcagatgcgagcctcggtgctcatggtgcccgctcagatggcccatcaggagagggagcgggtgcgggagctgcagagggtccaggagcaggagagaatgcagctgcaaagggagcaggagcatcgccatcagcaacagcagctgcagcagcagcagcagcatcagcagcagcaagagcaagtgcatcatgtcatcacggaggcaagtctgcggctgcacgacaaccagcacagtcccacagctccgaccgcctctcgtctcaatctcaatcccgacgagcgtctcttctacgagtgttgcaatatattgaagagtgcagagacgcctcgtccgcatcccggcggtggagccggtccagcccccacatcggtgatcgtgacggcgggcagaaagcaaccaccgccgcctccagcatcgccctcgccatctcggtcgtcctcgctgccgccaccggcatcaccatcgccatcgcttcctccgcccgcatctccatcgctttccctgccaccgccggcatcgccatcgccatcaccctcgccgccgccacccgccgaggcaactgctccggcgccagttcctgctgctgctcagccagcggctaacgtgtgccaccagccggttattcagcagctgttccggaacccgccagcagtcacccccaccaccacgcccaccaaccacaatcggctctcgcccagctactcggctgtgtcgcagttttcggccaccacgacgtcccgcttcaagacgaaggccgcgatgaagggctatgagaacgtgaatctgcagatggacatgctggagctggccaagtcgggtcgtggcgtctgcaagctaacggaattggcggacattgcgttgggtagtgagaagcccggtggcgagtttctgccccatttgccgcctgcaccggcggctccaacggtgacatcactaccgccagtgaatcaacagacgccgacgccaacacccacgcccacgggcacgccaacagtgacgccaacgggaccgatggagcagcaacagagttccacatcctcgaagaccatcatgcatgcgtccattatcaaggcggcggcgggtgtggccagttcggccacgctgccaccggcatccggtaggattatcatacccgaccggccgttcaagaatattggactggaggagaaggcgcccataacgttccagaagcccaagacgtgcgtcaatctgctgcaggagcaggacaacaacagcgtctcgacggccagctactcggatcgtgatgactacgacttcggaaccctgagctgcgatggcgatgtggatccagagccagaaccagaggtcagaggtggagttgtagccgccgggcgagtggctcaaccgcaggcaggaggacgtgccgtctccacgtccagttcatcgtcctcatcatcctcgtcggcggataacagccggacgggcagtcggagtagcagcagcagttccagccgcgccacggccaaaactttcgagaacaagtcactgatcatgggacggatatttaagcacgccagcagtgccaaggcggcgccagtgatggctccatctgcggcactgcttccgggtcccagtgtggtgcccggaatggcgaagatcaaggcgttgcccaagaaccaagcgaatctcgaccagatcttcgatgagctgcgtggcggtagcggagcggccaagtcatcggaaatggaggctccacccacaatggtgcaagagaactgggatcggcatcatccgcagcagcagcagcagatgcagccacaccaccaccaccatcatcatcagcagcagccgcagcatcatcagcaccatcatcacccccaccaccaccatcatcaggtggagcccatggcggcgccagcagcaccggcagcgccggcggccatgccagcacccagtgcattgccaccgggcaggaagccgaagaactccacggccaacacggccaagaagccagccaacaaatccgcaccgaccaagacaaaggggaaatcaaaggtggaagccactgcacctgcttcctcctcgtccaatcgcaagccacgcaaggatttgagcaagctgcagtccgaactgggcatgagtcacgaagagatcgagcagctgatcgacgagggacagcgcaagtctaagcgtcgctgtgccaccaatcgtcccaagaagctggtagagacttggagctccgatgagtacgaggagttcttgtgcaccaaggacatcatagccctgatcgagcagaaggagcagcaggaacagaagcgcaagcgcaagaccagcgaggcgaacacccagccggagccagttgctccgccagtggccagcaagaaagcccagacgccacaggcgactgcaggtaaacgaaagaatcgcgccagcgaaaagaaggctgcacctgccgagccggagcaaccaaaaccacgtgccaggcaaaggaaccagccaccgccgccagcaccagcacatgtgcctcctgttgtccaggcaccgccagcgcctgcgccagaagtgctaactccgcctgcaaggggaaagtccaaagcagcggccaagagcaaaactccagtgaccaaggcgacaaacaatcgcaaaaagcgatttaatgagaagtcaagggtgcaggaaagtagggaggatgaggaggaggaggaggagcaggagcaggcggaggtggaagttgaaccaccagacaggacgcgcagctccaggcagcagcctaaggtgaaggccaatgaaacggagaaggaaccaatagcgccaacaccaccgccaccagcacaaccaccactgcccgcagctgcaccggaagcgcaaagagagaggagcaaggtgcggcagcacggcaatcagcagcagacactgccgcctgcaccgcatccgcggagtagctctgtcgccacccccagcagcaccaccaataacaacaacaacagcagcagcagcaataagaatctgaaggccaagcgaaaatcgcagaccagccgccagtcgccggcgcgcagaaagcggccagccagcgagaagcagctgtactactggagcagctccagcgacgatgagttcggacgcctggacgacgagacggaggccgctgacggtgaatcccgcggcgctggagctggcagcgagcagcgggatggcgaacgaacggaactggagccggaggaggcgtcaccgtcgccgggtaaacacttcgaggagaacgagacgtaccagaagcacggctggatcgtgggcgattcgcacaagaagctcgtgaagctgctggccatcgccaagggcagcaaaaaggtggacaactgcggtgtcaagcggcgcacgccaaagcgcaagtgctag

SEQ ID NO: 23232 - protein, 3536 aa, DROSOPHILA
MSRFGLRRGFKFSEEQVNGKNPIGPATAPATAAASSNPRKKRQTRQEEDVDAEQEEVEPHEDQLEAEQEPLSLICSLPLERLPRLVEKLHQMTEEREREREREREREREEAAGLGGAAHSKVLCLYCDRKFASGKLQAKHVDKFHTERQERRCSGRSTSSNSHPAGGFPGCQWCGQQGNRRQATPPQICLPAKHLEQLFQHLSEQHADKYFACQPCRLRFQDADHLLGHQRQQHSLHHPEDGHATKPGLMGADEPVLFRLGLTQNRLPSHRNRNQRKEEEPPPLATPSSKSRSSSRAATQRQQQNQHQHQQSQSHQQTAAAGNMALQESVNPDAVFRLPASMACVSSSASVANSVFDDKFYKDVISNVRHNLQNHLDGRLFTSSSTSTTSATSSSASHKSDLIMLHGPSQLGPGGASYPTLLTADQFGGTGELLPLAKFRRRPHTKHSWKWKWDYVKKFTLINEGGRLVKKLKQPNYLGLRDLSKLDMWTQLTMRQKHDLSLSLTEEQNQEQRRLLEQLNLILDHRLLPHIILEQNEQAVIKCENEEEDEGLDSHPGDDLLPQTFADESFLSLLQLQPRGGSSEQERQRERDQRERSRNQKAVVLSGEWARPRLYLCICCGAKFDQRKSLEEHKTFRHSHIYATHYEVVGRELLAGNLLRHLFIPKRALGRFAAASNCIRWPQIAPAATVQQPKQEQVQPEEETRSSASSRSSYEVSTPTPLSALEQQQPSPASGSGNASSSSSCSPSSSSASTLLSTATRTSMSNSTCTSSAATTTVSSTSSAPSSCTKCGRKCSGLMDLYRHMLDCSGDYVWSLAKKRKYRYYCGTKKRRAFSKKLKQLSARKKEKLEVEVEEGTGDGDGDAEVDGDGEAEAEGEESVSSSSKLKNSPRQRPSDAESIRKMLENLPAKRICKKIFPVDNKAKRKAKNKAKAKSMAKSLVKSKSKSKQQRSSTKRIYNQHLLRTTRSRSRSSVVATGSSAAAVAAQQQRSRRKQKQQQQKQQQQKQQQKKQEQKAKLEKVKSPPEPPAAVESDQMPAKTEARAPAPTVTAKSRSPAEEKPSLRLELPQTLPEAAAPNVSVHETEPASPTPSKQLMPTPPTTPAPATKSPPAAAAVAPPFCAANRQTTPNSTVKRSKRISDCIAMLTGKLEEKLKTEQVPPPGPLQKEKEKPQQDRPAEKQDKTPQPVDHQSPAAAVVAEKERVQPKTPKRKAVSRRIIKMDATPETLAEPIQERKPVAMPPAVPPPAVAPAILNAAPAPPALQPPIFASMPVAVPVVPAPVPPPPVAAAAPLPVAAIVPLPVAAPAPPPVATALVHPPTRRTPTKAAAKQMGAPPPKPPASLAALKQYPPLEATLPVPPTNSAPPVPVAVPLVPVPVPVPVPVAMPLGMQGMPVPVNVNMLPKLPLYMTQLQAPANPNPNPNPAPTAMFVMADHQPLNLTSQRGVLQKPLISGTTGDPGLVGLQHHRAGGMPARRQTICGFEARNLIGLDMEMEPLDLSKKSSRKPSPVPPPRMQQELPMPLVPLPLVTNANALAPQSQPGGAPLPTPVGGAPVTCQLPMSGVSGVPGVPAPLASHYYSNLDLLKIPQVRNPGTGVVVPSSGPPAVSASAAVAAPVHPVKSSGGKKRSTEGTGSSKKDNGKGQAKACPRMDEVVNNHIDDAINSVIMAVQASFPDDDEEEQQAKKEKEREREREREREKEKLEEPPLKPSNCIMPLQACAEVLPSAVLEKSQAVNAIPAIVAPPVAVVPVVLAPQPVPVKNLTPKKRSMRSRTIDCRSALLALEETLPAASLPQCIPLPVNGDAKEEMPSLPDPIPAPTPAVVEPQLPVQVQGPTTSLRDKKTETVMPCTNSTTIPTATPLAESPESPDPVPVNLPQAETSVPAPVPVSVISVAPAVLPLPTRTATPPPTTMAETNCSSLMEEHSSNLNNNTSSGFHSLAQSEQPIPTAATTAEEAPPVKEDEELPAKKKQRRRRKNELAAIVADQLLESFKIDNARRDNLKKLENLAYEKSEDLLLTGMLLMPSTKRNAALGPSSAAAAKLAKKEAADTVAESPANSPVRGRPKRRQSCYYRRGKAGGVGGVGKATNENISLLKSSLESFSIGIEKQLLAKEAREAKEAQPAGGNNQAQLPVSSILRPSILSSAVAREQQLTRQQQSKLDKQEQLPPAATFSRDPRLNKNIHKEQADHKAAPKEQSATATTNENPEEDDNYLTEIAKNVNEKIMSATTNEDFEFAHDEFDGEGDPDQDQDQDQDKYYRPPTSMSVRSAPNLNDEHSNFGSMCDDNTNTEVMDMDLDDEMSVYTSYSQDLGRGGRGRRRRRRRSVLLTRRPKKRTQRSELDAEKFGCKLCGKSFFTATSLSKHNMTLAHVSKVSAQEYLQSQTAPSSPQDGHDLENKRERQAETMLQHQEEQPAAAQQQMRASVLMVPAQMAHQERERVRELQRVQEQERMQLQREQEHRHQQQQLQQQQQHQQQQEQVHHVITEASLRLHDNQHSPTAPTASRLNLNPDERLFYECCNILKSAETPRPHPGGGAGPAPTSVIVTAGRKQPPPPPASPSPSRSSSLPPPASPSPSLPPPASPSLSLPPPASPSPSPSPPPPAEATAPAPVPAAAQPAANVCHQPVIQQLFRNPPAVTPTTTPTNHNRLSPSYSAVSQFSATTTSRFKTKAAMKGYENVNLQMDMLELAKSGRGVCKLTELADIALGSEKPGGEFLPHLPPAPAAPTVTSLPPVNQQTPTPTPTPTGTPTVTPTGPMEQQQSSTSSKTIMHASIIKAAAGVASSATLPPASGRIIIPDRPFKNIGLEEKAPITFQKPKTCVNLLQEQDNNSVSTASYSDRDDYDFGTLSCDGDVDPEPEPEVRGGVVAAGRVAQPQAGGRAVSTSSSSSSSSSSADNSRTGSRSSSSSSSRATAKTFENKSLIMGRIFKHASSAKAAPVMAPSAALLPGPSVVPGMAKIKALPKNQANLDQIFDELRGGSGAAKSSEMEAPPTMVQENWDRHHPQQQQQMQPHHHHHHHQQQPQHHQHHHHPHHHHHQVEPMAAPAAPAAPAAMPAPSALPPGRKPKNSTANTAKKPANKSAPTKTKGKSKVEATAPASSSSNRKPRKDLSKLQSELGMSHEEIEQLIDEGQRKSKRRCATNRPKKLVETWSSDEYEEFLCTKDIIALIEQKEQQEQKRKRKTSEANTQPEPVAPPVASKKAQTPQATAGKRKNRASEKKAAPAEPEQPKPRARQRNQPPPPAPAHVPPVVQAPPAPAPEVLTPPARGKSKAAAKSKTPVTKATNNRKKRFNEKSRVQESREDEEEEEEQEQAEVEVEPPDRTRSSRQQPKVKANETEKEPIAPTPPPPAQPPLPAAAPEAQRERSKVRQHGNQQQTLPPAPHPRSSSVATPSSTTNNNNNSSSSNKNLKAKRKSQTSRQSPARRKRPASEKQLYYWSSSSDDEFGRLDDETEAADGESRGAGAGSEQRDGERTELEPEEASPSPGKHFEENETYQKHGWIVGDSHKKLVKLLAIAKGSKKVDNCGVKRRTPKRKC

SEQ ID NO: 23233 - DNA, 2693 bp, DROSOPHILA
tgagtttccaccagctttccaatgtgcgcgcccgtatgcgtgtttgtgtgttttgaggtggatttaataaattcttgttggaatgtaatcatttactgcacaatgcagacatcgtttacttttccagttatcaatgaacagaacattctggaaacacgatttgccggctatcggccagattgttcgctcttatataatcgccaatgggacacacacacttgcacacaaacttgaaatgcaattgggcaaatgggaatggctctggaaattgtttaaaagtttagaacttactgtgaattaaactggtactgcgaattattgacaagacagttaagcgaacgcttccgattctatttgatgtgaaacaacaagcccacttcaccacagtttactcgcttcgaaatgtgcgcacaggcggtccgaacttcctaaccttaatgtgtatcggtgtgaccattcgttggccatcgaaaatagccggcgcttatcgattgcttgcgtcgggcaatcgaatattatcggcagccatatgggggactcgcattcaagtaatatttataataaattgagctttcgccgataaataagttttctggtttccatagaaaagaaaacaatttaatatattaatgtattaacagcaaatatgcaaatccaacgcaactattaataatccaattatataataatgaataactatcgcagcaagctttatacgttatgctagagatgttagatgcggaaagcgatagtttcgcgcctaagtttttttttttcaaaatgaaaccatacatatgtatattttattatataggtttactacatttttcgaccatactataaagtctaagtagttacaaactgaatcctttgctcgattgcagtcgtaattggcccggtggagttcatgtagtccattaaggcgtccaagtcgaaaggaccaaacctggcaaaaaaagctttttaatactttattcaaaatcaacattgtttaacatgcttactctggatcttctgcattttcgctgattacgctaaatccgttcttcccattcgccaggtactccatgacgaccacgcggtacttgtgctccaaatcgagtggaatatacctgggcaccaggcacttggagcatcttactcgcacactgaatactcgctgatcggcgttcaaatcgtaacggatacggagaccggaaacctggaggaatcgggaggaacgcggcgtggccgaactggcattcatgggcgccaccacatgctccagcagctccacaatgtgcttaccacgcagactgagggtcaccagtctattctgccatgggcacatggcaaacaattgcttgtaggtgatgtctgtagtgatatacttagtcttattgttcgattaaggtatacatgttgttttcaggactcactgccagctggaataggcactcgaaaagttcccgttgatgtcaaggcaatggtcacgttactccaactctcttcagacgacgatgaagcatccttgacaaactgaagattctcattggactaggtcagttgcaagtgggttgaagccaccactacttaccgcatgaagcatagcatcggtgaagaagttacccagattgcattccccactgctgcactgactctgctggagattcacgcgactctggcccactgtccgctcggcaatgggtttcatctcgagttgccaaggcaccatggcttgtagaacgatatcatctttgggagattttaaatggtatatgattatattatgcaaccattgcctccaaacatattccccagcatcaataatcttccagagaaaagatatgtttgtgtactttccctgataaatttattgtggaaaatgcaattattgcacattatggatataatacatatgtatgtataatcagttgagcactgtgatgcgtccctcgaggccctggtaaatgggattgatgtgattgctgtacgagattagggcatccaagtccgtgactccccacctgaaatcagtaaataatcaaatggtattacaacatgggacacaagatgagctgcctgtatgtacgtactggaggtcagtgccctcggcgagcatggtgtagccatcgccaccagcctgcaggaagttgggcgatgtgaggcgatagagcttgtcggataccagaggctcgtacttgggcacctcgcagtccgcacaacgaatcgttacggatatgacacgcgatcccaccggcttcgtgtagtcgtacttcgcccggatgcccgagaactgcagattgatgtacgatccggtcaccccgttctcgaggtccactttgctcagggcccactccatggcctccactatcttgctgcccggcagattgtaggaaaccagcgtgttctcgaagggcgacatgctgactatatgggcgtacgtaagatctgagggatacattcaattgaagatttttagaggagtttttgctataacgcggtcaaaaacgatcacacaaccaagagaatgacttttttgtgcagcctatgatccacataaacgatcccgaaattcgtatatttatttctggaaaattttttttttcgaattttccgatttttataatcttaatttttttgcgaaaaatggacaaaaatttacattttaaactgtgaatgccattcgaaagggaatttggtgacgagttcaa

SEQ ID NO: 23234 - DNA, 573 bp, DROSOPHILA
atgaaacccattgccgagcggacagtgggccagagtcgcgtgaatctccagcagagtcagtgcagcagtggggaatgcaatctgggtaacttcttcaccgatgctatgcttcatgcgtttgtcaaggatgcttcatcgtcgtctgaagagagttggagtaacgtgaccattgccttgacatcaacgggaacttttcgagtgcctattccagctggcaacatcacctacaagcaattgtttgccatgtgcccatggcagaatagactggtgaccctcagtctgcgtggtaagcacattgtggagctgctggagcatgtggtggcgcccatgaatgccagttcggccacgccgcgttcctcccgattcctccaggtttccggtctccgtatccgttacgatttgaacgccgatcagcgagtattcagtgtgcgagtaagatgctccaagtgcctggtgcccaggtatattccactcgatttggagcacaagtaccgcgtggtcgtcatggagtacctggcgaatgggaagaacggatttagcgtaatcagcgaaaatgcagaagatccagagtaa

SEQ ID NO: 23235 - protein, 190 aa, DROSOPHILA
MKPIAERTVGQSRVNLQQSQCSSGECNLGNFFTDAMLHAFVKDASSSSEESWSNVTIALTSTGTFRVPIPAGNITYKQLFAMCPWQNRLVTLSLRGKHIVELLEHVVAPMNASSATPRSSRFLQVSGLRIRYDLNADQRVFSVRVRCSKCLVPRYIPLDLEHKYRVVVMEYLANGKNGFSVISENAEDPE

SEQ ID NO: 23236 - DNA, 3622 bp, DROSOPHILA
actcggatggccagaaccccacaaaatgccaacgtcccggcgtccttgtgcgctctcttctggagaaaagcagcgagagcaagagcttgccaagcccaaaaagaagaacaaacgctgaagggcaaatagtgagagagagagagagagaagacgctctaagtgtacggtaagaagataagcttaacggcgcattccgttcggtcagagtcaaagcaaacatgtcacgacatgcacaaacaaaagacgccaactgttgtcattccgctcctgtcactccagctccctatctcgctctattttcgactctgctgttttcgctgccctttctagtttgtctattgcatttgataaagttcaactttgacatttacaccgcgcatgtcccaaaactgtaaggaacaattgagtttacacaggttgcccagtgatttttgaacgagtagtcactaacgataaaccgaatgcaaattttaattgagtgcacatcaaatggcaacggacactagttgcctcactctcacttccgcccactcaatgcatccatctccttgtgcgtatttccatcccaacttcgcaatcctgttaagcatctagggtgctagtaaataccaagctgcacagttttctaaattttgatttttatgagttattcctaatttcttttcagtttatttattatctacattttctttcgtgtacctttcattaggtatcataattgtattttaggcactttttgtttgctttatttatcgtgttgttttttggttaagcatctgcttaagatcacctgtgatatatgcatttatctttttattattagctcatttaagttgtttggccgatttactatgttaaatatgtatattttcggaaatttttctatttacttcagaaggggtgcctaaaaatgtgcccagcaaattcttgtgtgtgttttttaataccataaaagttagaatccaatccagaataaccattgctattgctattaaaaaacttgacttttcgaaaatttgcagcttttatttttatgggattttatagatttttcttttttgattgtttgatgaaacttctaagctaaactacgcattccgggtttttattttctgattatcagaaagtgcgtgacgatcgaacgtccctggtaaccagggggcgtggccatgggcgctctagttctgggcgtggtgcatgccatggtaggcggcctgcttgtgggcagggctgcgctgaccgaaggggctcttggcgttgacctccaagatgtagtcaccgcgcagatcgtagtcgatctggagacccatgtaggcgcgcttgccaaagccatcctgctccttgtactgcttcagcgagttggccggaacggcggggaaattgcgctcgctaccgggacgcacagactcggcaaagtaacgggtggcacgggccacagcctcgatcacattctcggagccgggaacaccggtggacggtccgttggggtagaagtcaacatcgccgcaacggatggggcgtgcccatggcgaaggtcgatgtgtgaatggcatcaacgaagtcagcatcgccgcgggacagaccacccaggatctggggacgcttggacagcaccttggcgggatccagaccggtgatgcggcgcagcttgtgtccggtttgggcggtgtacttgttgccagcagctccggccacatgggccgcctgattccctggccgatcagatggatgatctcctggggcacacccttgttggtcagatcgatcagggtctggccgatcatggcgccggtgttcagaacatccagcatcgcgtagcgtttgaagttggtcagggtggagccgaggtcaatgatctgcaatttgaatttcataaatatccatatgtacacgtttaattatgaaatataggaatgcgaccaacttacgatcaaatcgccgctggcagccttggcggatttccattggtcagcggcctcctcgctgctggtgtagtcgtagtcgctgctcttgagctgctgctgctgctcctgggcgttcttctgcagctgctggaggttgtacttctggacgtaggcctggatcaacctgcgcatggccttctgctgagcggggctggtcttgggcagaccagtcaggacaatggtgacctcatcctcgccgaatccgggctgtgccttggccgtctccacatagttgttcaacttgcactcaaccttctgtccattggacttgataatccagacgggcacattgctcgggctgggcacaaagctgggggtcagatcgtgcttgatttggccaacgtggtctaggtgtgattcacaaggaggttatctctggagatttccagcaacatcggtttctactcacagatcttctcgatcaccttggcgccctgctccagcggctgattctccaaacgctcccaggtgatgtcgttgagggagggcacgttctccagctcggtggcggtcagccacttggtcggcttcagtcggtcattggaggcatccttggaggcatgggccgccaccaggaggcaggtggccagcaggcaaatccttagactcatcattttggtgcaaatccggaattgaatcagatcaggccaaacgctaaacgacgtttgatggcttccttcagccccatctctggcttatatagctcagattccagatagcgcactgccagcgattttctgctgaccaccaggaagtcgtcgtcgtcgtcgtcgttgtcgtcgttgtcggctgtctaggcttccagttttttccccacccctttcgttctgctgatctgtcgccggtgtataaagtgcaagtcaagggaaaattgattgcaaatagccggatttatttcacatgtgtgtgtgtttgccaaccatttagttctcttatcgcactaaggtttttgaacctcttcacacttggcaaaaaatgggcaaaaaaaaatccattcataaagtgttaagatttagattattggaaaatcgttgaccactagtagtattgcatcgtgatatatttgtatcatcactatcatttggttttaacgacacttacagatttatgcatataattcccaaagtaatgcaaatttttgttctctgcacttaaaatgtattctagtacggattgattgaaacaacttgtgcagatcccttgattagaattgaactagcaacaaacttgcaacacctgcgtcaagtgaggaactggtgtgacccggcattgacctccagcgattggaagccggccaaattggaatcaatgaccagccgccaggtgaatgcattatatttatatatgcaaaagcatagcaactgctaaaatgatgagctcaatcaaaacataggcagcaacatcaccaaaaagattaatatatattatgtttgtgtctgcatcaataacaataatgctcctgcttaagttgcataaaattgcattgcataaaaaggaaggaattgtatggtaaaaaaaaaggtaaacataatatttaggctattaatcacacacactttactctacatttgattactatacgttacatagtaaaataaatgtaatatttaatatgttatacaaaaaaaatatataatgtttattcttacaagttttag

SEQ ID NO: 23237 - DNA, 1488 bp, DROSOPHILA
ttagcgtttggcctgatctgattcaattccggatttgcaccaaaatgatgagtctaaggatttgcctgctggccacctgcctcctggtggcggcccatgcctccaaggatgcctccaatgaccgactgaagccgaccaagtggctgaccgccaccgagctggagaacgtgccctccctcaacgacatcacctgggagcgtttggagaatcagccgctggagcagggcgccaaggtgatcgagaagatctaccacgttggccaaatcaagcacgatctgacccccagctttgtgcccagcccgagcaatgtgcccgtctggattatcaagtccaatggacagaaggttgagtgcaagttgaacaactatgtggagacggccaaggcacagcccggattcggcgaggatgaggtcaccattgtcctgactggtctgcccaagaccagccccgctcagcagaaggccatgcgcaggttgatccaggcctacgtccagaagtacaacctccagcagctgcagaagaacgcccaggagcagcagcagcagctcaagagcagcgactacgactacaccagcagcgaggaggccgctgaccaatggaaatccgccaaggctgccagcggcgatttgatcatcattgacctcggctccaccctgaccaacttcaaacgctacgcgatgctggatgttctgaacaccggcgccatgatcggccagaccctgatcgatctgaccaacaagggtgtgccccaggagatcatccatctgatcggccagggaatcaggcggcccatgtggccggagctgctggcaacaagtacaccgcccaaaccggacacaagctgcgccgcatcaccggtctggatcccgccaaggtgctgtccaagcgtccccagatcctgggtggtctgtcccgcggcgatgctgacttcgttgatgccattcacacatcgaccttcgccatgggcacgccccatccgttgcggcgatgttgacttctaccccaacggaccgtccaccggtgttcccggctccgagaatgtgatcgaggctgtggcccgtgccacccgttactttgccgagtctgtgcgtcccggtagcgagcgcaatttccccgccgttccggccaactcgctgaagcagtacaaggagcaggatggctttggcaagcgcgcctacatgggtctccagatcgactacgatctgcgcggtgactacatcttggaggtcaacgccaagagccccttcggtcagcgcagccctgcccacaagcaggccgcctaccatggcatgcaccacgcccagaactagagcgcccatggccacgccccctggttaccagggacgttcgatcgtcacgcactttctgataatcagaaaataaaaacccggaatgcgtagtttagcttagaagtttcatcaaacaatcaaaaaagaaaaatctataaaatcccataaaaataaaagctgcaaattttcgaaaagtcaa

SEQ ID NO: 23238 - protein, 421 aa, DROSOPHILA
MMSLRICLLATCLLVAAHASKDASNDRLKPTKWLTATELENVPSLNDITWERLENQPLEQGAKVIEKIYHVGQIKHDLTPSFVPSPSNVPVWIIKSNGQKVECKLNNYVETAKAQPGFGEDEVTIVLTGLPKTSPAQQKAMRRLIQAYVQKYNLQQLQKNAQEQQQQLKSSDYDYTSSEEAADQWKSAKAASGDLIIIDLGSTLTNFKRYAMLDVLNTGAMIGQTLIDLTNKGVPQEIIHLIGQGIRRPMWPELLATSTPPKPDTSCAASPVWIPPRCCPSVPRSWVVCPAAMLTSLMPFTHRPSPWARPIRCGDVDFYPNGPSTGVPGSENVIEAVARATRYFAESVRPGSERNFPAVPANSLKQYKEQDGFGKRAYMGLQIDYDLRGDYILEVNAKSPFGQRSPAHKQAAYHGMHHAQN

SEQ ID NO: 23239 - DNA, 2901 bp, DROSOPHILA
attttaatgcaaaacacatccctcaacggtgtcatgcgtcctgctggcccattggcaaatgacccctaccactttggcagtcgtttcataaagcaatcctataattgggatgcggctgacgacgggacaatgcataaattctggcgcagttgcttattattattactgccgattgtcgctgtcatcgactttatttgccttttgtctgtgtttgtcgagtgccattcggaatcatatggcccatcgcttggtgttcgatagatgcaaccatccatttcgcaggtgccgcaggtgccgcaggagctacataatcgtgttgatagttgaacagtggccaaaagcgccgagtggggagcacaaaaatagaaacggtgcacttttacgaagattctgtcgctatttggtgctataatgagcagcacgattctttgatcgagcgaaacattgatgatttgtacctgaagatcgtgaagcgaatctgcaaatcgttttcaaggtcagctttcaagagctttgtcgatattttcttttaaactggagtagaacttttggagtggctggcgtgtggagtggtcggctggtggggcaccctgcgatatcatgctaaaaactcatacataaccagatcttggctatcgcaaggctcttccacattagctccatcaagcacttacacgaagcatcgccgacgcacggcacgaatggacgatacacttcacttcgcagaccagttccaaaaataattgtgctcaagtgcgtggtcgaatgcggatcgacaaatccggcaagcaaagaccagagtcgctgtcatcgaccaagtggttaataagttcgttgttgggtttgatgagcactcgactcggcgggtatgatttcatctcggctgagttccgcctaccatctagattggtaatggaaactgtagtccagcaggcctgccaaaggccggctataaagacgcggacgatatggaacaagacatcattgggttcaatactagcgacacagcaacaccttcagttagctcgaatagttcgttaatcaactgcagaacagaactatagcttcaaaatggtatgtttcagctcgcccgtcctccaatccaataataatttctaaagaaaatttaaaggcaatgctcatattgcaatttagcaatttagcaaatcagttttcccaaatttacatttgtcgttaacatttttattgcgcagaaactcttcaccgccgtccttgccatctgcctagtggcctttgcggcagcccaatctgctgatcccgctgctgcactggagccttcctccgagtacctgcctcccgtcggcgaggcggaggccgcccagctttcggagaacggatataagtacaggaccgtgcgccggctgaagctgcgccaccgccgcgaggtgcctaaccaggaataccttcctcccgtggaaaacgcacctagccaggaatatctgccgccagtagatgccgccgccattggtgacaccaaggttgccgacgacggctaccggtacaaaacggtgcgcaagcttaagttccgtgctcgccaccgccgcgacgtctccgaaatcgctgagcccagcggcgagtacctcccacccgtgcaggttgagcttgctcccgagctaaaaaccattcttggtgatgatggctacaagtacaagacagtgcgccgtctcaagttccgccgccaccgccgcgaggctgtcgccgaagaggctgctgccgagtccgcacccaacggagagtacctgccccccgctgaggctgccgctgccgcccccgctgccgccgaggccgagccaaagtccgctgaggagggcactgagttggccaaggacggctaccgctacaagactgtgcgccgtctgcgttaccgctaccgccactaggcctccgatccgaacctgggcacattgaaccaaattgatcctgaaagtacactcaagaagtaaagtcgaacgggcctcgtccaatcgactgacttcttcttttggcccttcctaatacttattcactcagttgtcacagcatatggaataataaaatttattcacaaaaaatcagtgaagttctctaacatatttccagcttagagccacaagaatggtatcaacattagcatactccccaaattgcacattaaataataatattcaaatgtaaaaaacggctcggctaggagctcaagccaatgggcgaaatggaatcgcaatcaatggccaagtaagtaaagggcaaaatgcaagcggaaaaacggttggccctcctcgccaagagggcaaaattctatttttaaattaagtgcgcctttttggaagcacaaggagcagccggagcggcaggagtaggcactttgagttcgccgacatctcgtctcctgctcgactgggcctgggactgggcatctttttacggtcaacttttcgtaatattattttgcatttatttgcacaaagttgatttttccctgatttctttgttttctttgcttggctttgcgggctgccagccaaattacaatattgtagcggccttgctcctggaacgatgtgctgggttcttggctggtggtccactgagctaggggaggaccgaaagcagctgcaaaagagtaaataaaacattttttgctctccaaacacaaagtttcgtaattgagcgcctgacttttgctagctggctcaggccaaaaaggttatcaacgggttcagatccagtaagatatcaaaatgagcttccgtcccagcggattgttgaaggggagcattcggacacggtgctatcaaaacctctgtgacctatgtcacagaaaaagttgttcaaatcaagcacccggtttaaagccaattaaagatttcatgataccgacacattatttgcttgtttttc

SEQ ID NO: 23240 - DNA, 761 bp, DROSOPHILA
cgacacagcaacaccttcagttagctcgaatagttcgttaatcaactgcagaacagaactatagcttcaaaatgaaactcttcaccgccgtccttgccatctgcctagtggcctttgcggcagcccaatctgctgatcccgctgctgcactggagccttcctccgagtacctgcctcccgtcggcgaggcggaggccgcccagctttcggagaacggatataagtacaggaccgtgcgccggctgaagctgcgccaccgccgcgaggtgcctaaccaggaataccttcctcccgtggaaaacgcacctagccaggaatatctgccgccagtagatgccgccgccattggtgacaccaaggttgccgacgacggctaccggtacaaaacggtgcgcaagcttaagttccgtgctcgccaccgccgcgacgtctccgaaatcgctgagcccagcggcgagtacctcccacccgtgcaggttgagcttgctcccgagctaaaaaccattcttggtgatgatggctacaagtacaagacagtgcgccgtctcaagttccgccgccaccgccgcgaggctgtcgccgaagaggctgctgccgagtccgcacccaacggagagtacctgccccccgctgaggctgccgctgccgcccccgctgccgccgaggccgagccaaagtccgctgaggagggcactgagttggccaaggacggctaccgctacaagactgtgcgccgtctgcgttaccgctaccgccactag

SEQ ID NO: 23241 - protein, 229 aa, DROSOPHILA
MKLFTAVLAICLVAFAAAQSADPAAALEPSSEYLPPVGEAEAAQLSENGYKYRTVRRLKLRHRREVPNQEYLPPVENAPSQEYLPPVDAAAIGDTKVADDGYRYKTVRKLKFRARHRRDVSEIAEPSGEYLPPVQVELAPELKTILGDDGYKYKTVRRLKFRRHRREAVAEEAAAESAPNGEYLPPAEAAAAAPAAAEAEPKSAEEGTELAKDGYRYKTVRRLRYRYRH

SEQ ID NO: 23242 - DNA, 3369 bp, DROSOPHILA
gcttccttcagccccatctctggcttatatagctcagattccagatagcgcactgccagcgattttctgctgaccaccaggaagtcgtcgtcgtcgtcgtcgttgtcgtcgttgtcggctgtctaggcttccagttttttccccacccctttcgttctgctgatctgtcgccggtgtataaagtgcaagtcaagggaaaattgattgcaaatagccggatttatttcacatgtgtgtgtgtttgccaaccatttagttctcttatcgcactaaggtttttgaacctcttcacacttggcaaaaaatgggcaaaaaaaaatccattcataaagtgttaagatttagattattggaaaatcgttgaccactagtagtattgcatcgtgatatatttgtatcatcactatcatttggttttaacgacacttacagatttatgcatataattcccaaagtaatgcaaatttttgttctctgcacttaaaatgtattctagtacggattgattgaaacaacttgtgcagatcccttgattagaattgaactagcaacaaacttgcaacacctgcgtcaagtgaggaactggtgtgacccggcattgacctccagcgattggaagccggccaaattggaatcaatgaccagccgccaggtgaatgcattatatttatatatgcaaaagcatagcaactgctaaaatgatgagctcaatcaaaacataggcagcaacatcaccaaaaagattaatatatattatgtttgtgtctgcatcaataacaataatgctcctgcttaagttgcataaaattgcattgcataaaaaggaaggaattgtatggtaaaaaaaaaggtaaacataatatttaggctattaatcacacacactttactctacatttgattactatacgttacatagtaaaataaatgtaatatttaatatgttatacaaaaaaaatatataatgtttattcttacaagttttagcctagagaaccgtttatataacgcgcttatttatatttgtgtagccaattccaacacatgccataagaaccttctgggcaccgcgcacattctccgcttcgtcctcgtcctccgcctcgggattctccagcttgaaggtgatcgagaagaagtcgcgcaaatgttgcagaaagtgaacggtgtaattggacagggcacctgtaatcaacattataatcaaacatgattcaattacattcttcagcacataccggtgaggaatttggagacatgcttttgccccagtgctatatagagtgccgccagccattgatagctggagtctacacagccaccgcgataaatctcgtctagcaaacgcagtgccacctccttgcccagattctcgggtatggatggtgtatcctcctgtaaagaaattacaagataatactataaaactaactactccataatggctttcaggctactcaccgactcctctcttgtgttggaacagcaatcggcggcgaagcacacaccgtccgtagtctcggcaatcagacagatgccaaatccgggcgaattacccgacatcttgcctttgttctgatctgtgtaaatatagacatccggcaggaactttagcatgcatcccttagccgcctccacggtgcgattggccatcgccggagagactttgcaggcataaacagtgccccgaatgcgtttaaccatgccctgtgactgaaattgtatggcacgcaggctctttcgcaccggacacctgaagatgatctctccgccgcccagcggagcaactcctcggcgcacaaccttgagttcgaggccctcgtcgactagaaggaatcgcttgagcagggatagagctgcacccttgatgtggtccacggatggcgagtccttgctattggtcacaccgcgcagggtgcactgtagcggactcttgcaaaatggacccaaggctattagggcgtccagatagtagccaatgccacgctggacacagcaatcatgatttagctgaccgccatgcagtaatcctggtgagaacatgacactcgtgccggcgggattcaattcgatcttggttccattggtgattttatcaagcaggcgaattaaacttatctcgtactcccgcagaccgggtgccgtttcgtcctccgaacggatttggctgatcttcaccggtttgccggacaggcaggcgaggattaggcgctgcttgaggaagttgctgccgcggtaaatcaggcaattgccctcctgggcaatgggcggcattttataggctctaaacgcaccaataaatcaaagaatttagcaaattgatcggcgcacgtgcgttaaaagaggtaaacaacgtctatcgccggactatcggttatcgatatagaacacagtatggcagcgctccttagggctgtcaagtgttggaattatcgcatttagtaaataacataataaattatttacaaatgaatatatttcagaatgcatttttataatttacacaagcactgcaaacaatcgaacgtttgtatttttatattattattttaagaaaaaaaaatactgcaagcttctattaaaaataccaaacgctgtaggagatttgaatagaattgttgttgcgaaattctctgctcattttgaaaaaaatactgcaagcttctattaaaaataccaaacgctgtaggagatttgaatagaattgttgttgcgaaattctatgctcactttgaagttgacgaaggggaagttcgcagaaggcgaacaaaactagttgtaaaaatgtctgcggatccaaaactttatgaatatgtcaattgtcccaactctagctcgcatttggtaatgctgtttaaaatgccctaccatttgccgctttgtgccaagaaatttccatcggacgaattagctcgctgtccatataacagaacccatatgtaccctattgccgatatatatgtaggttatgaatatatattatatgtatgtaagcaaatattaaattcaattgtttatcccatttgcaggaacatatcatcaagtgcccgagctacttacgcgaggagagccacagcgacgcaaaagaagatgccaaggactgtgatgccaaggaaagtgatgccaaggactgggatgccgacccgccggtttcgacatatgatccgaatatccactgtgagaagaaccctatcattcgtcgtctgcacggagctacgcgctcctctcgccgggcattccgcgaaaaggaacgcaagcgattaatggatttgaatacttttccttaatctatgaacatacttacttacttacatacatcatatgaatacatacatatacatatacaacatacatacaaataaacatatt

SEQ ID NO: 23243 - DNA, 1250 bp, DROSOPHILA
agtccggcgatagacgttgtttacctcttttaacgcacgtgcgccgatcaatttgctaaattctttgatttattggtgcgtttagagcctataaaatgccgcccattgcccaggagggcaattgcctgatttaccgcggcagcaacttcctcaagcagcgcctaatcctcgcctgcctgtccggcaaaccggtgaagatcagccaaatccgttcggaggacgaaacggcacccggtctgcgggagtacgagataagtttaattcgcctgcttgataaaatcaccaatggaaccaagatcgaattgaatcccgccggcacgagtgtcatgttctcaccaggattactgcatggcggtcagctaaatcatgattgctgtgtccagcgtggcattggctactatctggacgccctaatagccttgggtccattttgcaagagtccgctacagtgcaccctgcgcggtgtgaccaatagcaaggactcgccatccgtggaccacatcaagggtgcagctctatccctgctcaagcgattccttctagtcgacgagggcctcgaactcaaggttgtgcgccgaggagttgctccgctgggcggcggagagatcatcttcaggtgtccggtgcgaaagagcctgcgtgccatacaatttcagtcacagggcatggttaaacgcattcggggcactgtttatgcctgcaaagtctctccggcgatggccaatcgcaccgtggaggcggctaagggatgcatgctaaagttcctgccggatgtctatatttacacagatcagaacaaaggcaagatgtcgggtaattcgcccggatttggcatctgtctgattgccgagactacggacggtgtgtgcttcgccgccgattgctgttccaacacaagagaggagtcggaggatacaccatccatacccgagaatctgggcaaggaggtggcactgcgtttgctagacgagatttatcgcggtggctgtgtagactccagctatcaatggctggcggcactctatatagcactggggcaaaagcatgtctccaaattcctcaccggtgccctgtccaattacaccgttcactttctgcaacatttgcgcgacttcttctcgatcaccttcaagctggagaatcccgaggcggaggacgaggacgaagcggagaatgtgcgcggtgcccagaaggttcttatggcatgtgttggaattggctacacaaatataaataagcgcgttatataa

SEQ ID NO: 23244 - protein, 307 aa, DROSOPHILA
MFSPGLLHGGQLNHDCCVQRGIGYYLDALIALGPFCKSPLQCTLRGVTNSKDSPSVDHIKGAALSLLKRFLLVDEGLELKVVRRGVAPLGGGEIIFRCPVRKSLRAIQFQSQGMVKRIRGTVYACKVSPAMANRTVEAAKGCMLKFLPDVYIYTDQNKGKMSGNSPGFGICLIAETTDGVCFAADCCSNTREESEDTPSIPENLGKEVALRLLDEIYRGGCVDSSYQWLAALYIALGQKHVSKFLTGALSNYTVHFLQHLRDFFSITFKLENPEAEDEDEAENVRGAQKVLMACVGIGYTNINKRVI

SEQ ID NO: 23245 - DNA, 2934 bp, DROSOPHILA
gtacaggaacacaccgttgaccgccttggccttggcctcgttctccttcagtccatcgatgatcttttggaaaacggcgtccgactgcagagacatggttgttgttgttgttgttgtgggggtatttctgtgtgtatgcggttttgtttttccggaagaataaagaaaatattcagtgggcttgtgcgtcgtagaaataaaagaaaagtgcttacgctttgagagcggaacgcgaagtaatgagcagaaggcgtgcaatcggcgattttattgtcgcttttttcactacactgcccctgttgtgtgggagcgggatggtcgtatagcaagttgccggtcgcgatatgtcgccctcactcgcacctgttgcattcgcataagccttgttgtgctgttattgtcgcgctccctctctctctcgctctcttccaaatgttagccagctgatgcacagtgggcatgaactcaaaataaagtggctgcacgaaaaccttttgcatatcagatatagcttttatttatatcgtttatgcgatatttctttcattaagctgaattgaaattctgatatttgatgatatcagaatgaaaaagtaaataactgtatcgatatcatttggttttcaccgcttgttagcccactgttacaggtgtggagtttagactttaacattaacatgaaacgcctaacatgaagccgtaacagcggttatcagctgttgtccacgatttagtgcaaagtgcgcacccagtttgaaatgcccataaaacggcgataaggcttgaagactcttcagattatttcgacaaaatatgtcacctaacgagcccattgagaaaatatttttaaccccccaaatgccatatatcgtgattcgattcataaaacgcaagcattattcagtactattattttgcattgaccaatggatttcagttagtaaatgcatcaatttatagggttaaacgacaagtagaatgtgcgttcgtatcagcttcacttccttatgagctctcgaacttttccggatcgattccggccttcttcatttccacggcaatggagaagagatagtcatagcattccgacctggttgtaaaaagagagataaacgattaggtctataaaagtgctcggtgtctgagaataagtgaggcaacccacatggttttggccttctcccagttctgtccccaaacgtagacgccgtgtcgtcgaaccaggatcgcactgcagcccggatactccatcatggcggcgtacatactgtcggccaggtcgcgttcaaagggtgtgttctcgatgatcggtacgacgagctcctcgtcgtagcgcaaatatcgcttgtccgcctcatcgtagacgcccttgatcatctccaagtgggtgcagcggaaggttttccctggccacaggagcgtggccattacggcgtgctgcgaatgggtgtggatgacggctcccgcctgccgatgctgataggccagcataaagagcggcgtacattggctcttcttcaggcccttgatctcaggcggcagttgcagatccttgccggttatatcctgcacgaagagatcctccggctgcattcgctccttctggacgcccgacggtgctatgtagatctcatcgctgaaacggattaaccggcttatatggctgtctggatagatgtatagtatcacttgtactcacttgtacttaatgctcatgccacctcctgtgccggtcacccatcccaaatgatagaattgcctgcatagcgagggaatcaagtggcgaggatgctccgccggcaagtctttgaagatcgagagggccatctcgctgacaatgtgactttcgtgggacgtaatcttcgtcgccgtgcgacactgataacgggagataaagggattctgaaagcgacaaatcacgaatgtaaacaatgctgccgtcgatagacgattgcaatcggtgtatcgctgttaacacacagcgttgccgttacgataaacattgtccaattagaaatggttttttgaaaattgaataatgtgcaatagttcattaagagaacaagatattattatcaccgtattacctcaaaaatgtttcatagcgctgttgaaaacgttttttacaagtataaatataataagcttgctacatttgaacttttttcaattttcttgagtagtcctattctgtaagtcttattataaacttttttgtttttatgtggctcacctttggaattatattgtttattaaacatcttttcaggcccttcgtacaatgaagtccgaaatcggcaaggcgtcacaccgcctcaaccttttcacttccgagatcatgcactttatccaccaaatgcagtactatgtgctatttgaggtcatcgagtgcaactgggtggagctacagaagaagatgcagaaggctactacgttggacgaaatcctggaagctcacgagaagtttctgcaaacgattttggtgggctgttttgtcagcaacaaagcgagtgtggagcattcgctggaggtggtgtacgagaacattatcgaattggagaagtggcagtcgagcttttacaaggactgctttaaggagctaaatgcccgcaaggaactgtccaaaattgtggagaaatcggaaaagaagggtgtctacggactgaccaacaagatgatcctgcagcgcgaccaggaggcgaagatatttgccgaaaagatggacatcgcctgccgcggcttagaagtcatagcaaccgattacgaaaaggctgtcagcactttcctaatgtctctcaactctagcgacgatccgaatttgcagctctttggcactcggctggacttcaacgagtactacaagaagagggacaccaatttgagcaaacccctgaccttcgagcacatgcgcatgagcaatgtgttcgccgtgaa

SEQ ID NO: 23246 - DNA, 796 bp, DROSOPHILA
cattgtttacattcgtgatttgtcgctttcagaatccctttatctcccgttatcagtgtcgcacggcgacgaagattacgtcccacgaaagtcacattgtcagcgagatggccctctcgatcttcaaagacttgccggcggagcatcctcgccacttgattccctcgctatgcaggcaattctatcatttgggatgggtgaccggcacaggaggtggcatgagcattaagtacaacgatgagatctacatagcaccgtcgggcgtccagaaggagcgaatgcagccggaggatctcttcgtgcaggatataaccggcaaggatctgcaactgccgcctgagatcaagggcctgaagaagagccaatgtacgccgctctttatgctggcctatcagcatcggcaggcgggagccgtcatccacacccattcgcagcacgccgtaatggccacgctcctgtggccagggaaaaccttccgctgcacccacttggagatgatcaagggcgtctacgatgaggcggacaagcgatatttgcgctacgacgaggagctcgtcgtaccgatcatcgagaacacaccctttgaacgcgacctggccgacagtatgtacgccgccatgatggagtatccgggctgcagtgcgatcctggttcgacgacacggcgtctacgtttggggacagaactgggagaaggccaaaaccatgtcggaatgctatgactatctcttctccattgccgtggaaatgaagaaggccggaatcgatccggaaaagttcgagagctcataaggaag

SEQ ID NO: 23247 - protein, 227 aa, DROSOPHILA
MALSIFKDLPAEHPRHLIPSLCRQFYHLGWVTGTGGGMSIKYNDEIYIAPSGVQKERMQPEDLFVQDITGKDLQLPPEIKGLKKSQCTPLFMLAYQHRQAGAVIHTHSQHAVMATLLWPGKTFRCTHLEMIKGVYDEADKRYLRYDEELVVPIIENTPFERDLADSMYAAMMEYPGCSAILVRRHGVYVWGQNWEKAKTMSECYDYLFSIAVEMKKAGIDPEKFESS

SEQ ID NO: 23248 - DNA, 5537 bp, DROSOPHILA
caaaatgagcttccgtcccagcggattgttgaaggggagcattcggacacggtgctatcaaaacctctgtgacctatgtcacagaaaaagttgttcaaatcaagcacccggtttaaagccaattaaagatttcatgataccgacacattatttgcttgtttttctaccaatcgtctttaaggccataggtgttttttgtgacaccctgattttaatatccgttattaatacgaataaaatattcgttgtgaagtgcatgtgaagggaagagtatgcgacgcacaaagctgtctggagcgcacatggttaaatggtttttatttattaaatatgtcattagttatatatattatttatattttagtataaaaatatctaatgggcaataccatttcaaatgtaagaaatgtaactgaccataattcgtaatctatgatattaacacaaacattaacatatgttacattttgaatagtaacgtagcttgagcggttcaaaattgtactactcatccgcactgttgccgatcagatatattacactggacaacaaaaacaaattaaaaaaagaaaagtgcttagcttatagacttattcagaaattacatgtttctgaaaactctttccgatcaaaaacaacgaaactatgtgttgcattatcttcatttatttatacagatagctttaaaattgccagaatactttctgtcgaaacgacatttgataccgatcaaaaaaataattaacatggtaattaaaatgaaatgacgccaatccatccagatgatttggatgtattacatcaggtattaaaatactctttgatacaagtattttttatcggcatgatgactctcatgtttttgcgttaaaatttatataagtaaatttacatacttttaacctataaaaccgatccactcactaatgcatcagaggcttactgtagccgacgactgaaatggcgaacaaactcttatcgataaattatcgaatctcagctgatttcggacttttcaagaacttaaaaagtgcatttatattttctgtaatatcccattgctaagaaaaatgataaaaattagcgatgaaaagacctggcagagcagcagagactcagtctacgaagttggcgactcgtatagcggccagaatgccaatcgacctctggtggccacgaactgctccgaatatgcggtggcccatgcaaactgccagttgcgtccggttcgtcgatttgcggaggtttctcttctgccggacatcctggaaaccatgagaaacttgggcctaaaccggttgctccgactgcaaagctacacatggccacacttggccggaggatctgggcacggggcgatgattgtggggtctccggccagtggtcgcacttttgcttatataccacctgtttgccatgctgtttccagagctctaatggatttcacaggtcagtgcgaggatgtggagcacgatatctctcaaccggatcgctatggccccatagcattgatcctcgtaccggatctgcgacgcgttcaccaggtcagcgcgatgtgtctagccctgctgcgcaaggcgcataagaatgactccgttacattggcactcaatgtttcctccacgaaaagttcacagttcttcctcaagcttttgaacggagttggttgcctggtggccactcctgctcagctggtatggttttggcaagaagctcctggcctaatgcgatttccgtgcctgcagttcctagtgtacgacgacgtggacctgatgtccagggagcagctacaggacgttcagcaggtgctgcaggagatcctccccctgtcacactctccccaagtggtaatggtttcgaagtcatattgtcacacgctgatgtccaaattaagagctgtcaacgataaaccggctcttgtattcggcgatatactggaggctgccctttacggcggaacacgtatacgaatctccataatgcgctcagaagctaaggccaacgcagtggtccaaatgctgcagcagtgttcccccgaggagttccgaacggttattttctgcagcgatgacggggacatgcaatgcctcgtggcagctttggaagttcaacactacagttgcctaccttactaccagactgcagacctggaggttaggcagcaggtccatagctggcaggcaagaagcaacggtgttattttgctgtgcacagacaattgtccggagctggacattcgagatgcgcacaccataattcatcacagtatgagtcactcgtggagcaagtttaagttaaggcacctcaaaatatccgacaatctttgcaatatggtgaaacctacagcgagcattgtgaagaagccactgtattctctggtgctccttgacgataacaatcaccgtcaattgccgcgtctcgtagactttcttcagctgcaccaaaaagtggaccaccgcttagttgaggtggccaaacgaatacggcaggagttgggaaaagccagaaacgaccagcatcagttgtgcgatcaaatcctagtgctgggcaagtgctacgatcctgtttgcgagagtcgtcatcgcctgtcccatatcgacaggaggcctgattacttgcccgcgtctggagatgtcaaggttcagctagtcaaggtttactcgccgacacatttttgcgttcgcctacttgaacatctaccgcccaaaggcacgtggcggatgatggaatattcggctgtacaggagttccgcatgcagttgacgcagatcaaggagccccgacgctactggccacctgttgccggagcaatttgtatgtaccacaccacatttaccaaggagcgtgttcgcgtcctgaaggtggcggctataaaaaacacgaacatagttcaatccgatttgacagtgaaactccaggccctagacgttgacacgcggatcttctctacgaactgtggaaaactgtttgagtgtccggaggcgttgcagcaggaggctccgttggcctgcgatctgcgccttccaggctgggtgccttatttcggcgagcgcagctggactgaagaaaatattcgcaatgtaaatttaattctgacccaacttccaaaagatcacttcctgcaggccaaaatacttttcgtcgccgcaggaactttgtttgtccaggatctggtagccataatgtatgcggaccaatttaaggcgcatgtgcggcacctaagcctagcaaggcgtcttgttgaagcaaccttagtcaaaagaagtgagaatgctgccgaaatgatccgggaattttttgcggaggtgataatagaagacgatatagatgagaacgttcaggattccaaggaaaaagcaaatagcaaaccacatgaaaaaatgaaaggtaagatgacagatcaaccggccaagctgcagagtcagccgcctttaagcggtaggtgtctgcgactagccaatatggctcacgagtcggtcaaggagaatcagctgcatcaggaactgcaagaaagacgatatgaaaccccggaaataccacaccaatccaacgaatctgacatccctcaatccaatgaagacagattttcccaactgtatgagtgtatcatgaattgcgcctctttacagctggaagatgaaagtaaaccggcaaagcatcctgaccatgtgctcagcgagtcagttgaattccataaaattatgacaaacgaggatgctacacctgaccatactcaggagaagactgcattactactacttcctaacaatgtagcgagaccgtccgtgacctactatcagaccatgactaccttagagtttcaggtgtttctgccagaagatgaccatgactacaaggcgctactgctcggagcacagttgttctttagggcaatctccaaatcctcagatttaattctgcagtttattatgaccctcagatttccatacagctcaatgagtcataacatccgcggacggactgtgtacataagtgtcaaaaagctgctggcccttatcgatccattggcattcagagagtatcgatttctaaagcccaatcacgatttgttcgataaggttgataaacaactacaggagacacagaatcgattggttcgtttcctggaggatatgaattatgtgaaacgaaatttcgagggacaggaaaagcgcgagaccagtgaggacgaagaagtgaatgtggaagggattgagcgtccagactgccataaaatatgggacttataatcagaaactaaaaagaaaagccatttatacatttacaactattgttcttttcatggggccacgaagaaatataaggttgagactgttcaaaacaatcacacaaatatatatttcctaaaatggtcttttgactcaggtaaactatatataaggaaaaggtaaatagcatgaaaggaataataaactagaaaaaatcgtgtgctcttgagtattaaaacctgtaaaatgttttggcaacgcttcagaaaaaatcttgaaataaaaaactggtttcaaacgtttaatttaatcaaaactgtctttttttaacccgtaactcgtagagtaacagggttcactagattcgttgaaaagtatgtaataggtagaaggaaacgtttccgaacatctatgatatatatattcctgatcaggaacaacagccgagtcgatccggtcctgtccgtccgtatgaacgtcaagatcttagctagaaaactagaagtttgattctagagccataagacataagccagtgctatcttgctgccccatgttgccacgcccacaaattgcgacaactttttgccacgcccaatcttaagcgcacaaaccgccctaagcttccacgcccacacctttgaacactttttaaattttttcttattttattcacctgtattccagaaaacatgaaatttcgtgacctttgactaacccgcaagggtatatacaatatagttttcaaagatctttatcgatatagttagtattagcacaaagaaaggtagattttttcaggattttcgatctgcaaatgaggagtgataacattatcaaaaagatagggctggctgacaatttaaagattccttgtttggaatgattgaaaaaacttggcaagcaaatcgactatttcctgattcgattttaccgcttttgcgtttagtgctaacgaaaataaaaaacttttcagattttgtgcgaactgaaacttacaatggtttaaataattcctgtagcactgagcattaagcacggtaaaatttaagcgagcacttatatatttagaaagaatagactgagaaccggtgctttgaagttttgtataaagtctagacattacatttcttaggtgtgtcaactctttattaaaccaaggaggtttgttagagattgtcggatagtccttcggaacacaagagttaaacaaattatgttgcaggacgaattaaagacagctataatgtggaagttaagatagtttcatccgaataccaagtgatactgataacttgctgcgaccaa

SEQ ID NO: 23249 - DNA, 3537 bp, DROSOPHILA
ctgatttcggacttttcaagaacttaaaaagtgcatttatattttctgtaatatcccattgctaagaaaaatgataaaaattagcgatgaaaagacctggcagagcagcagagactcagtctacgaagttggcgactcgtatagcggccagaatgccaatcgacctctggtggccacgaactgctccgaatatgcggtggcccatgcaaactgccagttgcgtccggttcgtcgatttgcggaggtttctcttctgccggacatcctggaaaccatgagaaacttgggcctaaaccggttgctccgactgcaaagctacacatggccacacttggccggaggatctgggcacggggcgatgattgtggggtctccggccagtggtcgcacttttgcttatataccacctgtttgccatgctgtttccagagctctaatggatttcacaggtcagtgcgaggatgtggagcacgatatctctcaaccggatcgctatggccccatagcattgatcctcgtaccggatctgcgacgcgttcaccaggtcagcgcgatgtgtctagccctgctgcgcaaggcgcataagaatgactccgttacattggcactcaatgtttcctccacgaaaagttcacagttcttcctcaagcttttgaacggagttggttgcctggtggccactcctgctcagctggtatggttttggcaagaagctcctggcctaatgcgatttccgtgcctgcagttcctagtgtacgacgacgtggacctgatgtccagggagcagctacaggacgttcagcaggtgctgcaggagatcctccccctgtcacactctccccaagtggtaatggtttcgaagtcatattgtcacacgctgatgtccaaattaagagctgtcaacgataaaccggctcttgtattcggcgatatactggaggctgccctttacggcggaacacgtatacgaatctccataatgcgctcagaagctaaggccaacgcagtggtccaaatgctgcagcagtgttcccccgaggagttccgaacggttattttctgcagcgatgacggggacatgcaatgcctcgtggcagctttggaagttcaacactacagttgcctaccttactaccagactgcagacctggaggttaggcagcaggtccatagctggcaggcaagaagcaacggtgttattttgctgtgcacagacaattgtccggagctggacattcgagatgcgcacaccataattcatcacagtatgagtcactcgtggagcaagtttaagttaaggcacctcaaaatatccgacaatctttgcaatatggtgaaacctacagcgagcattgtgaagaagccactgtattctctggtgctccttgacgataacaatcaccgtcaattgccgcgtctcgtagactttcttcagctgcaccaaaaagtggaccaccgcttagttgaggtggccaaacgaatacggcaggagttgggaaaagccagaaacgaccagcatcagttgtgcgatcaaatcctagtgctgggcaagtgctacgatcctgtttgcgagagtcgtcatcgcctgtcccatatcgacaggaggcctgattacttgcccgcgtctggagatgtcaaggttcagctagtcaaggtttactcgccgacacatttttgcgttcgcctacttgaacatctaccgcccaaaggcacgtggcggatgatggaatattcggctgtacaggagttccgcatgcagttgacgcagatcaaggagccccgacgctactggccacctgttgccggagcaatttgtatgtaccacaccacatttaccaaggagcgtgttcgcgtcctgaaggtggcggctataaaaaacacgaacatagttcaatccgatttgacagtgaaactccaggccctagacgttgacacgcggatcttctctacgaactgtggaaaactgtttgagtgtccggaggcgttgcagcaggaggctccgttggcctgcgatctgcgccttccaggctgggtgccttatttcggcgagcgcagctggactgaagaaaatattcgcaatgtaaatttaattctgacccaacttccaaaagatcacttcctgcaggccaaaatacttttcgtcgccgcaggaactttgtttgtccaggatctggtagccataatgtatgcggaccaatttaaggcgcatgtgcggcacctaagcctagcaaggcgtcttgttgaagcaaccttagtcaaaagaagtgagaatgctgccgaaatgatccgggaattttttgcggaggtgataatagaagacgatatagatgagaacgttcaggattccaaggaaaaagcaaatagcaaaccacatgaaaaaatgaaaggtaagatgacagatcaaccggccaagctgcagagtcagccgcctttaagcggtaggtgtctgcgactagccaatatggctcacgagtcggtcaaggagaatcagctgcatcaggaactgcaagaaagacgatatgaaaccccggaaataccacaccaatccaacgaatctgacatccctcaatccaatgaagacagattttcccaactgtatgagtgtatcatgaattgcgcctctttacagctggaagatgaaagtaaaccggcaaagcatcctgaccatgtgctcagcgagtcagttgaattccataaaattatgacaaacgaggatgctacacctgaccatactcaggagaagactgcattactactacttcctaacaatgtagcgagaccgtccgtgacctactatcagaccatgactaccttagagtttcaggtgtttctgccagaagatgaccatgactacaaggcgctactgctcggagcacagttgttctttagggcaatctccaaatcctcagatttaattctgcagtttattatgaccctcagatttccatacagctcaatgagtcataacatccgcggacggactgtgtacataagtgtcaaaaagctgctggcccttatcgatccattggcattcagagagtatcgatttctaaagcccaatcacgatttgttcgataaggttgataaacaactacaggagacacagaatcgattggttcgtttcctggaggatatgaattatgtgaaacgaaatttcgagggacaggaaaagcgcgagaccagtgaggacgaagaagtgaatgtggaagggattgagcgtccagactgccataaaatatgggacttataatcagaaactaaaaagaaaagccatttatacatttacaactattgttcttttcatggggccacgaagaaatataaggttgagactgttcaaaacaatcacacaaatatatatttcctaaaatggtcttttgactcaggtaaactatatataaggaaaaggtaaatagcatgaaaggaataataaactagaaaaaatcgtgtgctcttgagtattaaaacctgtaaaatgttttggcaacgcttcagaaaaaatcttgaaataaaaaactggtttcaaacgtttaattt

SEQ ID NO: 23250 - protein, 1059 aa, DROSOPHILA
MIKISDEKTWQSSRDSVYEVGDSYSGQNANRPLVATNCSEYAVAHANCQLRPVRRFAEVSLLPDILETMRNLGLNRLLRLQSYTWPHLAGGSGHGAMIVGSPASGRTFAYIPPVCHAVSRALMDFTGQCEDVEHDISQPDRYGPIALILVPDLRRVHQVSAMCLALLRKAHKNDSVTLALNVSSTKSSQFFLKLLNGVGCLVATPAQLVWFWQEAPGLMRFPCLQFLVYDDVDLMSREQLQDVQQVLQEILPLSHSPQVVMVSKSYCHTLMSKLRAVNDKPALVFGDILEAALYGGTRIRISIMRSEAKANAVVQMLQQCSPEEFRTVIFCSDDGDMQCLVAALEVQHYSCLPYYQTADLEVRQQVHSWQARSNGVILLCTDNCPELDIRDAHTIIHHSMSHSWSKFKLRHLKISDNLCNMVKPTASIVKKPLYSLVLLDDNNHRQLPRLVDFLQLHQKVDHRLVEVAKRIRQELGKARNDQHQLCDQILVLGKCYDPVCESRHRLSHIDRRPDYLPASGDVKVQLVKVYSPTHFCVRLLEHLPPKGTWRMMEYSAVQEFRMQLTQIKEPRRYWPPVAGAICMYHTTFTKERVRVLKVAAIKNTNIVQSDLTVKLQALDVDTRIFSTNCGKLFECPEALQQEAPLACDLRLPGWVPYFGERSWTEENIRNVNLILTQLPKDHFLQAKILFVAAGTLFVQDLVAIMYADQFKAHVRHLSLARRLVEATLVKRSENAAEMIREFFAEVIIEDDIDENVQDSKEKANSKPHEKMKGKMTDQPAKLQSQPPLSGRCLRLANMAHESVKENQLHQELQERRYETPEIPHQSNESDIPQSNEDRFSQLYECIMNCASLQLEDESKPAKHPDHVLSESVEFHKIMTNEDATPDHTQEKTALLLLPNNVARPSVTYYQTMTTLEFQVFLPEDDHDYKALLLGAQLFFRAISKSSDLILQFIMTLRFPYSSMSHNIRGRTVYISVKKLLALIDPLAFREYRFLKPNHDLFDKVDKQLQETQNRLVRFLEDMNYVKRNFEGQEKRETSEDEEVNVEGIERPDCHKIWDL

SEQ ID NO: 23251 - DNA, 4833 bp, DROSOPHILA
aacggccgcatttgttgttaattgaaataaattgaaataaattccccgactttgctgctcatattgttaataaagagaagccggagcgacgcaacagcgaatcagcagcagtaaacaaaactgtgagcaaaaggttttagttccattccaggcgtcagacgactttgagtacaagcgacaaacaaccagaacatctaaggaattccgagcgaacaatgtgaataatgttggtatcacaagcaattggtggcaataaccaaaaagagcacatgcgtttatttatagaccccagtgtgttcccattagtgagtgtgtggcgtgctgtgcactgcaaatgagttcaagctgcagccaaagagaaggaggcgtcctaccaataccaatccttgtgtagtcttgttccctccacaatcagatcggtcgcagaccaacagtagcagctgaaattcctcgatcggcacacgaaatcgtatgtaaatactttcctgccgagtcagcctctcagaatgccaatgtttacagtattcgattattgtttaactaacagcctcttatgggaaagtggaatacatacattaattgatgggggaggtgggggttggggtttgtagggtctgctataagcagatttcccgtatttgatttgtcccctctgttgtctcagtttcagtgggacccatactcccgaaaatcaattgtatttaactgtgcgtatgcgatttcgaaaacaaaaacacccctcctgctggggtcattgcacccaaggtgcgtgggtgcgtgtgtcaacacttttgaacccctaagcacccacccgagaaatacgccgaaaagtatgcaacgaacatggcgaccatcagcacaagcaactttaacgattttctcacctcatttctatacttactttgcagcgcagcatccggcgacacaggacatgcgcagtggcctttttggtagttgcatttcggccaacagcgactgaaagagcagagagcggaggagcatggccttttcccgccacaacatcgagaagcgccgactcatcgagctcgtgcgactcaacccaatcctctgggactgccgcctgccacactacaagcgttcggacaagcgaaaagccatcaaatggaacgagttggggcggctcttcaacgttaatggcgagcgggtgcagcgcacgtttacttcgctccgcgagatcttccgccgcgagctgaaccacgaaaagatgctgggcaccacgcgcttcaagtccaagtgggaatactacgatgccatggccttcctcaaggaggtcattcgggaacgcaagtaagacgacgtttgacctgccctaaaatactaccttatgatatatgtagatcccgtttaagggattttggacattccagttatttgttctagtgtctttggaaaaagggtttactaaattcgttgaaaagtgtgtaacaggtaaaaggaagcgttttcgaccatataaggtacatatatatatttctgaacaggatcaatagccaagcctcgagctcaggaactataaaataccacacttttgaaaaatgttttcatttttcttggtttcattttttttatcttaccgatataccaaaaacactttggctacgcctcttctgaaaaattcaaaccgctcacaacaattttaattccccaatatctatcgacaagcaaggaaaattatagaatttcgcgttcgcactagctgagtaacgggtatgtgatagtcgggttttcgactacagcaattgtgttccgattataatcactgaaaaagttgtttgagcaaattcggagagaggtgaccgcgaaataatcaccgtcacttaaaagcctaaacatatttacatattcaacatttagattttgattttacgcgatttttaagtttttattgttataagaagaatgattagtgtaagggattgggaatataaatgtcgagatagttctcaaaataatacgcaagtcaccttcctcggttacaataaatttacattgattttactgaaatcaaatcaaataaaaactagttaaagaaaataactgttgtctaccgaataagaacaatgacgcagataagaatataaatgtctagataattcacaaggattgtgtgcaagtcaaatctaaatttaagcatttaggaagggtatacatagaaattctattaaaactttgaatttgtttcatgtggtcggtccagaactgaccaacaggcaagaatgaaatgcatgcctgcggatctgcatcatagcacctatctgctaaccttgaggcaagcacccgctttccaaaaaagctaattacaacttttgctttttagatctcgcgagcgcatcaagcacggctctttggattcagcaccagtagccacaggcagcagcaacaataacaacaactgcgtaagccgcaatagcagcaacaacaacagcagcagtgcggccctagacgaatatcagtactttgctcctagcgaccccaacaacccgaacaatcagccccagctgcagcccgaaccaaagagtagtctgccagtgactattcccagtctaagtctcaccctcagccagttgccggtggctctgcagcagcaggcccagcatctccaagccttacagttgcaaccggacgtgacgctgacttccctgcagaaacaatctttacccacttcccttaccaatgccacacccgcgcccttagcacaaacctcgcccgcccaggtgctgtccagctcgcgctcatgcagctcttcgccctccatctatataaaggacgagccgtgttctccggcagggggttgtccggaagaagtgatgaccggaaatggaccagaggcgacaaggaagaagctggccacaattcgtccgcagaccaaacagcaacttaaagcgcgtctgcagctgcccacgcccaaaaactcatcatcgtacgctacgtcgccgccccatttgatcatcaatgccaacaacgagcttattgacaccgacgccggggacctggaggaggatctggacgacttcgacgaggacgacgacgtgaccggacgctgctcaccaatcgtcggccagtcggagacgatgggtgccgacggcagactttcggtcggaagcatttatatcggtgacggtggcgactgcggaaggggtatgggtagagcccacactcaggcgcgacacgtgcctacctccagagaactgctctacatgaaattcggtgactttctggccgccagattgaacactttgcatgagactgtagctaatgagctgatgaacaagatgcttctgctaattgcagagaagtgagaaaagcggggaccgatgtcgcctctaaaattattgaatttagagttgcgtaaggtaagtgcattcaaatatggaaatgccatcttacacaatcagctatcaaataaaagcgtgtaagtaagattgcctcggcaagctgatgctttacaaattacggatgactaccgaataagaaaagaacactttgatttcttttctatgatttgcaaataattttttgacttcgcctactgcagctatattataaagtcgtccgatttcgatcaagttataccaatatattgttaaaaatatggatcataccgaaaactaagggaagtacagttgtgtatttcaaaagctcatattgtggctatgtaatatagttgtccaatcccgttccaactgaaatacaaactggcaatagaaggacttacatctggttttaaagtttaatataacaaactcattacgatgtttataaaaattaattttaaaaacagccttttctttaataaataaagtaaaaatatgaacttcggcgttatcagttaactgttaaccttaaagctatctgcataaatattcccattagtttccaatttgtttctccaatatctaccgatattcctttttaatatgaaaattgacctactatgtccttcttacacattacattgttaattttgttatcactttttggtggacttatcgatttatcttttcatatacaacacattgactattgaatatttctgccatagaaaatgtttcaaaatattggaaatgaaatcatattgtccatttgttaccatatttgtacgagtgtttgcatacttcaatggcttgacgaagctagcttacgttcttgtttttaaattgaaaatgaaatttactagttctccagattgccaacctattcatacaaaatataaaacgtagtgttactttcttgtaatttccactagctgagtaatgatctatgattactttaatattttaaggtaacaaactttataaaattataaataagtttgttaccgcatttaacattgttaagcttgtttcctcttgggaaaagagtgttcttattaattgcaatatgttgtgtgtttggtgcttgcgccggaaattcttgaacatcgtggctcgctgtacaaatttattgctctgaccaatttattcagcaacacacacatacttaaattttgagtttaatttacacagcaaataccaggaccataaaaaagttttaatttccggacgctgaagtgggccccagacattcacactgactcacagacacacggactgctgcccagaatggcacagaacgatgcaagtttggagatttgagagcattttacgcataaataaaatgcctaggaccatggtaaatggcaatccccatccatcaatttcccagaggccgaggagcggacacactgcgtacaatgagccaaaaatcagaattaaaacaaaaagggtccagttttttcgcatacagctccaagcgttgcctttggacttatat

SEQ ID NO: 23252 - DNA, 1803 bp, DROSOPHILA
atggccttttcccgccacaacatcgagaagcgccgactcatcgagctcgtgcgactcaacccaatcctctgggactgccgcctgccacactacaagcgttcggacaagcgaaaagccatcaaatggaacgagttggggcggctcttcaacgttaatggcgagcgggtgcagcgcacgtttacttcgctccgcgagatcttccgccgcgagctgaaccacgaaaagatgctgggcaccacgcgcttcaagtccaagtgggaatactacgatgccatggccttcctcaaggaggtcattcgggaacgcaaatctcgcgagcgcatcaagcacggctctttggattcagcaccagtagccacaggcagcagcaacaataacaacaactgcgtaagccgcaatagcagcaacaacaacagcagcagtgcggccctagacgaatatcagtactttgctcctagcgaccccaacaacccgaacaatcagccccagctgcagcccgaaccaaagagtagtctgccagtgactattcccagtctaagtctcaccctcagccagttgccggtggctctgcagcagcaggcccagcatctccaagccttacagttgcaaccggacgtgacgctgacttccctgcagaaacaatctttacccacttcccttaccaatgccacacccgcgcccttagcacaaacctcgcccgcccaggtgctgtccagctcgcgctcatgcagctcttcgccctccatctatataaaggacgagccgtgttctccggcagggggttgtccggaagaagtgatgaccggaaatggaccagaggcgacaaggaagaagctggccacaattcgtccgcagaccaaacagcaacttaaagcgcgtctgcagctgcccacgcccaaaaactcatcatcgtacgctacgtcgccgccccatttgatcatcaatgccaacaacgagcttattgacaccgacgccggggacctggaggaggatctggacgacttcgacgaggacgacgacgtgaccggacgctgctcaccaatcgtcggccagtcggagacgatgggtgccgacggcagactttcggtcggaagcatttatatcggtgacggtggcgactgcggaaggggtatgggtagagcccacactcaggcgcgacacgtgcctacctccagagaactgctctacatgaaattcggtgactttctggccgccagattgaacactttgcatgagactgtagctaatgagctgatgaacaagatgcttctgctaattgcagagaagtgagaaaagcggggaccgatgtcgcctctaaaattattgaatttagagttgcgtaaggtaagtgcattcaaatatggaaatgccatcttacacaatcagctatcaaataaaagcgtgtaagtaagattgcctcggcaagctgatgctttacaaattacggatgactaccgaataagaaaagaacactttgatttcttttctatgatttgcaaataattttttgacttcgcctactgcagctatattataaagtcgtccgatttcgatcaagttataccaatatattgttaaaaatatggatcataccgaaaactaagggaagtacagttgtgtatttcaaaagctcatattgtggctatgtaatatagttgtccaatcccgttccaactgaaatacaaactggcaatagaaggacttacatctggttttaaagtttaatataacaaactcattacgatgtttataaaaattaattttaaaaacagccttttctttaataaataaagtaaaaatatg

SEQ ID NO: 23253 - protein, 429 aa, DROSOPHILA
MAFSRHNIEKRRLIELVRLNPILWDCRLPHYKRSDKRKAIKWNELGRLFNVNGERVQRTFTSLREIFRRELNHEKMLGTTRFKSKWEYYDAMAFLKEVIRERKSRERIKHGSLDSAPVATGSSNNNNNCVSRNSSNNNSSSAALDEYQYFAPSDPNNPNNQPQLQPEPKSSLPVTIPSLSLTLSQLPVALQQQAQHLQALQLQPDVTLTSLQKQSLPTSLTNATPAPLAQTSPAQVLSSSRSCSSSPSIYIKDEPCSPAGGCPEEVMTGNGPEATRKKLATIRPQTKQQLKARLQLPTPKNSSSYATSPPHLIINANNELIDTDAGDLEEDLDDFDEDDDVTGRCSPIVGQSETMGADGRLSVGSIYIGDGGDCGRGMGRAHTQARHVPTSRELLYMKFGDFLAARLNTLHETVANELMNKMLLLIAEK

SEQ ID NO: 23254 - DNA, 6435 bp, DROSOPHILA
gaccgaatcttgctcgatgcaccctgcagtgggctgggcaaccggccacagttgtcctgcagcattaaacaggttaaggtcttgtcctcatatccccatattcagcgccggctatttgaacaggcagtgcagctcgttcgtcctggcggcatccttgtatatagcacgtgcaccgtcaccgaggatgagtgcgaatgtcttgtggcctgggcactaagaaaatttgtcgagctgcggctaacagatgccactccccggtggggcggtcccggacttccgcttcccggtttcgaggcatgtaaatctcgtctgttgcagcgcttcggtccaagcggagcaaatgcggacactgtgggcttttttattgcgaagtttcagaaaatataaataaattcaacttcactgaaattttttgtttattgggctcgataatttaaacattcgttttgatttgcaaaagtaagccggcttatgagtgatataagtgagacctacgctagtggtatttgatcaagaaaatttcaaccctacgcttagaaaagcatttgaaaaatgcagtctgataacatttaggctttgctctcccatagctgcttgtgctatcttaatggagatacataatgttatctttttgttttcgagttaaaaagaacttaaataatttacaattcataactaatgtaattttacttaaatctaagtccgtcattgttatttaacgattcttgttaaaagcaaaattatgcatttcgggaactttaaaactttctacgacaaagatttacttaatgattttacgagttgtaagttaaaaggaagtcaaaaatattaccaatcattgatgggaccccgataaatgcatgttttgtttgtgcttgaggaaattactaaatatgatgagaacatcgatgaaggcttttaacgctggcggaatctctcaccttgactgcagtgataattatcgtaaaactgcttgactcccacgataaaataatgttttaaataaggtattcgcataatttatttcatcgttcgatgccttttgtttccccggcgcagcattattgtttcgctagacgtttagcgttctggttcccggtatgctttcgccagaataatattcactactcgccaaacacggctctcagtcagtgctggtgcatacttatggccaagagaatggattggctaggaccaaacaaaagtggaaatgggaagaacccaccaacgtcaggttctttcaatataatagtcttaagaactaagcctaattatatgtacggatactattaacatgattttacgttgggatgttgagcgtcttaaactgatcttcgtgcatctcagtcatcatgaaggttccatcctgaagcaacaaaacaacgcgacgtgtacctcctgaaaaaaaacagaaaatgaacaagtagttagtttttgaagaataatcccctaaatattgctataattttctatgcaattccgatttataaaaaagctacccaatgtatagttctgcaagaagaaaagcaagaaaatgctatcgactatcatctgatagtatctacccctcgagaaacaaacgcacttgcgctgcgaatatatatccctgcttaatcattcagttctctacgttcatacagacagacaacgctagatctgctcgcttattgatcctgattataaatagaaaatatatactttatatcttcaaaaagcttccttctacctgttatgaacttttattattactctacgagtaacggatataaaagccaacacaagaagctggccttgtcaaatttttatgaaaaacacgacttacccggtgaaggcaaatctgcctgtaccacctccgctggtatctgggattccgtgccatcgctgtctgacgtcgtgatatggatctgagctgtgggtggcgttcccgttccagcggcagaagcctccgcttgttgaagcacctggtgttgcgccaactcctcttctgtcatggacacgagaatctgttcaccgtccgccgtagctgctccgacgccgtgagactcgacctgttcaccggcttgaacggcttcggccactgcgtggtccagagaaagaacatcctggtcttctccctctgcggctgccacgtacgcaaattgctgttctccatccgggccctgcgtaacgagaatagtttgtccctccgcattttttcccgctacctggtaaacagtgccgtcctctcctcgcaccagcaaggccgagccgtcctcgttggtaagaacttgttgatcgctgcccagaagggcctgtgccgcggcttctagctgctctcgttgttgctcctgctgttgctcctgctccatttgcagttgggtctcctcctgaccaataagcttgccggtgattggacacaactgagcttggtgctgatgaatctcctcctccaattccatttgcaggggcgttggctggattgttgacttggaaactattctttgccgggcaggagtcgctttctgttgttgactggactgctgctgagacagagcctgtcgctggcgtgcctgggcagagcgctgagccaacaactcttcccgggtcactactttacgcgtaactttcaagtcccctgactttgacagctgtaaaatcttttgctctggcgtaactgccttggcaccctgaggagtttgtacttgttggcgatgttgcggagttccgacaccggctcgtgcaaggactcgaccacccgggtgagcccggccgggcgcctgctgcaagttttgacgcacatgggatgcaccacccactccaggacggcgatgaagtgctgctgttacagggccgtggccgggagttcgaagcgcgtgttgtcgctggcccacagtgatgggcgagttagcgcccgaatgcgcaggacgagccattggcaaacgcttggctatgcctgcggcgggcggcgcagcgatcactttttgcggaacgggtgcaggcgaaacgggtgccggtgcctcggaattttcaacccgaaaaacgcctcttgtgctgctgcccacctcggagcgcgaaagataccgcacgggacactctggtttctcctttttctgcaacgaattaagatcattgttattaattggctgctgcgtagaaatagcattatttcgtaataccaaatttattgtgtttggcatctcgggcttgcgaaacatgccggagctcgtgctatcctcagtatagatgatttcacccattttttgttccgttaggggcgataccacggtggaattgccgttaattttagtctgctgcttttccgtggactgaatccgtggcttgttcaactgcacggagcttcctccgttttttagacgcttcacggtatgggacggaagatcctcttcaaggtcctctaggtccatcgagtcgtttaacccgctcccctctaaacttgagtctgtattgttcagctttcgcttgatcgctccagaagatggtggccattcctgttccgtggaggattcatcttcgtttgccgaggaaggcgaggaggatccatctccggcaacggtttcattgacccactgcttaaaggcatccatagccttggtcttggaagttcgagatggccgagaagacggcgatacctgcgacgacgccggaagtgggctgtgtggggcggcagtatctgactttgcgtttgtccctgatgactgcatgcgcttcagagcatccagacccttctccctagtaagtttttggcgtgccaattgcttttcgaacatctgcaaaaagtatggcacacgctcgagattggccatcacctcccaggtgttttcatgatgcgagcgatcaacccacttaaccaaatactcgtgggtcttacggcgcggattgaagcgcttagcgacaatcttttccactggctcttcggtgcgctgatctgtcttggaatcgatcctaatggctatgcggttgttcggcttcacggctccggcagagggaactgaggaaggcgttggtgtactcggcttggacttgggtctttcgttttctgtatcctttagttgattggctaacgtaggcagcttaccggttggtgattctgttgatttaaatatagtttaataacaagtgtgacttttatttagaatgttttgtattacttctggtaggggagacgctcgtgttgttgttgttgctatttgatgtgttgttattgtttggattgaccacagtctttgttattcgcacaggcatgtcctggagttgtccgtgtgcaattttgccgaatgactgtatggtcttcccagccacaatccacggctcgcggacgctatcgtctagttttacccaatgctggtacaaggcccacgagctgccggacgcgtccttgcgcgagtgcagctgagtagctttccatagcgtaaaagcccagatggtgggcttgggatcgagcgattccttcaaatttgcattttccttttcgcaggcgtcctctttgtgggcctgaaactcttccacgaagttgtaggcccggagacatcgtccacatacaagaacgtccatgtttgccaattcctcctgtgcagctgcagggcagaacacaaaattaacaataaaaattatttaccaatgtttttagtcactcacctcttataatgtttgcgtgtttgccgatttccgtaggtgaaatctcctgtgccaacattattcacgactccagcgcccaagcctttgaagagagcatttaaagtgtgacttaaaaatagtgctgaatggagtcttattatttgttattgcttggttttgaaatattggtaaacggcgaagaaaaagtacagtgccgtggtgtgtttgtgctaacttgaaccaggtggcaacgcgaacggtcgctgtctgcggtgtgtgtccgatatggtgagttcaagcatatgtacatctgcaatgggcaaaatgcagcggcgcttaggcagccgaaaaaaaacactaagtacattatgaaaagaacgagcctgccgcactgttgtagatatataatataataaaacacagaaaagcacgaactatgcgtaatgcgactttattagttacttaaacttatctgttacaaatgcatttgaacttcaacacagctaaaaattaaaataaataaaaccctatggttcgatcctatttgttttcatttaaaaaaaaggattacatatagtttaaataatatcaaagttcacaatttcattttgcccgctaaaccttgcaggcactagatataggccaggtatgattgcaaataagcctattccacatatcattaaattaaaagatttctctagaacactttggtacacaccttcataaacaattttggataaatatcaaactgaatgttgtttcaaacggttattttaatttaactgactcccgatttttcaacacgagcagctccactgctgctcacagttgtacgcgcgaactctgaatgccaaaagcgaaattcggctgcacggaaattgtccagagatgatttggttccggctgtgcggaccttagaatgctcttctgtgctaagctatttaaatcctaatattactgggagtgtattgcctgtcgatagctttaaactaactgcagtccagtaaattttaagatttcgaaggttttttcgaatatagtatatgatataaaacgcgggtttcaatgcttgcacggttttaagtgcccaaacttagggtgtagcgcccttttcagttcgcccgtgtggcggtgcacttagttagccaattacgcgtcgtggtgggtatatttattgatgtggcaactttgggcgcaataataataatattgtactttttttgttcatattaggtaagaaattcgaaattattttttattatttcattttattatgtcattcttttgtagatatttattgatataaatacttacccagggttgccacccagtgtattgtatttaacgtaggccctgtgtgtacacactgttacattagccggcgcattttatttagcgttaattgcttttctttcttgatttgacttggtagtgcatcaggactgcaagtatggccgacgatgagcaagaggaccagaaggagtaccgctgggaaacgggctatgaaaagacatggtgcgatggtgtgcgtgacaatgtaagcccgcacttacttttaatcctattagggaggccatcaaggacgacgaggatgggatgctggatggagccattgcagagatcattcagaaggccaaacgccagaggcaggctcaaaagtccaagcagaaccgcctgggcatgatgcgccacatgttcgttgtgctcgattgctctgagtccatgagcgtgcctgatttgaaacccacacgactgcggtgcaccgtcaagctgctggagctgtttatcgaggagttcttcgatcagaaccccatcagccaa

SEQ ID NO: 23255 - DNA, 3185 bp, DROSOPHILA
cagcagtggagctgctcgtgttgaaaaatcgggagtcagttaaattaaaataaccgtttgaaacaacattcagtttgatatttatccaaaattgtttatgaaggcttgggcgctggagtcgtgaataatgttggcacaggagatttcacctacggaaatcggcaaacacgcaaacattataagagatggacgttcttgtatgtggacgatgtctccgggcctacaacttcgtggaagagtttcaggcccacaaagaggacgcctgcgaaaaggaaaatgcaaatttgaaggaatcgctcgatcccaagcccaccatctgggcttttacgctatggaaagctactcagctgcactcgcgcaaggacgcgtccggcagctcgtgggccttgtaccagcattgggtaaaactagacgatagcgtccgcgagccgtggattgtggctgggaagaccatacagtcattcggcaaaattgcacacggacaactccaggacatgcctgtgcgaataacaaagactgtggtcaatccaaacaataacaacacatcaaatagcaacaacaacaacacgagcgtctcccctaccagaaaatcaccaaccggtaagctgcctacgttagccaatcaactaaaggatacagaaaacgaaagacccaagtccaagccgagtacaccaacgccttcctcagttccctctgccggagccgtgaagccgaacaaccgcatagccattaggatcgattccaagacagatcagcgcaccgaagagccagtggaaaagattgtcgctaagcgcttcaatccgcgccgtaagacccacgagtatttggttaagtgggttgatcgctcgcatcatgaaaacacctgggaggtgatggccaatctcgagcgtgtgccatactttttgcagatgttcgaaaagcaattggcacgccaaaaacttactagggagaagggtctggatgctctgaagcgcatgcagtcatcagggacaaacgcaaagtcagatactgccgccccacacagcccacttccggcgtcgtcgcaggtatcgccgtcttctcggccatctcgaacttccaagaccaaggctatggatgcctttaagcagtgggtcaatgaaaccgttgccggagatggatcctcctcgccttcctcggcaaacgaagatgaatcctccacggaacaggaatggccaccatcttctggagcgatcaagcgaaagctgaacaatacagactcaagtttagaggggagcgggttaaacgactcgatggacctagaggaccttgaagaggatcttccgtcccataccgtgaagcgtctaaaaaacggaggaagctccgtgcagttgaacaagccacggattcagtccacggaaaagcagcagactaaaattaacggcaattccaccgtggtatcgcccctaacggaacaaaaaatgggtgaaatcatctatactgaggatagcacgagctccggcatgtttcgcaagcccgagatgccaaacacaataaatttgaaaaaggagaaaccagagtgtcccgtgcggtatctttcgcgctccgaggtgggcagcagcacaagaggcgtttttcgggttgaaaattccgaggcaccggcacccgtttcgcctgcacccgttccgcaaaaagtgatcgctgcgccgcccgccgcaggcatagccaagcgtttgccaatggctcgtcctgcgcattcgggcgctaactcgcccatcactgtgggccagcgacaacacgcgcttcgaactcccggccacggccctgtaacagcagcacttcatcgccgtcctggagtgggtggtgcatcccatgtgcgtcaaaacttgcagcaggcgcccggccgggctcacccgggtggtcgagtccttgcacgagccggtgtcggaactccgcaacatcgccaacaagtacaaactcctcagggtgccaaggcagttacgccagagcaaaagattttacagctgtcaaagtcaggggacttgaaagttacgcgtaaagtagtgacccgggaagagttgttggctcagcgctctgcccaggcacgccagcgacaggctctgtctcagcagcagtccagtcaacaacagaaagcgactcctgcccggcaaagaatagtttccaagtcaacaatccagccaacgcccctgcaaatggaattggaggaggagattcatcagcaccaagctcagttgtgtccaatcaccggcaagcttattggtcaggaggagacccaactgcaaatggagcaggagcaacagcaggagcaacaacgagagcagctagaagccgcggcacaggcccttctgggcagcgatcaacaagttcttaccaacgaggacggctcggccttgctggtgcgaggagaggacggcactgtttaccaggtagcgggaaaaaatgcggagggacaaactattctcgttacgcagggcccggatggagaacagcaatttgcgtacgtggcagccgcagagggagaagaccaggatgttctttctctggaccacgcagtggccgaagccgttcaagccggtgaacaggtcgagtctcacggcgtcggagcagctacggcggacggtgaacagattctcgtgtccatgacagaagaggagttggcgcaacaccaggtgcttcaacaagcggaggcttctgccgctggaacgggaacgccacccacagctcagatccatatcacgacgtcagacagcgatggcacggaatcccagataccagcggaggtggtacaggcagatttgccttcaccgggaggtacacgtcgcgttgttttgttgcttcaggatggaaccttcatgatgactgagatgcacgaagatcagtttaagacgctcaacatcccaacgtaaaatcatgttaatagtatccgtacatataattaggcttagttcttaagactattatattgaaagaacctgacgttggtgggttcttcccatttccacttttgtttggtcctagccaatccattctcttggccataagtatgcaccagcactgactgagagccgtgtttggcgagtagtgaatattattctggcgaaagcataccgggaaccagaacgctaaacgtctagcgaaacaataatgctgcgccggggaaacaaaaggcatcgaacgatgaaataaattatgcgaataccttattt

SEQ ID NO: 23256 - protein, 899 aa, DROSOPHILA
MDVLVCGRCLRAYNFVEEFQAHKEDACEKENANLKESLDPKPTIWAFTLWKATQLHSRKDASGSSWALYQHWVKLDDSVREPWIVAGKTIQSFGKIAHGQLQDMPVRITKTVVNPNNNNTSNSNNNNTSVSPTRKSPTGKLPTLANQLKDTENERPKSKPSTPTPSSVPSAGAVKPNNRIAIRIDSKTDQRTEEPVEKIVAKRFNPRRKTHEYLVKWVDRSHHENTWEVMANLERVPYFLQMFEKQLARQKLTREKGLDALKRMQSSGTNAKSDTAAPHSPLPASSQVSPSSRPSRTSKTKAMDAFKQWVNETVAGDGSSSPSSANEDESSTEQEWPPSSGAIKRKLNNTDSSLEGSGLNDSMDLEDLEEDLPSHTVKRLKNGGSSVQLNKPRIQSTEKQQTKINGNSTVVSPLTEQKMGEIIYTEDSTSSGMFRKPEMPNTINLKKEKPECPVRYLSRSEVGSSTRGVFRVENSEAPAPVSPAPVPQKVIAAPPAAGIAKRLPMARPAHSGANSPITVGQRQHALRTPGHGPVTAALHRRPGVGGASHVRQNLQQAPGRAHPGGRVLARAGVGTPQHRQQVQTPQGAKAVTPEQKILQLSKSGDLKVTRKVVTREELLAQRSAQARQRQALSQQQSSQQQKATPARQRIVSKSTIQPTPLQMELEEEIHQHQAQLCPITGKLIGQEETQLQMEQEQQQEQQREQLEAAAQALLGSDQQVLTNEDGSALLVRGEDGTVYQVAGKNAEGQTILVTQGPDGEQQFAYVAAAEGEDQDVLSLDHAVAEAVQAGEQVESHGVGAATADGEQILVSMTEEELAQHQVLQQAEASAAGTGTPPTAQIHITTSDSDGTESQIPAEVVQADLPSPGGTRRVVLLLQDGTFMMTEMHEDQFKTLNIPT

SEQ ID NO: 23257 - DNA, 5840 bp, DROSOPHILA
gaccgaatcttgctcgatgcaccctgcagtgggctgggcaaccggccacagttgtcctgcagcattaaacaggttaaggtcttgtcctcatatccccatattcagcgccggctatttgaacaggcagtgcagctcgttcgtcctggcggcatccttgtatatagcacgtgcaccgtcaccgaggatgagtgcgaatgtcttgtggcctgggcactaagaaaatttgtcgagctgcggctaacagatgccactccccggtggggcggtcccggacttccgcttcccggtttcgaggcatgtaaatctcgtctgttgcagcgcttcggtccaagcggagcaaatgcggacactgtgggcttttttattgcgaagtttcagaaaatataaataaattcaacttcactgaaattttttgtttattgggctcgataatttaaacattcgttttgatttgcaaaagtaagccggcttatgagtgatataagtgagacctacgctagtggtatttgatcaagaaaatttcaaccctacgcttagaaaagcatttgaaaaatgcagtctgataacatttaggctttgctctcccatagctgcttgtgctatcttaatggagatacataatgttatctttttgttttcgagttaaaaagaacttaaataatttacaattcataactaatgtaattttacttaaatctaagtccgtcattgttatttaacgattcttgttaaaagcaaaattatgcatttcgggaactttaaaactttctacgacaaagatttacttaatgattttacgagttgtaagttaaaaggaagtcaaaaatattaccaatcattgatgggaccccgataaatgcatgttttgtttgtgcttgaggaaattactaaatatgatgagaacatcgatgaaggcttttaacgctggcggaatctctcaccttgactgcagtgataattatcgtaaaactgcttgactcccacgataaaataatgttttaaataaggtattcgcataatttatttcatcgttcgatgccttttgtttccccggcgcagcattattgtttcgctagacgtttagcgttctggttcccggtatgctttcgccagaataatattcactactcgccaaacacggctctcagtcagtgctggtgcatacttatggccaagagaatggattggctaggaccaaacaaaagtggaaatgggaagaacccaccaacgtcaggttctttcaatataatagtcttaagaactaagcctaattatatgtacggatactattaacatgattttacgttgggatgttgagcgtcttaaactgatcttcgtgcatctcagtcatcatgaaggttccatcctgaagcaacaaaacaacgcgacgtgtacctcctgaaaaaaaacagaaaatgaacaagtagttagtttttgaagaataatcccctaaatattgctataattttctatgcaattccgatttataaaaaagctacccaatgtatagttctgcaagaagaaaagcaagaaaatgctatcgactatcatctgatagtatctacccctcgagaaacaaacgcacttgcgctgcgaatatatatccctgcttaatcattcagttctctacgttcatacagacagacaacgctagatctgctcgcttattgatcctgattataaatagaaaatatatactttatatcttcaaaaagcttccttctacctgttatgaacttttattattactctacgagtaacggatataaaagccaacacaagaagctggccttgtcaaatttttatgaaaaacacgacttacccggtgaaggcaaatctgcctgtaccacctccgctggtatctgggattccgtgccatcgctgtctgacgtcgtgatatggatctgagctgtgggtggcgttcccgttccagcggcagaagcctccgcttgttgaagcacctggtgttgcgccaactcctcttctgtcatggacacgagaatctgttcaccgtccgccgtagctgctccgacgccgtgagactcgacctgttcaccggcttgaacggcttcggccactgcgtggtccagagaaagaacatcctggtcttctccctctgcggctgccacgtacgcaaattgctgttctccatccgggccctgcgtaacgagaatagtttgtccctccgcattttttcccgctacctggtaaacagtgccgtcctctcctcgcaccagcaaggccgagccgtcctcgttggtaagaacttgttgatcgctgcccagaagggcctgtgccgcggcttctagctgctctcgttgttgctcctgctgttgctcctgctccatttgcagttgggtctcctcctgaccaataagcttgccggtgattggacacaactgagcttggtgctgatgaatctcctcctccaattccatttgcaggggcgttggctggattgttgacttggaaactattctttgccgggcaggagtcgctttctgttgttgactggactgctgctgagacagagcctgtcgctggcgtgcctgggcagagcgctgagccaacaactcttcccgggtcactactttacgcgtaactttcaagtcccctgactttgacagctgtaaaatcttttgctctggcgtaactgccttggcaccctgaggagtttgtacttgttggcgatgttgcggagttccgacaccggctcgtgcaaggactcgaccacccgggtgagcccggccgggcgcctgctgcaagttttgacgcacatgggatgcaccacccactccaggacggcgatgaagtgctgctgttacagggccgtggccgggagttcgaagcgcgtgttgtcgctggcccacagtgatgggcgagttagcgcccgaatgcgcaggacgagccattggcaaacgcttggctatgcctgcggcgggcggcgcagcgatcactttttgcggaacgggtgcaggcgaaacgggtgccggtgcctcggaattttcaacccgaaaaacgcctcttgtgctgctgcccacctcggagcgcgaaagataccgcacgggacactctggtttctcctttttctgcaacgaattaagatcattgttattaattggctgctgcgtagaaatagcattatttcgtaataccaaatttattgtgtttggcatctcgggcttgcgaaacatgccggagctcgtgctatcctcagtatagatgatttcacccattttttgttccgttaggggcgataccacggtggaattgccgttaattttagtctgctgcttttccgtggactgaatccgtggcttgttcaactgcacggagcttcctccgttttttagacgcttcacggtatgggacggaagatcctcttcaaggtcctctaggtccatcgagtcgtttaacccgctcccctctaaacttgagtctgtattgttcagctttcgcttgatcgctccagaagatggtggccattcctgttccgtggaggattcatcttcgtttgccgaggaaggcgaggaggatccatctccggcaacggtttcattgacccactgcttaaaggcatccatagccttggtcttggaagttcgagatggccgagaagacggcgatacctgcgacgacgccggaagtgggctgtgtggggcggcagtatctgactttgcgtttgtccctgatgactgcatgcgcttcagagcatccagacccttctccctagtaagtttttggcgtgccaattgcttttcgaacatctgcaaaaagtatggcacacgctcgagattggccatcacctcccaggtgttttcatgatgcgagcgatcaacccacttaaccaaatactcgtgggtcttacggcgcggattgaagcgcttagcgacaatcttttccactggctcttcggtgcgctgatctgtcttggaatcgatcctaatggctatgcggttgttcggcttcacggctccggcagagggaactgaggaaggcgttggtgtactcggcttggacttgggtctttcgttttctgtatcctttagttgattggctaacgtaggcagcttaccggttggtgattctgttgatttaaatatagtttaataacaagtgtgacttttatttagaatgttttgtattacttctggtaggggagacgctcgtgttgttgttgttgctatttgatgtgttgttattgtttggattgaccacagtctttgttattcgcacaggcatgtcctggagttgtccgtgtgcaattttgccgaatgactgtatggtcttcccagccacaatccacggctcgcggacgctatcgtctagttttacccaatgctggtacaaggcccacgagctgccggacgcgtccttgcgcgagtgcagctgagtagctttccatagcgtaaaagcccagatggtgggcttgggatcgagcgattccttcaaatttgcattttccttttcgcaggcgtcctctttgtgggcctgaaactcttccacgaagttgtaggcccggagacatcgtccacatacaagaacgtccatgtttgccaattcctcctgtgcagctgcagggcagaacacaaaattaacaataaaaattatttaccaatgtttttagtcactcacctcttataatgtttgcgtgtttgccgatttccgtaggtgaaatctcctgtgccaacattattcacgactccagcgcccaagcctttgaagagagcatttaaagtgtgacttaaaaatagtgctgaatggagtcttattatttgttattgcttggttttgaaatattggtaaacggcgaagaaaaagtacagtgccgtggtgtgtttgtgctaacttgaaccaggtggcaacgcgaacggtcgctgtctgcggtgtgtgtccgatatggtgagttcaagcatatgtacatctgcaatgggcaaaatgcagcggcgcttaggcagccgaaaaaaaacactaagtacattatgaaaagaacgagcctgccgcactgttgtagatatataatataataaaacacagaaaagcacgaactatgcgtaatgcgactttattagttacttaaacttatctgttacaaatgcatttgaacttcaacacagctaaaaattaaaataaataaaaccctatggttcgatcctatttgttttcatttaaaaaaaaggattacatatagtttaaataatatcaaagttcacaatttcattttgcccgctaaaccttgcaggcactagatataggccaggtatgattgcaaataagcctattccacatatcattaaattaaaagatttctctagaacactttggtacacaccttcataaacaattttggataaatatcaaactgaatgttgtttcaaacggttattttaatttaactgactcccgatttttcaacacgagcagctccactgctgctcacagttgtacgcgcgaactctgaatgccaaaagcgaaattcggctgcacggaaattgtccagagatgatttggttccggctgtgcggaccttagaatgctcttctgtgctaagctatttaaatcctaatattactgggagtgtattgcctgtcgatagctttaaactaactgcagtccagtaaattttaagatttcgaaggttttttcgaatatagtatatgatataaaacgcgggtttcaatgcttgcacggttttaagtgcccaaacttagggtgtagcgcccttttcagttcgcccgtgtggcggtgcacttagttagccaattacgcgtcgtggtgggtatatttattgatgtggcaactttgggcgcaataataataatattgtactttttttgttc

SEQ ID NO: 23258 - DNA, 3228 bp, DROSOPHILA
aacacaccacggcactgtactttttcttcgccgtttaccaatatttcaaaaccaagcaataacaaataataagactccattcagcactatttttaagtcacactttaaatgctctcttcaaaggcttgggcgctggagtcgtgaataatgttggcacaggagatttcacctacggaaatcggcaaacacgcaaacattataagagctgcacaggaggaattggcaaacatggacgttcttgtatgtggacgatgtctccgggcctacaacttcgtggaagagtttcaggcccacaaagaggacgcctgcgaaaaggaaaatgcaaatttgaaggaatcgctcgatcccaagcccaccatctgggcttttacgctatggaaagctactcagctgcactcgcgcaaggacgcgtccggcagctcgtgggccttgtaccagcattgggtaaaactagacgatagcgtccgcgagccgtggattgtggctgggaagaccatacagtcattcggcaaaattgcacacggacaactccaggacatgcctgtgcgaataacaaagactgtggtcaatccaaacaataacaacacatcaaatagcaacaacaacaacacgagcgtctcccctaccagaaaatcaccaaccggtaagctgcctacgttagccaatcaactaaaggatacagaaaacgaaagacccaagtccaagccgagtacaccaacgccttcctcagttccctctgccggagccgtgaagccgaacaaccgcatagccattaggatcgattccaagacagatcagcgcaccgaagagccagtggaaaagattgtcgctaagcgcttcaatccgcgccgtaagacccacgagtatttggttaagtgggttgatcgctcgcatcatgaaaacacctgggaggtgatggccaatctcgagcgtgtgccatactttttgcagatgttcgaaaagcaattggcacgccaaaaacttactagggagaagggtctggatgctctgaagcgcatgcagtcatcagggacaaacgcaaagtcagatactgccgccccacacagcccacttccggcgtcgtcgcaggtatcgccgtcttctcggccatctcgaacttccaagaccaaggctatggatgcctttaagcagtgggtcaatgaaaccgttgccggagatggatcctcctcgccttcctcggcaaacgaagatgaatcctccacggaacaggaatggccaccatcttctggagcgatcaagcgaaagctgaacaatacagactcaagtttagaggggagcgggttaaacgactcgatggacctagaggaccttgaagaggatcttccgtcccataccgtgaagcgtctaaaaaacggaggaagctccgtgcagttgaacaagccacggattcagtccacggaaaagcagcagactaaaattaacggcaattccaccgtggtatcgcccctaacggaacaaaaaatgggtgaaatcatctatactgaggatagcacgagctccggcatgtttcgcaagcccgagatgccaaacacaataaatttgaaaaaggagaaaccagagtgtcccgtgcggtatctttcgcgctccgaggtgggcagcagcacaagaggcgtttttcgggttgaaaattccgaggcaccggcacccgtttcgcctgcacccgttccgcaaaaagtgatcgctgcgccgcccgccgcaggcatagccaagcgtttgccaatggctcgtcctgcgcattcgggcgctaactcgcccatcactgtgggccagcgacaacacgcgcttcgaactcccggccacggccctgtaacagcagcacttcatcgccgtcctggagtgggtggtgcatcccatgtgcgtcaaaacttgcagcaggcgcccggccgggctcacccgggtggtcgagtccttgcacgagccggtgtcggaactccgcaacatcgccaacaagtacaaactcctcagggtgccaaggcagttacgccagagcaaaagattttacagctgtcaaagtcaggggacttgaaagttacgcgtaaagtagtgacccgggaagagttgttggctcagcgctctgcccaggcacgccagcgacaggctctgtctcagcagcagtccagtcaacaacagaaagcgactcctgcccggcaaagaatagtttccaagtcaacaatccagccaacgcccctgcaaatggaattggaggaggagattcatcagcaccaagctcagttgtgtccaatcaccggcaagcttattggtcaggaggagacccaactgcaaatggagcaggagcaacagcaggagcaacaacgagagcagctagaagccgcggcacaggcccttctgggcagcgatcaacaagttcttaccaacgaggacggctcggccttgctggtgcgaggagaggacggcactgtttaccaggtagcgggaaaaaatgcggagggacaaactattctcgttacgcagggcccggatggagaacagcaatttgcgtacgtggcagccgcagagggagaagaccaggatgttctttctctggaccacgcagtggccgaagccgttcaagccggtgaacaggtcgagtctcacggcgtcggagcagctacggcggacggtgaacagattctcgtgtccatgacagaagaggagttggcgcaacaccaggtgcttcaacaagcggaggcttctgccgctggaacgggaacgccacccacagctcagatccatatcacgacgtcagacagcgatggcacggaatcccagataccagcggaggtggtacaggcagatttgccttcaccgggaggtacacgtcgcgttgttttgttgcttcaggatggaaccttcatgatgactgagatgcacgaagatcagtttaagacgctcaacatcccaacgtaaaatcatgttaatagtatccgtacatataattaggcttagttcttaagactattatattgaaagaacctgacgttggtgggttcttcccatttccacttttgtttggtcctagccaatccattctcttggccataagtatgcaccagcactgactgagagccgtgtttggcgagtagtgaatattattctggcgaaagcataccgggaaccagaacgctaaacgtctagcgaaacaataatgctgcgccggggaaacaaaaggcatcgaacgatgaaataaattatgcgaataccttattt

SEQ ID NO: 23259 - protein, 899 aa, DROSOPHILA; identical to SEQ ID NO: 23256

SEQ ID NO: 23260 - DNA, 5269 bp, DROSOPHILA
gcgtccactctccgcttccaccaggcaaacccctttgcgcaaatttaaatgggaatttatatttctactaattaacttatttaggatacatttactcacaatttgatagataactgcggggaaagtcatggcgcaacagctccttggccaactgacaacgcgtgagcagcttagactcggtctcccattgcgaaagcaggagaagattgagcaccaggaagagcgcaccacctttgggcaagtgactggccatgctgggttgggaggggcttgtaatgttggagggaccactgctaatccttttgggttcgaaagatccaagaagcgcttccctccgcggcaactgcgagcactgggcactttgctgcggaattatttctacggcactggatgcgtagcgcccgaaatctgggtttttaaagcctcgcacgcagtttttgttttcttctccaagtgggaggcgacattcgggagcggtctggtgacatggaaaaatcgtgcgggttactcatcgatggggatactcccatcccagttttaatacaaaaaatgtttgaactaattttgtctgggcaatctcgaatgtatctcaatctttgccagcttaaaaaatatgacttttattttgttaccatgtgggattagaaaaaagcaacctagtttagctctcagtgcattcaataaatcgctttgattgcgttaagccgtaaattggcaaattgtcttgcagagataacaatgggaatctttagcccgaaacgcatccactagatactggttactggacacagatgcactatgtgtgggtgtttgtgtgtcagagtgtcagtgacaactgcggcttgacctaaaaacgcatgatctgttgttgtgcgaggagagcaagtgcatcccgcccagtatccaagcatccaagcatccagacatccaagtgttttcgtttttcaatgctcgtcccactaatttccatgaaaatttttccacttacagtgcaattctcatgctcttgctgctgtgcactttggcagcggccaatgacctcaaggatctgctagaggacagcaccaccagttccagcaccagcaccacctccagcaccattccctcttcagtaacctcgcccaccacgcccaccgcctatgtggtatcggcggcagcggttcccgccctcgttgccggcagaggaaagtccaagtccacatccggaaagtatgtgaacaagagctcgccgaggaagcgcaaggcggagcaggtgtcctcgctgccgctgcccgtggatgatgccctcatggagtggaagtgccccaatatcacgggtacccggaacgcggaactcgagtgcggatgcgatctgcctcacacacttcgatgcaacattgatctgcacgggatgatggtgagatatttctaggcattttccagatttatctatacaatttagatgattgagatagagatttattcgatcaattcattttatgcttatatttttctatttatttagcatgctatcttaatatttaaagtcgtatattaacctctgatttcggagtcgaatgcacctatcttatcagtattatcaatgatatttgtgatttatacttagatttaattaatttaaaatcacaaataggcagtgggattttcaattgactccgtggcgcaacggtagcgcgtctgactccagatcagaaggttgcgtgttcaaatcacgtcggggtcagaggtaacatattttgcactctaaatattctgtttaaaaatcatattttgatgttgaaaatatgtatacttcgcgcatcaatatgagggatattatgagctattaatttttacaaaatatatatattttaactctcaactttgaccccgacgtgatttgaacaccgcaaccttctgatctggagtcagacgcgctaccgttgcgccacggagtctagttagtaagacttttaaaatatttcttaataaataaataatctactaactaataagtaatatacaaatatttatagagtattgataagtacatctttgctttgtagcttgatttctaacataattataccttctacagctcctggcggatcgactacgcacttctccctactccatatcattgctggactgttccttgcgcaacgtgaccttcctgagcgacgcgaagatcttcgacaatgtctcgctccacggactagtaatctcgtccggagagatcaagcgggtacacaagtccgccttcctgggcattcgaggaccgctgcaagcactcggtctgcccgggaacgcactgatgagcgtgccctggaacgccctgtccacgctgagcgccttggagcgcttggatctggccaataacaagatcaaggctctgggaacggcggactttgtgggattgactagcttggtttatctggagctgagcaacaatcaaatctctagcatatcccaacgcacgtttgttaatcttcgaaagctggaggtgctgaagctgggcgggaatcgattgggtgactatgcccaaagcttgaggtcactgagtcagtgcctcagtctgcgacaactggacttgcaggccaataacctgaatggaccactgagcgagcaaacgctgcccggaatgaggaacctcgagagcttgaatctcaatcggaatctgatcaagagcatccagaacaaggctttggccaatttctcgagactggtgagcctctcactgcgtcacaaccagatcgatgtgctgcaggatcacgccttcttcggcttgggtgcactggacagcttggatctgagctacaacggcatcgtagccatctccagtgcctcactgcagcatttgtcacgtttgaccgtacttgatcttacacacaacttcctgcgagcactgacctcggatttgatagcaccgctaccatctcttcgggagttgcgattggcgggcaatgacatctcgattgtggcaagaaacgccatggacggagcgagggaactggagagcctgcagatgcaggagaatcccctgtcctgtgactgcagcattcgtccatttgccgagtggctgcaggagtcgcagctccattccagtctgagtgcctcgtgtgtgacgcccccgagactggaaggagctcctctactccaggtgcccgtggagacgctcagctgcgacatggacaacgtggagaaggataacgccaacatcatgcagcacctggaaacgttagccaagcccaatcagacgtcgcccatcaaagatttgtccgaagaggtcagtactataataaagaaattcgctgtaacaacgtgtaatacttatcattatccttaccacagattattctacatgagctgcacttttcgacagactatggactgatcctcacctggctactcaatctgagcaaaaaggactacatgtgcgatgcaatctttgtttacaaggaggagcacatcaacgaaattctaatagataactcaccggtaattaatgtggataaaccgatcatgaaggatcttttcttattccataatttgattccttgcagatccattgcgagagtaaagtggtcaatggccagaacacagtcagcgtcatagtgccggacagttcctccctggaaataggcgagaggtgagttgtccaccgaccgattaccagaattaataactaatgtgcactttccgtgaagctatcgattttgtctggtcatgatccaggagcagaagcccgactcggaactgaacatcggctgctccaacatcacgcgactggagcggagcagtccaggtgccgttcccgtgtcccgtcagtatcagcgacgtccctactataacgccaatgagctgaagcccgaggtggtgcacgatgctggtgaggattaccaggtgaatcaacgccgcttcaattcggtggtaggaagtcaaccgcaacagacgcagcaatcgactttgctgcacagctacacggtcattgattcgctaaacaagagcttcttgccgggactgggtcttggagtgctggtcacctccgtgctggttctgatctggggagccacgcggattcggcagactggcggtagcagtggcggcggtgggaggaatggcgatagcatcgatagcaacagcagcagcatgcacaacaataacaacaacagcagaccgggcactccgacggccaccacctgttacgccgcctcggatcacatagcccgcctggcggatgcggaaaatgggacgcgctacctcaagctgcaggcaacgacgagcctgtgaggaggcacggatcacgatgcagcaggatgtgactcctgcccactcaataaaccatgtgatagtacagtacggactgtaccgactcttgatatacacatatattatatatacatataaacgtagtcctaaggtacactgcactaatcccaatagttggcccacactaacccatttgtgccataagctaatcgatacgcatccctaagctcccatttatcaaagaaatagttacagtggcggcggccaaaggaaaatccctaaaataataaactagaatttgtataaaaatattgatttgtattgtgaatcgtatttgaactggttagtgtatgctattgacctctactgtaactaattccccaatcgaaaaccccttgcgtctcatccagagaactagtgttaacttagtgttacgcctcctttatgttagcaatgaaactcgtaagtcatggatggccctttagaattacggctttaataatttattaacaaattcaaagcacacaataggaaagaaaaacataacatcaagtaaataaaagtgaaatgagcaatgagaaaccaactgccaattggaattggattggggtttcctaaggtcagttgggcaatttttcaggtttctatttttgggcaggcctacgacggccaaaaggccgcataatgctaagtgggctattaaccccacaaccatgacgtcatgtatggcacgaatatccatatgcgcggtggagagaataagttaatttcccattcaaatgagctcatagctggccacatcccacgccatcccacgtcatggtcaatggggtcccgggggagcacaactccacgggcgtatgcatatggggtactctgcgtggctccttatcaatcattgctgaatttatcgacatgtacggaatttttaatgcttatccagaaatcaaagttgacagggaaaaaagctggacggcgaaagcccccatcctccattgctccgttgctgtttcgttttctg

SEQ ID NO: 23261 - DNA, 2400 bp, DROSOPHILA
atgctcttgctgctgtgcactttggcagcggccaatgacctcaaggatctgctagaggacagcaccaccagttccagcaccagcaccacctccagcaccattccctcttcagtaacctcgcccaccacgcccaccgcctatgtggtatcggcggcagcggttcccgccctcgttgccggcagaggaaagtccaagtccacatccggaaagtatgtgaacaagagctcgccgaggaagcgcaaggcggagcaggtgtcctcgctgccgctgcccgtggatgatgccctcatggagtggaagtgccccaatatcacgggtacccggaacgcggaactcgagtgcggatgcgatctgcctcacacacttcgatgcaacattgatctgcacgggatgatgctcctggcggatcgactacgcacttctccctactccatatcattgctggactgttccttgcgcaacgtgaccttcctgagcgacgcgaagatcttcgacaatgtctcgctccacggactagtaatctcgtccggagagatcaagcgggtacacaagtccgccttcctgggcattcgaggaccgctgcaagcactcggtctgcccgggaacgcactgatgagcgtgccctggaacgccctgtccacgctgagcgccttggagcgcttggatctggccaataacaagatcaaggctctgggaacggcggactttgtgggattgactagcttggtttatctggagctgagcaacaatcaaatctctagcatatcccaacgcacgtttgttaatcttcgaaagctggaggtgctgaagctgggcgggaatcgattgggtgactatgcccaaagcttgaggtcactgagtcagtgcctcagtctgcgacaactggacttgcaggccaataacctgaatggaccactgagcgagcaaacgctgcccggaatgaggaacctcgagagcttgaatctcaatcggaatctgatcaagagcatccagaacaaggctttggccaatttctcgagactggtgagcctctcactgcgtcacaaccagatcgatgtgctgcaggatcacgccttcttcggcttgggtgcactggacagcttggatctgagctacaacggcatcgtagccatctccagtgcctcactgcagcatttgtcacgtttgaccgtacttgatcttacacacaacttcctgcgagcactgacctcggatttgatagcaccgctaccatctcttcgggagttgcgattggcgggcaatgacatctcgattgtggcaagaaacgccatggacggagcgagggaactggagagcctgcagatgcaggagaatcccctgtcctgtgactgcagcattcgtccatttgccgagtggctgcaggagtcgcagctccattccagtctgagtgcctcgtgtgtgacgcccccgagactggaaggagctcctctactccaggtgcccgtggagacgctcagctgcgacatggacaacgtggagaaggataacgccaacatcatgcagcacctggaaacgttagccaagcccaatcagacgtcgcccatcaaagatttgtccgaagagattattctacatgagctgcacttttcgacagactatggactgatcctcacctggctactcaatctgagcaaaaaggactacatgtgcgatgcaatctttgtttacaaggaggagcacatcaacgaaattctaatagataactcaccgatccattgcgagagtaaagtggtcaatggccagaacacagtcagcgtcatagtgccggacagttcctccctggaaataggcgagagctatcgattttgtctggtcatgatccaggagcagaagcccgactcggaactgaacatcggctgctccaacatcacgcgactggagcggagcagtccaggtgccgttcccgtgtcccgtcagtatcagcgacgtccctactataacgccaatgagctgaagcccgaggtggtgcacgatgctggtgaggattaccaggtgaatcaacgccgcttcaattcggtggtaggaagtcaaccgcaacagacgcagcaatcgactttgctgcacagctacacggtcattgattcgctaaacaagagcttcttgccgggactgggtcttggagtgctggtcacctccgtgctggttctgatctggggagccacgcggattcggcagactggcggtagcagtggcggcggtgggaggaatggcgatagcatcgatagcaacagcagcagcatgcacaacaataacaacaacagcagaccgggcactccgacggccaccacctgttacgccgcctcggatcacatagcccgcctggcggatgcggaaaatgggacgcgctacctcaagctgcaggcaacgacgagcctgtga

SEQ ID NO: 23262 - protein, 799 aa, DROSOPHILA
MLLLLCTLAAANDLKDLLEDSTTSSSTSTTSSTIPSSVTSPTTPTAYVVSAAAVPALVAGRGKSKSTSGKYVNKSSPRKRKAEQVSSLPLPVDDALMEWKCPNITGTRNAELECGCDLPHTLRCNIDLHGMMLLADRLRTSPYSISLLDCSLRNVTFLSDAKIFDNVSLHGLVISSGEIKRVHKSAFLGIRGPLQALGLPGNALMSVPWNALSTLSALERLDLANNKIKALGTADFVGLTSLVYLELSNNQISSISQRTFVNLRKLEVLKLGGNRLGDYAQSLRSLSQCLSLRQLDLQANNLNGPLSEQTLPGMRNLESLNLNRNLIKSIQNKALANFSRLVSLSLRHNQIDVLQDHAFFGLGALDSLDLSYNGIVAISSASLQHLSRLTVLDLTHNFLRALTSDLIAPLPSLRELRLAGNDISIVARNAMDGARELESLQMQENPLSCDCSIRPFAEWLQESQLHSSLSASCVTPPRLEGAPLLQVPVETLSCDMDNVEKDNANIMQHLETLAKPNQTSPIKDLSEEIILHELHFSTDYGLILTWLLNLSKKDYMCDAIFVYKEEHINEILIDNSPIHCESKVVNGQNTVSVIVPDSSSLEIGESYRFCLVMIQEQKPDSELNIGCSNITRLERSSPGAVPVSRQYQRRPYYNANELKPEVVHDAGEDYQVNQRRFNSVVGSQPQQTQQSTLLHSYTVIDSLNKSFLPGLGLGVLVTSVLVLIWGATRIRQTGGSSGGGGRNGDSIDSNSSSMHNNNNNSRPGTPTATTCYAASDHIARLADAENGTRYLKLQATTSL

SEQ ID NO: 23263 - DNA, 3253 bp, DROSOPHILA
ggcgctacttgctgttgggccagggcgattttattagcattctgattgaaaacatgaagttagttttcttgatgaatgtaattgaaacttttcaatttctaatgtaacacttgaaaatcgccttttcaggaacgaactggagcgaccgggccttgatatatatgctaacgatctcacctccatgttggattccgctctgcgctgtacgaatgcccagtacgatgatcctgatattctaaaccatctcgatgtgattgttcaacgaccgttcaacggtgatattggctggaacatcatctcgctgcagtacattgtccacggaccactggccgccatgctggagtcgaccatgccaacgtacaaggtgctcttcaagccactctggcgcatgaagcacatggagtttgtgctctcgatgaagatctggaaggagcagatgggcaacgcaaaggtaagtggctggctattagacttcttatcggttgtttcgagtgcatgcacatattttagattgccaagtgccactcagagtgcacatggtgattccagtggtcagcgaactgctagcaagcggactctgctttcaatacacaagtttggcttttgttcccaaggtaaattgggtcaaacttttgactgattggctaggaggcaattagggaaattataaatatatagggaatatcttgacttgtttgagttctttgactgcctgatttatgaacttaccaaacctaaaatcaagcttatctggttgagaaagctactatacggatttttagaggttttcaaagattacaaacaatttataggctaatctggcaacaggcagttgtgggggaatctatttttgtggttcgaagtgaagtcgaagttcgaaaggttttagccaagaaatcgactacaagagcttgataagattgcccgctcttgtaatctaatccgcagcgattacccacttaccgataaaacccatttgtagtatcaaagtgcacaggaatttgtcgttttcgccttatgtattattttctagttttgtagacgggtttttccgtacaaaaataacattaattatgtggtgaaacaaaaacacgaatacagattacaaattacacacacgaaaaaaaaaaaaaattgtgtaaaagggaacacacacacactgtctcgttgaggaatgtgctaactgggctgggttattgttgatcactccttttttacaacttggcgtcggtcttcaggagcggcgccagcttctgggtgagcatgatgttgccggcgatcttcagcttgcccttcatgaaggcagcctgggggttcagcttgcccagggcgatgtcaaccatgtcctcgtcggcgaccgtcaaggtggtgtccaccttgatgccctgggcaggtccctcgtaggccttggcgttcttgcagtccagagctgaaagtggtattcgttaataggttgttcatttgctcattggacttggaatatgctaccaaagtagacattcgattcttaaaactagcagataacttagcggatttaacttagcacgatttaatgtatgtatatatgacaacgttttaaagtgacttcttgtgcaacaagtggcatacatacatgcatatatggcaagtatgttgttctgttgctgtaatatatattctctaaatcgtgcaaataggcaattcagtggcttttgttaatgccaacagctggtgccgaagtacaaacgccgtgcactttgaactgtgactattacaaaatgcaaaacacacacacacgcaaagacgacgtactagtattctccactggccaggagcgccaacagaagggggcttagcaactggggggtaggaaaatcaccaactcagagtccgaaagtccccttcggattgagcccatctatgtacatacgcccctgtgctgcgcgttgggagtgtgtgtgtgtgtggtgcgtgtttttatgggctccattgggcgatggataactgatacttactccactccttggccaccttgccgtccttggtgattttgtacaggaacacaccgttgaccgccttggccttggcctcgttctccttcagtccatcgatgatcttttggaaaacggcgtccgactgcagagacatggttgttgttgttgttgttgtgggggtatttctgtgtgtatgcggttttgtttttccggaagaataaagaaaatattcagtgggcttgtgcgtcgtagaaataaaagaaaagtgcttacgctttgagagcggaacgcgaagtaatgagcagaaggcgtgcaatcggcgattttattgtcgcttttttcactacactgcccctgttgtgtgggagcgggatggtcgtatagcaagttgccggtcgcgatatgtcgccctcactcgcacctgttgcattcgcataagccttgttgtgctgttattgtcgcgctccctctctctctcgctctcttccaaatgttagccagctgatgcacagtgggcatgaactcaaaataaagtggctgcacgaaaaccttttgcatatcagatatagcttttatttatatcgtttatgcgatatttctttcattaagctgaattgaaattctgatatttgatgatatcagaatgaaaaagtaaataactgtatcgatatcatttggttttcaccgcttgttagcccactgttacaggtgtggagtttagactttaacattaacatgaaacgcctaacatgaagccgtaacagcggttatcagctgttgtccacgatttagtgcaaagtgcgcacccagtttgaaatgcccataaaacggcgataaggcttgaagactcttcagattatttcgacaaaatatgtcacctaacgagcccattgagaaaatatttttaaccccccaaatgccatatatcgtgattcgattcataaaacgcaagcattattcagtactattattttgcattgaccaatggatttcagttagtaaatgcatcaatttatagggttaaacgacaagtagaatgtgcgttcgtatcagcttcacttccttatgagctctcgaacttttccggatcgattccggccttcttcatttccacggcaatggagaagagatagtcatagcattccgacctggttgtaaaaagagagataaacgattaggtctataaaagtgctcggtgtctgagaataagtgaggcaacccacatggttttggccttctcccagttctgtccccaaacgtagacgccgtgtcgtcgaacc

SEQ ID NO: 23264 - DNA, 688 bp, DROSOPHILA
tcaaagcgtaagcacttttcttttatttctacgacgcacaagcccactgaatattttctttattcttccggaaaaacaaaaccgcatacacacagaaatacccccacaacaacaacaacaacaaccatgtctctgcagtcggacgccgttttccaaaagatcatcgatggactgaaggagaacgaggccaaggccaaggcggtcaacggtgtgttcctgtacaaaatcaccaaggacggcaaggtggccaaggagtggactctggactgcaagaacgccaaggcctacgagggacctgcccagggcatcaaggtggacaccaccttgacggtcgccgacgaggacatggttgacatcgccctgggcaagctgaacccccaggctgccttcatgaagggcaagctgaagatcgccggcaacatcatgctcacccagaagctggcgccgctcctgaagaccgacgccaagttgtaaaaaaggagtgatcaacaataacccagcccagttagcacattcctcaacgagacagtgtgtgtgtgttcccttttacacaattttttttttttttcgtgtgtgtaatttgtaatctgtattcgtgtttttgtttcaccacataattaatgttatttttgtacggaaaaacccgtctacaaaactagaaaataatacataaggcgaaaacgacaaa

SEQ ID NO: 23265 - protein, 115 aa, DROSOPHILA
MSLQSDAVFQKIIDGLKENEAKAKAVNGVFLYKITKDGKVAKEWTLDCKNAKAYEGPAQGIKVDTTLTVADEDMVDIALGKLNPQAAFMKGKLKIAGNIMLTQKLAPLLKTDAKL

SEQ ID NO: 23266 - DNA, 9236 bp, DROSOPHILA
aataacttaaaatcctcaaacacatttagtttcactcatggtgactccgtcatatattgtttaatcgcactcattgttatatgtcatttgtttaatcggagtcaccgttaccaagcactattatcggaaagtatagaagtgcgatatataaacaaatgcgttcggtttaaagtggggagtgtactatgtccaactaatattaacaccattgatattagcagattaggctggaataacgttcagaatgctctgaacttgtgttagccgagtccaaaacatactgattcgttatcggagcgacacgcttgactttccccatccgaaatccagtgtccatatcagttggtatatagcttatgtatgtacattctgaacgaaatacacatgcattcagttctgataatgaatgccagcggccctagtcgagtatatgttcggttcgtggagtaacaatccactcagtgtcgaccggcatttgcgttgaaaaggtgtgttctgttctcggagagattaaaatagcgaattcagagtgttttttttgggtaagccagctgttttctgtgcaccgactggatatgcttatttatggtgcaattaggttgcgccatttagtgaacaaccagttgttttcgttggaaacgagtattactcttttgcagttgtgccaaaataaataagtgtttgaaaaactgttacgtgtttgcatagtttaagtttaccgctatggaaagttacagactgaacgacattagcaaacactggattagcagtgacatgaaccaagattaacttaacacttactattgttttacaaataaaacgaaaacttaaatgtttacgccaatagactgtagttacatcccgataatttttaaagaaccactttaaactttattattgtcgaaatttacgactgtagctcgtcttatattaggcgccctttggcactttttagctacaaattcgaagcccagcgcggtcacactggcagcaagtttcgcattcagatccgatccaaatcttgaaatatacaagttttgttgtcgcggtgaacggttgtcaaagcgcgtcaactgcatgcgtttatatcttttttcttcctgctgacggtaccgaaaagtacacataattttaacaacaaacagaagacgcacaaccgaaacaacggtagatgcgtaacgaacgaaagtgaaagagtgtcagtgttgtttacatttgccgtgccacccgctcccgctcacgacccctttccctttctcctgaaacgcagaaccagaaccagaaaccgaaagtccaattgggatcttcacatcacaaccggaaagtcaacaacaacaacccgagcagctccaatccgaatccgagtccgacagaatggccaattttgacgatgtgagtgtccaattaggcaatttattgcgagcgagagaaagagatgtgtaacgattattaactttaactgacacatatgttgttaaatgtatgaacgaaacacacacagacgaactccgtgcacgtaacgaacattaagcgccttattttagtttgattttgatttgatttttatttgaatttttcgccgcttcgtcgttatcctcccgtctgtatgcgtgttgcatgttgctattgctattgcgtatgtgaaatcgcaactgcctcctacgaacaaccatgacaacaactacaacatctacaacaacgttggtcggactggaaactccaattgggatggctaacgaaaacaacaaaaacaacaacaacgaccagacgttgcaacgcgcccgccttgccttttccagtggaaagaccaggaatgtcagctttcggtgagtttacttttatttcggcactttattcgcttgctgtcagttaattttttgcaaaggctcctcgtcttggccaacatattgcgttaaaactgccgcttgagtggagattgtgtcatatatttcgctgattacattggttgggaggatctggaaagtggaagtgggttaacttccagcaagcgggactggaattaaaatcgccgtggaagttatttgaaatcttcacatcttcattctattccgcttttgttttgaatttcattgatttgtgatttaattttttttttaatttatttaactcgatgcggagttttgtataatttgacatttatctcttctttggctttagatgacttcttttaatcgcatagtttgattttaatatccacttggaaggtacatatatttttatcatttgtagtaatgggcaatattttaacattttaatatatgtacattattttccatgcggcttggaggtaggattaagatttcaggcattaagtccccacaccgagcttttatgcgaagtgatttcccaatccgctggccaccgtatctctgtttgcttttatgactggggggccattacaaagccattgcggcagggcagtcagcgaactaactatgtacgtacatacatacgatctcggctcggggggcataataacttttcatggctattgttgcattggggccaacgaaaggcggagatctcaatccgatcccaccgactttcacacgcaatgcaagctttgacctttgagccacacgccctcgagcttttcacgccgccgtagtacatgcgtgataagaaccaaagatagtggagcagagatgctaaagtctagttgtattccgttccgatatgcattaatgagcccgcggcggaactttgactccgtcaagtggttgtactttgaatgcaattagacggcggcggacggaattgtggcatgtaaccggaataattgccatttccacgtcccgaccgaccgaagcagcactcatccgccaatgggcatgatcgcgaactcatacctcatatacgtttatggatatgctaatggacaaagaggccgagggaaatagagacggagcagagaccgacgaaaacaggcgatatacccatacccgccgatatctcggtattttgagtgcgaagtgtgaaacggaagtgcggaggaatctcagcccaaggctgctggccgctggccgtttggttccatgatctttcaaatagatccggacaaacgaacacgttctatcgccgtctgcgcctccggctacttctactccactaatataatcagctagctattcaaatagatttgccgaacaagaaccacagaaaatcttacgacttgaaaagttggtttgtatggtatgatgtacatatgtacaactgttggactttgattgaccaagttcgatcgatgtattgactcaattaaagcaataatttcaagcttatagatacttattgaaagagacgatccattagaaacggcaattcaatacacacaatttccataagccattactttaaacgtttaagcatcgtaatagttttagaacgtgaatgtgaagtacatacttacttacttacttgatattaaaagtccaatgactctgctcaataaattaggcattgcgcttaatgaaagcacttttacattcaaagatccctggggtcaattgtatgcaacaaacataaaagtgcgctaaattagcgtaggcagggggattcgaaaggttcatctgcatggtcggttatggattgttgtaactttggaggacttaggtcatagccaagctgccctgtagttggaaaacgagacactatattggtcgccgagcggctaattgctttatttatattcacgacgatcggcgatcggttgtccgcttatggctttatgtttgtcatgagcaaataaaataattcaattaaattgcaagtgcaccccgaggggctgttcacctgctgctgcggatcaccttgactcgctcgcgcctccgcccactgctcctcctccagtgaggcataatcattggattgggtcaaattggagcatcgcagcgggctgtcaagccggtttgcatggttctaatccacaggagcttcaagctggtgctgtagttgagtcatgccagttggagcatcagaatcgtggagcaatcgtggaatctcataaccggccgtatagctagcattgaccttccccaagcgcctctcgtgcattgtgattagtattgattttgttttggtctttgtttcgcgctcctaccgcggaacttgtcccatcatcatcatcatcatcatcatcatcatcaccatcatcagcatttgtccattaattattgctcatttttggatttcgttttccgctctttttcagacgcaagcagctggagaatttgctgcgttgctatgaggagcacgagaacgagatcatcagcgccttggaggcggatctgcgacgtcccaagcaggagagcctcatcgtggaaacggaattcatgaagaacgacatcaggcacatcctattccagctcgacgagtgggtgcagtcggagaaggtgagccattacccccccccccccccctatacattgttgtgctcaatctctttaatgcttcgctttctggctttctgccctgctagccgcccaagtcgtttgtgaacatgatggacgacgtccagatctacaatgaccccttcggagtggttctggtgatcggcgcctggaactacccgctgcagctgctgctcgtgccagtggcttccgccatcgccgccggaaactgtgtggtgatcaagcccagcgagattgccgccaactgcgccaagttcattgccgatgtcattccaaaatatttggataatgtgagtcttgcctctgctctgtgctctgtgctctgtggtctgaatcatctgatgaaatcagctgctgatcttcaagcaccgcatcgttttgacataaagtaggggtctcacattaacctgtttccacggaattctataaaatttgcatttagttaagaatttgttgaatgctcagctgtgaccgaaacgcacggactggaaatattttgggtcaggagggggtttacaaattgttttgaacagatcacaatgttcacaagatgtatatcgtttgcaaagttcaagtttccctcggccactgaatgattttccctcctccaggattgctatccagttgtctgcggtggacccagcgaaacggcggagctgctcaaccagcgtttcgactacatcttctacacgggctccacgcgcgtaggcaagattatccacgccgcggccaacaagtacttgacccccaccaccttggagctgggtggcaaaaggtgagcacgctttgatcccccttaatttggagctaactaaccggtcggatgtgttactttcagcccctgctacattgacaaatctgtggacatgcgcactgcggtcaagcgcatcctgtggggcaagctgattaactgcggacagacctgcatcgctccggactacatcctctgctccaaggaggtgcaggagaagttcatcgtggaggccaaggacgtgctgaaggaatggtacggcgagaatatccagagcagtccggatctaagccgtgtgatcaacgccaacaacttccagtgggttaaacgagtcattcaaaagtgatatgattgcttaaatgtgttctatcctaggcgccttcttggcctaatgaagtccggccgcgtggccgtcggaggtaactacgatgccagcgagcgtttcatcgaacccaccatcttggtggacgtgaaggagaccgatcccatcatggaggaggagatcttcggccccatcttgcccatcttcaatgtggagagtgcctacgatgccatcaagttcatcaatgccaggtatgccagtctgtggcccaatcaaagaccaagatgtcccttgtcgttgccccccttaccatttactcaccatttatacacgaaaccaagctacaacaacaaacaatgtccgattcgcaatgtttttctcttagagagagtccacttgtcctgtacattttcacgccgacagcagaggttcagaatctgttcataaacggcacccagtcgggcggactgtgcgtgaacgacacgataatgcactatgccggtaagaatcccacctcggtcaaccctaaagtcgctccaatcgagatgctaatggctgtggattatgataataagtgcggccactcggcgtgtagtccgttgcttgcttctctactcgtctacggttttggcttctcccgatctcccgatctcccgatctccaatccccccggttgaacctgtttctgatagcttgctaagtgctaagtgcatacctgtaatttatagagtcttgtttggtgacggtgattataattattcttgtacagctccgtctagtagatgaactaagatcgcaggtcgcgtggattttaagtacctaaacctcatacactacacacattacccattcatctgtatatatgtcatagatgtttgcagatctgtttgcatatctattggttaaagctgtatctcaaaagttcgatattgtgtggcacagatctgcaaatgctcgcatgtttgtctttcccatgttacctttgttctttcgaagccctcaacgatgtccgaggaagttgagcttcagctagagctacgtacttaatcagaatatccgttctccgtaaatagagaaaagccgcttgtaatttacgtgttctccaactcgaataagctagttaaggagttcaggcggagcaccaccagcggcggattctccagcaacgaaaccataatgcactgtggaggtattttgctatgataatgtacatatatacctagatttagtcacacatcgcaatgagtcttgtgtagtgcacccgaattcaaagttacaccctttgtacacgaatcttagcgcactccagcaatccgaatttgaaatgcaaattccgggcattctaggcacttgaccgcatcgagaatccggataaacacagctgaatatccatacgtaaaagcaaagctttcgagcgatcacatactatgcacattgttttaaattttaatttgacggagtgttgaaattcacatgtacataaatacacgtatattattggcttttagagattttgtttagcacttaagcgcttgattgagtatggccaaaagtaaattaacaataagatggttataatattgctggtgatagaaaataataatgggtgtggctaaacataagttacttatttcgacttttatgtggtattctatcaaatcgaatgagaatgcttgttatttgcaaaacccgcaagttgttttttcttaactactaaccatttgcaaataacaatatattcctggtggttggctagtcgcacttattattcccccgtttcgcagttgatgtgctgcccttcggaggcgtcggcatgagcggcatgggcagatatcatggaaagtacggcttcgagaccttcacgcacaagaaatcttgcctgggcaaggacttatccccgttgggcgagaagttgtcatcgtaagtaatcgagttactcaatgaattcgtgtgattgatggctctactcccctgcagagctcggtacccaccctactcggaccgcaagggatcgctgctctcgttcctgctgcgcaagcgccgtccgctgcccaacctgcatctgagccacgtgctggccatcggactgggagtcggattgacggtgctgaccaactactacctacaggtaaggaaggtatagcaagccagctgcagtcgctccgtggtgcgcattaaaacgagaatttcttccatgcatccacgtcactgggaaacacacgcaatacactcaatacatgacactaccatcattcctcaaatacacattacccgccgcttgtacacaattgcagggcaagctgttgtcgaagtagaaactacatatgatgcgagccggagctgggtgagcctgcgccagaggattcccaatcaaccaaccacttaatattgtaattgtttgcaataaatgtttaggcgtaggcataactaacttcattgcacattcagacaactcacataatagaaactactgggccatctggtgttgtattttacactgcaatatgaaattatatatatttgaaatcgtcgacaaacgcctgcaattttgtactttcagaaaagctcaactgattaatgggccgagaacttttttctttttatacgcatatcggtgggtgatgtgaagctttggatacttcgatatacatatagttattgttatttagttgctatttaatacaaatgtgaatgctgtaatgtaatgtacgacaaataaacagtcaaaaatgaacaattgatttttaaatttgaaattcgggtggagcggtgtgaccagcgctgacggaaaacggtcgcttttcaacactactggcggctttacgatctcccgaggtgtgtacacactggccggcacaggcaacttctcttgttggtcacactggtgtgcgttttttgtcaatcatttgctgctgaaaataaattaaaaacacaggtaaaatggccgcgcgcggcgatttgattgcacagttcattgagatcaccggaaccgacgagaacgtggccaggttctacctgtccagctgcgactgggacatcgaggtgagctttcgcccaaccggcgacaacaatgatgcagcaaaagcacaaagttctaaagcattcaataattgtgcgaactatacggcttcagcacgcgctgggcaactactggagcacccaggcggacctgccggttccggtgccgacggtgggccacgcggacaaccccaaaccaaagccgacatcgagcagcggagcaagtgcatcggcatccgctgctggggccaccaagagtgcggactcagccgtcgctacctcgtcagcttcggtggacatcgccccggcagcgaccaaggccaagccaaagtaagcgataagagttgcaaggttcgcgataaatagtaatatatttcctctccagattcgcaacgcttagcgacatgtcgaaggagtcgtctagtgacgatgaccagcaggccttctatgccggcggctcagatcgctccggtcagcaagtgctgggcccgcccaagcgcaagaacttccgggagcagctcaccgacatgatgcgttctgcgcaggagcaaaacatcgcagaggtggggccatcaaccagcagcggcagtgccagcggaggatctggcggtgccgtctggggccaaggcatgcggctgggcatgaccgataatgaccacacggctgtgggcaccaaaaaaccggctgcgaccatcgaaaacaagccggtggtggt

SEQ ID NO: 23267 - DNA, 2317 bp, DROSOPHILA
cattcagatccgatccaaatcttgaaatatacaagttttgttgtcgcggtgaacggttgtcaaagcgcgtcaactgcatgcgtttatatcttttttcttcctgctgacgaaccagaaccagaaaccgaaagtccaattgggatcttcacatcacaaccggaaagtcaacaacaacaacccgagcagctccaatccgaatccgagtccgacagaatggccaattttgacgatacgttgcaacgcgcccgccttgccttttccagtggaaagaccaggaatgtcagctttcgacgcaagcagctggagaatttgctgcgttgctatgaggagcacgagaacgagatcatcagcgccttggaggcggatctgcgacgtcccaagcaggagagcctcatcgtggaaacggaattcatgaagaacgacatcaggcacatcctattccagctcgacgagtgggtgcagtcggagaagccgcccaagtcgtttgtgaacatgatggacgacgtccagatctacaatgaccccttcggagtggttctggtgatcggcgcctggaactacccgctgcagctgctgctcgtgccagtggcttccgccatcgccgccggaaactgtgtggtgatcaagcccagcgagattgccgccaactgcgccaagttcattgccgatgtcattccaaaatatttggataatgattgctatccagttgtctgcggtggacccagcgaaacggcggagctgctcaaccagcgtttcgactacatcttctacacgggctccacgcgcgtaggcaagattatccacgccgcggccaacaagtacttgacccccaccaccttggagctgggtggcaaaagcccctgctacattgacaaatctgtggacatgcgcactgcggtcaagcgcatcctgtggggcaagctgattaactgcggacagacctgcatcgctccggactacatcctctgctccaaggaggtgcaggagaagttcatcgtggaggccaaggacgtgctgaaggaatggtacggcgagaatatccagagcagtccggatctaagccgtgtgatcaacgccaacaacttccagcgccttcttggcctaatgaagtccggccgcgtggccgtcggaggtaactacgatgccagcgagcgtttcatcgaacccaccatcttggtggacgtgaaggagaccgatcccatcatggaggaggagatcttcggccccatcttgcccatcttcaatgtggagagtgcctacgatgccatcaagttcatcaatgccagagagagtccacttgtcctgtacattttcacgccgacagcagaggttcagaatctgttcataaacggcacccagtcgggcggactgtgcgtgaacgacacgataatgcactatgccggtaagaatcccacctcggtcaaccctaaagtcgctccaatcgagatgctaatggctgtggattatgataataaagaaaagccgcttgtaatttacgtgttctccaactcgaataagctagttaaggagttcaggcggagcaccaccagcggcggattctccagcaacgaaaccataatgcactgtggagttgatgtgctgcccttcggaggcgtcggcatgagcggcatgggcagatatcatggaaagtacggcttcgagaccttcacgcacaagaaatcttgcctgggcaaggacttatccccgttgggcgagaagttgtcatcagctcggtacccaccctactcggaccgcaagggatcgctgctctcgttcctgctgcgcaagcgccgtccgctgcccaacctgcatctgagccacgtgctggccatcggactgggagtcggattgacggtgctgaccaactactacctacagggcaagctgttgtcgaagtagaaactacatatgatgcgagccggagctgggtgagcctgcgccagaggattcccaatcaaccaaccacttaatattgtaattgtttgcaataaatgtttaggcgtaggcataactaacttcattgcacattcagacaactcacataatagaaactactgggccatctggtgttgtattttacactgcaatatgaaattatatatatttgaaatcgtcgacaaacgcctgcaattttgtactttcagaaaagctcaactgattaatgggccgagaacttttttctttttatacgcatatcggtgggtgatgtgaagctttggatacttcgatatacatatagttattgttatttagttgctatttaatacaaatgtgaatgctgtaatgtaatgtacgacaaataaacagtcaaaaatga

SEQ ID NO: 23268 - protein, 561 aa, DROSOPHILA
MANFDDTLQRARLAFSSGKTRNVSFRRKQLENLLRCYEEHENEIISALEADLRRPKQESLIVETEFMKNDIRHILFQLDEWVQSEKPPKSFVNMMDDVQIYNDPFGVVLVIGAWNYPLQLLLVPVASAIAAGNCVVIKPSEIAANCAKFIADVIPKYLDNDCYPVVCGGPSETAELLNQRFDYIFYTGSTRVGKIIHAAANKYLTPTTLELGGKSPCYIDKSVDMRTAVKRILWGKLINCGQTCIAPDYILCSKEVQEKFIVEAKDVLKEWYGENIQSSPDLSRVINANNFQRLLGLMKSGRVAVGGNYDASERFIEPTILVDVKETDPIMEEEIFGPILPIFNVESAYDAIKFINARESPLVLYIFTPTAEVQNLFINGTQSGGLCVNDTIMHYAGKNPTSVNPKVAPIEMLMAVDYDNKEKPLVIYVFSNSNKLVKEFRRSTTSGGFSSNETIMHCGVDVLPFGGVGMSGMGRYHGKYGFETFTHKKSCLGKDLSPLGEKLSSARYPPYSDRKGSLLSFLLRKRRPLPNLHLSHVLAIGLGVGLTVLTNYYLQGKLLSK

SEQ ID NO: 23269 - DNA, 2931 bp, DROSOPHILA
gttgttttgtttgttgtgttgtccttgttgttttgtttgttgtgttgtccttgttgttttgtttttgttgtgttgcccttgctgttgttgttttgtttttgttgttgttgtgttgcccttgctgttgttgctttgtttttgctgttgttgtgttgcccttgctgttgttgctttgtttttgctgttgttgtgtcgtcctttttgttgttttgtttttgttttgttttcttgtttctttttgttgttatttggtcggtcgtcatggacaaagacagtgcatttacatttatatatgctactgttgagatgccgccgccgtggccaaaaaaaatgtcagttgctccttaaaatgtgaccccaacagagaagtgtcgagagtttttagatgccagatattatccggggagtgtgttgtcgcctctcaaaagtgctccaaagccctgcgcagcttcttacagtaaaatggacattaagactcgcgctccttcttcaccttgacctcctcgcccagaatggtggtgatctcgccctgcatgaatgcccacggtatcaccgagttggccagtggacagcgatcgccgctggggcagtacacctcgttgcccagtccctgttgaggaatcgaaacaatttacagttagtatggaattccataatgaaaaaagaagccatcaatccaactgcaacattattggatcttgataatgaataagcatgttgcagtggatagatgatccatctttcgccccacttacattctggcgtttgatgctctcgcgactgcaggggaagcagaacttgtggtgattcaccgaggggcattgcacaaagtgcgtgtcctccaagcgctcctggcacagggtgcacttgagcgtggcattctgggcagccgccgcagctgctgccgctgcggaattcgaggcggcactgctgcccggagctccgccgagaccaccgctgccggccgaaccgccgccgctggccagtggtgtgccgcctccgccgccaccctgacttccactgctgccgggtccaggattcacggatccaccgctgccattgctgccggatggaccattaccgccggccggactgccatcgccggctaccgaatttggcgccatggaggcgggaccaatggctccattgcctccgctaccagaactggcactgccgcccggtccgccgctggtacaactcagctgtccactaccgccactgggtccgcccagttggccactggctgcattcgagccgggtcctccgccgccaccgccaccaaggccgccggccaccaccgcctggccgggattcgagccgcctacttcggagctggtaacggtggtgctggacacgtgacgggatccggacgaacgacgtcctgacgaggaacctgcaaaggttgacatacaaatcgatttgattagacttggcaagcaactaaattttgaaaaaagaatgggaaaattgatgcaaattcaaaaaaataaataataaaaaaaaatataaagaaaataaggaaagaaaataattaatcactacaaatcaaatcaaaaataattatatcttatcaccacaagatgataatacagttttaaagagagtagcgttaaaagtaaactaagtattaaatgtattttacagtcatgcaattggcactaaactaactaaatgataccgcaaccgattgtgtgaatgtgaaactaacccgaactgttcggcgagtgtacactgcgcgggggcagcggtccggagggcggactcgatccattgcgccgactggccggagacatgtgctctgcaatgtgaagatggtgtggaatcggattaggaatcggattggctgcacagagagagagagagagagagagcaatgaaaggcagctcgatgtcagtttgatgatatcgcaggatgatctgatgatattccatacccgatgcatcttatattcatactaaatttaactataaacaaataaacgatacccatcgaacttgtcatggtttgcaaatttatatgtgtcattggtcacaataaaaacttgagcatgtaatctcgtgagtcaagtgcaatgtactatgggccttggcgccccactttgccacaatattatacactggcattcataagtatgtcgacacacccacaaaatcaccactgacgaaagcacagcctataattcgagagcttatcctattattcatactaaattatccataattgacgttgacatcggcgatggtcggtcgaagtcgacctcacaaaatcgtttctaaagattttccaaatcattattcagaacgtgttctattcagtttgcaaattgatcaattcttgcagaattggggaaaagaaaaaggcgttttcattcaacttgtgctttcgattttgtatgcgaatgaattaaaattaatcacatgtttcgttttgcgcttgcctctgtgcaaaataaacttattgttgttttttttttttttattaggctcgttattttgttgctgtgttgtatgtgtaattttagaacttggcacgaaacatgtttctatgtatattttgtgttgtgcacatataaacacgtagcatgtacttgtacatatgtatatgtacatatacccacattcacttattacttggcaacgccggcccaacaacaagaacagcaacaacaagtttcattcaccggctggccattgaatatgtgacgtcacagcggcacgatacgattgcgtgtcattcttgttccactgtgcaggctcacacagctgttttttttttgtcgccttctttgtttttgttgctcttgtttcgccttctctctgtcgtcttattctccttcttcaccgtctcgttggcaaagtgccgaagcaacgcgaaatgaatggaaaggaatgaaacgaaacgaaacgagttctgctgctgctgcgcatacg

SEQ ID NO: 23270 - DNA, 1334 bp, DROSOPHILA
tggaatatcatcagatcatcctgcgatatcatcaaactgacatcgagctgcctttcattgctctctctctctctctctctctgtgcagccaatccgattcctaatccgattccacaccatcttcacattgcagagcacatgtctccggccagtcggcgcaatggatcgagtccgccctccggaccgctgcccccgcgcagtgtacactcgccgaacagttcgggttagtttcacattcacacaatcggttgcggtatcatttagttagtttagtgccaattgcatgactgtaaaatacatttaatacttagtttacttttaacgctactctctttaaaactgtattatcatcttgtggtgataagatataattatttttgatttgatttgtagtgattaattattttctttccttattttctttatatttttttttattatttatttttttgaatttgcatcaattttcccattcttttttcaaaatttagttgcttgccaagtctaatcaaatcgatttgtatgtcaacctttgcaggttcctcgtcaggacgtcgttcgtccggatcccgtcacgtgtccagcaccaccgttaccagctccgaagtaggcggctcgaatcccggccaggcggtggtggccggcggccttggtggcggtggcggcggaggacccggctcgaatgcagccagtggccaactgggcggacccagtggcggtagtggacagctgagttgtaccagcggcggaccgggcggcagtgccagttctggtagcggaggcaatggagccattggtcccgcctccatggcgccaaattcggtagccggcgatggcagtccggccggcggtaatggtccatccggcagcaatggcagcggtggatccgtgaatcctggacccggcagcagtggaagtcagggtggcggcggaggcggcacaccactggccagcggcggcggttcggccggcagcggtggtctcggcggagctccgggcagcagtgccgcctcgaattccgcagcggcagcagctgcggcggctgcccagaatgccacgctcaagtgcaccctgtgccaggagcgcttggaggacacgcactttgtgcaatgcccctcggtgaatcaccacaagttctgcttcccctgcagtcgcgagagcatcaaacgccagaatggactgggcaacgaggtgtactgccccagcggcgatcgctgtccactggccaactcggtgataccgtgggcattcatgcagggcgagatcaccaccattctgggcgaggaggtcaaggtgaagaaggagcgcgagtcttaatgtccattttactgtaa

SEQ ID NO: 23271 - protein, 264 aa, DROSOPHILA
MSTFAGSSSGRRSSGSRHVSSTTVTSSEVGGSNPGQAVVAGGLGGGGGGGPGSNAASGQLGGPSGGSGQLSCTSGGPGGSASSGSGGNGAIGPASMAPNSVAGDGSPAGGNGPSGSNGSGGSVNPGPGSSGSQGGGGGGTPLASGGGSAGSGGLGGAPGSSAASNSAAAAAAAAAQNATLKCTLCQERLEDTHFVQCPSVNHHKFCFPCSRESIKRQNGLGNEVYCPSGDRCPLANSVIPWAFMQGEITTILGEEVKVKKERES

SEQ ID NO: 23272 - DNA, 2724 bp, DROSOPHILA
ctttgaactcccagactaagtggagagcgagcatttatgagccagtggaggttccttgctttaagtttaagatgtttcgatttggcttctatatgtttgcgccaagtgagccgcctgtccagatgaactcccaagatatgttacctcgtcggcttgtggaatgcatatgttattcaagaccagtggtgggcatgtttgtttgtttaaggtaaaggtaacctgcttgcatttttgaacatttattgaaattctccagtcggcaagccatcgttctacagatgttaagtgtcgggataggagtgccgtggcttttattgggcatttcgagcgactgagtatcgcggtatcatcagcgaacgtggaggttgttagattgtagtctatggggaaatccgccgtatacagggtgtataagattggacccagtacactgccttgcggcactccagcttcgattgcgcaatcgcgtgaagtgcttgtatcgcatcttattgcaaacactctgttatataggtatgacttcagtagcttatgtgtgttttggggcaacagcttgattattttaaacaaaagtccatcgagccacactctgtcaaatgcctttgtaattaaaattgtaaaaattttataagtcgaacttgtcaactaaacctggattttttttcgatatcttatattaagctttccacgcgcttgttttacaaattctgaaaataggacaaagtgctgaaaaaatgcgtgcgaagtcgtgatgatatctttctactgtggtgaatgatggcttttccgaataaaaatttgttgccaggtgcaaccatgacgaaatcaatgctaaataagatcatattatcattctgtatcttaattattttactattttctttaacagatcgcccggcgagaaactagtggatgacatcaaaaaggaggccaagaagatactagacgactgactggcggaataagaccacaattttagtttaaaccaatttatctatgatcaaataaagagaatctatatgtgtaaaactagacaaacgaaattcctccgccgtaatattccaggcgtgtctgaggctggacaaatgccaaccaatcggaggcgtgggtggggaggagccccatgctctggcacttgtagagggccaaagccacgtttgctaggttgcccaggaagtagacgatgcgctggccagttccctgggccccctccgccattttggaagtcacctgggtggtgaagatggccttgataggccggatcagcatcatgccgaccatcatgatgggaaaaatggaaatcgagtttcctgacatgtacatgatgaatagattcatgggaatctgagggaatccaaaggttaagcacgggtctttccaaagggctgctactcacgttcttaagaggtcccagggcaaggtcccacgacttcttgatgaccaggcgctggtcgcgcaccacttcactctggttcaccaaagcagatggattgtagcccagcggcgaaggaatatcagcatttttgctgcaggaaaaagcaaaagtggtaagaacttgagtcaccgcgcaggctagcaatccttacctcccgttaaagtccagcgcccactttaacttttttgggttttgcttggcggacatgctgtgctttcttttatttaatcttttgccaatttataaaacaaaatgacgattttttctgacaattggtcgctgagtgttgttcaacgttaaattccgaaattattgtagtgtagacaattcgataggcaactgatgtgtatggcaccagggtatcgataggcagttacgattttgcgcggactttttgaaacgcatgtgcaaaaatcgaacagcgcagtagttttcattaatatttaaattttatttcaaattaccttttaagtagtactttcctttttaatatggtcttatatatatgcgtgatttttaatggattttgcgtgaccaagcgacaacaagaaacagaagggttaaaaattaaaatggtatttgttgtatttttaaagagcaattacaattacagttttttctcattaatattactttaatattataaaattaaaaagaaatatatattttgatgaggggtagggagaggacaaaaataacttaaaaaagacatttttataccatatactatagtttcctttcttgtgtgattggttgggcttttcttttactcgatttgcttttaaacatccaataattatgtatacgaatttaaattatattatagcgttctttatatgctgcttgaaaggttatgtttttgcaattcaataaacaatttcagtttcttgtttggaaatacggacatgcggagccctttaagttatgcgaagatctgctgctcttgttgttggtgttggtgccgctgctgctgttttgtgaaaattccttctgatgtcgatttccaccgtttaccgctggatgttggatgtccttcagccgctctttctatggttctggttgctggttaactgcttcggctcgcttgaaatcagagttagttgtattcatattgttgctttaattttagtgtttaattagcgattagcgttcttcaattggttggacagccagtcgagtccctcgtacagcccatcaccgctagttgcacacgtcgcctggatgtaccagttgcggtttctgagtgagtgcaagccgagcttgtcggtgatttcggccgcgttcattgc

SEQ ID NO: 23273 - DNA, 612 bp, DROSOPHILA
caacactcagcgaccaattgtcagaaaaaatcgtcattttgttttataaattggcaaaagattaaataaaagaaagcacagcatgtccgccaagcaaaacccaaaaaagttaaagtgggcgctggactttaacgggagcaaaaatgctgatattccttcgccgctgggctacaatccatctgctttggtgaaccagagtgaagtggtgcgcgaccagcgcctggtcatcaagaagtcgtgggaccttgccctgggacctcttaagaacattcccatgaatctattcatcatgtacatgtcaggaaactcgatttccatttttcccatcatgatggtcggcatgatgctgatccggcctatcaaggccatcttcaccacccaggtgacttccaaaatggcggagggggcccagggaactggccagcgcatcgtctacttcctgggcaacctagcaaacgtggctttggccctctacaagtgccagagcatggggctcctccccacccacgcctccgattggttggcatttgtccagcctcagacacgcctggaatattacggcggaggaatttcgtttgtctagttttacacatatagattctctttatttga

SEQ ID NO: 23274 - protein, 166 aa, DROSOPHILA
MSAKQNPKKLKWALDFNGSKNADIPSPLGYNPSALVNQSEVVRDQRLVIKKSWDLALGPLKNIPMNLFIMYMSGNSISIFPIMMVGMMLIRPIKAIFTTQVTSKMAEGAQGTGQRIVYFLGNLANVALALYKCQSMGLLPTHASDWLAFVQPQTRLEYYGGGISFV

SEQ ID NO: 23275 - DNA, 3721 bp, DROSOPHILA
atcttgcctgggcaaggacttatccccgttgggcgagaagttgtcatcgtaagtaatcgagttactcaatgaattcgtgtgattgatggctctactcccctgcagagctcggtacccaccctactcggaccgcaagggatcgctgctctcgttcctgctgcgcaagcgccgtccgctgcccaacctgcatctgagccacgtgctggccatcggactgggagtcggattgacggtgctgaccaactactacctacaggtaaggaaggtatagcaagccagctgcagtcgctccgtggtgcgcattaaaacgagaatttcttccatgcatccacgtcactgggaaacacacgcaatacactcaatacatgacactaccatcattcctcaaatacacattacccgccgcttgtacacaattgcagggcaagctgttgtcgaagtagaaactacatatgatgcgagccggagctgggtgagcctgcgccagaggattcccaatcaaccaaccacttaatattgtaattgtttgcaataaatgtttaggcgtaggcataactaacttcattgcacattcagacaactcacataatagaaactactgggccatctggtgttgtattttacactgcaatatgaaattatatatatttgaaatcgtcgacaaacgcctgcaattttgtactttcagaaaagctcaactgattaatgggccgagaacttttttctttttatacgcatatcggtgggtgatgtgaagctttggatacttcgatatacatatagttattgttatttagttgctatttaatacaaatgtgaatgctgtaatgtaatgtacgacaaataaacagtcaaaaatgaacaattgatttttaaatttgaaattcgggtggagcggtgtgaccagcgctgacggaaaacggtcgcttttcaacactactggcggctttacgatctcccgaggtgtgtacacactggccggcacaggcaacttctcttgttggtcacactggtgtgcgttttttgtcaatcatttgctgctgaaaataaattaaaaacacaggtaaaatggccgcgcgcggcgatttgattgcacagttcattgagatcaccggaaccgacgagaacgtggccaggttctacctgtccagctgcgactgggacatcgaggtgagctttcgcccaaccggcgacaacaatgatgcagcaaaagcacaaagttctaaagcattcaataattgtgcgaactatacggcttcagcacgcgctgggcaactactggagcacccaggcggacctgccggttccggtgccgacggtgggccacgcggacaaccccaaaccaaagccgacatcgagcagcggagcaagtgcatcggcatccgctgctggggccaccaagagtgcggactcagccgtcgctacctcgtcagcttcggtggacatcgccccggcagcgaccaaggccaagccaaagtaagcgataagagttgcaaggttcgcgataaatagtaatatatttcctctccagattcgcaacgcttagcgacatgtcgaaggagtcgtctagtgacgatgaccagcaggccttctatgccggcggctcagatcgctccggtcagcaagtgctgggcccgcccaagcgcaagaacttccgggagcagctcaccgacatgatgcgttctgcgcaggagcaaaacatcgcagaggtggggccatcaaccagcagcggcagtgccagcggaggatctggcggtgccgtctggggccaaggcatgcggctgggcatgaccgataatgaccacacggctgtgggcaccaaaaaaccggctgcgaccatcgaaaacaagccggtggtggtgctaaagctctggagccagggcttctccatcgatggcggtgagcttcgtcactatgacgatccgcagaataaggaattcctagagactgtcatgcgcgggtaagtggcactcattcccatcgatattatgctagcataagcgtatgtgcattccctaaataagttctgtgaagctacaataatcgaacgtacactcttccagggaaattccgcaagagctgctggaaatggggcgcatggtcaatgtggatgtggaggaccaccgccacgaggacttcaaacgtcagccagttccgcagacttttaagggatcgggccagaagctgggcagtcccgtggccaatttggtcacggaagcgccaacagttccagtggcattgtcgcccggtgaggctgcaaaccaggaggctagtgcccgtgatgccattaacttaaattccgaagcaccgtccactacgctgcagattcgcctagcggacggttcgcgtctagctgcgcagtttaatctttcgcacaccgtctccgacattcgtcgtttcatacaaacgtaagtcactgatttcggagatccagcaaattgattaacttaagcgcaattcgctttgcagtgcacgccctcagtactcaactagtaatttcatcctggtgtcctcgttccccactcgcgagctgagcgacgacaattccaccatcgagaaggctggcctcaagaacgcggcactcatgcagcgcctcaagtaactaactataagtcaagtacgcgtatatgtgctctcagcgatggggggcaaaaacctatgaaataaaactggatttggtgaagtcgggaaacctattcgggccgatccgatgcctataattatctacgatatatacaatataccaaagttgtgtgcttacttgtattctctttatggcagtcaagcaatctctcaaaactacatgtatttaaatctcaaccttaacgtacgctcctggatgagtagctccacctcgttgcggagcacattgatgtgttccataaagtcctcgcgaactgcgttgcgccagtcgtgcaggccatcgctgcccacatggtcgcagtccacgtagcggtgcacgaatccggttgataacgatagttccacatcggatgtactggccaagagctgcgccggcggcagctccaggcgattcagcaatgttttgaactcagatcttcgctccgggtcgtactgaacgttgtcgggcaacagtttcttccggtcatcgaagcacacggacatggttgccagttcgaagcgcgtgatctcggaggagaagtgtcgcagctgctgctggagcgatcccttcacctggtccccagagaactttgagttggggaagaacagctcgttggggcggagtagaagggtgaagccggcgtggttcacattccgcagcaagcagtccgtgagtaatagttgatggattcgcgaacgtgtgccattggactgctggaagggaaagttaaaaggcaggccatacagatgaatgttggtgcgctccaacaggtgatgcacttcctctggcagttcgtcgtggttgtagaccaggaaattctctattcccaatgcctggtggaacaggaagaactgcagcaaagcattttcattacgtgcgaacttggaggtcatgttgaagccaacgagatcaacgcaaacggtggctggtagtcggtgcgctacagctaccaccttgtcgtcgtccttcttgctcgctggtctcaggtttcgcagacgcagcctcactggactcctggtggttgttatgtccgtgaaggagacactgccgggctgaccgaaatctcggctcacctggcagaagaagtgatagctggtg

SEQ ID NO: 23276 - DNA, 1411 bp, DROSOPHILA
ttggtcacactggtgtgcgttttttgtcaatcatttgctgctgaaaataaattaaaaacacaggtaaaatggccgcgcgcggcgatttgattgcacagttcattgagatcaccggaaccgacgagaacgtggccaggttctacctgtccagctgcgactgggacatcgagcacgcgctgggcaactactggagcacccaggcggacctgccggttccggtgccgacggtgggccacgcggacaaccccaaaccaaagccgacatcgagcagcggagcaagtgcatcggcatccgctgctggggccaccaagagtgcggactcagccgtcgctacctcgtcagcttcggtggacatcgccccggcagcgaccaaggccaagccaaaattcgcaacgcttagcgacatgtcgaaggagtcgtctagtgacgatgaccagcaggccttctatgccggcggctcagatcgctccggtcagcaagtgctgggcccgcccaagcgcaagaacttccgggagcagctcaccgacatgatgcgttctgcgcaggagcaaaacatcgcagaggtggggccatcaaccagcagcggcagtgccagcggaggatctggcggtgccgtctggggccaaggcatgcggctgggcatgaccgataatgaccacacggctgtgggcaccaaaaaaccggctgcgaccatcgaaaacaagccggtggtggtgctaaagctctggagccagggcttctccatcgatggcggtgagcttcgtcactatgacgatccgcagaataaggaattcctagagactgtcatgcgcggggaaattccgcaagagctgctggaaatggggcgcatggtcaatgtggatgtggaggaccaccgccacgaggacttcaaacgtcagccagttccgcagacttttaagggatcgggccagaagctgggcagtcccgtggccaatttggtcacggaagcgccaacagttccagtggcattgtcgcccggtgaggctgcaaaccaggaggctagtgcccgtgatgccattaacttaaattccgaagcaccgtccactacgctgcagattcgcctagcggacggttcgcgtctagctgcgcagtttaatctttcgcacaccgtctccgacattcgtcgtttcatacaaactgcacgccctcagtactcaactagtaatttcatcctggtgtcctcgttccccactcgcgagctgagcgacgacaattccaccatcgagaaggctggcctcaagaacgcggcactcatgcagcgcctcaagtaactaactataagtcaagtacgcgtatatgtgctctcagcgatggggggcaaaaacctatgaaataaaactggatttggtgaagtcgggaaacctattcgggccgatccgatgcctataat

SEQ ID NO: 23277 - protein, 407 aa, DROSOPHILA
MAARGDLIAQFIEITGTDENVARFYLSSCDWDIEHALGNYWSTQADLPVPVPTVGHADNPKPKPTSSSGASASASAAGATKSADSAVATSSASVDIAPAATKAKPKFATLSDMSKESSSDDDQQAFYAGGSDRSGQQVLGPPKRKNFREQLTDMMRSAQEQNIAEVGPSTSSGSASGGSGGAVWGQGMRLGMTDNDHTAVGTKKPAATIENKPVVVLKLWSQGFSIDGGELRHYDDPQNKEFLETVMRGEIPQELLEMGRMVNVDVEDHRHEDFKRQPVPQTFKGSGQKLGSPVANLVTEAPTVPVALSPGEAANQEASARDAINLNSEAPSTTLQIRLADGSRLAAQFNLSHTVSDIRRFIQTARPQYSTSNFILVSSFPTRELSDDNSTIEKAGLKNAALMQRLK

SEQ ID NO: 23278 - DNA, 5428 bp, DROSOPHILA
aaatgttttaataggtaattgcaactctgctgagcatggactactagctaaaacctaaggaaagctacacaaaaaaaaaaaaaacgataaaataaagaagaaaaaaaaatcaatataaaagtctataaatttaaccacaaatttaaaacaaatggtcgattgggtatacgtacgatatctctgtcaaatttcatttgtttcgatgccttaaacacgtttttctgtctcattacttaatttaagctttggttctttaaaaatccccacagcccaagctaaggcctaataccaagatcattgtcagattttcgtgattggtacggcctcatgggcgcagtcggccttgactttatgttggattttctggtttttattcattttcggctggctgttcaccgaaaacaaaagtgcgaaatatggaaatcaaatcgaacataaattagatacaaacttcgttgattaatatttaaaacagttgctaactgaaacttaacgcagagctttccggtttgatgaactgactcaactcgaacgaaagtgagtcgaaagtatttattcttcattttttcttcgggaatctgacaattttatgagcagaaacaaatccccacaagaaatcttattatgaaagaatcaatatctccatgtacaaaatgtggttggagagtcaacttaagttataatcgcagttgcattaatgtttcatttctgtcgaaatattgtgccatcgaatgtctttttcgtttattcgttatttattgacaagtttgttttcatggcaattgagtgaggctgagattacgacggcggcggcaaaagctgttgcgaatccccaccaggcagcaggggaagatccccaagctccggcgacgtttcggctcgctccgatgatcatcatccaaaagagcttcagccggagcagcttcagcttcgagtgtgaggttgccagttaatatctgcgttgcgtttctagcgcgaaacagtcgaaattgtcagctcgttggctgagcatcgcagtagctcttccttagtttaacttttagtgatcacattgccattcgaaaacaacaagaggatttaaacaaaatggctaaaatcttaatcagtgctctattgtgcgttgccatgtttggctcaatgggttagtatactatagtttttaatactattatttcgcaaaacaaatgactttggtcacaaacttttctggtgctatactctatagtggcgaaaagttcgagaaggtgacacaaacatttgcatatatgtacgtcagcacaaaatttcaggaaacattaacacatttaactcatttcatcttgaagaattaaagattcaatggtgcggaaacgaattaaagttaattcttattgcttcctatataaacaaattcgtatttcatagaaaaaagtgccaagacccacattatcgtatgtcccacgtttggatgaaactacatacatatgtgcaattattcacttttacaacgcgtaaaactgctactcattcgattcacaatagcaggaaattacgcgaattttcatgcaaagtaactaaagtaaatgttttatagagaaatgcaaagaaagctagtaattattgccaacgtgatggctaatatgtaaaatcccaccgaaatttcattgatatttcaaggtcagcaggcagccttttcagaaatttgattcacacgccgaagcgggcagagaaacatggctattgcataatctttgcctggcaccaatggtcggtccattgtgtggaacgggtttatctcgcggatagcggtcagacatgttgggggagctggaggcgacagatccatctcggtgcgtgcccagccggttgttgtgacctttaagcgcgtttgcacctctttcgattcagtacgacataatcttcagtgtgtcaggtttcgaaaaaaccaacggtcgcgaatcagatttcgagatgaacgtcacgttttgtccgaaatctatttgaacacatatgggaaaagtaattgcatgtttatggattcaatttttttgggttcaaatagggaaaagccggttactttggttgaagctttaaaattatcaaataggatagcaaaaaaaaataatgaaaaccacacaaatcgttaacgttgtgaacattcacaagataaccagcatttttaaataaatttgtgtgattttaaattgatcggcgtaaaattaaaaaaaagcgactaatgacgtcagtgacagcagctaaatgtgtccattgaattttaaactggttaatagggtaacaggtttttaatagtacagccactcgagtatagggccttaacgatttaatatgaaaagatttttagcacagcttttaaaattagatggcattataagcgatggtttgtatgcatccctaaaaatcccaaaaaattccctaaaatcccaatcccactatatactaacatttgaaacaacttaaaacaactaccatcacttcatcaaagtccctggcacttgtctaccacttaaactcttttctgttacatcgcattaaataaacatctttgaattatattcgcgggttcaacaaccggggtatgtgcccacaaagtcattaaagtttcaatacccgggtatgtgtatgtaatatcgcgggaagacgagaaaatccattgtcaagtggaatgttgccctacggcaatcccacgacttgtcgttgatcataaagtacgtatcaaatagttaaaacaaaaaataaaaaagagccagtttcccatcataactcattagaggtaagctagcaaacgcaatcccatggatcgatattaaccgacgtacgctatttcttccagctgccgccgccgccggtgcatgcaaggaggcgaatggaactgctcccgtgtccggatcctgcgatgcctacattgagtgcaagaacggagtggccgaggagaagctctgccccgacggtctgctgtacaacgaaaagtccacgggttacccctgcggctatccgatcgacgtggagtgcacccagggccaggcccgcctgcaggccgctcagccaacggatgagtgcccccaccagttcggatactatcgcatgggtgatgccagccattgtggacagttcatgaactgcgccgcgggccgtggcttcgtgttcgactgccccgagggtctggcctggaatccggccacctacaagtgcgattggcccgatcaggtggaggactgtgacgccgaggccttcctgggcttccgctgcccagcgccggcacccagatctgagctgctcggcgagcaggaggctgactacaccttccacccgtcgcaggacaattgccaggtgtacttcatctgtatcgagggacgtccgcgtcgcattggctgcggcgaggaccaggctttcaaccaggagctgaaccagtgcgacgacatcgagaacgtgcccaactgcagcagtgccatccgtgaaaagggtgcccaaatcaaggctgctcgtcttcacgccaggaagaactaagtcaatccagttgtgatttttcccatgcacatgccatatggcgataggttgctcgagttttctagtctgtagttaaagaatttggcaaactgattgttgacattttgcgcgtcgaaataaaaaaaaaaaaggaaaaacaaaaaccactttagctttattcaataaataatctagctcttcatttatatgacatcttgctaataaatgcgtgatttctttgtaattacagctcttggctcgccggaatgccccacgcccaatggacgatttgcatcgggtgaccagtgcgactcttacacagagtgtcaggatggtactcccgtggagaagctgtgtccggacggcctgctcttccaccagcgcaccaaggcgaccggagagtgcacatacgccccgtactccacctgcaaggagagggctcgcctgcagcccgccaacggaacggaggagtgtccccgccagttcggcttctatccgaacggagatgcgaccaagtgcggcgtctatcgcaactgcgcccacggcgtggccagcctaaccaagtgccccgagggcctggcgttcaacgaggagacctaccagtgcgactggcccgatctagtggaaagttgcaacgccgaggcgtacctgggcttcaattgccccgccgccgattccgccgatgatagcgctgccgccgccgtggatgtcagcccggagggtgagctgcgctactatcgccatccccagacctgcaagaagtacttcgtgtgcgtcaacggacatccgcgcctgtacaactgcggcaagtatctggccttcaactcgcagacgaaactgtgcgacttctacaacaaggtgcccgagtgctatgccctgctcaaggagaagcagcgcctgaaggcggagaagcaacagccccaggtggctcagccggaggactaggcccttcgagaaaccgatggaatctcagaggctgctacccgtacacttcctgtgcaataattattatgctgtagatatgtaactgcttattggttatgcaatgaataaataagtaatctatatagaaaaggatttaaattgataattttaatcttttggggattcaaaaatttgtagtggtaaaaatcgatgttctttcacttttgagaagagatttcttaaagtatataagaaaatttaaacaacttcatttggtttcttgagtttgtaatttattatcagtttcagattttacgttttttgaatttagtgtgttagttattaataataggtttcttactagtactcggtagattaattaaacttatattatgttacataagtaagatggcaaaccacttccacacgtttaagcatttgtttgcgaactcatcatggtcattttcttcacttcatttataatttttacaacgtcttcatttattaaaaaaatattgtttttaagaaccaattttaatccgcagttacgatgtttttttagaaataatttaagctcgaatttcgtattgttgatttaaaacatttattctgcatttatcactaagtaaccaattaattttcgttcagaattgtttaggactgcttaaaactaaattcttcatttatccatattttggatccgatcgcttccgtttcctttgattcgtttcttctttggctataaaaattaaattacatataggtattgttttttgaacttttgcactattctgttgtagatgtttttgctgttgtgtgagtatcagtttgttcgttatattaaattacaacaaataattggtagttaagtacagtattatatttgcttttacaaatttttgtttcacttcgattcatatcatttctttctttcttgctttgtggtgcttggctaaggcgacttttgtttggttgttttcactttgtttttgttgtctttacattttgcaatatatttaac

SEQ ID NO: 23279 - DNA, 1457 bp, DROSOPHILA
ttggctgagcatcgcagtagctcttccttagtttaacttttagtgatcacattgccattcgaaaacaacaagaggatttaaacaaaatggctaaaatcttaatcagtgctctattgtgcgttgccatgtttggctcaatggctgccgccgccgccggtgcatgcaaggaggcgaatggaactgctcccgtgtccggatcctgcgatgcctacattgagtgcaagaacggagtggccgaggagaagctctgccccgacggtctgctgtacaacgaaaagtccacgggttacccctgcggctatccgatcgacgtggagtgcacccagggccaggcccgcctgcaggccgctcagccaacggatgagtgcccccaccagttcggatactatcgcatgggtgatgccagccattgtggacagttcatgaactgcgccgcgggccgtggcttcgtgttcgactgccccgagggtctggcctggaatccggccacctacaagtgcgattggcccgatcaggtggaggactgtgacgccgaggccttcctgggcttccgctgcccagcgccggcacccagatctgagctgctcggcgagcaggaggctgactacaccttccacccgtcgcaggacaattgccaggtgtacttcatctgtatcgagggacgtccgcgtcgcattggctgcggcgaggaccaggctttcaaccaggagctgaaccagtgcgacgacatcgagaacgtgcccaactgcagcagtgccatccctcttggctcgccggaatgccccacgcccaatggacgatttgcatcgggtgaccagtgcgactcttacacagagtgtcaggatggtactcccgtggagaagctgtgtccggacggcctgctcttccaccagcgcaccaaggcgaccggagagtgcacatacgccccgtactccacctgcaaggagagggctcgcctgcagcccgccaacggaacggaggagtgtccccgccagttcggcttctatccgaacggagatgcgaccaagtgcggcgtctatcgcaactgcgcccacggcgtggccagcctaaccaagtgccccgagggcctggcgttcaacgaggagacctaccagtgcgactggcccgatctagtggaaagttgcaacgccgaggcgtacctgggcttcaattgccccgccgccgattccgccgatgatagcgctgccgccgccgtggatgtcagcccggagggtgagctgcgctactatcgccatccccagacctgcaagaagtacttcgtgtgcgtcaacggacatccgcgcctgtacaactgcggcaagtatctggccttcaactcgcagacgaaactgtgcgacttctacaacaaggtgcccgagtgctatgccctgctcaaggagaagcagcgcctgaaggcggagaagcaacagccccaggtggctcagccggaggactag

SEQ ID NO: 23280 - protein, 456 aa, DROSOPHILA
MAKILISALLCVAMFGSMAAAAAGACKEANGTAPVSGSCDAYIECKNGVAEEKLCPDGLLYNEKSTGYPCGYPIDVECTQGQARLQAAQPTDECPHQFGYYRMGDASHCGQFMNCAAGRGFVFDCPEGLAWNPATYKCDWPDQVEDCDAEAFLGFRCPAPAPRSELLGEQEADYTFHPSQDNCQVYFICIEGRPRRIGCGEDQAFNQELNQCDDIENVPNCSSAIPLGSPECPTPNGRFASGDQCDSYTECQDGTPVEKLCPDGLLFHQRTKATGECTYAPYSTCKERARLQPANGTEECPRQFGFYPNGDATKCGVYRNCAHGVASLTKCPEGLAFNEETYQCDWPDLVESCNAEAYLGFNCPAADSADDSAAAAVDVSPEGELRYYRHPQTCKKYFVCVNGHPRLYNCGKYLAFNSQTKLCDFYNKVPECYALLKEKQRLKAEKQQPQVAQPED

SEQ ID NO: 23281 - DNA, 6247 bp, DROSOPHILA
gatggtactgagatttttgaaattgattataattatgatgatgtaatgatgtaggaatactaattaaagattattcaagcgaggctaagggatctttaaggcctgtcagtataggattgtatctatgtatggaaataaaatataaaaacaaaagagaacgctttagtcgatctcctcgactatcagatacgagttattgagctagtgggaatgcaagggaaaatttgagaattttttggcatactgataaaaattggcaagtaaaatcgcaccggtcaaaatatttttgaaaattgtaggcgtggccagaatgcatgcttactctttactttctagcttctatagttcaggtgatcctgcgctcatacggacagacatacgggcattaccagattgactacgctaacgatcctgatcaagaatataaatataaatattcgccaatatttttaaacatagttcactttttcaagcccttttgttaccaacgtttttaaaaataacatcaactgtttaaaaaaaaacaaatatgcctagactttagcttttataatggatttgcaaatattctcttcttaagaattgagttttgagttttatttctcatttccgttcataccactttatttgaactaaaagtactcttcataatttttacgaaatcgatcagatttttttataaagcgttacaaaccatttgagaataagagcaagtgggaaattccacgattgaaccatttcctcgaattcaaactcaattgggcactcaatgaattatggaaataggtgtactacgatctccggctggaaagaggcggacagaaggactccgcgatgctcgctaagaaatcccacgcttgccggaaaatttccgatatcatctggttcctataagtgcgccgcagagcgttgtggagagtatatgcacatatcgtacatgagtcgcggaataagagagtgcgcctctgcccgcgggagaccataaaagcggcccgatttccactcagccgagtcattcgccgcgaacttttgcctcgaccacatcgcagtctcttttgcagaagccaggaattccagaagcaagcacattgaaacgcgctaattgacaagacgagagtgtgttagcaaaaacatcccagaatgaagcccaccaataactcaaccctggaggtaatctcgccgaaagtgcaggtggacgatgagttcatcaccaccgactacgattaccagacatcccatgtgaagcgcaccgccgatggacagctccaggtaggtccaatcgtcaagggattgcttatcgaaccatgggcactagttgatcggaagcatcatccacttgaatgatattgatatcgaatgtggtgcgaacagtcattttccggctgaccttcacattgaacttttccaacaggcgggatggataagctctcccgctcaaatgcgcactcgcctgcactcggagaaaaatatttctcacctggatgaagaaatagtggtttattttgtttcgagtccagcataggccacctatgactaattgcattctattttacaaaacagaatcttataaattttaatataaatctgtaacaagcaatgtttaaattatgaacttaatgaaaaggccatttaaccatgttaaagttatttgattaatttcgtactataaattaaattgtgaacatccttaacgtatcacatccaagcacaattagtttaaaatcttaactaagagttagctcgttatagcgtaatgaactgaaacttgctaccccaatataagcgttaacttagcaactaaattgacccagtgaaactttccattatccagcaaaggaccgagctgtgccgaattctcggagtccatagggaccactccccggaatcgcaaaagacaaaaatagcgataagagagagggccggcctcctatccaatcgcactcacacaggcggggcgttacagttacaatttattgattgctcagctgaacagctgacgacaaatacggccgatagatatctcgtcactattccggaccgagcgcgagtggcgtgattttatgcgcaggcgccttttcggccgctcgaatggcacctaaataaataggaatggggctggtgcacccgactagaaacccaatagcccatttttccaagtgattgtggtcgcggtacgtgctctgtttacaccgcctgcaaacaatacactccacccatcaaccatctcccttcgcccacttccctcccacggacacttgctgcgcctcaaggtcactgtcaggcgatgcccgcgaagagagcatctaatgtaaagagagaaagagctcctctcttagccggctgaagaaatgtgataatttcgcaggccggcaaatggacatcttgttatcggactttggaccaacacgttcccaaattattatttcatcaatatcatttcttattcatcagtttatactatatgacatgtttgtggttcaaatcaaagagcgcgttgactcggcaaaaacagaaatcgagcaagaactgcccaaatcaacaacacccaaatgcggttatacgatcgtgcgatacctcttacgtgtaaataatgcatttgttatttgtttcatccgatgataacataacatatgaaactattacagaccatagagatttcgcgaaatttgttgtatgaaaatttattgtacctttgtatgcttatataataccattttcctgggtactttaatacttcatatagttcacttacacctatatcatattgtaacataagatagggttttagtttcatcgaattaaatcgatgtgttgccaagagcacccaatcgcagatatccccgttggcaatatcaggaaggggtgaatttcaggtttgcttcgcagaaatcgcgcgatcataatttatgcggctacctgacttgggtggctaatgtgaaatatcgataaggtggccggacctataataagaccaaacgggttgtgccattgctcctgcttatcggctctaatcaccgatcgatcttgcaggtgcacccccagacgacgtcgctgaagatacggacgggtcgccatgtgcccaagctgggcgtgatgctggtgggatggggtggcaacaacggatccacgctgaccgccgccctggaggccaatcgtcgccagctgaagtggcgcaagcggacgggcgtccaggaggccaactggtatggttccattacacaggcgtccaccgtcttcattggatccgatgaggacggcggtgacgtgtacgtgcccatgaaggagctgctgcccatggtggagcccgacaacattatcgtggatggctgggatatcagtggcctgcatttgggcgacgccatgcgcagggccgaggtcctagacgtggctctgcaggatcagatctacgatcagttggctcagttgcgcccacgtccatccatctacgaccccgacttcatcgcggccaatcagtcggatcgggctgacaacgtgatccgtggcactcgtctggagcagtacgagcaaatccggaaggacatccgcgacttccgcgagcgcagtggcgtcgattcggtcatcgtcctctggactgccaacacggagcgcttcgcggatgtccagcctggtctgaacaccaccagccaggagctcatcgcctccctggaggccaaccactcggaggtgtcaccctccacgatcttcgcaatggccagcatcgccgagggggtgagttattctcctccattctattgataagcaagactaattacctaatccaccatgtatccacttccacagtgcacctacatcaacggctctccgcagaacacctttgtgcccggactgatccagctggccgaggagaagaatgttttcattgccggcgatgacttcaagtccggtcagaccaagatcaagagcgtgttggtagatttcctggtgggagctggtatcaagccggtgtccattgccagttacaaccatctgggcaacaacgatggcaagaacttgtccgctcctcaacagttccgctccaaggaggtaagagtccagccaggatttccaggattcctcctcttattaataataactcctcctccggcagatttccaagagcaacgtggtggacgacatggttgcctccaacaggctgttgtacggacccgatgagcaccccgaccacgtcgtggtaatcaagtacgtgccctatgtgggcgacagcaagcgggccatggatgagtacacatcggagatcatgatgggcggccacaacaccctggtgatccacaacacctgcgaggactcgctgctggccacaccgctcattctggacctggttatcctcggcgagctgagcactcgcatccagctgcgcaatgcggagaaggaatccgccccgtgggttcccttcaagccagtgctttccctgctgagctatctgtgcaaggctccactggtgccccagggctcccaggtggtcaactcgctcttccgccagcgcgccgccatagagaatatcctgcgtggctgcattggtctgccgcccatctcacacatgaccctggagcagcgggtaagtagggtcaagtcaaaagcaatcattcggatccttaatatcctcgatttcttctttctattcacagttcgacttttctaccattacaaatgagccgcctctaaagagggtcaagatcctgggccagccctgctccgtggaatcggtcaccaatggaaagaagctccatgccaatggacactccaatgggtccgccaagctggccactaacggcaatggtcactgatggatggccgcatccctgattttcgatcggaatatataattggaatatatatggttttagttggataaactacgaaatagacttaagctactattactaactgaatcgtttaaatataaaaaggcgtaatagactgttgtctgtataccacaaaacaaatatttatttcttatgagcacgatcatatcatatcatatcttagagatcatggagtttactggatatggaacacatcttcaaatgtttgggaaacaacaatggaaggaagttcctgcattgaaatacttaattaatatccacgtttagcctaaaatttagttctcgaagattattcaaaagttcttagtatgagtaaattttagtttaagatgggtaaataataacgacgtttgtttggtacaaatagtttagttattatcatattagaagctttttgttctcatattccaatttcatttttttgaaggcatgaaaataacatgaaatagaaaaaaaaatgccaccttttaggcgaaaaacgctatctgttgtggtcttgctgctaaaaatgtcaacctttttttctgacagttgaatcggtttgatcccgatgattgttgctaaatattaaagtataaaatattatatgagtgttaaattatgtccggtaagacactttattttaataaaggtaatcgatcgttgaggacataaccactatcaagtaactagattagttattgtattgggacttcaaagttgatattaaaactaatttaaattaatgatttaattcagttagatgataccgaatgatacacacacgctttctgtaatatgattaatcgattgtcagaaggaataattaaacccgctaaaaaatatgcaatgaaaatatgttcttcagattgtatctttacaattgttccatacattatgataagattcttttgagaatggtgtgagcccacaataaagattttatttacccatctgttgcgatatcgaactttgatagattcttatcttggatataaggcgtgtgtcgtattgtagccacagaatgttacacacatcaccatcaggaactgaaatatttaccttatgaaactcaatcgaatactattttcatattcgttactcatagggtaaaagtatatatactagatttgttaaagtacatttatatagtaaagtatatattcttgatcagggtcaatattggaatcgatctggccgtgtccgtccgtgtagaggttgagatccaagtttggccaatttctatcggtacagcaaaagaactttggccacgcaccttctaaccgcccacacttttaaattttttgtatatttttttaaattttattatttgccaatttctggcgggaactaaccgaatctggatctgggctatgggatttttccgttcatatgaaagtctcgatcttaggcactataaaagc

SEQ ID NO: 23282 - DNA, 2280 bp, DROSOPHILA
cactcagccgagtcattcgccgcgaacttttgcctcgaccacatcgcagtctcttttgcagaagccaggaattccagaagcaagcacattgaaacgcgctaattgacaagacgagagtgtgttagcaaaaacatcccagaatgaagcccaccaataactcaaccctggaggtaatctcgccgaaagtgcaggtggacgatgagttcatcaccaccgactacgattaccagacatcccatgtgaagcgcaccgccgatggacagctccaggtgcacccccagacgacgtcgctgaagatacggacgggtcgccatgtgcccaagctgggcgtgatgctggtgggatggggtggcaacaacggatccacgctgaccgccgccctggaggccaatcgtcgccagctgaagtggcgcaagcggacgggcgtccaggaggccaactggtatggttccattacacaggcgtccaccgtcttcattggatccgatgaggacggcggtgacgtgtacgtgcccatgaaggagctgctgcccatggtggagcccgacaacattatcgtggatggctgggatatcagtggcctgcatttgggcgacgccatgcgcagggccgaggtcctagacgtggctctgcaggatcagatctacgatcagttggctcagttgcgcccacgtccatccatctacgaccccgacttcatcgcggccaatcagtcggatcgggctgacaacgtgatccgtggcactcgtctggagcagtacgagcaaatccggaaggacatccgcgacttccgcgagcgcagtggcgtcgattcggtcatcgtcctctggactgccaacacggagcgcttcgcggatgtccagcctggtctgaacaccaccagccaggagctcatcgcctccctggaggccaaccactcggaggtgtcaccctccacgatcttcgcaatggccagcatcgccgaggggtgcacctacatcaacggctctccgcagaacacctttgtgcccggactgatccagctggccgaggagaagaatgttttcattgccggcgatgacttcaagtccggtcagaccaagatcaagagcgtgttggtagatttcctggtgggagctggtatcaagccggtgtccattgccagttacaaccatctgggcaacaacgatggcaagaacttgtccgctcctcaacagttccgctccaaggagatttccaagagcaacgtggtggacgacatggttgcctccaacaggctgttgtacggacccgatgagcaccccgaccacgtcgtggtaatcaagtacgtgccctatgtgggcgacagcaagcgggccatggatgagtacacatcggagatcatgatgggcggccacaacaccctggtgatccacaacacctgcgaggactcgctgctggccacaccgctcattctggacctggttatcctcggcgagctgagcactcgcatccagctgcgcaatgcggagaaggaatccgccccgtgggttcccttcaagccagtgctttccctgctgagctatctgtgcaaggctccactggtgccccagggctcccaggtggtcaactcgctcttccgccagcgcgccgccatagagaatatcctgcgtggctgcattggtctgccgcccatctcacacatgaccctggagcagcggttcgacttttctaccattacaaatgagccgcctctaaagagggtcaagatcctgggccagccctgctccgtggaatcggtcaccaatggaaagaagctccatgccaatggacactccaatgggtccgccaagctggccactaacggcaatggtcactgatggatggccgcatccctgattttcgatcggaatatataattggaatatatatggttttagttggataaactacgaaatagacttaagctactattactaactgaatcgtttaaatataaaaaggcgtaatagactgttgtctgtataccacaaaacaaatatttatttcttatgagcacgatcatatcatatcatatcttagagatcatggagtttactggatatggaacacatcttcaaatgtttgggaaacaacaatggaaggaagttcctgcattgaaatacttaattaatatccacgtttagcctaaaatttagttctcgaagattattcaaaagttcttagtatgagtaaattttagtttaagatgggtaaataataacgacgtttgtttggtacaaatagtttagttattatcatattagaagctttttgttctca

SEQ ID NO: 23283 - protein, 565 aa, DROSOPHILA
MKPTNNSTLEVISPKVQVDDEFITTDYDYQTSHVKRTADGQLQVHPQTTSLKIRTGRHVPKLGVMLVGWGGNNGSTLTAALEANRRQLKWRKRTGVQEANWYGSITQASTVFIGSDEDGGDVYVPMKELLPMVEPDNIIVDGWDISGLHLGDAMRRAEVLDVALQDQIYDQLAQLRPRPSIYDPDFIAANQSDRADNVIRGTRLEQYEQIRKDIRDFRERSGVDSVIVLWTANTERFADVQPGLNTTSQELIASLEANHSEVSPSTIFAMASIAEGCTYINGSPQNTFVPGLIQLAEEKNVFIAGDDFKSGQTKIKSVLVDFLVGAGIKPVSIASYNHLGNNDGKNLSAPQQFRSKEISKSNVVDDMVASNRLLYGPDEHPDHVVVIKYVPYVGDSKRAMDEYTSEIMMGGHNTLVIHNTCEDSLLATPLILDLVILGELSTRIQLRNAEKESAPWVPFKPVLSLLSYLCKAPLVPQGSQVVNSLFRQRAAIENILRGCIGLPPISHMTLEQRFDFSTITNEPPLKRVKILGQPCSVESVTNGKKLHANGHSNGSAKLATNGNGH

SEQ ID NO: 23284 - DNA, 11984 bp, DROSOPHILA
tgttttcgaaagtgcacaggagctaacggcagtgcgagtggttacataaaattagtatataaatcacaacactaaaaaagacctcgccgtgacagaggtttgttgtttgagagcgtaggcatcgctagaatttaaatgctcaattcaaactttttagcttttatagtaccctagatctcgacgttcatacggtaagcgaagaaacattcatagaaagtgaataaaatttacatcggaaaaatgggatcttccatttcatgatctttgggtatgaataaatactgcaagctagttggcgtcaaaaaggacgaaaatcatcactcagcttaaatatttgtacaagtctcttttgttgcgttgcaaaatgacagaaatcaataaaccatataaggcaatcattttattgcactttgtatatattttgggacgacatggttgctttgaacaattatgttttaaaaaattaaagttttctttatttgtttggacgaccataaaaatgaaccggtatatagataatacaaatatttgacttgccaaatttgtccatgacatgttgcaatttatgaagtaaaaaagctacctgttacataattttaggtgaaaacgatttataaactgtcgcctgttggtaaaacgtcgtaattccggaacttaacagagcacgatagttgggattaaggatttagactctagctatgtaagtatgactacccagatcaagttaaatttcaaagattgtgacaccatcatatattttttcagtctactttttcttttaataactatgttcctaccgaaaagttccataaatttattataatccatatggtatgatttcaatactgttttgacttgtcaatacgtcagtgtctattggagaaaaagtgaattgatagtttccataacgggtatccgatagttggggcactcggatgtatcatttgatcctgttattttaaaaaattgtaaaaaatttcatttaacagataccgaattcaatttaaaaacagactttgaggttaggattcggataacatatttaacaatgaattaaaaatacctaactgaaagtttgaatgttacacgtccaatcattttctaacgttgaggacctgtgtatttctctaagtccttgctttcacctacaccgtcttattttgttgcacagtgttttgaagtgagatttttcctcacgattaatcttacttatttactatatgacagattggctcaacgcgttcgccaacttcgggtagaaattctccattggtcttgtgagcaacatttgtttgggctgatgcttcatcaaggtgggggctattttgtgtcggaagggtacttgaagacgcatttgttcctaccgcacctcctgttagcgcagaagtgcctggtgcatgtgtgcgactatatccagagctggttggcgcaccctgagctaccgccgctgccgatcgcctgtagacggtgctgttcatagtcagcttgcggacattcttgtccgggtgaaagacgaggatgtatactttaggtgaataaagacatacaagagccactgacgcacttagacttattgaaatacacaacgtagtagtttgcacctaaaaaattcaaatattttgttatagttatctataccgtacttgaaaccaggagctcagttacagtaaaacaatttcatttatgttgatttgattaaaccaaaatgtatacacaaaagatacctcaaagtaaattaataaattaacaaatagaagtcgtaagtatttttaaaacctcaaaatcaattttcgtaatttatattttatatatacatatatatatttttcgtttgaagaaagcgtacaaaaacactgaaacaaattgccttatctttatcaggcttattttcggtatacacaattttttacttaattttaaatatgataaaaatcaattgactatatcgtatattattggataagaagtcgtagctttgtggttctatttattatgtgttttctttgatgtgagatatttagaaaactgtataagctagagttttggaaattgttttcattcattgaataattctataaatgataagattttatgggatgcggtttgttgtttatagatttttatttatataaaaaacaattcataaattggtaaatcaaaattggttcaacatgatagcgccaatacgataatttaagtttgttcgattcatttcaaaaaaatgggatgattaacacttagatatttaaattagaacatttataaatgaaataaataatgagttgatcctcctttgtttttaatgacttcacacattcttttgggcattgggaggtattcgaagtataggaaagcgatcagccgcggtaaaaacaaggttattgccacctttctagttttttgttatcatacctttccaattatggaagataatcaaaactgcatcgggggcgctaatctaatgattagcgttcaattttgcgccgagagtaaaacaaagcagaattaaaaatataacggttcttctcaggacctctttttagaccccttactcgtagagtaaaacggtatactataatcgttgaaaagtatgtaactggcagaaggaaacgttaccgattatataaagtatatatattcttgatcaatagccgagcccatctagccatgtctgtctgaccgtacgaacgtcgtgatctcttgtaaacgccttaaacgccctaaatctgccacgcccacatttttgaaaaattgtttgatattttttaataattttattaatcgtgtaaaggtttatcgatttgccaaaaaactttttgccgcgccctttctaacgccctcaggccgccgaataggtcacgcctacactttggaataatttttagatgtcccagaaaaatttaatttcgcgttcgcacttacactagctgagcaacgggtatcttatagtcggggaactcgactacagcattcggtcttgtttatcttaaagagagagggaatgtcagtaaacaaaaaacattgatgaattttcgtgcaatggcaaaatacagaacataagaaaaaacggggccatgattatctgatgacgcgcagtgtataattcttgcaagggaatgtatgcttcgagttgcaaaagtatccttgattaaataaaaatgtggcttgctaattgaaatggcagtgttcaattgtatcaccacattaatttaacaaatacatacctcataggaatttccagttccgaaatatatgggtacaaacgcaagccagattatacatgtggtatacatggtaaatccaataaacttcgactcattaaagttttcaggtatttttctcgttttaattgcataaatagtgcaaatggttatgagaatcatattataaagctgagaaaagagaaaggacatgtcttgtattttgcatttaagaatcacctcccttcggtctgggtaatagaatcgagttcctggtggttcaactaccatccaaatcattgtgattagcacctgtattgctgaaaggattgaatattaaataaggacatttaaaaatagttaatattttaccgatcagagaggtagttatcaccacttgtgattgtggactaatatacttaaggcgctgtgctgacttagaagcagagtgaaagattcgtgaaattcgatttgtttttgttagcaaggcactgtatataatggaaaagccaaccccaataccaaacctttgtagaacacaggagccaattgttggcttagctatcagtgcaaaagtattacaataacaaaccagtataccaaaaagaagagtataacttagctctcgtcctgatgctcttaccaatggagtgtcatgattttttgcaaataaaactattacaatactggtcagtgcaataccaaaaattgcaattgccatcggaataagggcaaacaacgagttccatttcatatactggatgtctaaagcatagcaggagagcttgtcagcatagggccaaagtccaggaccgcagtctttacacgtaaactcatcatatacgtattcaaaagattcacagctgtcgcatatccagcaacaggtatccccctacaagattaaaattcggtgttaaaatgacataactaaattgactcaaatggtaattacctgttgtttcttgatcattccgacctcacatggtagtgaacaggccgaagtaggttgttcggtttccttgttccatacaactgtttctgagtttagttgcaaaccattaaaccattttccaataacctgaaaattagtttggctatatatctttgtgatagcaaattttttaaataaatacgatattgaaaattcatttacaatatatgtacaaaatagtacacaactgtcattgtttggaattctcatatgtagacaaatcggttaattgtttaatatgtttttttccagtagataaataaaatttacataggaaagttgtctgtttcaatgtcactgcgccatccatccctaagagtagttgtgtccgtgtaataaccaaataaagaaatttatatacttggaaatctcataccattatttttataatttttgcatacatatttgtgtgtgatttatggtaccttatactgatatcctgaagagttttcttgccgttgataattcaaaatgtcgtatctggccaaaccatcgccttgtcgatcgaatttaacttcgctgccagcaagatctattcaggacgaaccccgtataggattacaaagtttattattaagtatattaagtatttttaacaaaatcaactactcaacctatgaatgatacgttcaaaaggtaattgttgtaaaactcctttccgtcataattagccatgtcaggacacgcttgggacttagtatcagtcgaaatttttcgataccacacagattcgctttgtaggtgcttccttgtctcagtcgtttggtcgctttgtgtgttgcaacgatcattatgcaaattatgaagtgcataggcaaatgcgtagacggcatccacaacaaattgtgtctttgactcctgttcgtatctgtaataagacatactcttttctgtttcttctaaatcgatttgtaacttacaaataatgtaggaatttttagagtagggctttaataggaaataaaaacactttcgtaatttcatttaattgaaacaataagaaagcatttggggagtggtcacttcacgcataccttcaatggtttacgttagacgtcatatattattaaaatatcactttatattatcacgaatttatatttaaatattttaaacggatttttattgagtttaaaaattttgcagcacatggaagtgtaacaatttttttgccaaaaaaaggtataaagatcatgttttggcaatccaatagaatacaataacagttttctaaattattggcttgtatacgttgaaaatatatattgtactcagtggttttctttacattttaatatgatatttttccctgaagccactaacaatactaaccctgaaagtgtacattttaaatagggaaggaagcctcacttggttagtccagtgttcaacaaggcgtcactcgtgatggcaataataccgccactggacacacctatatacataacagcctcaaaatatgaggtggtcttaaagcagacccggaaacatttcctccgttaacgccaagaatgcaatacggcagttgcaaggcagcaccacaacagtggtccccagtctcaaggagtggatcgagcggtaaaatggccaaataaacatagatctaacacagatgatcagcgggcatcagaggaatgacaattgtggtcaggagagctaagagaatcggaaggtagctattgtgaacaggcccagaattccccgcgatgcaatactgattccattcttgtaatgtatgtatatatgtaaacatgtaaatgtatatgaatgaatgacaaataaaaattaaaaaaattaaaaattatctgtcgcaaaaagagccaaaaaggcgatttacgttacgttatttatttactttataaacatataaaagttatctgaaaaacatgagatgtaaatacaaccaatgccgaaaaattatctgtcgcaaaaagagccaaaaaggcgatttacgttacgttatttatttactttataaacatataaaagttatctgaaaaacatgagatgtaaatacaacctatgccgaaaagtatgcattatgcaaagtatgcaacaacaattttcttacaaacaccatacatttatattttatattttaattagacctgtaaatttgtatcgattcgaccaatgttttacacgctcacccttacgtccaaaatccgcccaaactcccacgcccacacttttacaatttttttttcatatttttattagtcatattcatattcatattcttattagtatacacataaaaaacgcctaaaacagtcacgaccacactttttaacaatttgaaaatttgttttcttattttattctccaatatctatcgatatcccagaaaaattgcaaaatttcgcgttcgcatttctcctagctgagtaacgggtatctaatagtcgggaactcgactataacattatcttatgttttttaattagaaataccaatagtccttaagaaggcacagagagcgttcgctttgcagatgaagatgaaaattctatgaatttattcattatattgtgtggaaaattatcagaattagattagatcataatataagattcaaacaataagacactgtcgaacgcttactggtttttgtagccaaagaaaacagccagaaagaaatcagttatttgtgcggagcacttctaaagggttttgcgcaggttttatggctgaacgatttaaagagcaatggtgtatataagtatatgaatatatacatatatattattcaagcgaagcaatgccgcattcgctcctcagaaaaatatagaagctgtatactgactcctgatcttatagttcagatcatgacactcatataaacagtcatcctgatccctttggatctataagtaataatgctctaaaaataagaaactagttggtcggaacttacccaactttttcagataaccggtaactatcgtcgcattctgtttttgctttgacgccgattttattgtcagtagaattagccgagtttgaagtatcaggttttaccgaaagagatgtcaaaacacagttgaatgtatcttcccagtattcagcaaaccaaggattcctttgatttgtctctggcgtcagttgcatcatgtagcgatcaaaatctgcgattatctctgactgcagttctacagttattgcaccctcagcgatgtcctctaagccttcgagtagtttttgttgtttcccccaaccatcacttgctatccaatgaaatggttgcgataagttagctcgtttagctgcttgtaaaattcgacgcgcatcttcagctctcgtaaaaagaacaacgccgcgagcgttaggcttcttttgaagcttgcttataatggaatcgaaaactttgtcgtctgcggcactgggtactttctcggctaccgctatgcaaacatttcgttcggtagcttccttgtgtaatgcttcaatcccatattcacctatttattggttaaattaatatcatatgttaataacgtaaaaaccgcattaaattatacaagactacacaaacccattgaagagggtacatttatttcaggagaaaaagtgctatagtcgagttccccgactatcagacacccgttactcagcaagtggaaatgtgaacgcgaaatttcatcatttttttgggatatcgatagatattggaaaataaaatggaaaaaaaatacaaattgttcaaaagcgtggacgtgattgttttgcccgttttgtaggtgttacaaggggagtagccgaagtggtatacaaatagaaaatgtcaagacaaacaataacacgaagaagtttcaatacatttttcagaagtgggcgtaagagtgggctctagaatcagcatgcatcatctcagccttttagctttcatagttcctgaaatctggacgttcatacgggacatactggacgaacagacagacggacggacaggggcagatcgactcggctattggcccttattaagaatatatatactttacgttaataaaaatcagaattcgatatttgttatcataaaattcggtttgaatgcccgtctgtccgtataaacgcctcaatctaaggaagtataaaagctagacaattaagattgagcatgcatgacatagacgaggcgcaagattgtttcccgatgttgctcactctaacgcccacaagccaaaaattccacgcttaaacttttaaaaaacgtttttatattttatatatagacttttattgtaaatttctatatttaaaaacatttttctattcctcaaacgccaacaaaccgtacaatacatttcaattgttaattgtttttaattttaaacttctgttactaagttctaccggtatttcagaaaatgttgaaatttctctttcgcacttttactagctaagtaacaggtatctaatagtcagggcattctctcttgattttttatttaattatgataaataattaccgaaagggtatacaattttctgctttcagaacattgattaagactcaccataagatccttccgaatgtatcgttgatacgtatgaccagttaaagttttttagtatgtccacgagggctacggattggaaagtgtctggaggtactgttcgagcaaacagatcaaagcgtgttttgtccgaaagcgttttagcggttgaggccggtgatacttgaggaatatgaaacagacgcagcaaattggccacttgcaaggacactgaactgtaggacccgccaataactccaaaaactgggcctgacgaagcattttttcttagttgcgggcttgacccatctgcacactcatatcctgatgtgtctaaattgtttagggatgctctgacaaattgaagcgactgattgagggcatatgtgtctcttgaacaggtgtcaagtatatggactcctatcgtaattccaggaagtatgttggggtcattgtttacacgatctatagcatacagcattgcttccaggcgttgaactcccctattatatacttttggtccgcaaggggcaccttcacctttttcatggaccggaaatagcccaccaagtataatgtcgccaggcagagaaacagacactgaatcctgagtatgtgtgttactaggactttttaagtctactactcgactccaggataaaaccatcacgacgactaaaattgttccgttattatttttctgtttcatctttttaaagacacgtggatgatttaagttaacaatgtattaggcccgcaacgtgaaattcaggttcatgtttttgcatgtccttggttgatgcttgtctatgggaaccgaaaaaattctataattaaaaatatattacaagcttattatatttaaacagaaacaagagttaatgaaatagtcgagttcatcgactgtcagatagccgtttctcaacttgctggagtgcgatggagaaatttcaaccatttttgccctgtcgatagaaatcataaaagacaaatctcttaacgaaataaaaacaacaatttttcaaaaatgagtgtgggcgtttttaagctaaacaaataataatataaaataagagatagtcgagttccccgactatcagatatccgttactcaactggtggaaacgcgaactagaaaattcataaattttctggtatatcgatagatattggaaaataaaatgagaaaaaactaaaaaattgttcaacagtttgcgcgtgacagttttgggcgtataccggtgaaattggcaagacaaacaataaaacgaagaaaaatcaaaacattttccaaaagtgtaggggtggtaggcgtctttgtccctagtatctgtaatctttaatagtttcttagatctcgacgtttattcggtcggacagaaggacatgacgggttggttattgatcctgatcaagaatatatatactttatatggtcgaaaacgctaccctctcttggtacatactttttaacgaacacactacgagtaacgggtataagtagggagaaagctataataatatttttggcataccgatacattttgaaaataaaaacaattaaatcacgtaggctcgtttttaaatccatgcccaattttttctaaaactaaaaatattaagattgatataaatatactctctgcactggtattaaaacaaaaaatgagtatttacttagcacaccaggtaaaacattatttatagccaaaattgttgggcacttccaacaggtgtgggattgtcagaacaccaagcattttcataatacttggttttctatataatttagtggttcttgcctgtggtaaaagcactattaacacgtaacagcaaaagctttggaatgtaaggacaagccaagtaccaaaaagaatggtactgatgatggcgttgctctgaagctgcaaaagcaatgtgttagcgaaagccctaaaaaagggcactcatacttatctgcagttattttcatatatgtacaaagttattgtaaaatattgagtcctttacagtaggtttcatgtgcaactatcttatgtacgtgtggaaaagtgcaacttttttaattgtgtttatttttgtcaacgagattccttgttttatgatgaacattgaacaactttaaaatgtgcaataattaataaattttatcactattcacaactcttttctttagaaaaattatttataatgttcacaattaaattaccttttttcttatttaaattcttatacaactttatcgcaacatttcttaaaaccttttttatatttaactaatacgcgcacgtcttgtcctaccattaccagttggttgactgatttatccatgataagctaacacgaaatcagttcttgtagaggcagcagcagcacaacaacaaccaagaaatgggtaccagcagcagtggccaagtaaaagaacaacaatactagcaacaatctacaacaatccttctaactgtccatctctcacggaatttgagagagaaagcaccattacggcagcataccaaagagaaaaaagcattaatgctctctcatgaaaatttaataacggtttttaagagagctgtgtagtcttactccttaccacctgtctaacaatggtttttcactatactcattgtgttcgttttacacgggcacactaatggacttttcctagggatgttgcaataagcacaacagttttttctggagctcgaatttcagtaaaaatgttgtagctctaaattcgtcaaatagaaatgtacttttccacatcttgtttttttacttagttcgatttactaaaattaacaaataattaaaacaattaaatttgcgtcatctttgcggcgtttaatcatctgtatttgccttatgtatatatactatactatacatatgtatatatacttgtatatagatacatacatatttatatattatattattgataataactacagaaatttgaactatcgatatattccagatcttaaattaagaaagttatataccatcctcaaaatataaaacaattatccagatgaggtacgtcagcacatacatataggaaaacacattctcttttaagaaaattaacatatttatatactcgataacgtaggtgataagtgtatactagatatgttgaaaggtatgtaacaggtggggaaaaaaatttcgaccatattatgtatttatacttatatagccgagtcaaataaaacgcccatgcccactttaaagcccactgatgtaatattgttcattgtatgtcttgttcaatttggcaaaaaatttgttcac

SEQ ID NO: 23285 - DNA, 3322 bp, DROSOPHILA
gacaagacgtgcgcgtattagttaaatataaaaaaggttttaagaaatgttgcgataaagttgtataagaatttaaataagaaaaaagacaagcatcaaccaaggacatgcaaaaacatgaacctgaatttcacgttgcgggcctaatacattgttaacttaaatcatccacgtgtctttaaaaagatgaaacagaaaaataataacggaacaattttagtcgtcgtgatggttttatcctggagtcgagtagtagacttaaaaagtcctagtaacacacatactcaggattcagtgtctgtttctctgcctggcgacattatacttggtgggctatttccggtccatgaaaaaggtgaaggtgccccttgcggaccaaaagtatataataggggagttcaacgcctggaagcaatgctgtatgctatagatcgtgtaaacaatgaccccaacatacttcctggaattacgataggagtccatatacttgacacctgttcaagagacacatatgccctcaatcagtcgcttcaatttgtcagagcatccctaaacaatttagacacatcaggatatgagtgtgcagatgggtcaagcccgcaactaagaaaaaatgcttcgtcaggcccagtttttggagttattggcgggtcctacagttcagtgtccttgcaagtggccaatttgctgcgtctgtttcatattcctcaagtatcaccggcctcaaccgctaaaacgctttcggacaaaacacgctttgatctgtttgctcgaacagtacctccagacactttccaatccgtagccctcgtggacatactaaaaaactttaactggtcatacgtatcaacgatacattcggaaggatcttatggtgaatatgggattgaagcattacacaaggaagctaccgaacgaaatgtttgcatagcggtagccgagaaagtacccagtgccgcagacgacaaagttttcgattccattataagcaagcttcaaaagaagcctaacgctcgcggcgttgttctttttacgagagctgaagatgcgcgtcgaattttacaagcagctaaacgagctaacttatcgcaaccatttcattggatagcaagtgatggttgggggaaacaacaaaaactactcgaaggcttagaggacatcgctgagggtgcaataactgtagaactgcagtcagagataatcgcagattttgatcgctacatgatgcaactgacgccagagacaaatcaaaggaatccttggtttgctgaatactgggaagatacattcaactgtgttttgacatctctttcggtaaaacctgatacttcaaactcggctaattctactgacaataaaatcggcgtcaaagcaaaaacagaatgcgacgatagttaccggttatctgaaaaagttggatacgaacaggagtcaaagacacaatttgttgtggatgccgtctacgcatttgcctatgcacttcataatttgcataatgatcgttgcaacacacaaagcgaccaaacgactgagacaaggaagcacctacaaagcgaatctgtgtggtatcgaaaaatttcgactgatactaagtcccaagcgtgtcctgacatggctaattatgacggaaaggagttttacaacaattaccttttgaacgtatcattcatagatcttgctggcagcgaagttaaattcgatcgacaaggcgatggtttggccagatacgacattttgaattatcaacggcaagaaaactcttcaggatatcagtataaggttattggaaaatggtttaatggtttgcaactaaactcagaaacagttgtatggaacaaggaaaccgaacaacctacttcggcctgttcactaccatgtgaggtcggaatgatcaagaaacaacagggggatacctgttgctggatatgcgacagctgtgaatcttttgaatacgtatatgatgagtttacgtgtaaagactgcggtcctggactttggccctatgctgacaagctctcctgctatgctttagacatccagtatatgaaatggaactcgttgtttgcccttattccgatggcaattgcaatttttggtattgcactgaccagtattgtaatagttttatttgcaaaaaatcatgacactccattggtaagagcatcaggacgagagctaagttatactcttctttttggtatactggtttgttattgtaatacttttgcactgatagctaagccaacaattggctcctgtgttctacaaaggtttggtattggggttggcttttccattatatacagtgccttgctaacaaaaacaaatcgaatttcacgaatctttcactctgcttctaagtcagcacagcgccttaagtatattagtccacaatcacaagtggtgataactacctctctgatcgcaatacaggtgctaatcacaatgatttggatggtagttgaaccaccaggaactcgattctattacccagaccgaagggaggtgattcttaaatgcaaaatacaagacatgtcctttctcttttctcagctttataatatgattctcataaccatttgcactatttatgcaattaaaacgagaaaaatacctgaaaactttaatgagtcgaagtttattggatttaccatgtataccacatgtataatctggcttgcgtttgtacccatatatttcggaactggaaattcctatgaggtgcaaactactacgttgtgtatttcaataagtctaagtgcgtcagtggctcttgtatgtctttattcacctaaagtatacatcctcgtctttcacccggacaagaatgtccgcaagctgactatgaacagcaccgtctacaggcgatcggcagcggcggtagctcagggtgcgccaaccagctctggatatagtcgcacacatgcaccaggcacttctgcgctaacaggaggtgcggtaggaacaaatgcgtcttcaagtacccttccgacacaaaatagcccccaccttgatgaagcatcagcccaaacaaatgttgctcacaagaccaatggagaatttctacccgaagttggcgaacgcgttgagccaatctgtcatatagtaaataagtaagattaatcgtgaggaaaaatctcacttcaaaacactgtgcaacaaaataagacggtgtaggtgaaagcaaggacttagagaaatacacaggtcctcaacgttagaaaatgattggacgtgtaacattcaaactttcagttaggtatttttaattcattgttaaatatgttatccgaatcctaacctcaaagtctgtttttaaatt

SEQ ID NO: 23286 - protein, 976 aa, DROSOPHILA
MKQKNNNGTILVVVMVLSWSRVVDLKSPSNTHTQDSVSVSLPGDIILGGLFPVHEKGEGAPCGPKVYNRGVQRLEAMLYAIDRVNNDPNILPGITIGVHILDTCSRDTYALNQSLQFVRASLNNLDTSGYECADGSSPQLRKNASSGPVFGVIGGSYSSVSLQVANLLRLFHIPQVSPASTAKTLSDKTRFDLFARTVPPDTFQSVALVDILKNFNWSYVSTIHSEGSYGEYGIEALHKEATERNVCIAVAEKVPSAADDKVFDSIISKLQKKPNARGVVLFTRAEDARRILQAAKRANLSQPFHWIASDGWGKQQKLLEGLEDIAEGAITVELQSEIIADFDRYMMQLTPETNQRNPWFAEYWEDTFNCVLTSLSVKPDTSNSANSTDNKIGVKAKTECDDSYRLSEKVGYEQESKTQFVVDAVYAFAYALHNLHNDRCNTQSDQTTETRKHLQSESVWYRKISTDTKSQACPDMANYDGKEFYNNYLLNVSFIDLAGSEVKFDRQGDGLARYDILNYQRQENSSGYQYKVIGKWFNGLQLNSETVVWNKETEQPTSACSLPCEVGMIKKQQGDTCCWICDSCESFEYVYDEFTCKDCGPGLWPYADKLSCYALDIQYMKWNSLFALIPMAIAIFGIALTSIVIVLFAKNHDTPLVRASGRELSYTLLFGILVCYCNTFALIAKPTIGSCVLQRFGIGVGFSIIYSALLTKTNRISRIFHSASKSAQRLKYISPQSQVVITTSLIAIQVLITMIWMVVEPPGTRFYYPDRREVILKCKIQDMSFLFSQLYNMILITICTIYAIKTRKIPENFNESKFIGFTMYTTCIIWLAFVPIYFGTGNSYEVQTTTLCISISLSASVALVCLYSPKVYILVFHPDKNVRKLTMNSTVYRRSAAAVAQGAPTSSGYSRTHAPGTSALTGGAVGTNASSSTLPTQNSPHLDEASAQTNVAHKTNGEFLPEVGERVEPICHIVNK

SEQ ID NO: 23287 - DNA, 7314 bp, DROSOPHILA
aagcgctttgagcgttctattttgggtacctctgacctacagctaagaccaaaaaaaaaaatgtgacatcgctcttgctaaagttagttttcatacatatagatatacatattttagattttttgttcggtttttcttcgttttggtaacataaaattaatcaacaaatttttagagttgcttgctaaaacttttcttagtgtaaacgtgccttaagcgatgcccactagcatccgtcgccaaaggaattaggatttataaataatggcgtaattatctgaataatcggacgatgctgggcggtgctagtgggcgagtgtttgtgtgtgtgtgtgtgtgtgctgcgaaaagttgcataagtttcgaccatataatcgctagaagtgagttgtatgtgttctaccataaatctttagccaatggaagagttttttttgtttttacttttggcgcccaatgctacaattagttgctcctaatctgatgctcggttcggtgtaaacacatctaaaatctgtaccatctttgtccgcatttgggatcatcatgtaccgctacgtttttagcaactgtcgtcaagtgcttttgttatccgtatctatatgcttttgtatatatcgtctcgcttgtatatatgccttctatataaatatcgtttgttgtttggtttttgtaatttgctggtattgtctgaatgtgctacgtactttaaacgctaaactagttcgtgtattagtgagtgagttttgtgtttgtgtgtgtgtactttagtagaccgacatacaaagttcgaggcaaaaaaaaaaaaacatgaaaaaattgccatcatccttttacaactaactcgcatatataactagtgcatacacatcgttcacataggtttctacgttctctacacgctattaatatgttattctgttttggttccccatcccctggagcctctaaagcctccgattggccacatcccggtgtccttcgagttcttggagcctctctagagcagctgggcgatgaccggctcgatcagacacatgtgctcggcaccgcgcactggcagccggttgaggcaaaagtgccggatcatctccggtaccgtctcgaagggacgactaaactggccaaggatgtactgtccagtctcgttgcgctggatgcgcatgtgcataaagcccttggcgcccctaagaagcacggatttagaatattattttcatgtcatttaagatcctttcatttcgcttacttgagggatagcgaatagtcctgcttcgtggactcgcagttgcgcaccaggaaggatccctcggacagcggacgcagtgtggtctccgcctcaattcgcgttatggcaccatggtaccaactgaaatatatagttgattaataaattatcttgaatctaaatggattcactttacccctgccgctccagcggaattgtcacatcgattagatccacagcagtgacatatccctggctgagattcatgtttagctccttgttgctattgagaccacgcagatccaggctgccaaactgtttggtcgcctgtcgcgattcattaaggtttagagtgagattctgccgaaaaagtgccgtatctgtagttgggataaaaatcagtagtttgctatgaataaagcacaaagattcgattcagttcaactaacccaacttgctggacatcttttggtcgtcgcgcatcgaatgactggaggaagcctgcgagatgccactggattcggtgctgtgcatcagcaggttattgatctccgcctggttggccctcaggcgtcgtcgcaacttgggcatgtcgaagggcagctcgccgagatcgacggacgtggcactgcccgatgtgcaggcggcctcctgttgcagcgtcttgcgtcgcctcagtttgggcatatcgaagggcaaatcgcgcagatcctgctgtatgccagtcgatccgctggcaactaccgaaccggatcctgatcctccagcgccgctactgccacccgttgctgagctacctcctgctccggaggccgttgccgacgttgttgttccttcagcaccaatcaactgtagcttgggcagcgttaaacgctgtagcgctaaggcctgcggttttccatcctcccgggaatgcagcgatatcccactatccgaacccagtagctcatcggccagctggagcagggccttatttggtgcaccccgattgctacgcggctgcttcaaggaggcattcacctggacttggttccctgctggtgcgccactcgttgtggaatcgtcttcctgcgacgccatcggcgccagctgctgggacggctgctgtgattgctccgaggcactggccgatgccggttcctgcgaggacttgtcggaaatgggactcaggatgtgcagcttggagtgtagcagcaggggagccggtcgcaggggataggccacactggagcctccgctaccgccgctgccaccgctgccgctctccgagctgtgagagctcagcgaactggagtgccgcgactcggagctggaggtgctgcgattgccctcgctggtgctggaacgcagcgattccatgctgccgccactgctcgaggtggcaatgctctcggtgctgctgtagttgtggccaccaccggtcgtttgcccctggctttggccatggcgatttcttctgctccccggcgcatgatgatgatgatgatggtgatggtgggtcgactggccaccctgatggccctgggcactgcgtcgcagctctagcacccggcccgattcgaggacaaaagatcgcggtcggcgtggagctgctgatccggttgccgagacggaggccgaggcggaagccgatgccgcattcgaattcgagttggtcgagggcggattcacgtaggcgctgtcggtgagactgttgtcattgctgctgccgccgcactgatgccgcatggactggatgggcagacggagatcccggagacggggatgcgctggattggcggcgggcagattgggtgcactcctgatgctgttcatgttcaggtagcgatcatgtttgccgggaaatttcatcggcagcggagccgtcgatggcggcgatggggtatatccccgcacgggcagctgctgcgtgctggatgcacttgctccactaccggtagcactcacaccatgctgctggttttggctctggttctgattctgattctgctggtccacttgactcagctgcagcttgcccagctccgcctccacatgatgcacttgtacatgggcctcgcccgtttgctcttgcagagcctgatttttggagtttttggctcgcttgcactcggcccgcgtcttcgaagagccggttaccttgctgatgtcaccaccgttgccattactcaactgcagcaagaccgagcaattggtaatgcgatccacctcatctagatcgtcatccgacttggctatcttgcagtcgaaggccgtctcatagatctgccgccgccggctgcccatgatgtcctcggagtcgtcctcttcgtcctcgtcctcgtcaccgtccacttcgtcctcgtcgtcgccgtagatatcgagcgatggattgctcagcgttggcgctggaacagtcgcaggctgggctggctgggcgcactcgatgcactcgtggacgccatgtggatgcacatagaagatgctgcgcggccggaagtactcctcttccagatcatcgccgagctcgctgccccgtccgccggccaaggaggaggcaggagcggatgtgatgcaggctccgcacacggctgctggtcccagcaggcggtgcggtggcatcggctggacctgagactgtaagccaagcaaagagatataatataaaatttgataacgaaaactggcgcccaacgtggcttcatttgaacgtattgacttacctggttctccgctggagccggtggcggtggacagcacttaagcagttcgccctcgccggcgtcgcaatgctgcaactgcagctgaagctcgctgccagtgggattctgattccttggctgaacgttgcaggtcttgcggactaaggctaaggcacgagcgtgccactcgcgtcgcttgaggcactcactgcaatcggattcctcggaagtactggtgctgggcgtctcgcagcgaatgatgtgtacaccctcctcggtgaaactgtaacgcttgggcgtggattgagagtcctgtcccgtccggggatcctcctcttcgtgactctctgcttccggctgctcctccgccggcggcacatccaagctggagctcttccggtagccacccaactgtgtctgggtttgctgcggcggttcactggccgtcgactggcgacacttgagcttaaagtcctccctgtccttgtcccgttccttgtccttgtccttgtccttgtctttatccttgtccttgtctttgtccttgtccttgtctttatccttgtccttgtcacgactcttgagcagatcggagtagtagtagggcgagggctggcgcttgttgtgctccgccggagcgacggtcagtttgcgcggactgcgctgcagttgcggtggaagcggacgcaccaggtcatcggatatggaatccggcgagttgagtccggccgctggttgtgaagcactctggacaggtgcttgtggcacgggcagcggttgctgctcaacctcttcgtcgatgtccgcctcgtcgtcggaggatttcggagccgaggagtctgtaaatcgtgtcgaagaagaaagtaagttagttgagattaaaattaaaattaaagaagtgcttttctaaataaattcaataaggctcggtagccacctatttggccaatttaacaatctggtggttacaaaaaagacagcgtctgcttaatttgcggcttctagatgcggatactattttccgaggcactgagacgccgctgacagtttctaattaagtcgctgcgacgacattgcggcgccgcgggccacgcaatcggaacgcaaatggagttgacgcagtctatttggcgcttggctgccccgctgctcgcttcactgtctccatggatgtggattcacttgccacatccacacccactgcatctctatctttttgcagttgtttcccccattttgcaccccttaatcaaagcctgccagtttccattttacgcttggataatcgaagtagccgcagcgagaaaagttgaaccgcctttgggttttcctaattgctggccacttgcaggagaggagtcctctcgccaggattgcaaagatctctggaccatgaacgcctaatgaacgttagccgattgcaatttgattattgatttaaaaaaaaaaattttggttgagaaaagtttgcaaaagttgtgaacatatatatgtgcccagtgcaactcaagctatactattttcaaatatttctaacttaaacttagtttatagttactaatttttctattttttaggtaataactagcattagctgtgcttagtaatagtttacttatcatttgcatacctgaattgtattgactgttgcgtttatcctttcttgagttgccgttgttgttgttgtaggtggaatgccgctgctgtaacttttgctgcagttgctgttgctgctgcgcacttctaggcgttggcaacgtttgctgttgctgctgctgcaattgctgctgatgcggctgctgttgctgctgctgttgctgatgccgcttgtggccagtagtcgagcgtttcttggcctttttgtgatagacctttttgtgattgcgcgtatcctttggatctgaatatccttcgattaatttcaccgatgcctgcttgatgttgctgttgggcagcggtggatgttgcaatgttgcacgttgttgttgatgctgctgctgttgctgctgctgtgcccctactggcaatgtgttgttattgttgctgtgcgtatgctgttggccgtgtgtgctgccgccgttgttgttgttgttgctcaaatgctgatgctgctgctgctgctgttgctggtgagtggccaaaatcgcagctgttgctgctgctgctgccgtcgccgcctgattgggcaatgttgccacgggaacgggcagcggtggcggtagttgaggagctgctgctgttgcgtttgccgctgctgctgcagatgttgttgctgctgctgttgctgctgctgctgctggttgtagctgcaacgcttgttgggcttcaccaaatggcagctgtttggttcgaatagcaggcaaaacggaaatgaagaaagggcgaaaaagaaaggagaggggcattagcatttgttacgcggctaatttgatttgcatttcaatttccaatttgtttggcatttaattgaaaagaataaaggaatgtgcgtggccaattcgattgtggcgcttattgggtttccctggatagaaaaaagaacgaactacgccgcaagccgccaatcgaatcaagcttcccccagaagcagacaacactttttaagcctccttttcatttgggatcggtggcgtatacgttacgtatgttgtacttttttctgagtttcggtagttgctcagtttacctgcttaaaacattacttctttcatctatatgacaaattttagcgaagttatgacgaaaattccgtttgtaaaatcaagtttttggtaaaaactcgttttttcaaatttcggtcaataaataatccgtttttttgccacaacttttaaaataatggccccaatatggaatgtcatacctcgttgagctcgttatttaattccaaatcgaactgtgtccaaaaattggaattctatttttttcccattttttgcaaattttaatgatgttaccccttacaaaaaatgcgaaaatttacctaaaataaattttttctaaacccgttaaaacgtaatagggatagttagaattgataattagctgttcaaaacagttattctttcatctgtatgatagtatttgaccaaaatatggtaaaaattcaaatagaaaatatgacattttcaccaaatggcatttttcatcataaaataatcggttttaggcaaaaacattaatgttcctaatatgaaatgcaattgaaatttgaaccacaaactggtcgtaatgatgacagtcaaagaaacaatattctcctcgattcagcattcgccatttgtctgaatatttccaccgtgatagatggatttcctttctaatacaccatagtccatgttctaaccccacttcctgcctccctcccctgttttagtttgttcataacaattccatgtcaatcac

SEQ ID NO: 23288 - DNA, 4251 bp, DROSOPHILA
atgcccctctcctttctttttcgccctttcttcatttccgttttgcctgctattcgaaccaaacagctgccatttggtgaagcccaacaagcgttgcagctacaaccagcagcagcagcagcaacagcagcagcaacaacatctgcagcagcagcggcaaacgcaacagcagcagctcctcaactaccgccaccgctgcccgttcccgtggcaacattgcccaatcaggcggcgacggcagcagcagcagcaacagctgcgattttggccactcaccagcaacagcagcagcagcagcatcagcatttgagcaacaacaacaacaacggcggcagcacacacggccaacagcatacgcacagcaacaataacaacacattgccagtaggggcacagcagcagcaacagcagcagcatcaacaacaacgtgcaacattgcaacatccaccgctgcccaacagcaacatcaagcaggcatcggtgaaattaatcgaaggatattcagatccaaaggatacgcgcaatcacaaaaaggtctatcacaaaaaggccaagaaacgctcgactactggccacaagcggcatcagcaacagcagcagcaacagcagccgcatcagcagcaattgcagcagcagcaacagcaaacgttgccaacgcctagaagtgcgcagcagcaacagcaactgcagcaaaagttacagcagcggcattccacctacaacaacaacaacggcaactcaagaaaggataaacgcaacagtcaatacaattcagactcctcggctccgaaatcctccgacgacgaggcggacatcgacgaagaggttgagcagcaaccgctgcccgtgccacaagcacctgtccagagtgcttcacaaccagcggccggactcaactcgccggattccatatccgatgacctggtgcgtccgcttccaccgcaactgcagcgcagtccgcgcaaactgaccgtcgctccggcggagcacaacaagcgccagccctcgccctactactactccgatctgctcaagagtcgtgacaaggacaaggataaagacaaggacaaggacaaagacaaggacaaggataaagacaaggacaaggacaaggacaaggaacgggacaaggacagggaggactttaagctcaagtgtcgccagtcgacggccagtgaaccgccgcagcaaacccagacacagttgggtggctaccggaagagctccagcttggatgtgccgccggcggaggagcagccggaagcagagagtcacgaagaggaggatccccggacgggacaggactctcaatccacgcccaagcgttacagtttcaccgaggagggtgtacacatcattcgctgcgagacgcccagcaccagtacttccgaggaatccgattgcagtgagtgcctcaagcgacgcgagtggcacgctcgtgccttagccttagtccgcaagacctgcaacgttcagccaaggaatcagaatcccactggcagcgagcttcagctgcagttgcagcattgcgacgccggcgagggcgaactgcttaagtgctgtccaccgccaccggctccagcggagaaccagtctcaggtccagccgatgccaccgcaccgcctgctgggaccagcagccgtgtgcggagcctgcatcacatccgctcctgcctcctccttggccggcggacggggcagcgagctcggcgatgatctggaagaggagtacttccggccgcgcagcatcttctatgtgcatccacatggcgtccacgagtgcatcgagtgcgcccagccagcccagcctgcgactgttccagcgccaacgctgagcaatccatcgctcgatatctacggcgacgacgaggacgaagtggacggtgacgaggacgaggacgaagaggacgactccgaggacatcatgggcagccggcggcggcagatctatgagacggccttcgactgcaagatagccaagtcggatgacgatctagatgaggtggatcgcattaccaattgctcggtcttgctgcagttgagtaatggcaacggtggtgacatcagcaaggtaaccggctcttcgaagacgcgggccgagtgcaagcgagccaaaaactccaaaaatcaggctctgcaagagcaaacgggcgaggcccatgtacaagtgcatcatgtggaggcggagctgggcaagctgcagctgagtcaagtggaccagcagaatcagaatcagaaccagagccaaaaccagcagcatggtgtgagtgctaccggtagtggagcaagtgcatccagcacgcagcagctgcccgtgcggggatataccccatcgccgccatcgacggctccgctgccgatgaaatttcccggcaaacatgatcgctacctgaacatgaacagcatcaggagtgcacccaatctgcccgccgccaatccagcgcatccccgtctccgggatctccgtctgcccatccagtccatgcggcatcagtgcggcggcagcagcaatgacaacagtctcaccgacagcgcctacgtgaatccgccctcgaccaactcgaattcgaatgcggcatcggcttccgcctcggcctccgtctcggcaaccggatcagcagctccacgccgaccgcgatcttttgtcctcgaatcgggccgggtgctagagctgcgacgcagtgcccagggccatcagggtggccagtcgacccaccatcaccatcatcatcatcatcatgcgccggggagcagaagaaatcgccatggccaaagccaggggcaaacgaccggtggtggccacaactacagcagcaccgagagcattgccacctcgagcagtggcggcagcatggaatcgctgcgttccagcaccagcgagggcaatcgcagcacctccagctccgagtcgcggcactccagttcgctgagctctcacagctcggagagcggcagcggtggcagcggcggtagcggaggctccagtgtggcctatcccctgcgaccggctcccctgctgctacactccaagctgcacatcctgagtcccatttccgacaagtcctcgcaggaaccggcatcggccagtgcctcggagcaatcacagcagccgtcccagcagctggcgccgatggcgtcgcaggaagacgattccacaacgagtggcgcaccagcagggaaccaagtccaggtgaatgcctccttgaagcagccgcgtagcaatcggggtgcaccaaataaggccctgctccagctggccgatgagctactgggttcggatagtgggatatcgctgcattcccgggaggatggaaaaccgcaggccttagcgctacagcgtttaacgctgcccaagctacagttgattggtgctgaaggaacaacaacgtcggcaacggcctccggagcaggaggtagctcagcaacgggtggcagtagcggcgctggaggatcaggatccggttcggtagttgccagcggatcgactggcatacagcaggatctgcgcgatttgcccttcgatatgcccaaactgaggcgacgcaagacgctgcaacaggaggccgcctgcacatcgggcagtgccacgtccgtcgatctcggcgagctgcccttcgacatgcccaagttgcgacgacgcctgagggccaaccaggcggagatcaataacctgctgatgcacagcaccgaatccagtggcatctcgcaggcttcctccagtcattcgatgcgcgacgaccaaaagatgtccagcaagttggatacggcactttttcggcagaatctcactctaaaccttaatgaatcgcgacaggcgaccaaacagtttggcagcctggatctgcgtggtctcaatagcaacaaggagctaaacatgaatctcagccagggatatgtcactgctgtggatctaatcgatgtgacaattccgctggagcggcagggttggtaccatggtgccataacgcgaattgaggcggagaccacactgcgtccgctgtccgagggatccttcctggtgcgcaactgcgagtccacgaagcaggactattcgctatccctcaagggcgccaagggctttatgcacatgcgcatccagcgcaacgagactggacagtacatccttggccagtttagtcgtcccttcgagacggtaccggagatgatccggcacttttgcctcaaccggctgccagtgcgcggtgccgagcacatgtgtctgatcgagccggtcatcgcccagctgctctag

SEQ ID NO: 23289 - protein, 1416 aa, DROSOPHILA
MPLSFLFRPFFISVLPAIRTKQLPFGEAQQALQLQPAAAAATAAATTSAAAAANATAAAPQLPPPLPVPVATLPNQAATAAAAATAAILATHQQQQQQQHQHLSNNNNNGGSTHGQQHTHSNNNNTLPVGAQQQQQQQHQQQRATLQHPPLPNSNIKQASVKLIEGYSDPKDTRNHKKVYHKKAKKRSTTGHKRHQQQQQQQQPHQQQLQQQQQQTLPTPRSAQQQQQLQQKLQQRHSTYNNNNGNSRKDKRNSQYNSDSSAPKSSDDEADIDEEVEQQPLPVPQAPVQSASQPAAGLNSPDSISDDLVRPLPPQLQRSPRKLTVAPAEHNKRQPSPYYYSDLLKSRDKDKDKDKDKDKDKDKDKDKDKDKDKERDKDREDFKLKCRQSTASEPPQQTQTQLGGYRKSSSLDVPPAEEQPEAESHEEEDPRTGQDSQSTPKRYSFTEEGVHIIRCETPSTSTSEESDCSECLKRREWHARALALVRKTCNVQPRNQNPTGSELQLQLQHCDAGEGELLKCCPPPPAPAENQSQVQPMPPHRLLGPAAVCGACITSAPASSLAGGRGSELGDDLEEEYFRPRSIFYVHPHGVHECIECAQPAQPATVPAPTLSNPSLDIYGDDEDEVDGDEDEDEEDDSEDIMGSRRRQIYETAFDCKIAKSDDDLDEVDRITNCSVLLQLSNGNGGDISKVTGSSKTRAECKRAKNSKNQALQEQTGEAHVQVHHVEAELGKLQLSQVDQQNQNQNQSQNQQHGVSATGSGASASSTQQLPVRGYTPSPPSTAPLPMKFPGKHDRYLNMNSIRSAPNLPAANPAHPRLRDLRLPIQSMRHQCGGSSNDNSLTDSAYVNPPSTNSNSNAASASASASVSATGSAAPRRPRSFVLESGRVLELRRSAQGHQGGQSTHHHHHHHHHAPGSRRNRHGQSQGQTTGGGHNYSSTESIATSSSGGSMESLRSSTSEGNRSTSSSESRHSSSLSSHSSESGSGGSGGSGGSSVAYPLRPAPLLLHSKLHILSPISDKSSQEPASASASEQSQQPSQQLAPMASQEDDSTTSGAPAGNQVQVNASLKQPRSNRGAPNKALLQLADELLGSDSGISLHSREDGKPQALALQRLTLPKLQLIGAEGTTTSATASGAGGSSATGGSSGAGGSGSGSVVASGSTGIQQDLRDLPFDMPKLRRRKTLQQEAACTSGSATSVDLGELPFDMPKLRRRLRANQAEINNLLMHSTESSGISQASSSHSMRDDQKMSSKLDTALFRQNLTLNLNESRQATKQFGSLDLRGLNSNKELNMNLSQGYVTAVDLIDVTIPLERQGWYHGAITRIEAETTLRPLSEGSFLVRNCESTKQDYSLSLKGAKGFMHMRIQRNETGQYILGQFSRPFETVPEMIRHFCLNRLPVRGAEHMCLIEPVIAQLL

SEQ ID NO: 23290 - DNA, 4796 bp, DROSOPHILA
ctcgagcaaacgatatctgtgactacttaggtgtcatgatccacttgcgattcatttcacatttaaaagtttttgtctcgacatgcaacagtcagctcttcccatttacaagtcagattttttgtgccccttaaacctctcatgacatgttttcttttcaactaaaatccagttcgcaaggtgtttatttattctaaatgcatttgtactgacgttttgtggaccttaggtatatagatacttccatacagtatatgattgttattcaagacgattctgcatcttttcatcagaagttccgtgtagtttgtcatatactcgcaaaagtatgagtgcaaaatactgcattttaaattagctgagccgaagttcttatactcttggtgtacggaagttggtttgactgatgctatatgaaatatataggattgtcttataaattctaggactgacttctcgaaccttctacacgtttaatttttcagatatgatttaaagtgttaattttaacaaatgttggttctttttaaggagatacttgaagtgcaatctcaagtaagaggccaatgaaccttttcttggttaacttagttagaacttacacatttcggtttcgtgttcattcaatcgcaaagatggctaattagcgagtacttagagctcgtacagaaacccgaaacctaaaaaaattttggaccgcacaagtgatttgagtgcctcgacacgtgcatgccataaagcctggcaaatcaataaaatacataaccaaatcaagaaaatgcgaattattgacgcaagtgatttatgatgtttcgagtgaaggagtcagaaataagagaagaaaccctgaataaaaagtgtctttctgtttcattgcgaatgtctgacacataactagtatacatgaattccgttctttctcgacttctattcctttacaatgatgaaaaacgcatcataaattatttattttaattattccaaagaatagaacacaacaatggcggccgttgaggtacggaatggctataagtactatggctccaaatcaaatcccaagattgtgcttaaccagctgaatatgaacgtgatgcgtggttctatgtgagttgaatttaaggttttgcggtaaatcaaactaaattctttcctcactcgatcagatacggattgctgggtgcctccggatgcggaaagacaaccctgctctcttgcatcgtcggccagaggcgcctcaacggcggcgaggtcgtcgtgcttggggccaagccaggagagcctggtagcggcgtgccaggatcccgggtgggattcatgccccaggagattgccctggtcgaggagatgaccgtcaaggagacaatcttctacttcggtcgcatctacggcctgacagacgaacgcatccgggagaagttcaagctgctcaaggagctgctgcaactgccaccggctaggcagatgatcaagcagtgcagcggtggacagcagcgacgcttgtccttcgcctgcgccatgatccacgatccggagcttctcattctggacgagcccactgtgggattggatccaatgctgcgtgaaaagtgtgtgcaagaaagtgaaatgaagaaagccttcagaataacctaatttgtacaacttttcagaatctgggactttctcgtggagacgacgaggaatagcaaattggctgtgattataaccacccattacatagaggaagccaaacaggcaaattgtgtaagtgtacaatgggaatcatgattaataaagagtttagtatatactacaattactttttcagattggtcttatgcgcaatggtgttctattggctgaggatactcctaccaacatcatgatcaagttcggaactcagtcgatcgaggacgccttcctcattctgagccagcggcagggcaacgaagatgagttggcccaaatcatggatcacaataagaatcaggctttgccggcagctgtgctgccccctgaggtaatagacacacacgagcccaacatgccggaaaaacagcccatcccgttcgaggagcccctaaacgagaatcgcaaaaagattttcttcaccaccaagggcagggtaaaggcactgatgacaaagaactttgtacaactctttagacaaccctcgtaagttccaagcaacatccatgtatatcgacgacattaatgaacaatatttttaggggaattattttcatgctactatttcccatcatacaactgacgtgcttttatctggccattggcaagacgcccacgaatcttgaaataggagtttattccggcgaagtggagaactatggggagtgctttgatgaaaacctggtcacagtctacaaggatagcgacaacgagagctgtctattcaacaagttatcctgcagatacatacgcgtgttgggtgacgatgtggccacgcggaaatactatgccagcgaagcagatgctctgaacgatgcaaagcgggccacaaccgttggctatttgcactttgcccagaacttcagcgattcgattctctcggtaatggaggatggcatccactccagtgacggagctgtggaccacgccgagcttagtatccacatcgatatgacgggtaagagagtcactgtgcgaagtctttcaaatctaataaagtcgttctgcagatcaacaagttgcgtacttcatgcagcgcaaacttcgtgacaagttcagtacattcatgcgcagtgttgtcaaggactgcaatgtatctacggccattgtagatctgcccgtccagttccaggaaccaatctttggcagcacggacatcgagttccagcagtactgtgccccaggagtggtaatgacgtgagtagagaatccacacgatggacccgtgtaccaacctcttctcacatgtttatgttttttattttatgagctgacgaaattcaccgcaatccattatttggttcttcgttggtagtcaatcagatctttgcttgaatcaacatttcccaaaaccctcactactgctaacttgtaccactcttcgcagcactgtttaggatttccatttattaatttctttaattgtatcatagcatggtcttcttcctggccactttgatgacggctgcagtgttcatttctgaacgcatggatggcatctgggatcgaactctattggcaggtgtctcggccaccgaaatgctgtgggctcatcttctaacccagctcatcatcatggccctgcagtcgttcgaggttattatgtatattggcctagtgttcgatacttacaataatggggataccacaacgctcattggattgctaacactgaccgcattttgtggcatgttgttcggtaagcgaagaaaagagaaatattcccagaagtgcactttaagaactatgatgtaatcccctaggtctcttcatatccgtattttgcaaatcgcatacagaggcaaactttgttgctactggtgctttttatcccatgatcatactgtgtggtaagtggtgtcaagctaatattcttatctttatattttatgaaacctatttttcaattcttgcaggactgctgtggcctttggagagcatgccgcagtttctgcaggatctagtgatggtgctacccttcaccattccctccatctccgctcgaaatgtgatcgagaagggttggagcatcacccatgagaaggtctacaatggtttcctggtcatggccggctggacgatcatcttcttcgtgctctgcctgatcggcatcagacgcaaggcgtaattttggacaatgggctaaactttaatattcgggggcctttcatttagttgtaacgttttagcattttttgataggtgatctatgtatgtgcatatcgttttaatttaataactatcggaagcatatcactcgcatgttgtagactctcatcacacaaggaaacacattcataccaacgaattgtaacatatttttaggcaacgttctatatactgcactaaaagtatcataaggttttaagggtgtctcacaaaaaaatatttataatacacaggacaacaaatcgtactcattgacaagcacaaatttcgtatttcattatttgatcaactcacgaaaattagaacaaatccatacatttttattcacatcgtatgcgcgtgaattttgtatattaaattgtgaaattatgtaaatcgaaatttcaaatcaaccaaaaatataaacctaaattaaataattgttaaagcgattaatttgggggttttaataaaatgctagtctaatttaagaatggcaacattttaaataacaattaaagagatacgcttaaggaggtcgacagcaaatgtgtcaagtttgtttttctctgaaattcaaagctgcataaaactaaagtccaatcctcctgcacacgcatatgcatatacatataaaaatgaatgtttgcttttctatataatattgcctcatgtgtgtgggccaagggcaaggacacactcacgacgacgatgtcgaggacgtgccaaagttgctgacacacttcgggctggaaagtgctagacagagtgtctgcccggccggatgactccccctccctgaccacgccggttttctcggtgtctgccagcagacatttttattacaaaactttatctttgccaaatacgaaaaggaagagcaggaaaaatatataaaaagccatcgtcctgctatcctgctagcgtctgtttttgtgggtgtgtcaagtgatgggtggcataaaatctagtttggtatt

SEQ ID NO: 23291 - DNA, 2119 bp, DROSOPHILA
atggcggccgttgaggtacggaatggctataagtactatggctccaaatcaaatcccaagattgtgcttaaccagctgaatatgaacatacggattgctgggtgcctccggatgcggaaagacaaccctgctctcttgcatcgtcggccagaggcgcctcaacggcggcgaggtcgtcgtgcttggggccaagccaggagagcctggtagcggcgtgccaggatcccgggtgggattcatgccccaggagattgccctggtcgaggagatgaccgtcaaggagacaatcttctacttcggtcgcatctacggcctgacagacgaacgcatccgggagaagttcaagctgctcaaggagctgctgcaactgccaccggctaggcagatgatcaagcagtgcagcggtggacagcagcgacgcttgtccttcgcctgcgccatgatccacgatccggagcttctcattctggacgagcccactgtgggattggatccaatgctgcgtgaaaaaatctgggactttctcgtggagacgacgaggaatagcaaattggctgtgattataaccacccattacatagaggaagccaaacaggcaaattgtattggtcttatgcgcaatggtgttctattggctgaggatactcctaccaacatcatgatcaagttcggaactcagtcgatcgaggacgccttcctcattctgagccagcggcagggcaacgaagatgagttggcccaaatcatggatcacaataagaatcaggctttgccggcagctgtgctgccccctgaggtaatagacacacacgagcccaacatgccggaaaaacagcccatcccgttcgaggagcccctaaacgagaatcgcaaaaagattttcttcaccaccaagggcagggtaaaggcactgatgacaaagaactttgtacaactctttagacaaccctcgggaattattttcatgctactatttcccatcatacaactgacgtgcttttatctggccattggcaagacgcccacgaatcttgaaataggagtttattccggcgaagtggagaactatggggagtgctttgatgaaaacctggtcacagtctacaaggatagcgacaacgagagctgtctattcaacaagttatcctgcagatacatacgcgtgttgggtgacgatgtggccacgcggaaatactatgccagcgaagcagatgctctgaacgatgcaaagcgggccacaaccgttggctatttgcactttgcccagaacttcagcgattcgattctctcggtaatggaggatggcatccactccagtgacggagctgtggaccacgccgagcttagtatccacatcgatatgacggatcaacaagttgcgtacttcatgcagcgcaaacttcgtgacaagttcagtacattcatgcgcagtgttgtcaaggactgcaatgtatctacggccattgtagatctgcccgtccagttccaggaaccaatctttggcagcacggacatcgagttccagcagtactgtgccccaggagtggtaatgaccatggtcttcttcctggccactttgatgacggctgcagtgttcatttctgaacgcatggatggcatctgggatcgaactctattggcaggtgtctcggccaccgaaatgctgtgggctcatcttctaacccagctcatcatcatggccctgcagtcgttcgaggttattatgtatattggcctagtgttcgatacttacaataatggggataccacaacgctcattggattgctaacactgaccgcattttgtggcatgttgttcggtctcttcatatccgtattttgcaaatcgcatacagaggcaaactttgttgctactggtgctttttatcccatgatcatactgtgtggactgctgtggcctttggagagcatgccgcagtttctgcaggatctagtgatggtgctacccttcaccattccctccatctccgctcgaaatgtgatcgagaagggttggagcatcacccatgagaaggtctacaatggtttcctggtcatggccggctggacgatcatcttcttcgtgctctgcctgatcggcatcagacgcaaggcgtaa

SEQ ID NO: 23292 - protein, 69 aa, DROSOPHILA
MAAVEVRNGYKYYGSKSNPKIVLNQLNMNIRIAGCLRMRKDNPALLHRRPEAPQRRRGRRAWGQARRAW

SEQ ID NO: 23293 - DNA, 8235 bp, DROSOPHILA
tttactatttctactgttatgttataatactgaaaaacttgaacttgaaatgaaaatcgactgcttgttaaatataaaattattaacaattccgaaagactaagtttcaatacaaagctaacaacaaggtaggaatctagctttggcagtgataataattaaataataatattaaagcaagaattcccgttactcaacttaaagaaaaaaatcaacacatagttagtggtcgtggaaacatcgtctgcgtctatatctatagaatcagcatgctttaagttctagttcttatagttcctgaaagcgagacgttcttacagacagacggattggttgatttaaagattgacacttatgcattctctaaatcccggtgcttgatgttgcaatgtgaagacaagggtgatgtatctgtcaactagtagtagtggagctagtgtataagaagcaaaagtggcaagaatacccctgtgctaaattaaattggaagcttgacatatcgcaagacggccacgctggccttgctctatcttatgttggcgttggtattttaagatatctcggtggtacgtgtaagttgaatatttttacgaaattcaatttaaaaaatttttttaggatgtgcagttatagtggcttgattttattaagattaccagaagaattaactaaacaatctttaaaataaaacacacccgcccagtgtgataaagtcacacaaatcaaaaatttgtacatacatcactgtgtgtctgtatgcgtccagatacttacgaattttttttaccttttagatctatattagttctattagttctatatttcaaacatgaaagctcgaatcagacatttcaattctataaacatgttaattttaatgtgtgatgagggtgcatgtgtatttcgcgttcgtgtgtgacaatcagtttgatattttaggttaggtttctgtgttgcttttatattatattattttacttttactatccattctgtaaagctctggtaagtttttttttatcactagttcttaactaagctttaaaataaatcctttgttgtactgtttgctttgaaaaagacttgaagctgtttgctttatttatagaacttgaactgtttgaaaaataaacaattgtgcacagaatcataaagccattaggagtttaacaaaaacactgaaaatttgatttcattgcctttcttacaaataaatcaaccaaaaacttttttgaacttattgtcagcataacattaaacaagaggcaaataaaaatgacagattcaatgaaatttggcccggaatggttgcgcaatatgtcagccgagccttcgggctctcccagtacctacaacgttggtaatgcagctcaaaacaattcgattggagggcacaacctgggaaacaacacggcggcatccgcttcccgtaatctatttccagaataccggtacggacgcgaggaaatgctgtccttgttcgatcggaactgcctactgccgcagatcctgccatcgttcaaaaagctcttcgtggaaaaggttcagtgccctcttgcactgacaccgagctccgaggaggacatcaaccaaaactcacttggcaataacgtatgtgaagtaatttgacatgagttttagaacataatttacttttctttgaaactagtctcgtcctgcctggttgcagcgctcgcccagtggatttggtagtgcctcccgaggctctggacgtggtggaaccgttgaccggggacggatgcgcggaaaatcggcctatcatccgatataccaacgcccaagcggtctatatgatgaaagcttatcggttatatcaaaggtaattgcaaatacgaactaaataaggaagtacgattagttgttgattttttctgccaggccgaacgcacatggagcgaccgcaacggaactggagattctgcggcaaccaccacctccactagtggctctggtgctctagattggaatggaactccaagctcaagtcctcgaaaagattattctaataatcatcgcaacttggaaaactggcgacgaacacgtaacgaagatggatccggtgatggtccatcctccagcggttccatgagcggacccgatattgctggttggcggagcggtgtcgtcggtggaagtacaaacgcaggttttggtaccaatagccatcggtggggtcagtcaattacctttatattattatttttcatttttactcctacacatatgagcacaataatacatgtactgctatctctatcatgtaaatttgactttccaaaactttccccagcctatatagttggctattcattcgataccattcatgctacaatctgttgtaaagtttgtgtttctttaaaacgtattctaaaaaaccttttcataaatatattaaaattaagattaaatgttttagttaatgaagtattttatatgagaatatttaaacaaaaatgctaatagaccagctgaaatccctatggtaatttctatgcaatgcatcaggccttgtttttatttcattcctaaagtacatcgctggtagctttagtacgttttcaaataatgatctttttttttccagaatagacttgatttatcaaaattgaaaaataaaaaaacgcgagcccattttaagtgttatgtatcaaagtccaactaactaacagttcaaactattcaaatatgggcttgcctatacataacaacgtaaccaaatatactttttacactttgatacgctttacgctttattaaaatgtacttcttcacccggtaatcttctatcgaagtttggatactataataaattgtatatataatgtatttataaaatttttgtcgtgcttagtgattaagagttagtgttctgccgctatgtggatcaggtgtacaatcactgacatatttgctttcctacttgtatatctgaatatcgcttgcatttctagtatctaactaaatgggtaacagttttgcaatagctcgactatagcggttttctgtttagtaagtttgctatatttgctaagaagatgaaccaagttaaaatttaaatagtccaagttattgaacaacagtatagaacttaaaaaaaaattttttttaggaagatctacaagctggcgtgatgaagatcctagcgtcgacaatgcagctagtttacaacgctcaatttcaacagttgcgactttaagtacagatcggactggaaacaataaaggatctggaatcggagctgcagagggagtagggagcatatcgcacccacggttgtcgagttctaaaatatctcaattatggactgttaataatgcagccggtgttgatgccgacgaaaatctacccgaatgggcaattgaaaatccatcgaaattgggtggcagttttgatgctagtggagcctttcatggagatactgatctaaaacctatcaaaagttcgcataatactttaaaaaccaaaagcttagactcctatgacgatgtaaaaagaccgaaaagtaaagacctgtctgatccagatagtggaaacgatataactccagaaacctcattaacgaaagataccaatacaacagctgtgcaagaagaagttgaaagcagtttatctccaataagctctacaacgacaaaggaagtgatccatggagatatttcagatcggattaaagaggtcgccgatgaagtagaaaaacttataatggatgatgatcataaaatctcttcgaatcaaagccaacatcaaaatcatgacgggtttacagctgcacttccaagaatggcagacattgagataaacgtaaaaccgagtgttacagcagtgcatcggcaagcaccttccaccatgcctatacaaattacccctacaattacagatgtcgctccaccatcccatgcagttgtgtcgttttcggatcatgagacaatgcaacaccataacatgcaccacctgccacaatttccaatgattcctacaccgcatatcatcactccaaatctaaacgaattgtggttttaccgggatccgcaggcaaatgttcaggggccatttagtgccgttgagatgacggaatggtatcgcgctggctactttaatgagaacctgtttgtacgccggtactctgataataggtttagaccgctgggagagcttataaaattttgtcatggtaacatgccatttacgcacagtcacctacttccatctccgatagaactagagaacattcctgttggtcaaataccagcccctctaacggcgtcactttcaattacaccccataagccatcaccgattcctatcgcactttctgttgttgaacagcagttgcagcaacaaagagatgagcaactaaaggcaaatgttacagcaacagctgaagctctacgtgctgcaataaaaggaagttttggcggaaatagcattggtaatacgtctcatttgcttacaatgcggtttcaaatgctacaggatcagtacatacagcaccaggaataccaaatactagctgagctatccaaaaatgaatgctttcaacgtctttcggctgtcgagcaagaaacagttgttcgtcggaaagttcaattgctgggtcttcctgagtatttgatcagcttaaacggattaagcaattctttgtccgtactgaaccccgttgccggtagacagttgtacagggcagtggttgagcacgccaagaaggatcaacaacatatttttgcaaacaccgagcagcaacgttcagtgggaaatttactggatgctaataatttcattctaaatgcccaaataatgattcagcaatcgcagcaagaggtaggtcccttggtatcatccgtggattgtattatgcaaggtggaactgcagctgacctaaataagccgaatgaaataccgaggaatgagttagacttaattaatgaatataacttacggatgctgttgcgtggccaaccaacaagtactcaacagcaaccacctgcgctgacgaactcagctaccgaaaatctccctggagttgattttttaactgaaacacaattgttagagcggcaaaacttgatgattccaatctggttaccccctaataataataagcaacaagaaaccgaccaacagtgggctgaaatgtctaatgcggatgcatcattatgggaaacggccaacttaaatgaagagcgaaatgaagatcagcaactattaatacaaaagtcttctgaagcgtgcttcgcagatacagaaaaagatgtcaaaattgcccaattatttcaagttcaatcaggaaatgttgttaaccacaccgcattagaggaattagatcagtcccctcaaaatttaaaaggttcacataatcaaaaaatagtcaaatcccttgtttccgatattcaacagaatcataatgaggaactaaattcacatcaacaccaggtaaagcaggctaacaagcagaatctgaatacaaaacagaatgcggcacagtcagccctaaagccaattaataacgaaaatgatcgcaaacgagaacagacagaagaaaaaaaaaggcaaagagaggaacgcaagcgccagcaattggaagatgataaacgtcgggcgttgaatgaatctgaagaacagacccgccaaattcaagaggaaaaggaaaggcaacagcaaatacaagcccaacgtcgaaaggcattgttgggcaatgtccattctctatcagttcaaaatgggatgtcaggttagtacttgaaaaaaaatttaaatttacaaatttaaaaatttacatatatatgtaatttataaccaccatttaatatgacatagaaagactagaatttaaactattattcgactttaaacaagcggttttaaattgataaattttatatattggttttaatttaagaacagttctttttgcgaaagaaatttaaaaaaggacaaacaaaccaatgccaatgagttttaattgacgaaaaaaaagtaaagcttaaagttttataaagaactcgtttatacaaaaacgtttacggtgaggtatatttaaattttggtctttttgcaagcgaagatgcttggtatttatttttaaaacgtaagattttgaactcttattgacactgaatcgatgctttatttataggaacattagcgtctgcacaaagcaagaagaacgacgatgccaaaacagcagaaccccaagtatcctcgcgcttgccgtctacatccgtagcgccttggtcttttcagttgcaaaattctatgagatcggcgcctggtctggcagaaatacaaaaggcagaacgtcgagagcgtcgcgcagaccaacagcgacatcaagagctattagacaagcaattgcgtgccaatgccgcagctgcggctgaagccaacgatgctttgcttaaatggcagtcaacaccagcgtcggcgcccgtaatgagtctcgccgaaattcaagcagaagaggcaaggcggttggccaatgaccttgtggatcggcagcgtcgacgagaactggaacatcaccaacaagctcctttgtcatcagcggttttggttacgagtgcaacttccaacatctggggtaacgccaataaagcatggagttcgtccgctgctcaatcactttcgttaaaaacaagttctggaactggtctgtgggacgaaccgaatccattaggttctaatggatctggaacaagcggtacctcatccgtaactgcggcggcagtcttggcaggaggattaaactcagctaataaatccactctgcaagctcaaaataagtcgtcggctttatttgcatcgcctcgaaatttgcgcaagagtcaaacattgccagcccttagtaacccagaaaagtcaaataaaaatggaccaggtcaacggccagaaaaacaaaagttggctcaaactcgttcaaagggtgccgctgtctcaattgaagagaaggatagagaaagaaaattgaatgcaaaaagccagcaaagcagcaccgaccaagccattagcaaggttaatgagtatgaaaacgagttcactagctggtgcataaagagcctagataatatgtccgccaaagttgatggtaaatatttgcataattgttatatatttaactgtattcattttcattacatttttagtacccacgttcgttgcattcttgcaggacttggaagcgccatatgaggtaaaggactatgtccgaatataccttggtaagtaataaaaaataccataattataccctttactcgtatagggtaattagggtatacaagattccctaaaaagaatatcacagacaaagggaagcgttcccgaccatataaagtataaatattcttgatcaggatcaatagtcgagtcgatctagccatatccgtctgtatgaacgtcaagttcttaggaactattttttttttcgtacgggtcccacggccacacctcccgcctaaccgaccgaggggcgctgccgtgtatcgtacgggctcgattcgcgagaagatatagacgcgatataaaaaagagaacaggaacgaggaaatgaatataatgtaaaataactatattaaatattactgttagtaggatctaattatgtaataaaaaagttgaaatcgattgctttaagagcggcagagagccaagattacagataataggataaagtctattataaacagaacataaaactctgtaagggtcatgcaactcatagttagatgtacaatgatttaaaataaggggtatatagtttctagtgaatctacttggaaccgggagttaagccgactaatcaagtcgggactctcaacatccccacgaataagcttacaaataaagactgttccaagcatagttctacggttaactagggacggtaaattaattaaaagtagtctactggaataaggaggtaatatacggtttgcatcccaatttaggcgccgcaaggcaaaaagtatgaagtttttttggaccgattcaatgcggtccgagtggactgcgtattggggactccaaacaggtgatcccgtactcaagaatcggacggactaacgaaataaataaggttttagtcaagtaaggatcagcaaattccttagaccacctttttataaaaccaagcacacccctggtcttattgaaaatagacgaaatatggtcagaaaattttagtttagggttcagaagaacaccaagataatcaacccc

SEQ ID NO: 23294 - DNA, 4512 bp, DROSOPHILA
ctggccttgctctatcttatgttggcgttggtattttaagatatctcggtggtacgtcataacattaaacaagaggcaaataaaaatgacagattcaatgaaatttggcccggaatggttgcgcaatatgtcagccgagccttcgggctctcccagtacctacaacgttggtaatgcagctcaaaacaattcgattggagggcacaacctgggaaacaacacggcggcatccgcttcccgtaatctatttccagaataccggtacggacgcgaggaaatgctgtccttgttcgatcggaactgcctactgccgcagatcctgccatcgttcaaaaagctcttcgtggaaaaggttcagtgccctcttgcactgacaccgagctccgaggaggacatcaaccaaaactcacttggcaataaccgctcgcccagtggatttggtagtgcctcccgaggctctggacgtggtggaaccgttgaccggggacggatgcgcggaaaatcggcctatcatccgatataccaacgcccaagcggtctatatgatgaaagcttatcggttatatcaaaggccgaacgcacatggagcgaccgcaacggaactggagattctgcggcaaccaccacctccactagtggctctggtgctctagattggaatggaactccaagctcaagtcctcgaaaagattattctaataatcatcgcaacttggaaaactggcgacgaacacgtaacgaagatggatccggtgatggtccatcctccagcggttccatgagcggacccgatattgctggttggcggagcggtgtcgtcggtggaagtacaaacgcaggttttggtaccaatagccatcggtggggaagatctacaagctggcgtgatgaagatcctagcgtcgacaatgcagctagtttacaacgctcaatttcaacagttgcgactttaagtacagatcggactggaaacaataaaggatctggaatcggagctgcagagggagtagggagcatatcgcacccacggttgtcgagttctaaaatatctcaattatggactgttaataatgcagccggtgttgatgccgacgaaaatctacccgaatgggcaattgaaaatccatcgaaattgggtggcagttttgatgctagtggagcctttcatggagatactgatctaaaacctatcaaaagttcgcataatactttaaaaaccaaaagcttagactcctatgacgatgtaaaaagaccgaaaagtaaagacctgtctgatccagatagtggaaacgatataactccagaaacctcattaacgaaagataccaatacaacagctgtgcaagaagaagttgaaagcagtttatctccaataagctctacaacgacaaaggaagtgatccatggagatatttcagatcggattaaagaggtcgccgatgaagtagaaaaacttataatggatgatgatcataaaatctcttcgaatcaaagccaacatcaaaatcatgacgggtttacagctgcacttccaagaatggcagacattgagataaacgtaaaaccgagtgttacagcagtgcatcggcaagcaccttccaccatgcctatacaaattacccctacaattacagatgtcgctccaccatcccatgcagttgtgtcgttttcggatcatgagacaatgcaacaccataacatgcaccacctgccacaatttccaatgattcctacaccgcatatcatcactccaaatctaaacgaattgtggttttaccgggatccgcaggcaaatgttcaggggccatttagtgccgttgagatgacggaatggtatcgcgctggctactttaatgagaacctgtttgtacgccggtactctgataataggtttagaccgctgggagagcttataaaattttgtcatggtaacatgccatttacgcacagtcacctacttccatctccgatagaactagagaacattcctgttggtcaaataccagcccctctaacggcgtcactttcaattacaccccataagccatcaccgattcctatcgcactttctgttgttgaacagcagttgcagcaacaaagagatgagcaactaaaggcaaatgttacagcaacagctgaagctctacgtgctgcaataaaaggaagttttggcggaaatagcattggtaatacgtctcatttgcttacaatgcggtttcaaatgctacaggatcagtacatacagcaccaggaataccaaatactagctgagctatccaaaaatgaatgctttcaacgtctttcggctgtcgagcaagaaacagttgttcgtcggaaagttcaattgctgggtcttcctgagtatttgatcagcttaaacggattaagcaattctttgtccgtactgaaccccgttgccggtagacagttgtacagggcagtggttgagcacgccaagaaggatcaacaacatatttttgcaaacaccgagcagcaacgttcagtgggaaatttactggatgctaataatttcattctaaatgcccaaataatgattcagcaatcgcagcaagaggtaggtcccttggtatcatccgtggattgtattatgcaaggtggaactgcagctgacctaaataagccgaatgaaataccgaggaatgagttagacttaattaatgaatataacttacggatgctgttgcgtggccaaccaacaagtactcaacagcaaccacctgcgctgacgaactcagctaccgaaaatctccctggagttgattttttaactgaaacacaattgttagagcggcaaaacttgatgattccaatctggttaccccctaataataataagcaacaagaaaccgaccaacagtgggctgaaatgtctaatgcggatgcatcattatgggaaacggccaacttaaatgaagagcgaaatgaagatcagcaactattaatacaaaagtcttctgaagcgtgcttcgcagatacagaaaaagatgtcaaaattgcccaattatttcaagttcaatcaggaaatgttgttaaccacaccgcattagaggaattagatcagtcccctcaaaatttaaaaggttcacataatcaaaaaatagtcaaatcccttgtttccgatattcaacagaatcataatgaggaactaaattcacatcaacaccaggtaaagcaggctaacaagcagaatctgaatacaaaacagaatgcggcacagtcagccctaaagccaattaataacgaaaatgatcgcaaacgagaacagacagaagaaaaaaaaaggcaaagagaggaacgcaagcgccagcaattggaagatgataaacgtcgggcgttgaatgaatctgaagaacagacccgccaaattcaagaggaaaaggaaaggcaacagcaaatacaagcccaacgtcgaaaggcattgttgggcaatgtccattctctatcagttcaaaatgggatgtcaggaacattagcgtctgcacaaagcaagaagaacgacgatgccaaaacagcagaaccccaagtatcctcgcgcttgccgtctacatccgtagcgccttggtcttttcagttgcaaaattctatgagatcggcgcctggtctggcagaaatacaaaaggcagaacgtcgagagcgtcgcgcagaccaacagcgacatcaagagctattagacaagcaattgcgtgccaatgccgcagctgcggctgaagccaacgatgctttgcttaaatggcagtcaacaccagcgtcggcgcccgtaatgagtctcgccgaaattcaagcagaagaggcaaggcggttggccaatgaccttgtggatcggcagcgtcgacgagaactggaacatcaccaacaagctcctttgtcatcagcggttttggttacgagtgcaacttccaacatctggggtaacgccaataaagcatggagttcgtccgctgctcaatcactttcgttaaaaacaagttctggaactggtctgtgggacgaaccgaatccattaggttctaatggatctggaacaagcggtacctcatccgtaactgcggcggcagtcttggcaggaggattaaactcagctaataaatccactctgcaagctcaaaataagtcgtcggctttatttgcatcgcctcgaaatttgcgcaagagtcaaacattgccagcccttagtaacccagaaaagtcaaataaaaatggaccaggtcaacggccagaaaaacaaaagttggctcaaactcgttcaaagggtgccgctgtctcaattgaagagaaggatagagaaagaaaattgaatgcaaaaagccagcaaagcagcaccgaccaagccattagcaaggttaatgagtatgaaaacgagttcactagctggtgcataaagagcctagataatatgtccgccaaagttgatggtaatacccacgttcgttgcattcttgcaggacttggaagcgccatatgaggtaaaggactatgtccgaatataccttg

SEQ ID NO: 23295 - protein, 1465 aa, DROSOPHILA
MTDSMKFGPEWLRNMSAEPSGSPSTYNVGNAAQNNSIGGHNLGNNTAASASRNLFPEYRYGREEMLSLFDRNCLLPQILPSFKKLFVEKVQCPLALTPSSEEDINQNSLGNNRSPSGFGSASRGSGRGGTVDRGRMRGKSAYHPIYQRPSGLYDESLSVISKAERTWSDRNGTGDSAATTTSTSGSGALDWNGTPSSSPRKDYSNNHRNLENWRRTRNEDGSGDGPSSSGSMSGPDIAGWRSGVVGGSTNAGFGTNSHRWGRSTSWRDEDPSVDNAASLQRSISTVATLSTDRTGNNKGSGIGAAEGVGSISHPRLSSSKISQLWTVNNAAGVDADENLPEWAIENPSKLGGSFDASGAFHGDTDLKPIKSSHNTLKTKSLDSYDDVKRPKSKDLSDPDSGNDITPETSLTKDTNTTAVQEEVESSLSPISSTTTKEVIHGDISDRIKEVADEVEKLIMDDDHKISSNQSQHQNHDGFTAALPRMADIEINVKPSVTAVHRQAPSTMPIQITPTITDVAPPSHAVVSFSDHETMQHHNMHHLPQFPMIPTPHIITPNLNELWFYRDPQANVQGPFSAVEMTEWYRAGYFNENLFVRRYSDNRFRPLGELIKFCHGNMPFTHSHLLPSPIELENIPVGQIPAPLTASLSITPHKPSPIPIALSVVEQQLQQQRDEQLKANVTATAEALRAAIKGSFGGNSIGNTSHLLTMRFQMLQDQYIQHQEYQILAELSKNECFQRLSAVEQETVVRRKVQLLGLPEYLISLNGLSNSLSVLNPVAGRQLYRAVVEHAKKDQQHIFANTEQQRSVGNLLDANNFILNAQIMIQQSQQEVGPLVSSVDCIMQGGTAADLNKPNEIPRNELDLINEYNLRMLLRGQPTSTQQQPPALTNSATENLPGVDFLTETQLLERQNLMIPIWLPPNNNKQQETDQQWAEMSNADASLWETANLNEERNEDQQLLIQKSSEACFADTEKDVKIAQLFQVQSGNVVNHTALEELDQSPQNLKGSHNQKIVKSLVSDIQQNHNEELNSHQHQVKQANKQNLNTKQNAAQSALKPINNENDRKREQTEEKKRQREERKRQQLEDDKRRALNESEEQTRQIQEEKERQQQIQAQRRKALLGNVHSLSVQNGMSGTLASAQSKKNDDAKTAEPQVSSRLPSTSVAPWSFQLQNSMRSAPGLAEIQKAERRERRADQQRHQELLDKQLRANAAAAAEANDALLKWQSTPASAPVMSLAEIQAEEARRLANDLVDRQRRRELEHHQQAPLSSAVLVTSATSNIWGNANKAWSSSAAQSLSLKTSSGTGLWDEPNPLGSNGSGTSGTSSVTAAAVLAGGLNSANKSTLQAQNKSSALFASPRNLRKSQTLPALSNPEKSNKNGPGQRPEKQKLAQTRSKGAAVSIEEKDRERKLNAKSQQSSTDQAISKVNEYENEFTSWCIKSLDNMSAKVDGNTHVRCILAGLGSAI

SEQ ID NO: 23296 - DNA, 3654 bp, DROSOPHILA
ccaaaataaatttaaattttttgacaattgaaaaccacaactaattgactcaattaccgaactattattagtttagtaagttcattcctaacagaatgagctcccttttaattagcataagtacgcagtatgaaatacttgagaatccgatttcaaaagaaaactatttttagaaaatttttttaaaggtatttgattatagtgataagatattaaaatcgataaagtaagaaatacatgtttatgccgcctaatcgtctgttgaccatatatgtatttggctaacactcgattagcgctatcaattggttacgtctactgaattgttatgataaggataggaaaatacgacaatattgataactagacggataagaaaatcacttgaactatgatagcttcgcgggaacttcagtaattttagtctgtttccattattcatcgccgaatgttgtctgtctcgttcgtgaaataacttttaatcttaacagaaaaaaatccctcaaacaatttgcgtcgtttcgtacgtcataaaatgggttaatctttaatgtgcaaactcttgtcgatggaaatgaaagtgtcagccggtaaagtgaaaagttgttctctgtgtatggtaccataaatgtcaccgtttttatcagagtacgtaaatcatgtttagttttactgggtaaaaggaggtagtcatcttcattgttgggcagccccattatcagaacattataaaacatcgatgaacccccttgcatgctaccacattacatggaatcttatcggatgagtacagcactaatttcagttcatacaataggcccagtaaattagacataactacagacaaaaagctcagtcgctgccataaactcttctttcgatttccatatccattttcaacggaattatatcaatatttctgtttccgttcacaggtcaataagttctttgtgttctgttagttaaggagttcctgtgaatcaatgttctcgaaatcagcatggcgaccataagtttttgcaataggaaatatgtccgtctgtggccagtgctcatactgttcaatgtggcactcctgctggtttggaggaacctgcagcaggcccagaaactggccgcatcttctaatactggtgggcaaaagtcggtaggacttttgctgtccaacgagtcgaatccctcacgtttttctgcaaacttccatctcgccaatgatcagcatccgaaaataatccggcgagaggactccgctcgcaccaaggaattgcgatcattgctcaagtgccgcgaccgatcgctccgtttcgagaggcttcagcacggagagttctggctgcttcagaatcttgtcatgggacgaaagagtcgggaagtcggctgtgccgagtccgtgacgtataccaccaacggggactttacgttcttcgataatctggaaatggtggtatcacggtgagtgctcttttatctaataaacacttaatagcaatctataaagatttctttgctaacttaatttacttattttccagttggcgtgctccagttagttttgccatccacactccaggttatgatcttaacaccacactggatgccattcggtatgtgcgaaactgtttgccggagagcgatagcatcaaggactgggtctcctttcacgtgtacttcccaaatcagcacatgccggaatacgtgccatatgacgaggccgaggtactaatgtatccgcacatgtgcaccctggccaatggatcgttggtatcgccgctctacacgcaaatcccaaccacggatagctacaagtcaagggccaacctcacgtaccccatcaatgtgggcaggaatatagccaggctggcgaccaacacccacttcatctttgcctgcgacatcgagctgtatcccagtgtgggcttcgtcgaccaattcctggacatggtggccagaaaccacagtgtccttgcactggatccgcggcaacgcagaagggtgtatcctctacccgttttcgagatcgaaacgggcgccaaagtgccggtagacaaggacgaattgttggccctctatcgaaagcagcaggcgcaggtgtttcacctgaagctttgccccacatgccacactattcctggccaagaagagtggctcaatcgaacctctcgagccgatgaccatctgcacgtgtttagcaaggcgctgcgaaaatggaagttccgagcctgggagcccttctatgtaagcgataacacggagccactgttcgacgaacgcgtcacgtgggagggtcagtcgaacaagcgcatacaggtgagttactactgtagtcaagtttccgtttcacagtgcaaccttttattgcagaactatgctatgtgccttttggactacgaataccatgtcttgagtcccgcatttctagtgcacagtcctgggatcaagcaatccagcaaagctgactccactcgtcttcaatacgcgaaggaaatgactaaatttattaagaataaaatcgagcccgaatatcgtgtgctcttcggaaagaactcagcctgcaagacgtgacattactttgataatataacaaataatgtaattaatgaatttatgccccatctaagttatgcctttataggaaaaagagtctattctttttactacttaaaccgagtagtatgtatattttgaacttaatgctcactgcttgctattcatcaatgtgaaaatatattatattttatacaattagataataagacctaatggatacaattccctataccttgggaaactgattgctccgctgtttcatgtagtacaatatatagaacataaattttaaattaaatttttaaatgcattttaaattcttcagcaaaatggctttcacataattgtttagattgcaactctttccttgtgtagatagtcttctttgatggcattgcgtagtaaaacttttgacaaaagctcctgccgctgaaaaaattcagaggactcttcataatttatattttgtggaacgttgtcatcagttttttcatcctgccaccacttcgattgtggcaaatcccacaatttttgcccggcttttggcattacgtaaataattattggctgttgtgagatcggattaatagatgccatttgcttggattgcactccgtttgttacgggattcaaaggatctggaccgtaaagtcgtatataacgttgactccgcactaggaacattatttgcacgaaggcaatcaacgccaatgtgtcgtaggccacaagcactgaaaaaaaaaactgttatcttacacaaatgaggctaatcgaatttagttgcttacttgcgtaaaatgaaagggcaagggtcatcagaattaaggtggccaatggcacaatgtgtctggcaatccgtagcgttataatgacgagtacaactacttgtactgtgtaaatgaactcgaagatagccaatggtacaacgtgatatttcttaagctgcattgaaaataatacatacttgttaaaatactatatataaagaattaaaagcagaccttatatgctccataagccgccaaaacacaagttgcaatgtagcaaaaactgtagagttgcataaacaccatgagctccttggaatctgtaaggcataaaaggata

SEQ ID NO: 23297 - DNA, 1574 bp, DROSOPHILA
atggcgaccataagtttttgcaataggaaatatgtccgtctgtggccagtgctcatactgttcaatgtggcactcctgctggtttggaggaacctgcagcaggcccagaaactggccgcatcttctaatactggtgggcaaaagtcggtaggacttttgctgtccaacgagtcgaatccctcacgtttttctgcaaacttccatctcgccaatgatcagcatccgaaaataatccggcgagaggactccgctcgcaccaaggaattgcgatcattgctcaagtgccgcgaccgatcgctccgtttcgagaggcttcagcacggagagttctggctgcttcagaatcttgtcatgggacgaaagagtcgggaagtcggctgtgccgagtccgtgacgtataccaccaacggggactttacgttcttcgataatctggaaatggtggtatcacgttggcgtgctccagttagttttgccatccacactccaggttatgatcttaacaccacactggatgccattcggtatgtgcgaaactgtttgccggagagcgatagcatcaaggactgggtctcctttcacgtgtacttcccaaatcagcacatgccggaatacgtgccatatgacgaggccgaggtactaatgtatccgcacatgtgcaccctggccaatggatcgttggtatcgccgctctacacgcaaatcccaaccacggatagctacaagtcaagggccaacctcacgtaccccatcaatgtgggcaggaatatagccaggctggcgaccaacacccacttcatctttgcctgcgacatcgagctgtatcccagtgtgggcttcgtcgaccaattcctggacatggtggccagaaaccacagtgtccttgcactggatccgcggcaacgcagaagggtgtatcctctacccgttttcgagatcgaaacgggcgccaaagtgccggtagacaaggacgaattgttggccctctatcgaaagcagcaggcgcaggtgtttcacctgaagctttgccccacatgccacactattcctggccaagaagagtggctcaatcgaacctctcgagccgatgaccatctgcacgtgtttagcaaggcgctgcgaaaatggaagttccgagcctgggagcccttctatgtaagcgataacacggagccactgttcgacgaacgcgtcacgtgggagggtcagtcgaacaagcgcatacaggtgagttactactgtagtcaagtttccgtttcacagtgcaaccttttattgcagaactatgctatgtgccttttggactacgaataccatgtcttgagtcccgcatttctagtgcacagtcctgggatcaagcaatccagcaaagctgactccactcgtcttcaatacgcgaaggaaatgactaaatttattaagaataaaatcgagcccgaatatcgtgtgctcttcggaaagaactcagcctgcaagacgtgacattactttgataatataacaaataatgtaattaatgaatttatgccccatctaagttatgcctttataggaaaaagagtctattcttttta

SEQ ID NO: 23298 - protein, 493 aa, DROSOPHILA
MATISFCNRKYVRLWPVLILFNVALLLVWRNLQQAQKLAASSNTGGQKSVGLLLSNESNPSRFSANFHLANDQHPKIIRREDSARTKELRSLLKCRDRSLRFERLQHGEFWLLQNLVMGRKSREVGCAESVTYTTNGDFTFFDNLEMVVSRWRAPVSFAIHTPGYDLNTTLDAIRYVRNCLPESDSIKDWVSFHVYFPNQHMPEYVPYDEAEVLMYPHMCTLANGSLVSPLYTQIPTTDSYKSRANLTYPINVGRNIARLATNTHFIFACDIELYPSVGFVDQFLDMVARNHSVLALDPRQRRRVYPLPVFEIETGAKVPVDKDELLALYRKQQAQVFHLKLCPTCHTIPGQEEWLNRTSRADDHLHVFSKALRKWKFRAWEPFYVSDNTEPLFDERVTWEGQSNKRIQVSYYCSQVSVSQCNLLLQNYAMCLLDYEYHVLSPAFLVHSPGIKQSSKADSTRLQYAKEMTKFIKNKIEPEYRVLFGKNSACKT

SEQ ID NO: 23299 - DNA, 3800 bp, DROSOPHILA
accatgactgtatgtacctttacttcaattgccgagtcagctgttactcgtagagtagaagggtatactagattcgttgaaaagtatgtaacatgatcaggatcaatagccgtgtcgatctgaccctgtgcgtctgtccgtccgtatggacatcgagatctcaggaactgtaaaaagctaagagctagaactgtagtagctagattctagagacatagacgcaactcaagtttgttaaactgataagcatgctgccacgtccactctaacgcccacaaaccgaccagaactgtcacttttgaaaaatgttttaatattttttcaaattttttattagttttgtaaatttctatcgatttgccaaaaaactttttgccaagcccactctaacgaccacttaccgaccaaaacggacacgccaataccaaagacactagaatattgtagtagaatctttgcccatactattgaaaaatgtgctgattttttaaatatttttttagtcatgttaatttttatcgatttgcctaaaactttttgccacgcccactctaacgccaacaagtaacacaaacaaaaaatgttttcttattttattcacaacatctaaatcacagaaaaattatgaagttacgcgcaataacatgaaactagaaagttgagattcaccatgcatattctagagacctatgattcaagtttgtttcgaaaattttactacaaactgcccaaggctgccacaccaacagttttgaaaaatacttttttttcctcatttttatataagtcttaacagtttccatccataggctgcaaatatttagtctcgtccacaaacggcgaaggctcccatgccgacgatttcgtatatatgtatcattttcttttttatatggttgcctatgtaaatataataaacttattttattttaaacaggtcgaattggatggtcttcgatagtgtcaccaatgtcgttttagtgtgaatgttaagtaggaaatggcgcactctgacatatgtgctttacagacgaccactgctgaccaggatcagggaacgtcttcaagggacagcaatgttcccaagccgtctttgcccaacatctacccacttggaacgacaagaacttcacaagctcaatcaacgacgatgactttggaacaataccgcctccagctgtataactatgcactcaatattgaacgactacgctgcccccaatatggtgggacgggtggcagtggagctagtgctccttggttgcatttaagcccctacggacaccatggctcaggcagtcttccatcagttaatcgaatggccgctctttcaacaatttccctcttcccacaaacgcaacgcatttttcaacctgaggagcctaaaccgcaacacagctatattggtttgattgccatggccatattgagctcaactgatatgaagttggttctctcagacatttatcaatatattttggataattatccttactttagaagtcgggggccgggatggagaaactccatcaggcacaatctctctctaaatgattgctttatcaaatctggacgaagtgcaaatggcaaagggcactactgggcaatacatccagccaacatggaggattttcgcaaaggggattttagacgtcgcaaggcgcagcgtaaggtccgaaagcatatgggtctatcggtggatgacgccagcactgactcgcccagcccgccgcctttggatcttacaactccacccccaccgagttcccagtctgctctgcaactatctgccctgggttatccataccaccagcactatatcggccaattctttaacaggagctcagcacctggtatgacgcattattccccaccagatccagccttgttaatgcaacgacaagaggcgaataacctagatcagacaatccaaccaactcagctccagcagccacattcccatcatcagcactttgcctatatcaactccaccacgacaacaacaatcgcgaatatgttttcgcagacgcggaagcgccagtttgacgtggcttcgctactggcacccgatgtccaaatcgttgatattgtctctgaagaccaggagtcgtcagttacgccaaccacttcggcgaggacaacaactcaaactcatcatactgtcattaccaagcaaacaatacaccgcgaagttgtgttgggattagaaaaacctgtgcaagatgcagacatagacgctgatattgatgtagaagttaatgtcgacgtggtagacgatagcattattcctgatactgattcttatacggatggggaagacaggaaaaaaacaaggggcactttgaagcaaatattttccattgaggacaataactcgtacctaatcgatggcaggctatcttcatttgatgccgatcccgatcatgaccccgaccacgatccagaagaccttgaacagcacaacttttcaattgccagctccgcagccaggtccttgggtagcagtagtagccaacacgaggagtcaagctcacttgaggaatgtcctatacaagagtgcattgtcgcgccccaaactgcactcatatcgtcaatggctactgcgaaaacatcaaccctgtcagttcccatttcagatgcgtatcttgaactgaaccaggttgatcaacacatgcttagtaggtactacgggtcgtatattgccgcagctgcacgacgagcaagtatagatgcatcaaatacttcgcgcacttcctctattacgccgcctccaaaaatagaaattctctcgcaaaagtaaaagataatttcattggcaagaaactacaataaaagaactaattgtctaaagttatataacaaacaatattaaaaactgaccacccacccacaaaatttcataccataaatttatatttattaaatagagttctttcaatgtagactaatatttaaacgtgcataacaaatgttaaaatattgttaaacttcatagatttcaaaataaatttagtgaacaaaacaattcaaatttctgtcatcttgatattaaaaaggttacattttcagcacggttccagttctagtcattacaaatctttagcacacaaaatgccgggtctgaccaagaaaaatgagtactcaagactttattttaattatatctttctgtttattaataaataacaattatcaaaaatgcatgggtctcagatactttgggctactaaggagaataaaatgagaaacaaatttgaaatcgtttaaaagtgtgtgggcgtgaccgttttcggcggtttgtgggcgttagagtgggggtggcaacatgggtcaacaatatggttggaaacgcttccttcttagtcgtactctacgagtataagggataacgatatagtcgagatcctagaccatcaaatacccgttactcagctagtgggtttgataaacataacatttcaacatttttggacatcgacagaaattggcataaaaataattcatctaaaaaacccaaaatgtataaaatgacagtttgagcggcttgtggatgctgaatggacttggttgaaatgctaatgcacataatataacgaaaaaattatgaaattatatttcaaaagtgtgagcgtggcaattagtttttttgcaagtggatataaatttagaagactaatgaaaattaaaatatcagcacaattttcaaagtcaaggttttcaacgttatattgggcgtggcaacaccaggaaagaaattctttctcgcttttaggatatgcccagttcaactcggctattta

SEQ ID NO: 23300 - DNA, 1800 bp, DROSOPHILA
atggcgcactctgacatatgtgctttacagacgaccactgctgaccaggatcagggaacgtcttcaagggacagcaatgttcccaagccgtctttgcccaacatctacccacttggaacgacaagaacttcacaagctcaatcaacgacgatgactttggaacaataccgcctccagctgtataactatgcactcaatattgaacgactacgctgcccccaatatggtgggacgggtggcagtggagctagtgctccttggttgcatttaagcccctacggacaccatggctcaggcagtcttccatcagttaatcgaatggccgctctttcaacaatttccctcttcccacaaacgcaacgcatttttcaacctgaggagcctaaaccgcaacacagctatattggtttgattgccatggccatattgagctcaactgatatgaagttggttctctcagacatttatcaatatattttggataattatccttactttagaagtcgggggccgggatggagaaactccatcaggcacaatctctctctaaatgattgctttatcaaatctggacgaagtgcaaatggcaaagggcactactgggcaatacatccagccaacatggaggattttcgcaaaggggattttagacgtcgcaaggcgcagcgtaaggtccgaaagcatatgggtctatcggtggatgacgccagcactgactcgcccagcccgccgcctttggatcttacaactccacccccaccgagttcccagtctgctctgcaactatctgccctgggttatccataccaccagcactatatcggccaattctttaacaggagctcagcacctggtatgacgcattattccccaccagatccagccttgttaatgcaacgacaagaggcgaataacctagatcagacaatccaaccaactcagctccagcagccacattcccatcatcagcactttgcctatatcaactccaccacgacaacaacaatcgcgaatatgttttcgcagacgcggaagcgccagtttgacgtggcttcgctactggcacccgatgtccaaatcgttgatattgtctctgaagaccaggagtcgtcagttacgccaaccacttcggcgaggacaacaactcaaactcatcatactgtcattaccaagcaaacaatacaccgcgaagttgtgttgggattagaaaaacctgtgcaagatgcagacatagacgctgatattgatgtagaagttaatgtcgacgtggtagacgatagcattattcctgatactgattcttatacggatggggaagacaggaaaaaaacaaggggcactttgaagcaaatattttccattgaggacaataactcgtacctaatcgatggcaggctatcttcatttgatgccgatcccgatcatgaccccgaccacgatccagaagaccttgaacagcacaacttttcaattgccagctccgcagccaggtccttgggtagcagtagtagccaacacgaggagtcaagctcacttgaggaatgtcctatacaagagtgcattgtcgcgccccaaactgcactcatatcgtcaatggctactgcgaaaacatcaaccctgtcagttcccatttcagatgcgtatcttgaactgaaccaggttgatcaacacatgcttagtaggtactacgggtcgtatattgccgcagctgcacgacgagcaagtatagatgcatcaaatacttcgcgcacttcctctattacgccgcctccaaaaatagaaattctctcgcaaaagtaa

SEQ ID NO: 23301 - protein, 599 aa, DROSOPHILA
MAHSDICALQTTTADQDQGTSSRDSNVPKPSLPNIYPLGTTRTSQAQSTTMTLEQYRLQLYNYALNIERLRCPQYGGTGGSGASAPWLHLSPYGHHGSGSLPSVNRMAALSTISLFPQTQRIFQPEEPKPQHSYIGLIAMAILSSTDMKLVLSDIYQYILDNYPYFRSRGPGWRNSIRHNLSLNDCFIKSGRSANGKGHYWAIHPANMEDFRKGDFRRRKAQRKVRKHMGLSVDDASTDSPSPPPLDLTTPPPPSSQSALQLSALGYPYHQHYIGQFFNRSSAPGMTHYSPPDPALLMQRQEANNLDQTIQPTQLQQPHSHHQHFAYINSTTTTTIANMFSQTRKRQFDVASLLAPDVQIVDIVSEDQESSVTPTTSARTTTQTHHTVITKQTIHREVVLGLEKPVQDADIDADIDVEVNVDVVDDSIIPDTDSYTDGEDRKKTRGTLKQIFSIEDNNSYLIDGRLSSFDADPDHDPDHDPEDLEQHNFSIASSAARSLGSSSSQHEESSSLEECPIQECIVAPQTALISSMATAKTSTLSVPISDAYLELNQVDQHMLSRYYGSYIAAAARRASIDASNTSRTSSITPPPKIEILSQK

SEQ ID NO: 23302 - DNA, 4030 bp, DROSOPHILA
cgatcggggagtttgtagaatattttgcttaaacatccgtacaatatacccaccggtccttttgaggtggttttacgtggtcggccactacgcgcaacgttttttggttgtgtgtgtttttttatatttatttatttggtaatacaccgttgcccgtggaattttgtataaatcaatgatattttgtaccgaaataccagaattatacttaattattatttcattttttataaattcgctcagttcctttgttttccccatgtttaacaaatttatgaatgaaataaaagtaggtagtaacacgttatcaagaacaaatgttcaaatgatctaaaaaagtcaaaaatttgatattcatcgaacaacagatcaatgcgaactaattaaatgtgatgtctaaatacttttgtcaccgcccaaatcgttgtctgtctaactttcttatcagcagaaggaaaattgaaaaggtaaaaagcaaaacatacctctcgcgtgtaactgtaattgcactctttgttttatcatcaatagtttacttatttatttgactgtactatgaaaagcatagcccggcagttgcaagctaatggtgtctaaatacttatgcccactagtgtagttcctaagttcgagaaataatctaaagtctagctttaatttgccgagatttagaagttcatacggacggaaagacagacggactgacatggctatatcgactcggctattgattcagatcaagaatatatacatacatatatttgaaatgtaatctttcttctacctgttacatacttttcaacgaatctagtatattgattttctccacgagtaacgggtataaaaatgtggattgcaaatgtctcatttactttgtgtgcaatatacgacgaaatagttagacgacttcattttggttttatggacggtcaaatgatatcttcagactttttgagtttacgtacctcttgttgtcttttttcaggctcattacgatagcatgaccgacattgatgcgagtgctcaacagcaacaacaacttcagaacgtgcagagactgcagcacgaaagctgccttcaggaattgcacaatcatctgagcagccagtacggggcagttcgctttactgcagcaaacccccaacatcaaaatcaacaggcagtttccgtatcttccggaaacttgatgccgttccttccggccttcctacagccgccaatgcccaatgctcaacagctcctgcagctcattcccggtcatgagaatgcccaatctgtcccaactcatcaccacagtcacccgcaaagtgaagcattcagcacacacaaaatggcactagctcctatgtggtccactgcggctgtggcagctgcgcacattcaagcagctctggcggctgcggcagtagcagctgccaacaataacaaaaatagcagccatttttcgaacaacactaatatagtcggtttagccaccagaggtaatgagctactgaacacagattctgatccccaaatggaaatcggagaaacgagaaggggcggcaatggggggtcctgcagatcaaggccagagtccccaacgtacgagaatccaccttacgaaatcctctcatacagccataacacacctccagaatctccacatggtcgaacagctgattgttcaaaaaacttttcaccatccccgacagacaatctcagcattgcgagcgtgtctgaagcccaagactcggaaatggatgctccacttaatctcagcaagccaaagggatcaccaagttcatcaccgaacagctcttcccaaagggatcactgcgaaaaccttactcctgttgtgtccagtcctcccctcagttggcaccaggggcaaccacattatgcggagatagagttgccccttctaaaaagtcatgtaagtaaaattagttttgcagattatttttaaaatcggcttaatttattttatttaaaagcacttataagtcaaggtaagcttatcttagcttactacgcaaaatgcaaacctttttcttgacatttatgtagtccctgttgcctatctgaatcttgcttgcacatgtgttatctatataacgtaatgtcgaccgcattttttcaaacacagcacttggtcgtgtttcttttgaaaaggaatatactgtctagtttattaaagcgggtttctttaatttgttctaggggagagtgtggaactcagctgttgcatgttctggaggatcacgggcaacgcgagtgagtcgtgactcagtaaatagttgtggtacgaattcagagcgatcggctgcgttggacccagaaagtttgaattcaggtcaactaggccctgtacctgcatcgccatcatcgcagccactgagacaaggaaatggtcatggacacggaggcaaccacggccacgtgcacagcaagccacacataaagaggccaatgaatgcgttcatggtgtgggcaaaagatgagcgtagaaagatactcaaggcttgtccagacatgcataattcgaatatatcaaaaattcttggtgctcgttggaaagctatgtccaatgccgacaaacagccgtattacgaagaacagtcaaggctctcgaaacttcacatggagcagcatccggactatcgctatagacctcgacccaagcgcacctgtattgtggatggtaaaaagatgcgtatttccgaatataaggtcctgatgcgaaaccggagggctgagatgagacagctatggtgtcgcacaggcggggtcagtggtggctcaggaagtctctgcgcagatgcctgtccaaagggatccggcggttctaattctcaggtcgcggttgcagccgctgcagctgtgtatcacttgcaggatatggcatcttcagcagcttccaccgctcatgggcatgactgtggacatacaccccctcagcagttcttctatcccccagaaagcttatcgccttctggtttttcttccgatgaagtggaacttgcatctcagcgcgagctagacgactaggatggtgattaccgaaagccaaatccggaataatgacaattctggcaaacggtgccagttatcagaagataaatgaaaaatacaattaaaatctgtttgtaaatacaaaaaaataggatagtcattatttgaagtaagtttcagttcaagtgccattaacgtacatatatacacatgcatacatatataagttatttgtgaatccatagtttacagggcattcggtcttgggaaccttgcaatttttgtgccatttacgcaccaatgccataataacataccccagattagccgtaaacaaataggtagttagtatcgattaataaaaatacaaaatatacaattatgtacatgtcaaatttgtatgcgtccaaatactcaaatctagtttaatagcatccacttaaataaatacatatatttaattagttgtaaattttcataactactttaaagtttattataaagattggcttgtgtgcatacttagtaaacaaattacaatgttgttataataacattatagtattcctattccggcggtaagccgctttttcataatcctggtattataatatgctggcaatctaaatgcaaatttaggaaatctaatgcacacgttgtgtatatgatgaacatgtctaagtgtacattcaaattattatttcactctaacataattaatttttaacatatacaatgcaatcgaatcaaaaagctcataaatcatatacatttttaaaatggctttccaagcaattgtatattaacagcaagaaatagaatactagaataatggcttggaaccaattaaacaagaacgcgaaatatatctttttgaaagttcaatgaatgatttctttttttccttgaaaaatatttcgacagctcatccatccctatcccgttcccgttcggaattgttagatcactacaaatcagtgttttgaaaaccgttactcgtgaagtaaaattatattatgaattagttttttgaatt

SEQ ID NO: 23303 - DNA, 1743 bp, DROSOPHILA
atgaccgacattgatgcgagtgctcaacagcaacaacaacttcagaacgtgcagagactgcagcacgaaagctgccttcaggaattgcacaatcatctgagcagccagtacggggcagttcgctttactgcagcaaacccccaacatcaaaatcaacaggcagtttccgtatcttccggaaacttgatgccgttccttccggccttcctacagccgccaatgcccaatgctcaacagctcctgcagctcattcccggtcatgagaatgcccaatctgtcccaactcatcaccacagtcacccgcaaagtgaagcattcagcacacacaaaatggcactagctcctatgtggtccactgcggctgtggcagctgcgcacattcaagcagctctggcggctgcggcagtagcagctgccaacaataacaaaaatagcagccatttttcgaacaacactaatatagtcggtttagccaccagaggtaatgagctactgaacacagattctgatccccaaatggaaatcggagaaacgagaaggggcggcaatggggggtcctgcagatcaaggccagagtccccaacgtacgagaatccaccttacgaaatcctctcatacagccataacacacctccagaatctccacatggtcgaacagctgattgttcaaaaaacttttcaccatccccgacagacaatctcagcattgcgagcgtgtctgaagcccaagactcggaaatggatgctccacttaatctcagcaagccaaagggatcaccaagttcatcaccgaacagctcttcccaaagggatcactgcgaaaaccttactcctgttgtgtccagtcctcccctcagttggcaccaggggcaaccacattatgcggagatagagttgccccttctaaaaagtcatgggagagtgtggaactcagctgttgcatgttctggaggatcacgggcaacgcgagtgagtcgtgactcagtaaatagttgtggtacgaattcagagcgatcggctgcgttggacccagaaagtttgaattcaggtcaactaggccctgtacctgcatcgccatcatcgcagccactgagacaaggaaatggtcatggacacggaggcaaccacggccacgtgcacagcaagccacacataaagaggccaatgaatgcgttcatggtgtgggcaaaagatgagcgtagaaagatactcaaggcttgtccagacatgcataattcgaatatatcaaaaattcttggtgctcgttggaaagctatgtccaatgccgacaaacagccgtattacgaagaacagtcaaggctctcgaaacttcacatggagcagcatccggactatcgctatagacctcgacccaagcgcacctgtattgtggatggtaaaaagatgcgtatttccgaatataaggtcctgatgcgaaaccggagggctgagatgagacagctatggtgtcgcacaggcggggtcagtggtggctcaggaagtctctgcgcagatgcctgtccaaagggatccggcggttctaattctcaggtcgcggttgcagccgctgcagctgtgtatcacttgcaggatatggcatcttcagcagcttccaccgctcatgggcatgactgtggacatacaccccctcagcagttcttctatcccccagaaagcttatcgccttctggtttttcttccgatgaagtggaacttgcatctcagcgcgagctagacgactag

SEQ ID NO: 23304 - protein, 580 aa, DROSOPHILA
MTDIDASAQQQQQLQNVQRLQHESCLQELHNHLSSQYGAVRFTAANPQHQNQQAVSVSSGNLMPFLPAFLQPPMPNAQQLLQLIPGHENAQSVPTHHHSHPQSEAFSTHKMALAPMWSTAAVAAAHIQAALAAAAVAAANNNKNSSHFSNNTNIVGLATRGNELLNTDSDPQMEIGETRRGGNGGSCRSRPESPTYENPPYEILSYSHNTPPESPHGRTADCSKNFSPSPTDNLSIASVSEAQDSEMDAPLNLSKPKGSPSSSPNSSSQRDHCENLTPVVSSPPLSWHQGQPHYAEIELPLLKSHGRVWNSAVACSGGSRATRVSRDSVNSCGTNSERSAALDPESLNSGQLGPVPASPSSQPLRQGNGHGHGGNHGHVHSKPHIKRPMNAFMVWAKDERRKILKACPDMHNSNISKILGARWKAMSNADKQPYYEEQSRLSKLHMEQHPDYRYRPRPKRTCIVDGKKMRISEYKVLMRNRRAEMRQLWCRTGGVSGGSGSLCADACPKGSGGSNSQVAVAAAAAVYHLQDMASSAASTAHGHDCGHTPPQQFFYPPESLSPSGFSSDEVELASQRELDD

SEQ ID NO: 23305 - DNA, 5085 bp, DROSOPHILA
gtttacaccttatgggcaaatagctaatttaaacaatgcgatatgataaacataacaaaaattatatttcttttttactaaatgaataattttgtggtatgagcataactgcgaaaataacttgtaacttaacttaatcattgtgaaatgattatacattttacctgatagtacatgttaaaaaaaaacttggacttaaacacatttaaaaagtttgccagatatattttaaagtaaaaaagattatactacggtctacaataagttgaactttagttgcatcccacggttttccataattactcatcaattcctttaccaatgcttgcagagtacttgattctttttgtctaatactattggtctatatacagttgcttaaattcaatttttaggacctaaatgtcttcacaaatcaattttaataataattacacgataacaattatacgaacaagctttggatacattatattgatcgaaaagctttcgctcctaaggtaaaagcctataaaataataaccgaaaataatttatgtttctcaaagtatatccaaataattataataaatttttttgttagtggatgtcctttatattttgagggaattcaaagcataatgcaattttaagcaaagtccattacacaaataattccaaatactaaaaaaaattactctatatatatgatttattaaatacaaataaatacttaaaatgaaaatcaattcccctgatcgcgtgcattttttaattctataggcaacgtctgcaatcaactggctccaactccaatcaactacttttatgtacaaaagttgtttagattacgagtcttgtttttttgaagacagacagtttcaaaactggatgttccggatagttttatagtgcaaccaccatgtgtccaaagaaaaaactgcccgtgctaatacacagcaaaagtatccagtttcacctaccgatccgtgtaggaatttagtaaaacaaacattaagttatctttttaaactaatattaatctctgatatttcagtcaacattttattggttgaatatttttagaacccgctacctatagtatattaaattcgttataccaaacattttttgccgcctagcaaaataaggggtactgatagtctatgaaatcggctcatgtattaaaaacaatatattaatagtttggtttattttcgacagtcagtcaaaatgataacatagtgtaatttttaatataaagtaaccaatgcagaaattaatagtcagtttaaattctacctgtagaatttcacggtgatactaccatatactcacttaatctgaagctttttcacattaaatattttgcttttaattcataccgtaatgtttaaataggttttattaactttttcttcgcttgtattgaatttaatttgatcttacaaagtttattacaaattcaatgcataatattcaatgatagatttgctgactttgaagatttttccagtacgcctatctaggcagcttcctttgccaggcggtcagccttttctacaacttcttcgattgggccgaccatgtagaaagcaacttcaggtagatggtcgtagtccccagctagaattgctgagaaaccttttatagtttgctccaggggcactagtttaccagcatgcccggtgaagacttcagcaacttggaatggctgcgacaagaaacgctgaatcttgcgagcacgagcgactgtgagcttatcttcctcagacaactcatccattccgagaatggctattatatcctgaagtgatttgtagtcttgcaagattttctgcacaccacgggcaacgttatagtgttcttggccaatgatgttgggatccatgattcgagaagtcgaatccagtggatccacagcagggtaaatacccagttcggcaatcgcacgcgagagtacagtggtggcatccaaatgagcgaatgtagtagcaggagcaggatcggtcaaatcatcagcgggcacatatatggcctgaacagaagtaatggatccctttttggtggtggtaatacgctcctgcatagaacccatgtcggtagccaaggttggctggtaaccgacggctgagggaatacgacccaacaaagcggacacttctgagccagcttgagtaaatcggaaaatgttgtcgataaacagcaacacatcctgtccttcttgatcacggaagtactctgcaacggtcagtccagttagagcaacacgggcacgagcacctggcggctcgttcatttgcccatatacgagagccacctttgaggtcttgtcctttagtgaaataacaccaccctcgatcatctcattgtataaatcgtttccctcacgagtgcgttcaccaactcccgcgaaaaccgagtatccaccatgagctttagccacgttgttaatgagctccatgatcaacacagttttgcccacaccggcacctccaaacaacccaattttaccacctttggcgtatggagccaggagatcgacgactttgattccagtgacaagaatctcttgctcaacagacatctgaacgaattcaggagcctcagcatgaatggcagcggtcttgtctgtatcaattggtccacgctcatcaatgggttcacctgttcaaagaatttcttaatttctttcttatgttttaatataatttacttaccaataacattaatgatgcgtcctagtgtttcggcaccaactggaattcggataggatacccagtatcgagaaccttctgtccgcgaaccaagccttcggtaccatccatggcgatagtgcgcacggtattttctcccaagtgctgggccacctctagcacgagccgaggagaacggttgtctacttccaaggcattcagaatgggcggtaagttatcatcaaactggacatcgacgactgcaccaattacggccacaatctttccatttgcggcagctgcagcctttgcagccttggcagcatggctacgagctgaaaacggagcagttgcttagtaagttttaaaaaatgtattcaaatatttttaaaatcgtacttaaagaaaactagcttacttcttgagaataattgtaaataaaaaatcaggacttgtcgaaggccaccgcagcaggtgcttgcaaaaaaatatatatgtatctaacattgtattagatgcttgatttgtttaatgaatgaataaaacacattcggctgatgatcctgatcatcgaataaaatttatgggatcggaaaagtttgctaatttatattgccagcgtatgaaaaggttttcttaataccccatatgtaaagctaattggtatcattttttaataaaaagtactatcagtttattgattttcctatcactagataccaatatatacagatttatgttatacttaacgaaagtgatactagtagaatacatcatcgtaaaacttaaacagtaacaatttgggcatcaatatcgacaatttttaatattattttttaagataatgatgaacaattaatattatactattaattattaatttaatttttaagtaactttaattttcaaaatactttgtgaagaattcaattgcaatataacgaaaaaaaaatttattcaatttaaaacgtcaaacaatatcggcatacaatatatgtacatacctagttaacttacagaaagacgtacacgcaaatgtctgactaaaaaaatctttttttttttcaaaagtcgtttaaattgagtactgttatatatgttataaaacagaagtaaccttaaatcattcaaaattgttatgtaatattttttttcgctcgtaacattttattgaacgataggttatgttcgacaattgcgctattagccaaagcacatattttgtgctgaacttcgcaatttaatacaattgttatcaattaaaaatttttatttttgtgctacttacacaattgccccaagaatggcagcaaattcttatcggctttagatgcagcacgtaacgcgaacatttttctcgaactaactgagaagtgtgcgggcgagcagaagtcctagtgatgagcaaatcggtagtcgcgatatattgagtatttacgcttccaaaacatatcgaggttttagtatttttgcgtattcagaccataatgtggacttacgttgttgttaccgcaccaggagagtgtccgaatgccacttttatatatacacaatgaactgtaactgttgtggttgcccgacactaacgactgatacacccatgaaaaggtggtttaatggattgcaagctgatgtggctgagtagaggtaactgcaccaacaaaaataagtaaaacaagagagaacgcaagtacgcaagagaaatttaaattattttatggcttatggatagaatttggaaaatatatgacaaaaaatgatattaatagtggtaggcgtgacagttttgggcggcgtgtgggcaatagattgtgcgttgcagcatcgatgaaaaaacttgccctgattcttcgtctctggaatgttaagtctcaacttgttaaatcactatctagctttcgtagttcctgtgatctcgacatacagagggacatgtgtagatcgactcggctggtgatcctgatatgaagatgatgaagaagatatggttgaaaaagcgagtaaacaattcttagtcagtctgattggcaattaatttttgtttaaaagatatcaaaagcaaacaaaatttttcgatatttgtcttaatacaatttttgtcggcttgtctgcctgaagaaaagcgttattttaaaacctaaaaaataaatttgtttatgttaaactggttggtatgggaaacttagggtttattacttttgctaagcccttccattttagcgagaaacagctataaacatttccttcctacccatcgctaaaatctaatagtttatctaggttaggggtgtttacgcttacaaacacataactacaatatttactccttcaaatcattttaagttatcgatgcatcgatatttcccttgtatttttccacctgtaccacgtgtggtcattttctgcaat

SEQ ID NO: 23306 - DNA, 2079 bp, DROSOPHILA
tttgctcatcactaggacttctgctcgcccgcacacttctcagttagttcgagaaaaatgttcgcgttacgtgctgcatctaaagccgataagaatttgctgccattcttggggcaattgtctcgtagccatgctgccaaggctgcaaaggctgcagctgccgcaaatggaaagattgtggccgtaattggtgcagtcgtcgatgtccagtttgatgataacttaccgcccattctgaatgccttggaagtagacaaccgttctcctcggctcgtgctagaggtggcccagcacttgggagaaaataccgtgcgcactatcgccatggatggtaccgaaggcttggttcgcggacagaaggttctcgatactgggtatcctatccgaattccagttggtgccgaaacactaggacgcatcattaatgttattggtgaacccattgatgagcgtggaccaattgatacagacaagaccgctgccattcatgctgaggctcctgaattcgttcagatgtctgttgagcaagagattcttgtcactggaatcaaagtcgtcgatctcctggctccatacgccaaaggtggtaaaattgggttgtttggaggtgccggtgtgggcaaaactgtgttgatcatggagctcattaacaacgtggctaaagctcatggtggatactcggttttcgcgggagttggtgaacgcactcgtgagggaaacgatttatacaatgagatgatcgagggtggtgttatttcactaaaggacaagacctcaaaggtggctctcgtatatgggcaaatgaacgagccgccaggtgctcgtgcccgtgttgctctaactggactgaccgttgcagagtacttccgtgatcaagaaggacaggatgtgttgctgtttatcgacaacattttccgatttactcaagctggctcagaagtgtccgctttgttgggtcgtattccctcagccgtcggttaccagccaaccttggctaccgacatgggttctatgcaggagcgtattaccaccaccaaaaagggatccattacttctgttcaggccatatatgtgcccgctgatgatttgaccgatcctgctcctgctactacattcgctcatttggatgccaccactgtactctcgcgtgcgattgccgaactgggtatttaccctgctgtggatccactggattcgacttctcgaatcatggatcccaacatcattggccaagaacactataacgttgcccgtggtgtgcagaaaatcttgcaagactacaaatcacttcaggatataatagccattctcggaatggatgagttgtctgaggaagataagctcacagtcgctcgtgctcgcaagattcagcgtttcttgtcgcagccattccaagttgctgaagtcttcaccgggcatgctggtaaactagtgcccctggagcaaactataaaaggtttctcagcaattctagctggggactacgaccatctacctgaagttgctttctacatggtcggcccaatcgaagaagttgtagaaaaggctgaccgcctggcaaaggaagctgcctagataggcgtactggaaaaatcttcaaagtcagcaaatctatcattgaatattatgcattgaatttgtaataaactttgtaagatcaaattaaattcaatacaagcgaagaaaaagttaataaaacctatttaaacattacggtatgaattaaaagcaaaatatttaatgtgaaaaagcttcagattaagtgagtatatggtagtatcaccgtgaaattctacaggtagaatttaaactgactattaatttctgcattggttactttatattaaaaattacactatgttatcattttgactgactgtcgaaaataaaccaaactattaatatattgtttttaatacatgagccgatttcatagactatcagtaccccttattttgctaggcggcaaaaaatgtttggtataacgaatttaatatactataggtagcgggttctaaaaatattcaaccaataaaatgttgactgaaatatcagagattaatattagtttaaaaagat

SEQ ID NO: 23307 - protein, 505 aa, DROSOPHILA
MFALRAASKADKNLLPFLGQLSRSHAAKAAKAAAAANGKIVAVIGAVVDVQFDDNLPPILNALEVDNRSPRLVLEVAQHLGENTVRTIAMDGTEGLVRGQKVLDTGYPIRIPVGAETLGRIINVIGEPIDERGPIDTDKTAAIHAEAPEFVQMSVEQEILVTGIKVVDLLAPYAKGGKIGLFGGAGVGKTVLIMELINNVAKAHGGYSVFAGVGERTREGNDLYNEMIEGGVISLKDKTSKVALVYGQMNEPPGARARVALTGLTVAEYFRDQEGQDVLLFIDNIFRFTQAGSEVSALLGRIPSAVGYQPTLATDMGSMQERITTTKKGSITSVQAIYVPADDLTDPAPATTFAHLDATTVLSRAIAELGIYPAVDPLDSTSRIMDPNIIGQEHYNVARGVQKILQDYKSLQDIIAILGMDELSEEDKLTVARARKIQRFLSQPFQVAEVFTGHAGKLVPLEQTIKGFSAILAGDYDHLPEVAFYMVGPIEEVVEKADRLAKEAA

SEQ ID NO: 23308 - DNA, 6253 bp, DROSOPHILA
ccagaatgccatgcgatgcagatcgattcctggatactatctatttttgatgaatttgttgcctagagcatgagattccactaataaccaaaaccaaaaaaaaacacacccacaaacacagacaattatatagctatagttatataaaatggaattttataatgaatcccacacagagaatagaacaaacagcatggattgtaaaaacaaattatatatgtatacatgtgaagccgtatgaatcaaatataaagtactgctatacaacataattactaaaaaaaacaaaaacaaaaactgaagctaagtgaaattatacatacatacatgcatattatatacaaacacacacacaagcccacatacaaatatataaacgttaaataaatgaaaagtacaatacacttgcatattgatttattgtttaatttggctgcggaaaataaataatgtaattgatcgaaatcgggatgaaaaaaatagaatttctttaggtttttaatattacattttgtttattaaattgaagttggaatgaaattaataatggaaataaacttaataaggtagcttcaataaaaaaatagataatcgtcaaatttcattctaaaataatttgcgctttgacttagaattaattttcaacaacacctttagaaataaatcactaaatacaattatcaaatggacttcaatttcagttcgtttattttgaagttaattaacgatattaatttattagtaattcattacgctaaaggcttccaaatattatgatttttttcagtaaccaaaagaaaaggacacaaatcaaaaattcaaaattacacttacaactgattaaactagacctattttaaattaaacctttgaaggctttaattcaataacttttatataaccacaaaatatcaaaatatagaacaggaacaaaaaaaaaaatccaatgcatgtacaaagaatctaatgattcgttcaaaggagctggtactttcccagatcggcatccctgccgttcatcaaatatgcgttgatggcaatctggctgagcacctgcacaccacatttgtgaagatactccatgtcctgggtcgacagcggcgccttcttcacatcgacaaaacaatggctggcacttttggccacaggatctttggagaacggagttgttggctccaggatgcaagcgccgccggcacgcagcacattcctgatgggcgccccgctcctctcgttcatgctgagtataacccggtgatcggagaaggcgccaccgccgcacgcactcaactccgtgcgccaacggtggacggcggcagcgatgggctcctcctccggtgccagggtgggcaagttaatggccttcgggttgccccattcgtacagcgtttcgtccagaaagtcgccacgcgcatgcgactgttcgatatactggatatttagtatccatttcccggccgcaatgcaggccagcatcttctcgccgcgattcggacgctcgcacagcagatgggtgcagctatcgtcatagttcaccagattctcgcacacttttccgcccagttgggtgatccgcgcgattagttccgcccgcttttcgtcatcatcaccgcacgagatgctgaagcacggtatgccagcatactgcatcttgggcgaaccgccagaggatcttctctttgccgcattgaactccgccggatcgcgccagtcgaccatgtcctcggtgcccagggcgaagccctcggactcgaagggctgcacatactgcacctcgctctcgccgcaatccatgtcgttgtcgtggctacgcttcagactgttccttcgcgattcgcagttctttagatagtcggtgatttgcttgacatctggcgccactgtgggaacatctggggccaatacgggcacggccgactcctcgaagctaatcttgtcaaagttaatagtgctctgaccttcctcgcttaacgttggaccatctgaacgccgtggcggcgctgcttcgattggactctgtgtgttcggtacgaagggtgattgcgttccgctgcggggtgaacccatggacacccggagtggcgtctttttacctagcgatagcttcggtgttttcggtgatctatcaaagttgagtttggtggcctgcgtcgtcctggttggcggcttcttctttaccgttgatggcgattccgatagcgttggcgtcttagcattactttcttcatattcgatgcccagagtttcgcatgtgatccgcatcacgcgctgcctgatgacggccaacggtgtgtctggtttgattttcatggtgggtaggcgccagcgccgctcaaaatcatcggccatccgctgctggaactcgggagtgagacaaaaatctggaattcccggtgctggtcgttgatgcttacgactgacgggcgtgcaggcctgccgtcgaatgcgttccaattccggcgtttgattctcgcgcatttcacggataatctcgcgcacacaatccttgccctcttctgtatccaggcgttgaacgaattgctctaggaagtccagattgtactgctgggcacccacctggctaagtggcgtgcatggtgagtccggagaagatgtggagttgctgccacgatgaagagcactgcctcctggtattccagctagctcggaaactctcttgttgcgcaggggcgtcagttcaggagctcctggactgccagcagtaactggtgtgacagatcccgccggttggttctcggcctcctccatggttacatccggttgagccaccaatgtggattcattcggtcttcttgctgtccggctattgctgtcccgcaagcgtggcgatatggggaaatcctcgggactcttgcccaccaaatatccaacgaagggcagcttctgaccagtgcgggcgcactgcaccagccaatcggatgtgactacgggatagttccatttgatggcaccttcatacttggagccctcggcactgggacacaccagcagcggtttctccttcttgatgaatgtcttattgacggaggcgccaagtagttctgctgtcgcattaataaagtcccgctccaatcctgcataaatggatacgacaatagtcattcccttaagcggctgacgcagtgcggtagccggcacatgtttgtggtaatattcgatgggcagcagttgattctttttcatacagctttccaggaacagttcggtgaccacatggcgggccttgacgggtaattgcttcacatcgaaggctacctcaaagctgacaatggcgaaatccacttcatcggagaaactcgatggcaccaataagccttgggcagcttcgcattcggttagcatttggttgaagaactcctcgttgaaacactccctgtgcacataaacagagacaccggcgaagtagtccagcttatcgaaatcaatggatagagtgctggcactgagatccggcaattgcaaaccctcagcgggtggttttggattggctaccgagactcgctggcgtatatccatttgggtggaacttgccgctggttgaaggagactaacatctgccggtggcagttgtgccactgctccttgatcctgtgagtactgatccagcagcgtatgatccggctcctcgtgctcctgttcctgcacgggatccggttcctgatcgaaaagcttcttcttgatgggcaatgttggctgcttgaagctgtggttcatggagcgcagtgttcgcttgctggcaggagaggcaacgtctggttctcgattctgtggcatcgacacacgatgcaccaactcactgaccacgcgaccagctcgaatgctctccagcagccaatctaggcgcaccacatgaactgaacccatgagaccatcgcgctgccactgtcggtattcggcgtcatccagttggcccacaatgatgtgtgagatgccctcattggcctcatcgtagcgggtcgctccgcccgtattcagcactctgtttagcttctcacgctcctctgagcggaagccactcaaatacacacagcagccatccagaaaggcgcccgcttttttcgcctgacgcggttcaatctcggccagcacctgctggtagttgcggccactgctagtcgcctgcttgagcagctgcttggcgggcgaactgctgcccacactgctgacggattcgttgacggtactaagatcgctgcacatgcgacgcgagccggagacgaagctgatacgtgagagatccgagaggtgcgtttgatctgcaccgggagctgcgcccggacgagtggtcttggtgggtgtggacgacgtcttgccaggccgcacctcatagtcctttgtgggcagagcgtagccgcgattgcagctatcgaagatccattccggcagcaagacatccttcttgtagcgtatggctgccttatacttctcggtgtccgtttttgtttgctcggtgatgacgatgtccaccacctgggagcgaaaggcacgatgatagatgcctccattatcgttgaccagccgcataacttgatccttgcgcgccacatccaatccactgcacgtgatattcgcaccaaagaaaatgggcaggcgatacttatcgaaatcaggatccgtggccatgatgccctcgcgctggctgcgacgactctgatcccagacgtactgcacccagtcgacgtgcattacgggtactccgttcagcgttgcctgctcgtacttgctggacttgatggtgttcgaaatgaggtgggtggtgcgatgcccgaagctttgaaagtatatgccgcccatccagtttatgagcctgctcaattcctctttcttctgtggtgttatgcccgtggccgagacctgcagatcccgcatggccgtgctgtagatggcactgctgccctcgggaatgggttcattgcgccgcaggcaggtgatgaggcacggtggccccagaattagtgctcgcgtctgctgcaattgctcgaagaattcgccctcgaactgggtcagcacaaagacgtccttcttggtaaggttaccggctgcgatcaggggatatccttcgcttggctttatttgccggatctgcgtttccgccaactgttggcccagtagctcccgcgccgcctcgaattgctgcagtgtgtcggcctcctggacgccaccgtcgcccggcttcagattgttcacgaagtacgcgcagatggtctcgtccatgctcatgcttatgctcatgatggcggttgcgagtgtgttctctgctccgtgatgcgctgcaaaattgccgtgattttcgcactgcactttttttcgcgtacgctattttggcgccgtttgttattgccttcaaaccgttggcaacgctggcttgtgattagttggcaactacgagttgagctatgtggcaacgccgacggcgaattaaaaaataatgtgtatgggtaattttaattatttatctctaagatgtaaggattttttatttactttttatcaaataaataaaatatttcgaaaataagcagttatttatcagttttggtttaagctatcgatatatttcattaagcgaaatatcgatatccacgtcgtcgacggcagctcagccctaaaagaaaggaagaaagaagaaaggaaaggcaaatcagaaataatcaagacattgaccaacttgtactattgctagttttgtggacacaggatccaacacttgaaggcgaccacagctttcgcacactcacacacacacagcggccattttccgccgaacaagtgaaatgccaacatgccattgtatgtgtggtggtgaccaactgaaatagaataataaactaaaccaaagcgaagagaaaacgtaggccaagagctatattggatctgtgtcacagttttccatagcaccaacctatcaaatgggcaactttgtgagcagacagaacgcggcggtggaggaggccgatccgagcacgaacaatgcctacaagtatccaccgagaatgggtaacttctttggcacccacttcatcatgggcggcgagcgcttcgacacgccccaaccggaatcgtacttgtttggcgagaatgcggatctcaatttcctgggcaatcgacccacagcctttccgtatcccccgccgcaggccaatgaaccgacgaagaccctgaagagtctggtcaacattcgcaaggagtcggtgcgtttcgtcaagacgatgaacgacaagaagctgggcgg

SEQ ID NO: 23309 - DNA, 4278 bp, DROSOPHILA
atgagcataagcatgagcatggacgagaccatctgcgcgtacttcgtgaacaatctgaagccgggcgacggtggcgtccaggaggccgacacactgcagcaattcgaggcggcgcgggagctactgggccaacagttggcggaaacgcagatccggcaaataaagccaagcgaaggatatcccctgatcgcagccggtaaccttaccaagaaggacgtctttgtgctgacccagttcgagggcgaattcttcgagcaattgcagcagacgcgagcactaattctggggccaccgtgcctcatcacctgcctgcggcgcaatgaacccattcccgagggcagcagtgccatctacagcacggccatgcgggatctgcaggtctcggccacgggcataacaccacagaagaaagaggaattgagcaggctcataaactggatgggcggcatatactttcaaagcttcgggcatcgcaccacccacctcatttcgaacaccatcaagtccagcaagtacgagcaggcaacgctgaacggagtacccgtaatgcacgtcgactgggtgcagtacgtctgggatcagagtcgtcgcagccagcgcgagggcatcatggccacggatcctgatttcgataagtatcgcctgcccattttctttggtgcgaatatcacgtgcagtggattggatgtggcgcgcaaggatcaagttatgcggctggtcaacgataatggaggcatctatcatcgtgcctttcgctcccaggtggtggacatcgtcatcaccgagcaaacaaaaacggacaccgagaagtataaggcagccatacgctacaagaaggatgtcttgctgccggaatggatcttcgatagctgcaatcgcggctacgctctgcccacaaaggactatgaggtgcggcctggcaagacgtcgtccacacccaccaagaccactcgtccgggcgcagctcccggtgcagatcaaacgcacctctcggatctctcacgtatcagcttcgtctccggctcgcgtcgcatgtgcagcgatcttagtaccgtcaacgaatccgtcagcagtgtgggcagcagttcgcccgccaagcagctgctcaagcaggcgactagcagtggccgcaactaccagcaggtgctggccgagattgaaccgcgtcaggcgaaaaaagcgggcgcctttctggatggctgctgtgtgtatttgagtggcttccgctcagaggagcgtgagaagctaaacagagtgctgaatacgggcggagcgacccgctacgatgaggccaatgagggcatctcacacatcattgtgggccaactggatgacgccgaataccgacagtggcagcgcgatggtctcatgggttcagttcatgtggtgcgcctagattggctgctggagagcattcgagctggtcgcgtggtcagtgagttggtgcatcgtgtgtcgatgccacagaatcgagaaccagacgttgcctctcctgccagcaagcgaacactgcgctccatgaaccacagcttcaagcagccaacattgcccatcaagaagaagcttttcgatcaggaaccggatcccgtgcaggaacaggagcacgaggagccggatcatacgctgctggatcagtactcacaggatcaaggagcagtggcacaactgccaccggcagatgttagtctccttcaaccagcggcaagttccacccaaatggatatacgccagcgagtctcggtagccaatccaaaaccacccgctgagggtttgcaattgccggatctcagtgccagcactctatccattgatttcgataagctggactacttcgccggtgtctctgtttatgtgcacagggagtgtttcaacgaggagttcttcaaccaaatgctaaccgaatgcgaagctgcccaaggcttattggtgccatcgagtttctccgatgaagtggatttcgccattgtcagctttgaggtagccttcgatgtgaagcaattacccgtcaaggcccgccatgtggtcaccgaactgttcctggaaagctgtatgaaaaagaatcaactgctgcccatcgaatattaccacaaacatgtgccggctaccgcactgcgtcagccgcttaagggaatgactattgtcgtatccatttatgcaggattggagcgggactttattaatgcgacagcagaactacttggcgcctccgtcaataagacattcatcaagaaggagaaaccgctgctggtgtgtcccagtgccgagggctccaagtatgaaggtgccatcaaatggaactatcccgtagtcacatccgattggctggtgcagtgcgcccgcactggtcagaagctgcccttcgttggatatttggtgggcaagagtcccgaggatttccccatatcgccacgcttgcgggacagcaatagccggacagcaagaagaccgaatgaatccacattggtggctcaaccggatgtaaccatggaggaggccgagaaccaaccggcgggatctgtcacaccagttactgctggcagtccaggagctcctgaactgacgcccctgcgcaacaagagagtttccgagctagctggaataccaggaggcagtgctcttcatcgtggcagcaactccacatcttctccggactcaccatgcacgccacttagccaggtgggtgcccagcagtacaatctggacttcctagagcaattcgttcaacgcctggatacagaagagggcaaggattgtgtgcgcgagattatccgtgaaatgcgcgagaatcaaacgccggaattggaacgcattcgacggcaggcctgcacgcccgtcagtcgtaagcatcaacgaccagcaccgggaattccagatttttgtctcactcccgagttccagcagcggatggccgatgattttgagcggcgctggcgcctacccaccatgaaaatcaaaccagacacaccgttggccgtcatcaggcagcgcgtgatgcggatcacatgcgaaactctgggcatcgaatatgaagaaagtaatgctaagacgccaacgctatcggaatcgccatcaacggtaaagaagaagccgccaaccaggacgacgcaggccaccaaactcaactttgatagatcaccgaaaacaccgaagctatcgctaggtaaaaagacgccactccgggtgtccatgggttcaccccgcagcggaacgcaatcacccttcgtaccgaacacacagagtccaatcgaagcagcgccgccacggcgttcagatggtccaacgttaagcgaggaaggtcagagcactattaactttgacaagattagcttcgaggagtcggccgtgcccgtattggccccagatgttcccacagtggcgccagatgtcaagcaaatcaccgactatctaaagaactgcgaatcgcgaaggaacagtctgaagcgtagccacgacaacgacatggattgcggcgagagcgaggtgcagtatgtgcagcccttcgagtccgagggcttcgccctgggcaccgaggacatggtcgactggcgcgatccggcggagttcaatgcggcaaagagaagatcctctggcggttcgcccaagatgcagtatgctggcataccgtgcttcagcatctcgtgcggtgatgatgacgaaaagcgggcggaactaatcgcgcggatcacccaactgggcggaaaagtgtgcgagaatctggtgaactatgacgatagctgcacccatctgctgtgcgagcgtccgaatcgcggcgagaagatgctggcctgcattgcggccgggaaatggatactaaatatccagtatatcgaacagtcgcatgcgcgtggcgactttctggacgaaacgctgtacgaatggggcaacccgaaggccattaacttgcccaccctggcaccggaggaggagcccatcgctgccgccgtccaccgttggcgcacggagttgagtgcgtgcggcggtggcgccttctccgatcaccgggttatactcagcatgaacgagaggagcggggcgcccatcaggaatgtgctgcgtgccggcggcgcttgcatcctggagccaacaactccgttctccaaagatcctgtggccaaaagtgccagccattgttttgtcgatgtgaagaaggcgccgctgtcgacccaggacatggagtatcttcacaaatgtggtgtgcaggtgctcagccagattgccatcaacgcatatttgatgaacggcagggatgccgatctgggaaagtaccagctcctttga

SEQ ID NO: 23310 - protein, 1425 aa, DROSOPHILA
MSISMSMDETICAYFVNNLKPGDGGVQEADTLQQFEAARELLGQQLAETQIRQIKPSEGYPLIAAGNLTKKDVFVLTQFEGEFFEQLQQTRALILGPPCLITCLRRNEPIPEGSSAIYSTAMRDLQVSATGITPQKKEELSRLINWMGGIYFQSFGHRTTHLISNTIKSSKYEQATLNGVPVMHVDWVQYVWDQSRRSQREGIMATDPDFDKYRLPIFFGANITCSGLDVARKDQVMRLVNDNGGIYHRAFRSQVVDIVITEQTKTDTEKYKAAIRYKKDVLLPEWIFDSCNRGYALPTKDYEVRPGKTSSTPTKTTRPGAAPGADQTHLSDLSRISFVSGSRRMCSDLSTVNESVSSVGSSSPAKQLLKQATSSGRNYQQVLAEIEPRQAKKAGAFLDGCCVYLSGFRSEEREKLNRVLNTGGATRYDEANEGISHIIVGQLDDAEYRQWQRDGLMGSVHVVRLDWLLESIRAGRVVSELVHRVSMPQNREPDVASPASKRTLRSMNHSFKQPTLPIKKKLFDQEPDPVQEQEHEEPDHTLLDQYSQDQGAVAQLPPADVSLLQPAASSTQMDIRQRVSVANPKPPAEGLQLPDLSASTLSIDFDKLDYFAGVSVYVHRECFNEEFFNQMLTECEAAQGLLVPSSFSDEVDFAIVSFEVAFDVKQLPVKARHVVTELFLESCMKKNQLLPIEYYHKHVPATALRQPLKGMTIVVSIYAGLERDFINATAELLGASVNKTFIKKEKPLLVCPSAEGSKYEGAIKWNYPVVTSDWLVQCARTGQKLPFVGYLVGKSPEDFPISPRLRDSNSRTARRPNESTLVAQPDVTMEEAENQPAGSVTPVTAGSPGAPELTPLRNKRVSELAGIPGGSALHRGSNSTSSPDSPCTPLSQVGAQQYNLDFLEQFVQRLDTEEGKDCVREIIREMRENQTPELERIRRQACTPVSRKHQRPAPGIPDFCLTPEFQQRMADDFERRWRLPTMKIKPDTPLAVIRQRVMRITCETLGIEYEESNAKTPTLSESPSTVKKKPPTRTTQATKLNFDRSPKTPKLSLGKKTPLRVSMGSPRSGTQSPFVPNTQSPIEAAPPRRSDGPTLSEEGQSTINFDKISFEESAVPVLAPDVPTVAPDVKQITDYLKNCESRRNSLKRSHDNDMDCGESEVQYVQPFESEGFALGTEDMVDWRDPAEFNAAKRRSSGGSPKMQYAGIPCFSISCGDDDEKRAELIARITQLGGKVCENLVNYDDSCTHLLCERPNRGEKMLACIAAGKWILNIQYIEQSHARGDFLDETLYEWGNPKAINLPTLAPEEEPIAAAVHRWRTELSACGGGAFSDHRVILSMNERSGAPIRNVLRAGGACILEPTTPFSKDPVAKSASHCFVDVKKAPLSTQDMEYLHKCGVQVLSQIAINAYLMNGRDADLGKYQLL

SEQ ID NO: 23311 - DNA, 3092 bp, DROSOPHILA
gtgcggcttaaactgacattaataaactgattgttttacctgattttttaagacatcaaattatttataatgatcaaatatatacacaccgtatttaaaaattatcaattatatgtaacccaattgggggaaaaaatactttaatgttttaatgttccaaaagttgcacttttaaaaacgcactgtatgtttattaataagatgaatttgttgatcataagacaatttctcaatcctaatgcaaaccatattatacaaaaccaattaggaaggtcaattatacacatatgttgtgggcaatttaagcccgagaaaaacattacaactattcgcttaaaatttcctataagcatctaaaccatttgaaaaaaaattctagcaaaaacttactatagctaaacttttgttgatttaacatattgcacccataagagcaattcaaattgtatttcctttctgaattgtaaattatattttatgtatgaacgtaagaccaatgtagctaatgctaattcccaatctttgaaaacacttccttgggaaatgggcattactttttttttttgttcttttttgttggtagtcaagcatgtagatttatagcacattgtgaatttgaacactcgcatcagatcgatttaatggaacactgattatacacttctgtagaaggaaatatatatacaccagacatttttgtagtttcaaatggacgtgggcgggacacacgatggttccatctagaatctatagtgatgcaagagatcatttggccaatcactcgtatgacaggtgattgctattaacttacatatctcggtaattgggctatcatcatgctcgactctctactaacccccctatctacaaccatattctttcgcagtccatttaatataatctgtggccaagtcatagatcacctgatgccttatcaggccataaatcgtatgaaagggttttggaaattgcggtaaacgtgatatgtatatttaagatgctaagcgcatagttgtgcgatatcggcattgggaaggaatcccgtccaggcgatgatcgtgcggaaggtcgctccactagtgaggcgcctaatgatgtgcacatttatcttcttgccatgaatgtcgtccactttccggccgcgcaggtgatccagcaccatctggccacgggtgtggatgccactcagctccacggtggcgtagtactgccgctgttcggcgatcatcgcatccgggaagagataggcggcggtgagtagggaatcacaactgatccacttcacgaatcctcgcggctccagcatggagcgttccacgcgtgtgagtagctctataaagggatgatcaaccgctccgaggacattcagtcgccagtcgagggtggtgtcgaactctccatcgatgcagggctcccagggcaggatgatcgccggttccagcagacgctccagggtaatgtgcgccgcctcgggatccatcatgaaattgaattcggcacttttcgtgacattacccttgccgaatatgttgccacccattatatagactcgaccaatgttcgtcagaaatgagtttccatacaaattgatgcagttggcaaagttggtaagtggtccgcacagcagaaagtccacttggccgggattagctctggccaggcggtacatggcattgacagcgtgctccggttgcagttcctgctccacatcgaccacaggatagttgcccacatcgtttaggccatcctggccatggaaacagttggtatactcccaagtgcgtggcactatggattcgtaacagcccctaaagaccggaacctgtgtagatcagattgttagcacgttttggaaatccgattgcacaaagcatttcacatcgcgcctgttcaacgtgtgcagcacccgcagggcattcagtgttccattgtccgcatccgtgttgccatgcaccgttgttatggccaacactttgcaggtccttccttcgcgcagagttagctcctccgcgcgcagcaacatggccaatccccaggcatcatcggtcccaatgtcgcagtcgtagaccacgaggcgatgcttcttgtccatgtcgaatgctattccaaactggtttgctgccgcttctatcgattacggaacgaactatcgcgcccaatggtgggccccatgaatgaaaatactatatttaactaaattcggatggtttttttttaggctcgcaaagcagggggctttccatttcgttttgctcgtgattattactgactgaatatatggaaatatatatatattgcagcaaatattattattatttagtaacattttcatttcaactaaataagttttacttgctaaaatttcaatgaaactaatcatctgcaataacgtaaaataaacagctgtaaccagcaggtttacaatatgtaacatatgatatgatactatagttagggtattcagctggtaaatgtaactaaatatttaataaagaaaatagtatgaaatatataaaaaaaaatatgtaataaataaaaaaacattgaatatatataaacaaaaagctgaagttcaatgatttatcattagtattaacttatgtatagtttatagttttttatttttcaatttgatttaagctgattttaagctgagtatttcgagttttgagatcttgctaaatttggaagaaaacaattaaattcacattaaaatcccatttaatcgcatttatttagggcttaagcataataaccttcggtcttaaaaatgttcattatttcaacactcgcgaataagaaaatagactaaccaaatagagcatagtcgtttaatgacttaagtgggtgggtgttccacgttcatttccaactacttacttatatgggatgtactctcgtcgcgacattctagattctatagtctagattacctcaagtgtcgcaagtgggcgcttctcaccatgtgacgacctgccgcaacttgattaccattgttgcaaccatagtgattccagttgcccttcggatcccgtctcttgtattcattgaattaaattgtaaattgaattcttcccttcttattcagcaga

SEQ ID NO: 23312 - DNA, 1035 bp, DROSOPHILA
atggacaagaagcatcgcctcgtggtctacgactgcgacattgggaccgatgatgcctggggattggccatgttgctgcgcgcggaggagctaactctgcgcgaaggaaggacctgcaaagtgttggccataacaacggtgcatggcaacacggatgcggacaatggaacactgaatgccctgcgggtgctgcacacgttgaacaggcgcgatgttccggtctttaggggctgttacgaatccatagtgccacgcacttgggagtataccaactgtttccatggccaggatggcctaaacgatgtgggcaactatcctgtggtcgatgtggagcaggaactgcaaccggagcacgctgtcaatgccatgtaccgcctggccagagctaatcccggccaagtggactttctgctgtgcggaccacttaccaactttgccaactgcatcaatttgtatggaaactcatttctgacgaacattggtcgagtctatataatgggtggcaacatattcggcaagggtaatgtcacgaaaagtgccgaattcaatttcatgatggatcccgaggcggcgcacattaccctggagcgtctgctggaaccggcgatcatcctgccctgggagccctgcatcgatggagagttcgacaccaccctcgactggcgactgaatgtcctcggagcggttgatcatccctttatagagctactcacacgcgtggaacgctccatgctggagccgcgaggattcgtgaagtggatcagttgtgattccctactcaccgccgcctatctcttcccggatgcgatgatcgccgaacagcggcagtactacgccaccgtggagctgagtggcatccacacccgtggccagatggtgctggatcacctgcgcggccggaaagtggacgacattcatggcaagaagataaatgtgcacatcattaggcgcctcactagtggagcgaccttccgcacgatcatcgcctggacgggattccttcccaatgccgatatcgcacaactatgcgcttag

SEQ ID NO: 23313 - protein, 344 aa, DROSOPHILA
MDKKHRLVVYDCDIGTDDAWGLAMLLRAEELTLREGRTCKVLAITTVHGNTDADNGTLNALRVLHTLNRRDVPVFRGCYESIVPRTWEYTNCFHGQDGLNDVGNYPVVDVEQELQPEHAVNAMYRLARANPGQVDFLLCGPLTNFANCINLYGNSFLTNIGRVYIMGGNIFGKGNVTKSAEFNFMMDPEAAHITLERLLEPAIILPWEPCIDGEFDTTLDWRLNVLGAVDHPFIELLTRVERSMLEPRGFVKWISCDSLLTAAYLFPDAMIAEQRQYYATVELSGIHTRGQMVLDHLRGRKVDDIHGKKINVHIIRRLTSGATFRTIIAWTGFLPNADIAQLCA

SEQ ID NO: 23314 - DNA, 14825 bp, DROSOPHILA
actaactaaattccctggcaacttcgaatcctttaaaagtagtctgcataaagtataaaatatttcatacttttagacacccattttgaagtcaccagaaatttctagcaccgctgctcgtaatttctatctacttcatagtttagtaactataactagttaattttcaaatatagatatgcaattagaatctgtgctttatatgcatactcaccgcgtgacacatttgacttttgttaaatgttgtacaattgtttttttttttctcatttgcaaattttggtatttgatatatatatatgtatatattacaccattaaactttcaatatatcgcgcatagtatataaatatatatttatatggtatatacacagatgtggcatatggaggcatcggtcttgttgtccattggctctaatatatatgttttttttttcgctatgtcgaaaggagttctattttggggttctgaggactgtggtttcacttctatctgatggatcgatctatatagctgcatagctgtatctgcatctctgctgctgctctagtggtggctcaggtaggtcttgcgcttcaggtaaccactgcgtatgggtgatgagagtcctgtctcgttgctgtgtttatcgagtatcgattatcgatgacagacacggtcgatggcagtgtgtgcgtggtgtgaggtgtgtgtgttggtgtggtgttggatttgtttttgttttgtttttttcaggcaaattttggatattttttgtttggaaaaagaaagacagagttaacgttgagaaagagttgaattttggctctaagatggaaacgtttctaagatcgataattatcgtatttttttttacccacctctagtgtgtggggcttatcaattttgtttcttttttcacaacaccaattaatcaatcaataaaatgctcagctaggtatgcttcaaaatacataacaaagaaactgaaaaattgtgtggggagtgtggggtatattctagaacactaattctaacatcaattgtctgtaatgttttgtttttggttttaacgcttctatctgtttacaagatgctttaattgttgtttttcattgctctaaacaattggtttgcttgagttgcaattcaattttcattcgttgcttgttcatgcagcctgatgatggtgtgtatttggcgtgaggtgtatttgtcggcgtggtgggttttgaacagcgtggtgggttttgaaggccgtgaagcattaagcgatttttttttgtttgtattattattattatttgttcgtatcggttatccgtaaatcaaggaacaaacaaagaaaagataaaaatcgtaatcgaaacattataaatcatatatatactatgtaagatatatatttccaacaggcccatttaactgtacgtttttttttattcggcactaaatactggcgcacatattttttatgttttgttgcattttggcttttgttcgcaatcaaaataatatcatacaaatacaaattaagatagtacatgaatgcaatcataatattaataataataataataatcataatagtatatagcttatagcataaataatacggcatttgttctacaacaaaacttaagaatgtaaaataaagtacaatacgattcgtgaaggactagttttgagaagattggtgagacacaagaagattgcttctgttacttttacgctggtgataaacttaaaaacatacaaaaaaaatatgtatttccatctacacatataagtttcctagccagctggcgtgtccttttcaatggcattctcaatcagttgggccagtaggatgtggttgccgctgctgggactgttgatgttgctgctgctgggactgatgttggccaattgcagctcgaaagcattgctgcagattgtcatggcaagggaaaagggcatgattaggtaggttggaactggaggttcgcgcattggcaagagattactcgttccgaagaaggcgcacacaacaaacattttagtgggtatgggaatgctggatgggttaccactgcctcgactcgatggcggaagcggaaaacacggctggcggacaaaataaacggtcatgcgacccagaacacaaaaacaaaaaaaaaaaacagagaacaacagaaagtcacagaaaaatgtctaaacaccaacaaagcagtttccaatggaatacagatataatgccttcagctgaatcaatttcactctatttacaactttgaatattccataatttggaaaaaaaaaacatcctattgtcaacaaacagtagcaaatatcaagataaattcaattataaactaaccctgatacattcctttggtcaatatattcttatacaagtttacaaaagctacaacctgctatatgcatgtttgcatccttatttcgaatcagctaaaggcagtacactgtgcacaaaacacataacattaacacacacgaatgcttgttgacctatttacactaaacacaaacacaggatacatatatacacagcgaggatcgggcgttacagtgggtgcgctctgtacagtggatcgtctctagcagcgccagccagtggcatcagcgtcttaccttctgcgccgcggatttgcggtctggccgggaagattgaagcatccgcgtggaatgaccatgcgggcattgcccttcgccggacgcgaaccacccacagcctgcaaaccggccaagtgggcggcatagccatcgctaagcacggtggcattcgactgcagcttcttgccaacctgtgaaaggaacgtttaatggcttataaaatagctgattgtaactgattaccttgcccacgatgaagatttgatcggttcgcatgccaacattcgtgtagacactaatgtccttgctgctgccgtaggcggcagtaattgagattccatggttctgaaccaaattgttgagataggccgtcttgtggcccaatggatcggtggacaggccgtcggcgaacgagatcaggccgtgcgggaagttgtgctggctcagccaggacaccacgcgttgctgctgcatatccggtcgtccggtgatgtagatgagcaggtagcccagctcctgccagtggcggcaaacatcgacagctccggcacgcaccttgggatccctacccgtcaccgacatcgaagcggtgaaggagccatcaatgctgaagaccacgcattcggttaacggcggcaccaccgccatatagcaatccaccgaggtgtgatcgccacggaccaccatcttaaccggatatataccatagccaagggatacctgatccggaatgctgtacgaaatgcgtccattcttgtccgtcacctcggtgctgaggaatgtccactcgcccgccggcggatccttcataatgtgcacatccaccttttcaccgtgcagcgtgatcatgtccaggggtccgtacataaatctcgcattcaatcgctgctccctgccctcctgcacgattacatcgttggcccgatgattggcggctacatttttcagcttaaccgaggtccgtttcttaatccacttctccctcggctgtccgggatggaaggaggcattgtccttgtcatcgtttgagcccacaaagggtatgccctcgaatttgccaatctgccgtagaataaaggcaatcacatccggactctcccagtagctggcatggaagaggtgcggcaaggcgtgagcagggaaattactcaatccctccgggcaatataatgcgtaatccaagcgctttgtgccccaccatttgttttgcactgcgaatagaaatgtttaatcagttagttggcaatacgaatttaatcaattaaagctgctttcttagcgggcaactacgagcttcttacgggcatggatcgtactaagcgagacattctcaatcagacccgatatcgtgctctgcatggatgcgtccgacaaacggcgaccagccaataggttattgccatcgttaaagtgctgcggatgcgattgaatgacctccactgaaaaggataacaaacagtttcaatcaaaactattacaaatccatgtgtaactagtacaggaggactcacataaatgcaatggctgtccattacccagcggatacttggcgtaccgtgggacattgactggcgccaatatagaaaaccgggcgctcagaagcggctccaggcgcgaggcgatcggatcggttggatggaacagattgtagacctggtggcagttgggccgcggcagggcggccttggcatcgtgaagtttccttgcagccagcaccacagatagcggcgatccgaacatgaagaagtcacagacctcaaagtccaatttggtggcacgcgaatcgctggatgagctggaacggcgtctacgtggcgatggggcaaccagcaaacgcttggcatccagatcggcttcgatgaaacgctcgtcatcgtccaatcgcgaattacgtgggctcaacggattgtgggtatttatatttgtggccgcatctccgccggaattcgaggcacccgaagccgtgcccggctggctgccattcgatcggcagagagcctcgtacgccagcagcgaacccatcgaatcgcccagcatgacaatctggccggagaatccgtgaccctcctccgatttcaaaaactcatggtagacaatattggcagcggcaaccgtcttgttgaccgtctcgtggaattctggcgatgccacagatagtagtggtatagctccaatggggacatcggctatattcggtatatccgccgccgagggcgacgcatcaaaggagtacggactcaggctggagagaatgcccagggcgtcggtgcatattgaggggcacggcaccatcttgatggtcacatgggtgaggaggctgggatagtgctgtcgcataaccgcctcgaaggagccacggaatgtggtcacatcggatttcttggcggtcagctcgctggccgcatccaaaacgctgcccgcatggacaaccaggatcagaatggttgtgggacacgacggtgtactcggcgatcccggcggcgatgaatcgtgactgcgatccacgctggccgaggaacgtaactgccgcttgttgccgcgctccgaggccacgcgcatcagaaagtcctgattgaatatgctgtcctcttgccgcgagttgccacgcccacccaccgatgctgcactagagggtccgccatgtggcggcggactgtcgtcgccctcgccaagcagctccagcgagctccacttggccagcgagttcgtctcattggtgtctatgaaatgaaaatacatattagtttctctattattttagtttctctagaatattcataatgcaatgcttacccaggcaatcaaagaattcctcatccgaattggatttggagtccacttccaatcgctccatacgccagttagccacctgaggtgtgcgtaaattgaattaatacttgcatatagacacaattgtttatttataggcatggatatatgtatatttcttcgaatctgttctacaaaaaacggcatcgaatggctaagctaagctaatggaacttggctaatcaaaaactgcgactaagcaaattactaagggaatggatgaggggtaggaggctttaatatgggtcattggaggttttatactatctataatgacgcgctattagctgggcaattgctagtaatgaaaaagaaagagagagggcgtaaaagggagcgacagagagggcgagaggaacttacatgtctgcgtggcgctgtctttgcatgcggctttttggactgattttggattgttttcgatttaattgagcgagtaatttggtttataatttttatatatatttaatttattcggttttttttttatcgatttgtgtcgtttgtgttgtagttgttgtcgttggatcgtgttggatggaaggtaaattaaagattatttggtaagacgcagcacatttaaaggacatagcgacacacataacacacagaaaattgaacacagagacagaataaaggtgtttttgaatgaaaatattgaaaactagattaaaattgaagtttaagtgcaacaaaaaattgcacatcaaacttgaaacgctttgaaattcgaattaaactagttttgtcaaagttaaagacatatttttcttgctggattcagtaagcaattaagtaagattgttattcttattctatagaaaactctagtagatatcttttaaagtagcccttttaaatgggaaatttccctgacttttcagtcatgttaataacaaacacacaatagtaatttgcattaaggaacaccgaacttgtttaaacattcatttgcagaattaacacacgaaatccaccaaaggacacaggacaaagataatagataatcatctggccgtgctcacctggagatcgaagctatgggcagatcccaccggcgagtgaagggcaccctttgacccgaacttgcccttctgggccatctgaatactttgggagcgcgagcgctgcgcggatccgccttggttggctgacagatccacgcccgtgccaatggcatcgttctcgtcctcgtcgtcatcctcctcctcctcgccctcctcatccgaactggcctcggcgctcggcggctgctgggtgacaataggcggcacagccggagcggacttctttcgctcgctgcccgttgtggaggcggcggtggccgccgtgctgacgtacggctccgagacgctgtctgaaatggatgaatacgaataataaatacattgattacattggttcattttccagtcgatggattgatgtccgaatgaatacgaaaggtttcactgcctttctcaactacatatccttcaaattcaatatgtgaatgacatcattcattttttgctttatctttatgcaaacttatactttttacaatttagcaagtgtatgtggtgaggctgaagtggatgataggatagtggaggtggccaaagcggactgaccgtcgctgcactcctcgccgccgcccattttcttggccagcgccagttgcgtctgtcgctccagctcgcgtatatcctcgatggtcaagccgaaccactcgtcctgccatgcccacgcctgccgatgggcccgcagcatcatcttgcgcagcgccacatcgtggatgaacttctccagctttgtctgcatgccccagtagcggaactccacgcggcagatcttgtaggcggtcatcagggacatgttgcgcggtgtcggttgctttttgcccttcacttcgcgccaatactcctccagccaatcctcggccaagggtccacggcccgtcttgtccgacacaaagtgcttgggatcctcctccttcacatagtcaccgccccacagctgatccttgacaatgtcaattacgtctgcaagaacaaaatgtgctgattagataaaatccccaaacaagtagctaatattattcattattcgcaaaacaacaactcacctacgatacgattacgcaaatcgcttccggacagctggaagacattgtcctgatagccattgtccggataatagtatgtctcaatatccagcgagaatttctccacaaacggacaggtgtagcgagtcctggtatacggataggcattccatgcctcctcctccacggttaaagcgcttttcggcaagagacctgtggcgggcacatacgattcattatagcatacaaacgttattaacacaagatattcaactcacttttaatccagccaggcagatgattgcccacgtgatagatcttctttgtgtattgaccattaccgccgggtccatccttgtacggctcattgatgattatctcaacgccactgccctcgccatggctctcctcgcgactctttttctgtggatcggaaatcagtttggcacgattattattatggttctaatcaaaataaactgcagttcgttcgattgagcaacattgcgtgaatttccggtgtaaacgtttcatatattattgccattgtaaacaatttgtaaatatgtccaatgtgcaaagacgaataaacaattccgggcgcattgtacattttgtgacgatcaaagattgtatttgaaaactattgaacttttacaccggaaatggccaacgttaaatttgtatttatttttgttgcgaaagtgcttaattttttttttaactactttacacaactatttccaaaccaatcaagcgtaagtcgaactgcctttgaaaaactatttttaaatcaaagatttaggctgcatataattttagatggctgtttatcgattagggaattaccgaaagtatttagaagatgactaggcgaactgatatttacatatgtataataggaattggaataggattcctcaccgcaatcatgtagagctgggcgatgcggtactcctcgacggtgaggggcagcggaatgcggtactccttgatcagcatgttgacaccgcgtgacttgggtccttgtcgttgaaatggcggactcccctccggctattgacgttctgcgaatggcgcactcttccgacggtaccgactgactattccggcgtcctcctttccggctgcctctattggctctcgttggctgagggaatggcaatcatcgattgccgccgctggtcatggctggatgatgtgaaggcgcgacgcggctgtcgtccgacgttttttttttgttttttgtggcgaggggggtgattggcgtggggtggcggcacgtcgtctatgacctggtcggaatgatggaattggaaaaaacgaagcggggtcagtcagcggttgttctatggataattttccggggccgtaggtgtacaggtccagatgtgtgtccgtgtgtttgtttgtttgtgtgtgtgtaggtgtgctagaacagttgctatggcttctgcctggtgcctatctgacatttaagtgaatgggctcccagcaaactaaaattgcacagccctatgcgaagttgaaatgttcacttcaaggtagggcgaaattttagaattttcatctcagtgaagaatgaatatgtgtattttatattttgttgtgcgattatctaaaagtatatacattttaagctatttactgctgcgtactttcagaaatacgcgcagccaaatgaaaaattaactaataatcccgaaagttattagctaataaacacgctgaaaaagatttgaagagcacgcaaaatgttttgcaaatgtaatttaaacaggatataaacattctactccccatattcacaatcattggctttaaacaaagggcaaataaaggccatcatttttaaaatagaccacatgagctatatagtgagttctcaaatgcaaattaacattttctttattgatttcgaatgacagcagcgaaatggaatgggcaagtctttgacaagcactttggataatcggatgtgacctgcgggtgagggctctcgggggttccttccttctttatttttttttttttttcgatgcgaatcggtggtcaatgtcagcgaaatgccaacaaaaagaagtgattctcccccctgataaggtcaagtaaggtacatatcggtacatttcacaaggaacagccaaagaactactagttcaaccttcttcactcgcatgtccctttgcccatttcgctttcagttgcataaataatcaatttgttacttgaatggttgtatattatgatagtgattagaagttattaccaaacttttggctcgcttgcaattgaaactggccaaaattccgtttattgtgcataattgggttgctcttcttaccttgaaccatttctacttttcctatctttttgctaattggatttattgttgactgctgacaacagcaataccaaccaaccaagctcaggtggcctgaggggcaggtggtgtgggtatgtgtgtgtatatatatatatctatctatatacatagctatgtaggatgtcgtctgacgcatttgcatcgcattttgacctataggaatgtagctaaggagagtggagggagtgtgggtgagtgggtggtgggctaatttagggggtggagaaatgggcgggccaacacgtgtttaagacgagttcaaacggcgataggggaattatcgttatgactgataataaagtgatgaattcccgtgcagaaatattaattagtttcgtatcaagtaattacagtgggtattgcttaaagggaacttaactgatcatttttattaagtgaagaatatttccgcacagaacgttaagttaaaatctaagctacttgaaatttgtcagtatatctatatatctatatatttatattatcaaatataatagaatattcttgggcatatagcatatatatattcttaaactacaattaaacctcttaactacgtagccccactgtgcttacaagctgtgaacttccattgctaatgaccttcattagactcctaatctgtttagatcttatcgcgtatttatctcgaccacaaatttgtccagctcctcattaagtgctattgtattcccccatccaatttatggatcccaaaggagcttactttttaattggagcttttgtgttggtcgaaaaggggggaatggggattttgtaaattgatgtaagtggcacttagcatgcaaactcaacactcaaccatgttgcgcaaaagtttagatttccctatttactatgagattaagaaaaacaagctacagaatatctaatacataatacaatacattcattctatatgaaattactaaaaagaagcttttgatatatgtaattatattatggcatagtttcattagtttgtagttatatatggtttgatcctaataagatctggatagacattgttggggaaatgggggagggggcgggatgttctagatgctaaaataagaggcacaataaaggagggccgtcaatcaataattattgggcacagcgggcagtgggggaaggggaaacgaacacagacatgcacatgtttatgtcatggcagttacatggcaggccgtaacgaatcgtaagccccaacaatatggccaccgctttaggcccccttccccctgccatgccacgcccccttttcgcctagcactctccaccccccgttagcctccacacatcaccatttttctgttttttttttttgcctccttagcataattacattttgtgacacagaaaatgcgccaacagattttctttgctacactgggtcaaaggttatcgaaagtgtgtcctatatataagaaaaacagataatttcataacgaaaacatgtatcttccactgttttaaagttgtgaaacaacttttttggtgtaaaaaatttctgttaagctagcgaaagtaacaatgtgcagttagcactatatgaagaatgctaggttttgtttacaactgcaattacttttcccaatttaatattcatatgtatgtacatttttacgacttttagagaacacaagtaaagttcatataagaagaaagcacctgcagttaaaagtgataagaaatgttaatattcacgatgagaaaaaactttgcagcgataagatttattacaatggagcttcctttatggggcttataaaaaaatggacattatttacgattcgcttaaagtcttcttatttggcggggggcattcgagaaatctagactagaaaacacctttttttttaaatgatatagcagcccggagatgaaaaagcggcccactgtgcatcaataaacaaattacaaacgcacacatgtgctggctataaaagatccggccaaagtgcacgtagccttcaatgtggttgtttatgatgtattttgtcatttaaaaaatttttgtttatgatgtgaccaaagggtaaagcaagggtatgcacacggagaaaagtaagagcaatatcacaaatattttcattcattaatattattaaaatatattaacacaatgcacattttatccatgtccactctgatatttaaattatttttaagattgcttgatatacttttctctccgtgtaaaatcataagatgaagatgggtaaaattccacgcttttatgcacaaaaccatttttgttattaagtctgccagacagaagctcaaatagtgaaaatagaggaaataaatttgcgcaattgttgcaacatcaaaaacgccaaactgataaataaattgccatggtaattgaccaagcaatacaataaaaaaaaaggtgtagaaaaatgtgcaaaaaaaggtaataaaacgaagaaaagcaacaacaacagaaaacgcactcaagcggaaataaatgaacgcgagacagagacagaaatagacgggttgggatgcaaagaaagcaaaggttgaaagaaagcctattaaatccgagtctcaagtttagtgagctaaattagacggaaaagagcaagaaaaaaaggtcacgtactctctctttggctctcacccactctccccgtctcgctcactccttcgtgcacacctgtggcacgctttgtgcttattaataatttataaatacaataagcagcaaaaataagaacacaacaaacgtatttcttgggttcatctcaaaaagggcctatataataatatttattttgtacaaagatatcttttatagactcatttatgaaaaatgtacattcctaaaaatattaatcataggaaattcataatttctaagattaaagactttttttcaaaaaccaatggttataaattccagagcagtgctttcgaataaatatttttatttttcatctgagttaagttcctatttttttagtataatgaaatgtgtaaaaaattatttatggaacattaaccaaaaaaagttattttttatgaactcataatgaaaacatttctaacaatattattcttaagaaatttatcatttttagattaaagcatttttttaaagaaatagttataaattaatatttttatttttaatttgacttaaattccttaaaaaatactttaaaaaatcaatcattaagatggctataaaagactttttaaaacgctgaactgtaataaactttatccgatttataaaagtgcaaaagtaccaaacataacaaaacaaagctttacgtgaaaattacgcatggaaaattcttatcacagacttgttgttgtttgtaaaagagagcaaaagcgtgaaacaggaagagcggtgggagagagctaacgggaccttgagacctggccacagccaacacacacacacttacacaaacgcgacgcagcttacgcatttacgcagctgccacccacacacacacacacacgacaaccgaagtatccttaactaattttacgaattttgttgtaaactattccatttgttacaaacaaaggtgaaaaaagagcagcagtggaaaacgtaccaactttcggcgggccaactcacattattatcattgcgggcagctggacaattaacaacaaaagagtaaggtccaaagcgcaaaggagaaaaaaaaacaacgaacaacgcacaacaaaatataaatatacagtggatatatgctgactcgattgggcgattaatacaatttatctattcattttcttcggggcgcttttccaggccgcagatgaaaaatgttttcagcgttgttgctgcttgccttgcgtttgcttatttctttttgcaatcaaaacgtacacactgaaaaaaaaacagcgtgcgctgcgcggcggcaaagttgcgattgcgactcggctcgcgtttgattccgaactgaagtaagatgaaccaaaccgaaatgaactgaacggaacgccgaacgctgaactgaacgaacgccgaaaagcaaacgaagctaaagcaaaagcaaagccaagagaaatgagcggagagagcgaggcgttccgaaaatgagtatcaccgcaaaatcgccagactcataaaaagtatactagtatatacataaatacatatgtatgtatgtacatatttgcaatctggataatttttgcttagatattaaaaaactatttctacattacatatacatacatgttttaagtacattttagaaaaggactatttaaggactaattaaataacaaaaaagttaaaacgccaccgtttctgaaaacggtcagttcagttctcaattctcaactgacgattcgcggaaaaccccttactttatttgtgcgcaacaaaagcgcgcgagaaagcgtcactctcactctctttgcctttctctccttttgcggggacactcagctggctaggctgaaaagggggggtttcgtaaattggatttatgcatatcggccaatgaataatatacagtaatttctgcaagaaactcggatggccagaaccccacaaaatgccaacgtcccggcgtccttgtgcgctctcttctggagaaaagcagcgagagcaagagcttgccaagcccaaaaagaagaacaaacgctgaagggcaaatagtgagagagagagagagagaagacgctctaagtgtacggtaagaagataagcttaacggcgcattccgttcggtcagagtcaaagcaaacatgtcacgacatgcacaaacaaaagacgccaactgttgtcattccgctcctgtcactccagctccctatctcgctctattttcgactctgctgttttcgctgccctttctagtttgtctattgcatttgataaagttcaactttgacatttacaccgcgcatgtcccaaaactgtaaggaacaattgag

SEQ ID NO: 23315 - DNA, 4276 bp, DROSOPHILA
cgagccgagtcgcaatcgcaactttgccgccgcgcagcgcacgctgtttttttttcagtgtgtacgttttgattgcaaaaagaaataagcaaacgcaaggtcatagacgacgtgccgccaccccacgccaatcacccccctcgccacaaaaaacaaaaaaaaaacgtcggacgacagccgcgtcgcgccttcacatcatccagccatgaccagcggcggcaatcgatgattgccattccctcagccaacgagagccaatagaggcagccggaaaggaggacgccggaatagtcagtcggtaccgtcggaagagtgcgccattcgcagaacgtcaatagccggaggggagtccgccatttcaacgacaaggacccaagtcacgcggtgtcaacatgctgatcaaggagtaccgcattccgctgcccctcaccgtcgaggagtaccgcatcgcccagctctacatgattgcgaaaaagagtcgcgaggagagccatggcgagggcagtggcgttgagataatcatcaatgagccgtacaaggatggacccggcggtaatggtcaatacacaaagaagatctatcacgtgggcaatcatctgcctggctggattaaaagtctcttgccgaaaagcgctttaaccgtggaggaggaggcatggaatgcctatccgtataccaggactcgctacacctgtccgtttgtggagaaattctcgctggatattgagacatactattatccggacaatggctatcaggacaatgtcttccagctgtccggaagcgatttgcgtaatcgtatcgtagacgtaattgacattgtcaaggatcagctgtggggcggtgactatgtgaaggaggaggatcccaagcactttgtgtcggacaagacgggccgtggacccttggccgaggattggctggaggagtattggcgcgaagtgaagggcaaaaagcaaccgacaccgcgcaacatgtccctgatgaccgcctacaagatctgccgcgtggagttccgctactggggcatgcagacaaagctggagaagttcatccacgatgtggcgctgcgcaagatgatgctgcgggcccatcggcaggcgtgggcatggcaggacgagtggttcggcttgaccatcgaggatatacgcgagctggagcgacagacgcaactggcgctggccaagaaaatgggcggcggcgaggagtgcagcgacgacagcgtctcggagccgtacgtcagcacggcggccaccgccgcctccacaacgggcagcgagcgaaagaagtccgctccggctgtgccgcctattgtcacccagcagccgccgagcgccgaggccagttcggatgaggagggcgaggaggaggaggatgacgacgaggacgagaacgatgccattggcacgggcgtggatctgtcagccaaccaaggcggatccgcgcagcgctcgcgctcccaaagtattcagatggcccagaagggcaagttcgggtcaaagggtgcccttcactcgccggtgggatctgcccatagcttcgatctccaggtggctaactggcgtatggagcgattggaagtggactccaaatccaattcggatgaggaattctttgattgcctggacaccaatgagacgaactcgctggccaagtggagctcgctggagctgcttggcgagggcgacgacagtccgccgccacatggcggaccctctagtgcagcatcggtgggtgggcgtggcaactcgcggcaagaggacagcatattcaatcaggactttctgatgcgcgtggcctcggagcgcggcaacaagcggcagttacgttcctcggccagcgtggatcgcagtcacgattcatcgccgccgggatcgccgagtacaccgtcgtgtcccacaaccattctgatcctggttgtccatgcgggcagcgttttggatgcggccagcgagctgaccgccaagaaatccgatgtgaccacattccgtggctccttcgaggcggttatgcgacagcactatcccagcctcctcacccatgtgaccatcaagatggtgccgtgcccctcaatatgcaccgacgccctgggcattctctccagcctgagtccgtactcctttgatgcgtcgccctcggcggcggatataccgaatatagccgatgtccccattggagctataccactactatctgtggcatcgccagaattccacgagacggtcaacaagacggttgccgctgccaatattgtctaccatgagtttttgaaatcggaggagggtcacggattctccggccagattgtcatgctgggcgattcgatgggttcgctgctggcgtacgaggctctctgccgatcgaatggcagccagccgggcacggcttcgggtgcctcgaattccggcggagatgcggccacaaatataaatacccacaatccgttgagcccacgtaattcgcgattggacgatgacgagcgtttcatcgaagccgatctggatgccaagcgtttgctggttgccccatcgccacgtagacgccgttccagctcatccagcgattcgcgtgccaccaaattggactttgaggtctgtgacttcttcatgttcggatcgccgctatctgtggtgctggctgcaaggaaacttcacgatgccaaggccgccctgccgcggcccaactgccaccaggtctacaatctgttccatccaaccgatccgatcgcctcgcgcctggagccgcttctgagcgcccggttttctatattggcgccagtcaatgtcccacggtacgccaagtatccgctgggtaatggacagccattgcatttattggaggtcattcaatcgcatccgcagcactttaacgatggcaataacctattggctggtcgccgtttgtcggacgcatccatgcagagcacgatatcgggtctgattgagaatgtctcgcttagtacgatccatgccctgcaaaacaaatggtggggcacaaagcgcttggattacgcattatattgcccggagggattgagtaatttccctgctcacgccttgccgcacctcttccatgccagctactgggagagtccggatgtgattgcctttattctacggcagattggcaaattcgagggcataccctttgtgggctcaaacgatgacaaggacaatgcctccttccatcccggacagccgagggagaagtggattaagaaacggacctcggttaagctgaaaaatgtagccgccaatcatcgggccaacgatgtaatcgtgcaggagggcagggagcagcgattgaatgcgagatttatgtacggacccctggacatgatcacgctgcacggtgaaaaggtggatgtgcacattatgaaggatccgccggcgggcgagtggacattcctcagcaccgaggtgacggacaagaatggacgcatttcgtacagcattccggatcaggtatcccttggctatggtatatatccggttaagatggtggtccgtggcgatcacacctcggtggattgctatatggcggtggtgccgccgttaaccgaatgcgtggtcttcagcattgatggctccttcaccgcttcgatgtcggtgacgggtagggatcccaaggtgcgtgccggagctgtcgatgtttgccgccactggcaggagctgggctacctgctcatctacatcaccggacgaccggatatgcagcagcaacgcgtggtgtcctggctgagccagcacaacttcccgcacggcctgatctcgttcgccgacggcctgtccaccgatccattgggccacaagacggcctatctcaacaatttggttcagaaccatggaatctcaattactgccgcctacggcagcagcaaggacattagtgtctacacgaatgttggcatgcgaaccgatcaaatcttcatcgtgggcaaggttggcaagaagctgcagtcgaatgccaccgtgcttagcgatggctatgccgcccacttggccggtttgcaggctgtgggtggttcgcgtccggcgaagggcaatgcccgcatggtcattccacgcggatgcttcaatcttcccggccagaccgcaaatccgcggcgcagaaggctgcatgaacaagcaacgaatgaaaattgaattgcaactcaagcaaaccaattgtttagagcaatgaaaaacaacaattaaagcatcttgtaaacagatagaagcgttaaaaccaaaaacaaaacattacagacaattgatgttagaattagtgttctaga

SEQ ID NO: 23316 - protein, 1250 aa, DROSOPHILA; identical to SEQ ID NO: 23202

SEQ ID NO: 23317 - DNA, 2639 bp, DROSOPHILA
tgtttacctaattaacgcagaacaacagagttctcggcagcaggaaacgagttttttttttgaggggagcacgagtatctgtatttgtatctgtatctgtatctgagtcttcttaccgcgtttcgttttgggatggcgtgctttcaaacacatatgtttatatgtatgatttgcacacccgatcggatccgatgagaagctagcccgccggtgcgacgctgctggcccgagcttaagtactgaacgcccaagtatttctcagatacaattgcgcctcagttcgctttcgaatggcggcagttctctcccaaaaacgacgatcgcagagcagcaagccaaccaaacgaatttgctcgccagcctgataatgctgataaggtactagctagtcacggttgaaagtataccacctgaactctctgacaaatcaaatgatttggatggtaacggagagggttttgggctggatccatgactaccaaacccatcctgataattgtgaatgaaagcatttatcaatcgaagaagcccgagttcaatgatccaaacttatgataatgtgctttatcggaatttttggtataaaaagatactacagagttttatgaacgcgatctagctagctactatgtttaatttaagatttagatccacgtaggtggtattaaaagagacttaaatttgtctaaacattgcagtaaaatgattataaaatttttttcatttcttttgtacacctataaaaatgaacgttccatttgatagctaaaatttgtcaaaggtgtttgtttaaacgtggggacaaaaaaacaacattttgcgattacatctcgctgcagctgatagcgggaattcctggaaatgctttaatcacgcgattagtaaaataaatacaccttattcaatgaaactgacttaggctttatgtatgtgcaactttagtagctatgagtagagttagttaagactatgagcgagtccaagtgcagcagtcgaagtcctagcaacgcgagacatcgggcagcgtgcgcccacgacatttgctcatccatccgggccaggcctggaatccgtggcggttgaaaatctgcatggcacatcgcgagtcatccgagatctcatcgttaaggaactctgcagcggacggggaagggagaggagatcatagaccgtcattatatgtgggtgtttttgggaagtcttgcgaactcaccttcgcatttgatgttgcagattccgccacgacgacctttgcgacaccaatttttgctgttaatctgcgaaattgcgctttagaatatatttgataaggaacgtgggttgacccacctgaaacagaccgtagctgacgctctgattgggcagctgcatagatttggatgtactgcgtccactctccgcttccaccaggcaaacccctttgcgcaaatttaaatgggaatttatatttctactaattaacttatttaggatacatttactcacaatttgatagataactgcggggaaagtcatggcgcaacagctccttggccaactgacaacgcgtgagcagcttagactcggtctcccattgcgaaagcaggagaagattgagcaccaggaagagcgcaccacctttgggcaagtgactggccatgctgggttgggaggggcttgtaatgttggagggaccactgctaatccttttgggttcgaaagatccaagaagcgcttccctccgcggcaactgcgagcactgggcactttgctgcggaattatttctacggcactggatgcgtagcgcccgaaatctgggtttttaaagcctcgcacgcagtttttgttttcttctccaagtgggaggcgacattcgggagcggtctggtgacatggaaaaatcgtgcgggttactcatcgatggggatactcccatcccagttttaatacaaaaaatgtttgaactaattttgtctgggcaatctcgaatgtatctcaatctttgccagcttaaaaaatatgacttttattttgttaccatgtgggattagaaaaaagcaacctagtttagctctcagtgcattcaataaatcgctttgattgcgttaagccgtaaattggcaaattgtcttgcagagataacaatgggaatctttagcccgaaacgcatccactagatactggttactggacacagatgcactatgtgtgggtgtttgtgtgtcagagtgtcagtgacaactgcggcttgacctaaaaacgcatgatctgttgttgtgcgaggagagcaagtgcatcccgcccagtatccaagcatccaagcatccagacatccaagtgttttcgtttttcaatgctcgtcccactaatttccatgaaaatttttccacttacagtgcaattctcatgctcttgctgctgtgcactttggcagcggccaatgacctcaaggatctgctagaggacagcaccaccagttccagcaccagcaccacctccagcaccattccctcttcagtaacctcgcccaccacgcccaccgcctatgtggtatcggcggcagcggttcccgccctcgttgccggcagaggaaagtccaagtccacatccggaaagtatgtgaacaagagctcgccgaggaagcgcaaggcggagcagg

SEQ ID NO: 23318 - DNA, 441 bp, DROSOPHILA
atggccagtcacttgcccaaaggtggtgcgctcttcctggtgctcaatcttctcctgctttcgcaatgggagaccgagtctaagctgctcacgcgttgtcagttggccaaggagctgttgcgccatgactttccccgcagttatctatcaaattgggtttgcctggtggaagcggagagtggacgcagtacatccaaatctatgcagctgcccaatcagagcgtcagctacggtctgtttcagattaacagcaaaaattggtgtcgcaaaggtcgtcgtggcggaatctgcaacatcaaatgcgaagagttccttaacgatgagatctcggatgactcgcgatgtgccatgcagattttcaaccgccacggattccaggcctggcccggatggatgagcaaatgtcgtgggcgcacgctgcccgatgtctcgcgttgctag

SEQ ID NO: 23319 - protein, 146 aa, DROSOPHILA
MASHLPKGGALFLVLNLLLLSQWETESKLLTRCQLAKELLRHDFPRSYLSNWVCLVEAESGRSTSKSMQLPNQSVSYGLFQINSKNWCRKGRRGGICNIKCEEFLNDEISDDSRCAMQIFNRHGFQAWPGWMSKCRGRTLPDVSRC

SEQ ID NO: 23320 - DNA, 2907 bp, DROSOPHILA
ctctagcatttccccagcagttgaaatactctatggtattcccgaacctaatccctcttcttctgcagaactggcgcctgaaggatttcgccgcaagggccaaggaagccggacatccagcaattaccatgctcaaccaggtggaagccgcccagtggctgccaatgatcgagcagtacgggatcgatacgtggaatccatgcgatgccattgccgtggccgtttggctattcgaggatcacttgatccggaggcacaacacctggcacgccaccgtggatctgcggggcacccacactcgcggccagatggttctcgatcatttgcgggagcgcgaaaagtatccggagaacgtgcgcattatcgagctggtggatgtcgagttctttaaacggatctgcgaatggatcgccggcttggatgacggcgccctactccgcgacactcaataaatccatatctctagtaattcccgcctttttcttcggcgctatcatttgattcccccatttatcaacggttcacaatggttatggggggggggggggggtcttggcgataagagtgcttttggaacaggtgcacaacacgatccatagagcagttccgagatggcaccaacctaatcggaatttaagctttaaacacttaatcggtgattaagcgtaaggttgcaaaattggctagctacccaaatgggtttggaagagcttttattgttaattgaattaaaatgttgtaatatttttaaggctttagtttgtgctatttcatttttaagtgtattttgtataagtcaaatacaagtcaagaatgtgctcaatcactatggcttatgatagtaactttcaattaatgaacaattagaagtaatacaatttctatgtaagattatacacaataaaaattcctttttttatcccaaaaatataataatttcttgttatatttaagcaataaaaaactagtataaaaagaacgagttattgaatcaattgagctacttggacttctttttgatcttcttaatcctttgcgaaggagccttttgttctgcgggagcgcgatatgtgccatgcagcttgtccagaaaaccgagcacaccgtaattgtagttgaacctggaaggatgaggaggaggagattcgctatgaaggtacaacggatggcaaggataggcaggatacccacttggcatggtgatagtcgtggaaccgcaccgaacccgccgaccatgggaaactgtagcccgtatgatcgctcatcgaattgatgatggccagggcaaagatcacgtaggccagggcgacatgggtgcccaggatggcaatggacgtggccaccggcaacagattggccaacacatgctccaccggatgggcatacagtgtaatggccgcaatgggagccgtccactcgtgatgcttcttgtgaacatacttatacaccgatctgtgatgcagcagtcggtgggcatagtagaacatgatctcctccagcaccacaaacacgaccaaatcgcgcagggatcgcttaaatgtgggcagcacccggatatcctggctattctccgatttgtaaacgaactcgtacaccacccagctgaccagaaagttaaccaccgtcagattgaacagcaccaccttgacggcatgccacaacttggccagattcactggctcattctgacccggctggatcttgtatttgcgcaggaaacgcggacgattcgtaatgtccatcagggtgaagatgcccgcatagagccagtatacgatgaaaatgaccactgtgctgcccaccacccacaggcgccacgactcctcaccaacggtgtccagcagcaatgtccatttatcctgcagataatccccggactgcgtccagccagccagcaaggtgtccattttggtcgaggtctgggcgcaaactacttgcggatctcactagccgctctttgaagttgactacataggccgcctggtgccctacacccagtgggttacattggtggtctgatgaggctagtggaatatgcaatatataatatactaatccctaaaagaaactactttcatagcaagatgcttccgttcgttagtaagaatattaacttacagaaaattctcatattaaaaaatattgtttgatcattatgattttttgtagttaagatctgggataatccaagaatgttatatgacatctttccataaccatggagtagctcatttaaaggatcagtgtgctgcaactgtaattttccggttttggtccctaagcactctttacgattttatatatgactgtccaagctgattaatattgcgtacgaatttagaaatctagtcagcttatcatttctttcgcagtcgatggcagattatggtcaagcattactattgtatttagattaggattccatctatatatagtacccataccgtttgttgtttgcagctttgctaaatctcatcgatttcaagttcaaagttcaagccctgggggagatataattattgatatgatatattgatattgttaatgatgataataactcgaatcatagagaaacacacacacacgtttagttgaattttttcatttattgtttttatttctcatctttgtatatttgacttaaattgatttcttagttctctttcggttttcgtttcatttgtttggttttcgttaaccgacttttaaaacaattcacttgcttttttttttttaagatttattggagattgaacgccatcagttttgctatgctagtttattaattaattgtttaattatatagttatatgtaatgaagcacagatactcgaactggatcgtgtcgaaataagcaaaaaaaaaaaagaagagacccaacgaaaccatctaggataaatctcaatg

SEQ ID NO: 23321 - DNA, 837 bp, DROSOPHILA
atggacaccttgctggctggctggacgcagtccggggattatctgcaggataaatggacattgctgctggacaccgttggtgaggagtcgtggcgcctgtgggtggtgggcagcacagtggtcattttcatcgtatactggctctatgcgggcatcttcaccctgatggacattacgaatcgtccgcgtttcctgcgcaaatacaagatccagccgggtcagaatgagccagtgaatctggccaagttgtggcatgccgtcaaggtggtgctgttcaatctgacggtggttaactttctggtcagctgggtggtgtacgagttcgtttacaaatcggagaatagccaggatatccgggtgctgcccacatttaagcgatccctgcgcgatttggtcgtgtttgtggtgctggaggagatcatgttctactatgcccaccgactgctgcatcacagatcggtgtataagtatgttcacaagaagcatcacgagtggacggctcccattgcggccattacactgtatgcccatccggtggagcatgtgttggccaatctgttgccggtggccacgtccattgccatcctgggcacccatgtcgccctggcctacgtgatctttgccctggccatcatcaattcgatgagcgatcatacgggctacagtttcccatggtcggcgggttcggtgcggttccacgactatcaccatgccaagttcaactacaattacggtgtgctcggttttctggacaagctgcatggcacatatcgcgctcccgcagaacaaaaggctccttcgcaaaggattaagaagatcaaaaagaagtccaagtag

SEQ ID NO: 23322 - protein, 278 aa, DROSOPHILA
MDTLLAGWTQSGDYLQDKWTLLLDTVGEESWRLWVVGSTVVIFIVYWLYAGIFTLMDITNRPRFLRKYKIQPGQNEPVNLAKLWHAVKVVLFNLTVVNFLVSWVVYEFVYKSENSQDIRVLPTFKRSLRDLVVFVVLEEIMFYYAHRLLHHRSVYKYVHKKHHEWTAPIAAITLYAHPVEHVLANLLPVATSIAILGTHVALAYVIFALAIINSMSDHTGYSFPWSAGSVRFHDYHHAKFNYNYGVLGFLDKLHGTYRAPAEQKAPSQRIKKIKKKSK

SEQ ID NO: 23323 - DNA, 10025 bp, DROSOPHILA
tgtttttaaggataaacgcctttcatattactatgtacatattttaattttaacagtatttgataatactgctttactgtggatgaacttgataaggatcgaaccgctgataagtctagtctcaactgtgtcgatttatagttccccgatatcgaaactcgtcataaagtgtaaatgtattttttatagcgccagaaacgttatcttgaaccttatttttaaagattaccttttagtcttcgagttgtgtttataatcacgttcgcgagcacaaaagtgtagataaccgtcgacttaattttccggttacactaaagaaaccaattgaaatgatctgatatgtaccttacatatacataatcagtgtctagcgtcttcggatcggacgttaaggacgttaagaacttcctttttgcttttggctttcagatgcctaatgatttttttttttaaattaagaaatagaatataaacgaaaagagaatgctatagtcgagttccccgactatctcagctagtgtgaatgcgaacccgaaattgcacgatttattttttttattgggatatcgatagatgttggggaataaaatgagaaaaaacttaaaatttgaccggttcggcagcttcaggacgttagagtgggcgtatcaaaaatttttttggaaaatggatacatgggtcaaccttctatcatttatagtgccagagatctcgacgatcctacttatggcacattcttttctgactccacttagctgagtgatgggtatatgatatttctgattgtagaggaactagactcttctctcttattttgataagcgaacaacagacgcaattcccaagtcctttgagaaccactcaagcgtcgccactcaagagaaaaatgcccccactatcactgtctcgctctacccagaaaccaactgagaaggcgacgccgtcaccgctgttagttgaacttcacgcgtcgccgggtgtgccgggaagtaagcagtcgctgacgatcggaaatctaaaacaattacagcgagtagggccgtgtacgataaaaagagaacaccagctgatagtgcacgacagcggaacattattgtagtctctcaactgagtatttcgtacattcacatattttgtttacatagtccatgcaatgcgcatatggctgggaactggaagatttacaaaatacgattggatacgaacaagtcataataatgatttaaattttaatgttctgaagagtttaaaatgaatatgtttttaatatcagaattttacgcaattaagcctaaatgagactaacgccaatggttcagtgtgatacgtgagagtgaatacaacgaatgggcgctccgttgtgatctctctttccaacggaacgtacatatgtacattcatatgtatgtgcatagttatgtgcagcatcagcagctgagtagaaacatatgagagaaagagagccgcggtcgaaattattactcattgccaaagtcaaacctgctgataaggtcagtgcacgctcagcgccggcattgttttctttactttgctttgacttgcggttaaactctctggttggtggaggatctaattcttattggtagttttctcgcaaaacgctacgtcccatagctacatatttacaaatcaaatagattacaaaccacatcaattttaatacacgtatgcatgctattagaaattatattatgttatatatacatgtatatatgtatataatataatgggttaaatatgccaaaaaaaaaggtgctctagaacacctagccaagaaaatgaaatacgagccccaactactattattgttttgtattgtgtttcgaacagcatgtgttttttgcggtgtgcaatgttcaacacacgatatgtatactcattactactacagataacgtatgcaaaagtatttagtctgaaagagaattttattctcttcatgttgataaaaaatgttatattttcaacaacaacaacagagataagaaaaaaaggccactattaattcgaacgctgcaaagtataacagactaattaacataagaattgtgtaacgtcgcgtcctgggctgtattacacattaaatacgttttggcattgatttaaaaaaattttggccatgttctcgagaaatcgatacccacatctctttgaggtcacaaatgttcctctgtggttcattcgaagctttcttttcattagccaccaaatattgtttatggggcctagatctggactatctagccaatctaaaacctccacttgcttatattgtagtcaattttcctactgaatcctttcccgagcccattgcaaactcgtttttttttttgcgaagcgtaagcaagggtttttccgtggcctacaagtagagtaaaagggtatactagattctttgaaaaagtatatatattcttgatatggatcaatagccgagtcgatctgaccctgcccgtctgtccgtccgtccgtatgaacgtcgagatcttaggaactatagaagttaaagagttgagattagggatacagttttcagagagatagtttttactatctactagttactattattattattactattattactattattactactatttactatagtactagttttacaataccagtatttcgacactgttttaatttgatattcgaaaccataataacagtcgcaaaatgtttggattgttaacaattttagattctttgccttagccgtttgttggctttacattttttgggaagacaaatggtagaatatacaaaatgaaaatacaaaatgtgatcgtgtcagcttaagcgataatggtaaggttttgaatcaaacttacatacatagcgatttgattaccctgtagcttttatagttcccgatatctctcgatattcatctcttgccctccaactagacaggaaaagggtatcttattgtctatcaaagataataacaagctcttctggcgatttgattggcaacaatatgctttcggtcaaaacctgccgagaaaacccaacgctgataacccaacggcacacaagctagtaggactacttttgctgataagcatacatgaatcaaatgaaaaaggtttaaattgccagtagagttccaccaacgtgcgatccgttgttgataaatgcatatctacattacttaagttgtggagtgtaataaatttaattggttagtccttaaattctaacaagagagaatgctgtattcgagttccccgaccatccgataccctttactcagctagtgggattgcgaatgcgaaattattcataaatgaataaaataaaatgagaatgaaatgaaaaaaattaaaaattgacaagataaacaataaaacgaagaaaaatcgacaaacttgcgtctgtatgcttgatttcagccgtctagcttttatagtttctgaaatcaagacgttcatagtatgacgttcatacggatagacggccatggccagatcctattcaagaatatatatactttatgtggttggaaacgcttccttctgcctgttccatatttttccacgtatctagtatacccttttacattactagtaacgggtataataaacaacattttgtttagctatcattatacgtacattgtatagaataatcaatttaccttataagagttccttaagagttaacttaaaatgaaaacgtttctaatctgcaataaactaccactgtattatttaaaatttttgtaaaatccacgtttaggcaatccacgtttaagcagggtttaacatatgggaccatataatcttctatgtaatttcttgcacgcttagcttgaagtttacataaaggggcttacataaataggatgctggaagtgatcatgaattcctctccctgaaaattattttttaaatgctgcccttgttacacatttccctagacataaggaaaacaagagagaatgctatagtcgagttccccgactatcagatacccgttatcattttttttatttacgttatcaatattaaaatgtttataactaatttccaaaagagataccattgttggcctcgggagttttgaccgacttgctcttagttgccataatgttttcgatttcgtctggctttcatatttctactttacctacaataatcaatatttatgaattttatttaaagatcttcttcgagtttcttaccctgaagacaaatagtaatttttcttggctaagcaatcaaagagctaccattaatttgtatccttattcaaaggtatacggtgtatcttttctctgttacctaactagtcccatagacttcaatgtaaatgtagtgataatggtttgaaatgtacttttaatacaatgaacaacattatttgttaattaaacagtaacttacaatgttataactaagaaaacttactgacaaagtaaacacacgattttcacacacgattcctatgagggcttgagggattagcattgcatcatgtgcttgtcgatgtatatcctctttgaaggtccagctcgtgacagatcatattagcccatagatggcttccaattatttttaatctatattctataacctttctaatatgtccatatatacaataaagatcaaattttctgcacctaactcttactgtcggggtaagggtcttgggactagggaatcctttgaggacaataaggcatttggtatttttgagggcactactttagtactcccattagcgaatatatcatagcagtaaatgcatacatgtttgcccttttaacgtctacaaaccaaccaaaagtgtcacgcacttacttttgaaatatatgttcgtctgtatgaacattgagatctttggaactataatagctagaaggttgagattaaacatacagattctagagacaaagacgcagtgcaagtttgttgccacgtccactctaacgcgctaaacccacccaaaacttccacgcccacatttttgaaatattgtagggtcatatatcagatatcagaaccatcatttaaataagattgtgaaatttaataaaatttaacatattttcataaaaaaaggatgtcgaatgtaagcttttcaacagtctgaaccaaagagaagtgatcagtttcctacacaacaactgattgatttactatgacagatgccggacttctcagtttacattaattgctcacttctcgttaaccaaacatcaaattcacaagtcgacataaggagatgccgacactactgaaatattaatagcataagttcaccatttgacaccaaataacatgccaaaatatcagaagcttgacaacacactgttgcccaacgctcacgatgacgactctgaagggggtttcccgggttactttgatgataatcatcaaagtttgggaatccaacaggatccagatactagagatgatcgactgtcagattaccaagataggtattacagcgttaacaacaatagtgttaatagggaggtggtgacaattgggtcaaatgtcgtccgggttccagaggagcaaacctgggaagtgccactgttgggcgattgtggtgacagtgcgagaaaccaggtaaatgaaacaaccaaaggactacttgcatgcacacacaaatatttacgaacaaattgtgcggcccattgcagagctcggaaacggaatttgatatgcagcgtgagtgctgcaatcatcaaccagggttcagagccaactcgaagagcaaatctgcacaggaggccaagtataaaattatgctcgcagttgctctgtgttgcgtatttatggtaagaagaagcaccatacccgcctacctgtgtaggtgtgaaaacgtattgctgatttaattatgacacatttcatgtcctgaactcatcccacaaatttgacggcgaccgcagatcattgaatttcttggcggctatgtcgccggaagtctggccataatgacggatgccgcccatttagcatctgattgcattagtttcgtcatcggtctagtcgccatatggatagggggtcgcccgccagacgagcgtatgtcctttgggtacaaacgctttggtaagtagccaattgtgattgacaccagtctaatgagagtaccacacgcacgcccatataaatcccggcgttactgggcgatttgaccgctcgtatgccatatctgtctgttaacagacaatcccaactgctcacggcatttaagaggattattctgatttttcttcttttttttgtgataaatttcttttcagaggttatcggagctctggcttctattttgggaatctggttcgtaactaccctgctcgtggttgtggctattgagaggatcttctcccaagactttgaattaaacgccgatatgatgatgctgatttcaggcattggcatagtcataaatatcgtgtaagtgaagacgagaatcttacataagcattaataattgtatgaaaattgtatgtattatcttatactatcacaccataagacgcatctagcgaaagacaaaggtaaagctcgcctattctgcaattaacttctaaaataaatatgaaacctacacttgcggattaatattttcatgtaaacgaaggctggaagtgtggattttagacttcttatcatgcagcggttacatttcaatgacgttttctaacttctatcacctttgctaatcgtatttgtcgtttttttcctatataaaaaagcaaataatttgcacttaattaagtacatttgatcaatgtggtcttcagtaatgaaaaggtccatgagtccaggtccaggacaatcaaagaagtcgtcaaatttccgataatagcaaataggtttggggaaacgtattatattttcgaatataacagtttttacacccgtaactagtagagcaaagagtatactagatccgttcacaagcatgtaagcaaatgtaaatgtaacgctcgcaaaccaactcacaatttttagaaatgattgtttttttattttactattattttgcacatttctgccgacatgccaaaaaatttaaaaattactacatagcaaattactccatctaggtgagtaacgggtatctgatagtcgaggaattcggctatagcgttctctcttcctttttaagtgggacccactttttaaaaattaaaaatatttttgttttttttttcgtacgcagaatgatgtttgttttgcatggatcctggttcgtgaacgggaatggtcatggccacagtcacagccatagtcatagtcacagccacagtcacggaaacggacatgagccaaacgatagtctttcacaaacacgttccaattcgaactttcttacgaccattggaagtcaaagcgcttcaacggcagatgaggaggattcaataaggaaagaaattaattcaaacgagcataagattgttattacaaatgggaaaaaaccaactctgactgggtaagtgaaatatatgcagagccaaaacaacgcctctggtgaaaaccatacaatttttattcgactagtattaggcaaaaacaactccgcacatcctagtctatgtacatatattcgggaaaatttaaggttcccgacccaaaacggtatattacctattcttcatcggaatcaccagcccagactatctgtccgcatggacgtcaagatcttgccagctaaaaagtctggaaagattgagcttacattccaaaattatttatttagtcaacaactatcatattgagaaacggtccaagtcactccatcgcggatatctgatagacgtgaaatgccttttccggtggcgtttgtcgtatctttttgacagtatttaacataatatcatttaatcttaaattacattaacatgaatgtcacagctcataatttacatttgttcctgactgatttttcttcctgcaggacttcaaacatggagctggcacacgaggataaaaacctgaacctgcgtgctgctatgattcatgtgattggagacctagtgcagagcattggcgtttttttggccgccgtcctaattaaagtttgtgtaagtttgtgatgagcatatatcagtacatttttaagcttttaggacccactgggtgtgggtcacttgtatggctacaatacgcaccaggagagagtgaaaagttaactatttaaacataagaacatattgaaccagctttggtggtgcgagtgataggctattaaagaaagatgttgcaaaaactaaaaggactacatacaagactttgaagaaaacaagagaggactgaagcggaaatggaatgctttagcatacaatttacttattttatgtattttaatattatggatatttcagccaggtgccaagtatgctgatcccctgtgtactctcatattctcaattattgtaataatgactaccttgcgtctgtttcgggagtctttgggcatcatcgtgaatgcagttccacaaaaccttaatatgcgcactctgcacttggagctgggcagcatcgaaggtgtcaggtcagttgacaaatccagtccgccaaaggtaacctcaccttaaaaatgtgtttctattggcagatctttgcaccacctaaacgtgtggcaacagacctctcagcaaagggtgctgatggtgcatctcgttacaggtgtgtttctaaaatgtacagaactgcattttcattaccatctaatgcgtttcagactcccgagcggacggcaatgaggtactgcaggctgccacggcgctcgtatccagcccaagatataacatcaagcattcaaccattcaattggaacctacaacagagtagtcgttatcaacgaaataatgtaatgtttgtaatgtttgtaaattctgacccccaaaaaatgaggattgcatctagccgtgttatttaagccatgttattttactttgtatgtggcaacctacaacatttactgttaaacatccagtgacattaccccaaagaaaatatattctaattttagaattaatttatttaatttgacccaaatcgtagcaaatatactttaaataaatgcctccacattcgaattccaacaggtattagtcaaaaatcatctttaactatggtagggccatttgatccataagtattaataataaaataaacgttttaatgttgttgatcagagtgtattttaataacatatgggcggcagtctatatatacatcatggagaaattcaattcctctttggctgtccccaatcaaaagctaccgccatagccacaacttaaaaaaaaagtaaagtatttaaatcgttattccgaaacttgaattttgtttttattattttcaaataattttccaactatatccgataaatatcaaattaaaaccataaatatatattgtcaaaaaacacattatgatcaaaaacaacgatggtaatttttaactcaatttttattttaaattattcccgctgcagatataagatttagtggtccggcccgttccggctaatatactacgagcaatagacagaagactttaaaaatttggaaatgacttcaatttgtttcggactctttactgaagtcaatataatctatgcaaggtaaccagaagaattccattttttccaaatttgctgctggtttttcagaaatcgggtatttgaatggcaaataagttatttaaaagtgggtgtgaccgttttgaacgttttgtaggtgagaggatgggagcggccactgtttttggtaaacagataataattggcgagacaaacaaacaaagaaaaatctaaacatttatcaaaagtatgggcgtggcagtttctggaggcttttgggcgttacaaagggcgcgtctaaccgatataaatttacaggaccaataaaaagaaggaaaaaagcaacatattttttaaaagtggtggcgtggcagtgtggtgcccgtttttgtccgctgcgtctgcctctagaatttgtatgctaaatctccaccttgctt

SEQ ID NO: 23324 - DNA, 1763 bp, DROSOPHILA
ctgacgatcggaaatctaaaacaattacagcgagtagggccgtgtacgataaaaagagaacaccagctgatagtgcacgacagcggaacattattatgccggacttctcagtttacattaattgctcacttctcgttaaccaaacatcaaattcacaagtcgacataaggagatgccgacactactgaaatattaatagcataagttcaccatttgacaccaaataacatgccaaaatatcagaagcttgacaacacactgttgcccaacgctcacgatgacgactctgaagggggtttcccgggttactttgatgataatcatcaaagtttgggaatccaacaggatccagatactagagatgatcgactgtcagattaccaagataggtattacagcgttaacaacaatagtgttaatagggaggtggtgacaattgggtcaaatgtcgtccgggttccagaggagcaaacctgggaagtgccactgttgggcgattgtggtgacagtgcgagaaaccagatcattgaatttcttggcggctatgtcgccggaagtctggccataatgacggatgccgcccatttagcatctgattgcattagtttcgtcatcggtctagtcgccatatggatagggggtcgcccgccagacgagcgtatgtcctttgggtacaaacgctttgaggttatcggagctctggcttctattttgggaatctggttcgtaactaccctgctcgtggttgtggctattgagaggatcttctcccaagactttgaattaaacgccgatatgatgatgctgatttcaggcattggcatagtcataaatatcgtaatgatgtttgttttgcatggatcctggttcgtgaacgggaatggtcatggccacagtcacagccatagtcatagtcacagccacagtcacggaaacggacatgagccaaacgatagtctttcacaaacacgttccaattcgaactttcttacgaccattggaagtcaaagcgcttcaacggcagatgaggaggattcaataaggaaagaaattaattcaaacgagcataagattgttattacaaatgggaaaaaaccaactctgactgggacttcaaacatggagctggcacacgaggataaaaacctgaacctgcgtgctgctatgattcatgtgattggagacctagtgcagagcattggcgtttttttggccgccgtcctaattaaagtttgtccaggtgccaagtatgctgatcccctgtgtactctcatattctcaattattgtaataatgactaccttgcgtctgtttcgggagtctttgggcatcatcgtgaatgcagttccacaaaaccttaatatgcgcactctgcacttggagctgggcagcatcgaaggtgtcagatctttgcaccacctaaacgtgtggcaacagacctctcagcaaagggtgctgatggtgcatctcgttacagactcccgagcggacggcaatgaggtactgcaggctgccacggcgctcgtatccagcccaagatataacatcaagcattcaaccattcaattggaacctacaacagagtagtcgttatcaacgaaataatgtaatgtttgtaatgtttgtaaattctgacccccaaaaaatgaggattgcatctagccgtgttatttaagccatgttattttactttgtatgtggcaacctacaacatttactgttaaacatccagtgacattaccccaaagaaaatatattctaat

SEQ ID NO: 23325 - protein, 452 aa, DROSOPHILA
MPKYQKLDNTLLPNAHDDDSEGGFPGYFDDNHQSLGIQQDPDTRDDRLSDYQDRYYSVNNNSVNREVVTIGSNVVRVPEEQTWEVPLLGDCGDSARNQIIEFLGGYVAGSLAIMTDAAHLASDCISFVIGLVAIWIGGRPPDERMSFGYKRFEVIGALASILGIWFVTTLLVVVAIERIFSQDFELNADMMMLISGIGIVINIVMMFVLHGSWFVNGNGHGHSHSHSHSHSHSHGNGHEPNDSLSQTRSNSNFLTTIGSQSASTADEEDSIRKEINSNEHKIVITNGKKPTLTGTSNMELAHEDKNLNLRAAMIHVIGDLVQSIGVFLAAVLIKVCPGAKYADPLCTLIFSIIVIMTTLRLFRESLGIIVNAVPQNLNMRTLHLELGSIEGVRSLHHLNVWQQTSQQRVLMVHLVTDSRADGNEVLQAATALVSSPRYNIKHSTIQLEPTTE

SEQ ID NO: 23326 - DNA, 11359 bp, DROSOPHILA
aatattgaattttgtatcttttttcactatccttatcgagctaaagtttttgtgaacaaaatttagaatacaagcaagagaccacgacagttggtttggaaattggcaaataaaactagtaaaataaaaaagttcctgacatattcataattataattatatatataattatttcggcatatagataaaaattgttaaggctaaagaagaaagaaaaaaaaacgacgttcatacggacggacagtcatttggacggccagaaagattcacctagtgatcctgatcaagaatataaatcatttataggatcagaaacgctatattgtatgtaaaagaaaaaacgcgataaatatatttattgttttatatagcaacaacttatacaaaattgaaataatttaaatattttatagtgattgacaaagacgccgaaagacaaataaagaaaaaacgatcgcttttatttccaaaagacccacaaaatattgcatatatcgcttgttcattttgggccgtcgatcccaacagctacaatttttaaaatagcaattttttatcttttaccctgtttaattcaaactaattcttttgatatgcaatatgaggttccaaagatcataaaatattaaaacggttttgatctgaccattctggaagatatttaattcaacggctctaaattcatagtactcttctttatatatatatatatatatgaaaatatattgtttagtttctaaattaaattgacaagttcttttaaaagagtatccatgaacagaaagttttaaaatatttaactcaaaatttgatcatgtggttggagtgctggctaagagcgcagcgaagtgcccaacctcgaacaaggaaccgttttttcggcaacggtcactctgttttcgatagaaataacttttcctcgcaggcctggtattttttggcatttaccagcagtgcggccgcattgaatcgttaaaaagtaaaaagagaagcaacagcgtgaggtgtaaataatgtaagacaatgcaatatagtaaaggcgagcagcaattgggaacagtgtgctcgaatcaagtgcgattggtgcggcggaaaagcgattggcacttggcaggccgcaacgtagttgtggaaaacgcagcacacccacacacagccagagtgcacacatatattgactgatgattttcgtctacgtttcaattcgattttcggaaatttcaccttcgcgttgctgtttttcggctatttcaaacttgttttcagctgtgcgcgccccctccgtcccccgtcccgaccccttttcgttccgctggcagccgctcactttttgacttgcttacgtattacgttcgcgtgccaattcgcagtgcaaagcgtgcattacaaacgcaaaatctcgcataattccacgcacattacccgtctgtcgccttccagttgtctcgcgatctcccgtcattttcgtgtggaaatcgtgtgacgctctaagaataccacggatcggtggaaagccgtgaaaagcgcaggaaaagccaaccaaatgtgtgtcaaagagcagcagcaggtgtaaatgcagtgttctaaagcgctgcaatgctccgtgcgtgtgtgtgtgtatgtgtgtgtgtgtcgcaaacatatggcagcaaataaatattaatcgcagttaatattttcgccatactccgcagattgaagattcacgcgaaggccaagcccagagtgactgcgtgtggggagtagggcccgccaggtgtaccaagtgcgccaagcaatcccatggattccaatgtcaaatgtaacaatcgaaacacaccagccgccctgaggaagcagaagaaagtgtttcgaggtcaaccaaccaccaccatcaccaccccccgatttgttatcatttcgttttcgtttactttttaaccctccgctcgagaacgtggtttcttttgcgacgtgcaatactctgtggcagaagtcttgcaccgttccaaaagagagcagcacgtggagcgacgagaacggccgtacaatacccaagtccgtggccaccaagctccagcgtctcaaggccaaggcgtctgcgagccagcactacggcggcacctatcgtaagtcctcgtccggagcgtcagcgtccaacggaaaccacagcgagggcagcgacagaagctcatcctctgcgctccacggcgggcatagccatcaacgcggtggcgccgccgaggagctccaatttgctttggcggatgtggccgagaagtcatatcaaagcaacagcagcagcagcaacctcaaccacaataacaattatcaaaagtcaaaccacaccagtgccaattattaccaacactccaacaacagcaaccacccacaaagcaccaccaccaacctgccttatcagcccaacagcaataccaacacgatgatgatgaccaaacagaagaattcgctggccgagcgcctcaacatcggtgaggaggtgcgggaactgaagctgggcgccaccttcaacccgaagaacacctcgaccgcctttcacactatcaaatgtaagtgctgtccaggggactcccattcaccctcgccagaactcagaattcacccacaaacgcctcgtcttgcagatgacttcaagccagcgagcgtggacaccagccgcatggcatctgtggacgtcggctccaacaatcaagttactgttaccgtgccaaattctggtgagtgcactcgaaaaagtggtcgaaaacagcattgcgttaggtctttgtgaaggtagatttttaacatcataaaataagtatatttaaactggaagtcttaattaagggcacagtttaaatgtttcacacaaagaatagttattcaatcaaattccaaagctcaaacttctataccaatgaatttgtgaagaaatttggaattatgtataactagttcatatttactaaataagctaaacacgtttagcgatactacaattgtccagaataagcaaggtgaaatttggtgtgcacctgcttaatcgaatggtggaatgtgcatctcgcccagaagctttaaaaaaattacttgaagcaatcaataacacgtgctccaagccaagttcagatacacttgagctcagaaatatttacatttgtattcctaaaaccaattggactaaatccctttataaagagaacacaacatgtacttatttttcaaacggacatggacatggctgggttaatagggttttatcgattgggaactcggaaccaaagttatgatataccctttcgaactgggataaaagaaggtgtctggttagagctcattgtatgcgtttagttgggactgcattgcatgcctgatgacataatgcataatccattagacgagacgaactttttaaagatacaaattaatggctagccctgtgcattatttgaatcaagcaagagaagaaaaggccagctctggagagcaaagacagcgaattacatcaagtcaggaaaaatgcagccaagcgttcaagtctttcacctcggccgctctatactggtattattccgctatgctctttgtggccaaacattgtcgtcgtcatcgtcatcgtctgtgggccgacgactgtggtggggctgctgctttggggcccattgcggccgacttggcttgtgtaacgcttcgttgattgcgagcgccgagtcgccaaagagttttggcggcggcggtggtggcgacggcgacaatagcatcggaatttggtcaagtgtgggccactgaagtgggtaagtgcggtaactgaccaatctatgccgcctctctgggaatcggacgggtgcagccaaaggcgcacaatgctgaactagtttccagtttggcaccgtccacagccaagttcccgtccagcctatcaatggaacacttttgccgtgcttccatagccatagtaacgataaccatatcgtttacccacagctacggcaattttgatagtagttttgtgttttattccgcatatggccagttaataatggtcagaaatggaatcgtagtaatagtcaattgaatcgagtaagttatagattgttacgcattgattcatacttattattctttcttgatatcaaattagtgtctagaaatgtctggaataaagcctatttttgtaagcattcccaaatttcccctgtctccgcgtctgaactttgtgatactagaagctctctccccttggtgactcaaccgattggatacggcaatttgaaaccgcgtcaaggtcatctcagaccacgttacattaagccactagagattcctgactaaatacgatatgataaaacaaaagtttattgcaaacgtgtttgtagatctaaaagaagtttcgtttagacaaaccagcgctttcgtttgattatttgggcaggaagtctaagccagccttgaataggccagtttgattgtccagggatgcatttctccgtctactgtccccgaaaatctccatcaatgatcctatgttataggtcaacgaaaaggcctgcttgattttgtctgcagtagaattcagaagcctactcttgacttccgaaagaagtggcaatatgaccaaggcactgtatacctgcaggcaaagcactatgttcataaatcagcatgatatctgctcgttggtcacgatgctcaccaacgattaaaactccgattcgcattgtcgacttctctcgctgacgacggaatccaggttactaaagtcagttgcaaccaaaaagcagacgcccatagcgagtttaatagtcagcatgataattgctattaacgttcaggccagactgtgaatatcacgctaatatggttgagcagcaagagggcagagatgaattagtgaaatgcgttttagaagagtgtccgaatgattcttgtttaatacaacagttaaatgtatatacttcatatgctgacgtcgaataagcagcgaatatcagtatccacttgtgacctattcagtttgaccgattatccccgccgattcgttctggagactatgtcacgcatgggacacgctccgaaccccaaaatcgatctggccgccacaggcttgtagatctttgggcagtagggcttctggcaattcatgggcggtggacagtagggaggcaggcagcttgccatcctgcccaggtttccgggaatacacatgggtggagtgcagggacttggacaatagggtggccagcaggtcggtgggagggtacagcccggttctttgcagggtggatagcaatcgggcggaacgcatttggaatcgcagtgtggcgatctgcacggataacagtagggtggttgacaaattgtggggcagtgcggcatatagcaccagggaaagtaggagccatcggggtactccaggccttccgagagatctgacgggggcttaaatgggtcttcagttgtagttgtggttgttgttgtagttatagttgtagtgactgcctttaatggaagcgacggagaaagtgttggtggtggtggaggtggtggaggtggtgccgccggcggcggtggtctccgattcggtcgggatggtttatagaatggcggaggcctcgggcagagaagctccaccttcttggccagtaccttaaataagaaacatcgtctggacgatgttatatgcacctcttccagggcttgtcccagcgacggaacccattcggctccgtatttccttcctgagttagcctccgcaatggcatttaccagatccgcggttagttttttcaacttgaggtgatcctgcgtccaacttggctgcgcccgcaacagacctgccaagtggatactattattatctcatgctatatatcagagcttttgtggaaatatcacaatatatcactgttttttgaacggcccaatactgttcctattcaaattcgtatcacaaacttacatatcatgaacagtaaaagcggaaacttttcgttcatctcgagcaacttgccaaactcccaacttgtttcatttacatggatacttaagtaaattagttatttgcatatttcttaagcagatccaaattgaaatgctgcgatttaatcaaataggcaacagtcaataaacgtgagtgaaacatatacaatagcattgcgaaaaacagtatgtgtcatctctttaagctcaaaaagtgtaaagttagtggcttaaatgctattcacagaaagcaattcaaagaatatacaaattcttctgcttattagcactaaacggttttatttttgtaagcccaatgaacatccgtaaaaatttccgatctgaaacattaactttcataacaacttcatattacagccaatctacaatatttggcatggtacaaaaccgaaaaatgttttcactacagataaggttcatctagcagcagtagctcttttattcctctaagaaatccagtaggtttattttcttggttatgcagtctttaagaaatccaattagtgtatctagtttctcttctatattttgttttctcgatcgcgctgatacaggtaacttttcatctgcaaagatgatggtaatgtttggaattttaatggtcggcaggattatgtagttttgcacagtgttcttgttggttatccgaaagttggcaattttagctggaagcttctttccttctttcatttctatgacgcacagcattataagtgtgtcaatcgtgtccgagtcctgacgcccttttacgttctggtcgagccaggacttcagttcgttgattttattcagcaccgctcctatttcccattgaaacaggtagagaatggctaaagaatcgagtcttactttcgttttggatcgcatagcaactcggacttaccaatgtgtacagcaagccgtcgcattttcgattctagcgataacactcggattttaccatttatattccatgggacaaatccattagtcaaactttacattacctggtcgccaaagcagcgaaaagatcaatattggatttctgacaaggtagctctgattttcatcagtggtcaggtgttaaagcgctaccaatgctatgtagtagaattgttgatgatccccattcgtatgaacatcatgatcctatgctactactataagagctagtaacttgtgattaggcatgtacatacattttaatgttgcgaaagcactggcaatccggaaaacacagtcccaaatgttctttaaagaatgattttcctgaactatgaaatgttcctgttttaattgaatgaaaaacattttaaattgaatgtttaatttaatttagaaagttagttcggttacgcttttataacattaagttctttgattttcataaggacgcacttcttaatgcccgcactcaatcctttcttagtcctttcttgcaaccccgttctgggtgcaggtttggtatcctccttggcgttgctacgacgtttgattattatggccccgtttttagatttctcttggtatttggccagctccttttcatccttcacgatgacaaccgtaatcggtggcaattgaatttccggcatgctgatgttgttcgtgatcgtgttaatattactgatggtttgtttgggatttacaaatcccttttctgtttctgatttacaaagcttgaccagcgtgttcaggaattgcctcttttcgtcctctttagtgtttgccttcttatttgaatatgtattgggtttcgcgtgtgatggttccggttccggttccggtgcagagctatcatcgttgttaccattgaacatttcgtttatcattatgaccttatcctcgaagtgtttgtggatgttgtttaaaacaggtaaaaatggcttctgatttgagacgtggagcacacagagcagcactataaatgtcacaaataggaattgttgttcggatagtaccagctttaggaactgcaaactcacccaaagcgatcgtacaaaaccgcatcgtgggttgtaaaaagagaactaaattaattccgccaagatgggtgcatcttggattcacgaaaaaggcgcgaataatccattggtaccagatcacattttaatttaggccattaatatttttacaaatatgtatcttctgaaagtcgtctagtcgttacttaaatttagcactaggtttagttagtattataacattttctttttaaaaactcactatctccaaaaatcaatattgtaaaattcggagaatttgcattaaaaatattttatcaaaactttaccagaacttttgtttgacttatggggaaggaagcataagcaggaataattaatagtcattagttttatttttcaaatatcaatctcacctaattccatggttattatacaaaatattaatttttccaagaacttaagtgatagtatggccacgattttcaaggataatatttagatttgagtataaaaaaaagaaatttaaaaatattgctccatgcatagataaccgaaataagtaaaattgaaatttaaaatgcttaacaaacccatttgtcatcagcttgaggaaatgcgagagactatattgacaattaatttgctagatgttattttcgaaaatatttttatatttctatcgtcgtaaatgtcttttgcactgcatttcaaacttctgaataaaatttatataagctcacaccattaatgtttacgatctctgctttatattatgatggtgccaatgccttatattactattttatttaacttgcagaaagttccggagtgcctcatacagtttataagggaaatcagagagagtatgcaaaggagtgtttgatgatctacgacaaggagacgggcgccatcaccatagaaaagctaaaccacaatattcaagtgaagaagaccaggtaagtgctttaatcttagagaatttcaagcagcaagcttaaatttacattactgcaggaatgaagtcaccaacaagtcagtccagctgcctggtcagaacatgggtcagccccacaatcagggtgcgaacggagcggcaccagtcgcggtcccggtacctggtcaaggctcgggaacggcacccaaaatggagaatagcaccatgcgaatctcaaccaagacgaaggtttctaccggcagccgtagaaacaatattagtaagtattgtagaaagaggaaacaagaggacacagtagaaacacacaccactctaggtgtgcagataacttaaacccaaataaaataaacagaaattcaataagattgaagtgcttgctctaatttttctttatcttaccattttcagttgacttcaagccgcgcaattcgccaatgcaacagaactcaccatcgcgtccagtgccagtccaccgcagtccccaatctgcgccggcgtatgttactttatccgtcctcgctgacatatatttcatagaattatctttcagttgggatgctaacaatgcacagcagacgctgcccagcattcccctgatcaccgacgacgacgactttgggttgagagccgccctgcacaacagcggacatgggaatacgtcaggcaccgcggcaggtcaaccggatttcggatctacgtcctcgtccacgcacattggcaagcagcggcaggctcctccgcatggccatggaaagcgccagcagatgcaccagcgcctcagcccaccaatggctcagcagcagcagccatctaactatgggcgtggttacaatggcggccacaaccacgcacaacagcagcagcaccatcaacgcaactcgccgcagcagcagcgtccttctgcctatggccacggcaatagcatgcccatagacgtggactcgagcagggagcatgaactgacctcgcagtccgtggcgcaagcggctgccgccttggaacaggtgggttgtgattatggttaggtatggcgcattgctaacttgagggtttgctttcttgcagcaaattggcggtgcactgagtgcatcgagctccagttcggagtcggattccagcgacagtgacagcggtagcgactcggatgacagcacagaggacgatcgctccacgcagggccaacagcaggatcaccagcagcagcagcagcagcagcatcaggtctatcagaatcacaaacacactcaacagcaggtggcgcagcagcaccataatcagctgcccaacctgggcctcggctccatatcaccagcatatggcagcagtcatcaacagcagcatcagcagcagatgcttccacatcaacagaaacagaagcaacagtccggcatttatgcgtccaatggtggctttccaaacgatttcctacaaaacgatctgcagttgtcgtcaaattcgtccgacgatgacgacgactagctgtttaaagtttgatcttatttgccttcttttgactaaaccaacgacaacaagagcaacaacaattattgatattttgtctatatgcgtgtaattaatttgtaattattgagaggtgattttacttgctagtgaaattttttaaaataaattcttatttctacaccacgatatccacaaaaatatattaattaattttaaacactaattttagaccttccaaatgtgctggtaaacattgaattaaatcgaaaaaagattaatcaaatcaatcaaaatcataaaccacaatgcatattcgtttttaacacaaacaaatgattatgtaaaacttgttggaagactaataatatatcgcacgcaaataaaacacagatttatactataaaaaatacccaggagataaaacgaacgatgtagaggatgcaactgaggaaattatttagtttgtaataagaatgctgcaaatcaagaaaatatttttaagttttccagaaaaaagtgaccactcggatttttgccattaattacgcattttaatttaagcccttacttctttttaatatattcagataccaaaagcgcaaagaaacatattttaaaagatattttcaagtgttattttgttttcccttacttcgctcatctttgtagtcaagcttacttttatcgttggcgatttagttaatttaatgaaaagtaaaagctatctgagtttacgttttttattaatttgttagctatatttatccctctctttgttagtcacataattgtgcggtatgaagacatttgtgtttttagctcatgttttatttgaatttatttgtagttttttaattaattttaaatttatactattacgattttgttatgagcttgcaatagttaaacgcaacgaaagaaaataaatgtgaaacgaaataaccggcctggtgaaagccatttttgtttatatttgtattcaccccagaatgtccaaagaatttgttacactggc

SEQ ID NO: 23327 - DNA, 2864 bp, DROSOPHILA
tgaggtgtaaataatgtaagacaatgcaatatagtaaaggcgagcagcaattgggaacagtgtgctcgaatcaagtgcgattggtgcggcggaaaagcgattggcacttggcaggccgcaacgtagttgtggaaaacgcagcacacccacacacagccagagtgcacacatatattgactgatgattttcgtctacgtttcaattcgattttcggaaatttcaccttcgcgttgctgtttttcggctatttcaaacttgttttcagctgtgcgcgccccctccgtcccccgtcccgaccccttttcgttccgctggcagccgctcactttttgacttgcttacgtattacgttcgcgtgccaattcgcagtgcaaagcgtgcattacaaacgcaaaatctcgcataattccacgcacattacccgtctgtcgccttccagttgtctcgcgatctcccgtcattttcgtgtggaaatcgtgtgacgctctaagaataccacggatcggtggaaagccgtgaaaagcgcaggaaaagccaaccaaatgtgtgtcaaagagcagcagcaggtgtaaatgcagtgttctaaagcgctgcaatgctccgtgcgtgtgtgtgtgtatattgaagattcacgcgaaggccaagcccagagtgactgcgtgtggggagtagggcccgccaggtgtaccaagtgcgccaagcaatcccatggattccaatgtcaaatgtaacaatcgaaacacaccagccgccctgaggaagcagaagaaagtgtttcgaggtcaaccaaccaccaccatcaccaccccccgatttgttatcatttcgttttcgtttactttttaaccctccgctcgagaacgtggtttcttttgcgacgtgcaatactctgtggcagaagtcttgcaccgttccaaaagagagcagcacgtggagcgacgagaacggccgtacaatacccaagtccgtggccaccaagctccagcgtctcaaggccaaggcgtctgcgagccagcactacggcggcacctatcgtaagtcctcgtccggagcgtcagcgtccaacggaaaccacagcgagggcagcgacagaagctcatcctctgcgctccacggcgggcatagccatcaacgcggtggcgccgccgaggagctccaatttgctttggcggatgtggccgagaagtcatatcaaagcaacagcagcagcagcaacctcaaccacaataacaattatcaaaagtcaaaccacaccagtgccaattattaccaacactccaacaacagcaaccacccacaaagcaccaccaccaacctgccttatcagcccaacagcaataccaacacgatgatgatgaccaaacagaagaattcgctggccgagcgcctcaacatcggtgaggaggtgcgggaactgaagctgggcgccaccttcaacccgaagaacacctcgaccgcctttcacactatcaaatatgacttcaagccagcgagcgtggacaccagccgcatggcatctgtggacgtcggctccaacaatcaagttactgttaccgtgccaaattctgaaagttccggagtgcctcatacagtttataagggaaatcagagagagtatgcaaaggagtgtttgatgatctacgacaaggagacgggcgccatcaccatagaaaagctaaaccacaatattcaagtgaagaagaccaggaatgaagtcaccaacaagtcagtccagctgcctggtcagaacatgggtcagccccacaatcagggtgcgaacggagcggcaccagtcgcggtcccggtacctggtcaaggctcgggaacggcacccaaaatggagaatagcaccatgcgaatctcaaccaagacgaaggtttctaccggcagccgtagaaacaatattattgacttcaagccgcgcaattcgccaatgcaacagaactcaccatcgcgtccagtgccagtccaccgcagtccccaatctgcgccggcttgggatgctaacaatgcacagcagacgctgcccagcattcccctgatcaccgacgacgacgactttgggttgagagccgccctgcacaacagcggacatgggaatacgtcaggcaccgcggcaggtcaaccggatttcggatctacgtcctcgtccacgcacattggcaagcagcggcaggctcctccgcatggccatggaaagcgccagcagatgcaccagcgcctcagcccaccaatggctcagcagcagcagccatctaactatgggcgtggttacaatggcggccacaaccacgcacaacagcagcagcaccatcaacgcaactcgccgcagcagcagcgtccttctgcctatggccacggcaatagcatgcccatagacgtggactcgagcagggagcatgaactgacctcgcagtccgtggcgcaagcggctgccgccttggaacagcaaattggcggtgcactgagtgcatcgagctccagttcggagtcggattccagcgacagtgacagcggtagcgactcggatgacagcacagaggacgatcgctccacgcagggccaacagcaggatcaccagcagcagcagcagcagcagcatcaggtctatcagaatcacaaacacactcaacagcaggtggcgcagcagcaccataatcagctgcccaacctgggcctcggctccatatcaccagcatatggcagcagtcatcaacagcagcatcagcagcagatgcttccacatcaacagaaacagaagcaacagtccggcatttatgcgtccaatggtggctttccaaacgatttcctacaaaacgatctgcagttgtcgtcaaattcgtccgacgatgacgacgactag

SEQ ID NO: 23328 - protein, 504 aa, DROSOPHILA
MMMTKQKNSLAERLNIGEEVRELKLGATFNPKNTSTAFHTIKYDFKPASVDTSRMASVDVGSNNQVTVTVPNSESSGVPHTVYKGNQREYAKECLMIYDKETGAITIEKLNHNIQVKKTRNEVTNKSVQLPGQNMGQPHNQGANGAAPVAVPVPGQGSGTAPKMENSTMRISTKTKVSTGSRRNNIIDFKPRNSPMQQNSPSRPVPVHRSPQSAPAWDANNAQQTLPSIPLITDDDDFGLRAALHNSGHGNTSGTAAGQPDFGSTSSSTHIGKQRQAPPHGHGKRQQMHQRLSPPMAQQQQPSNYGRGYNGGHNHAQQQQHHQRNSPQQQRPSAYGHGNSMPIDVDSSREHELTSQSVAQAAAALEQQIGGALSASSSSSESDSSDSDSGSDSDDSTEDDRSTQGQQQDHQQQQQQQHQVYQNHKHTQQQVAQQHHNQLPNLGLGSISPAYGSSHQQQHQQQMLPHQQKQKQQSGIYASNGGFPNDFLQNDLQLSSNSSDDDDD

SEQ ID NO: 23329 - DNA, 6240 bp, DROSOPHILA
caagcgggcatgttggagaggtcggcgctctggtagaactcatacaaatccatctgtttgcgcgaccactgcaccttctggatgatctcggcgaccagcgcctggctttggcccttctccagcatgccgggcagaaggcagatttgaaagggatccgagaagacctgagcaccggtttgcgtctccttggtcccttggctcttctcctccgtccaggctgtttggagccacttggtaagttccggttgctgatacgcctcgttcaggagcacttcgttcgtttcaaggatgtcgcccaggcgcaaaagcttcctgtgcggctcgcccacctgatctgcggaatcctcctgctctgcacgaccatctgcaagggcaacatagtgaatgggtttgcattaagcgaggcaaacaggggcataccttaaactttaatttggctattttttacgcacaccagcactcacacacgcgttatcaaaggcaaaggcaaaatcaaaggcaccgatgtgccggcacacctcgctttatcgttttggggcagatttctcactgtttccacttaccttcgtccttgtcttttctcctgggctttactggactggagctcgaggtttccatgatgctgtgagtcaaattttcggttaaaaacgtgaatttttgccagggaaaataaaaaaattggcttgtgcagctagagatggtagctcggaaatatcggttgttctgtgcaagtgttgggtagttagcttattccacgcagtatcaaatacctagctaaagtttagtagctaaaaacttttggcattatattgtaaacaataaagggcgtatataagtaataatatataatataataatatattgaaggcattcagcattagcattcaactcactaatcacactttcattttatactgatcatcactgattgtacgtgagtgtcgtgtgtttcgtcgtcgcctcacgcctccatccctagccaattagtaacgaacaattgctcgatcggctccacgtaaataaagtttagatcacagctttgttgattgcttatcgcggtggcaaatatagttattcgtttatggctgtaaactttcgaaacggacgtggacatagccggtaaattaaaacttgaagataaaacctagctggtgacaaagaaattccaattggagcagtccaatgccgtggaatgaccttggaagaggcggagccaccattcagccctccatattataaacaaaaatactattgtggaatgttcacagctattttgtataaaaaaaatatttggctatcagtctgtgcgtgctagggccaaacagctgattccgcctggctgccacctgatttgttgggggtgtgagtggggctggggctgtggtattctgtatgctcgcgatgatctcattgtgttggaatcggagcaaaagctaaactaaacaacttgacatgtgttcttctgctcctgtgtagctacctagtgttggaggatacggaggagcaatgggcaaggatcagcatttgctggaggcttcgcgagccggcgacatcaagacggtggacaaactgctggagcactcgagcaaacgacatggcccgctgtccaggtgagtcaccagcagcaactgttgttattccaggtagtttactacaggttttcctttacagttttaggcgaagtcccagcatcaactgccaggacatgaatggctacacttcgctgcatcacgcctgtctaaatgggcatagcaacattgtacggctactactctcccacaacgcgctgttggatgtgcctgatatacgtggctcgacacctttatttctggctgcctgggctgggcaccaggacatcgtcaagatgctgttgatgcactcgcctacgggagccaatccgaatgcccagactatcgaaaacgagacgccgctgcactcaggcgcccaacatggccacaatgccgtggtggccattttgctgtcctatggcgccgatcctgccatacgcaacaatagctttcaaacggctctggatttggcagcgcaattcggacgccttcaggtggttcagaccttgctccgtgtttatcccgacctcatattgccgtataagcgtttggaagatgacaatgaagagctgctgggctgcatgcccataaagcacatattcacgcacacctgcctgcacctggccagcaggaatgggcacaagaaggtggtggaaacactgctggcggccggcgtcgatgtcaacatactcaccaacgctggaagcgctctccacgaggcggctctctgtggcaaaaagtccgttgtggtcactctgcttaaggccggtatctacgtacacgccaccgatggaaacggacgcacagccctggacatactctccgattatccgccgcatgtgacctacgacattgtgggcgccataaacggtgcgtacgagtaagaagtagaagaaatacaataaaggggctatgggtagtggctggaaatgcttatctttactgatatctaaagttaatacagctcttcataaagctttgtaattcaaaacatttatttactctatttgtaataaatgttacaccctatttattgaaggcaaccaaataagatcgaaattattttattgctaatataaagctgtaaatatattcttgaagttatgtgagtaagcgcagacagtaaataattgataacgatttcaacaggctttattatttgaatctttaatagtgcctccaaaccactaacgcccacgatcttttgcagagttcacccaagcggcgagggaacatcagaagccacttgtcgtagagaacggcacacaatcgctgccgaagcggctgtacgagaagaactcgcaacgacagaaggtgccgcccaggcagaggaagtaagcccagcaactccatgcacagtgacactgaaacacacacccacatcactgctgaccctaattaacttagcccgcagctcatgtcattcggaaaacgcactcatccccgctcgcactcgcacccactctcatgtccacgcccactagccctagcactcatcagaatcagaatcagcttcagaatcggttgtgcgtctcttcaattaactggtctggtttcgtttggtttcttttcaataaccacatactcacccctcaccatgtagaaagcaagatcatcaagccaacggactttcgcactctttaagctcactggacatttttgccaagccgccggagaattacctgcaaatgaaacccatcattcaccagaagtcctgcgacaacatgagcgactttcggacgaatggcagcaatctgttgaccagctataagccggtgtacaagcaacccatgctgcccagctttcggatggacagcgacatctccaatggatccgtaccctccagatcgtatgagtacataaatctactaaggaacgggtcccacagcgatgataactccgccagcaccagtagcaactgtacgtaatgtacctttaactatttcactcgaaagtcactagacctgaatatccaatgagtcaggcaaataaacatctggttttgtgtccatttacagctgcggtgcgtcaacaagcggtggctacgtacgtggagatgaagctgccaacgccgccagttcctaaaccacgcactcgaataaacggcgaatacaacgactatgcgaatgtggtgccaatagaagaaggcagctgcgtggcagctgttgataataacaataatagcaatggtaatggcacgaaattgcgattggttcgccattcgcccacgccggattatccaccacccacagtgaccgaagcggaacgcacgatcttcaacttcatgcagccggctactttgcgcaaaaacagtttgctggaaccggcggaatcccctcgaaccactaactcagtgagctctgaccaggtggaggaatacgttgccgacataccctttgctggactattcaaaggatccactttgaacttgtcctcggatgtggtggatggcattggtgctgtgccgggagatagggagtttctgcaatcacccagcatggtgaggtcggcccacgtccaaaaccacagacgcagcctgtcaaagcagcgatactcagcgctgggcgaagacttcagcgcgtcccgagtgtgggctgaaatcgataccatttttgagaacattggcaacgaagtgtccacagtagagcaggaagtcgaggagtttgtagaagatccttcaagcttgtccttagaagattctcggcagtccctacacatacgagatcccgcggaattgctattgggcagaaaaccgagcgcagcctcctccaattggtgccactcgccatacacatttatctatggcgaaattcgatactctctgtttgtgagtatgatttgccataagtatttaaattaaatacttcaaacctataaatgttttgcagtatcttggctcaacggtcattcgaaaactgcaaggaaccctttccactcgaaaatctatccagaaactgaagattgatgagaacttaaagtcggcggcgagcgttagtgatttcagcttgctggaaaactgcacaacctccacaaagtatttgaaggcagccaaccatcagacacgactcaatgtggacattgctgtatcctgcgttggcgtcaagttcatagaccacgataaaaaggtgagcatatttcaattccttgatatatattgtatgtatatttgtcaacttgcttttagactgccatctgttgccatgacattgagaacataaattgtgtttgccaggactcggaggacttgcgctactttgcgtacataaccaaagaacaggacctgcactactgtcacgtctttatggtggatagcttggttcgtacttatggactggtgaatctcaacatgctaacgaattattaattctcaggaactggccaaggaaatcatcatgacgctgggacaggccttcgaagttgcctaccagctagctctgagcagacagggcacgtccctcaacgaagagtgctaattctaagccatggaagtgccacaattgccaccgagcgtggttttttattatttatttcattgcatttcacacgtaaagttattttttttactcatttgctagtcgttgatgccatctcgatgctggctttgctccacataaggcagctcacatgttaagtattttgagagttttttaataaatttacaacattgcttttaaaagcaaaattttgaatttaggggtaaagcgggatattttatcgaatttttcgtttatcgataccagttagtgggaaataaatagcagcgcctggtaacactacgagatcagcttcaaaaaaaacgtacagattgaatatcattggcattttatttttaaacataaactaaagatccagctaaaaatggaacttaatattggtaaatagttagtgaacgtcatatgcttgctagtacctacattgttttcacctcattactgaagataatcgcccaaacgatgtcggcgtcttggcgccgaacgatcaggaaaatgaggacgccaatcggaggatggaaaatacagacgctgttaagactccagtggccaggaaaacgcgacgagcggtcctcaagcggatgaatgccacttcggaaaagaattcgcccacgcatcccgatcctccgaagacaccgggcactccaggccatcttagccaaaacaccgaaactccgagacgtagttgccggaaaagtgtgcgtccagcgatcgattacgatgacattatagtgcgatccgccaagaaggctatcgtcgaagcactttcagccgatcccgagggcgaggagccttccgtccagaagtggaccaccgcggaggtgggaaaaaattcgcgcaaacggggtcgcaagtccaagcgcatggtcgccaagaagcagaaaacagagcacatagttgcagaggatgatgaggagcaggacacggagttggaggtcccacagaaaaaggtggatccttctcaggatgctgaaggaaatgcagaggttcaagcagacatagtagaggaagtggcactatccacgaagaagtcttctaaaaagtctaaaactaaagatccagatcacgcaaatgatattacggacattgtagtgaatctggagcaaccaatatcgataaagaagtcttctagggcgtctaaaaatccagacaccaaggagcaaaatgtagctgatgaacta

SEQ ID NO: 23330 - DNA, 2940 bp, DROSOPHILA
ctcgatcggctccacgtaaataaagtttagatcacagctttgttgattgcttatcgcggtggcaaatatagttattcgtttatggctgtaaactttcgaaacggacgtggacatagccgctacctagtgttggaggatacggaggagcaatgggcaaggatcagcatttgctggaggcttcgcgagccggcgacatcaagacggtggacaaactgctggagcactcgagcaaacgacatggcccgctgtccagttttaggcgaagtcccagcatcaactgccaggacatgaatggctacacttcgctgcatcacgcctgtctaaatgggcatagcaacattgtacggctactactctcccacaacgcgctgttggatgtgcctgatatacgtggctcgacacctttatttctggctgcctgggctgggcaccaggacatcgtcaagatgctgttgatgcactcgcctacgggagccaatccgaatgcccagactatcgaaaacgagacgccgctgcactcaggcgcccaacatggccacaatgccgtggtggccattttgctgtcctatggcgccgatcctgccatacgcaacaatagctttcaaacggctctggatttggcagcgcaattcggacgccttcaggtggttcagaccttgctccgtgtttatcccgacctcatattgccgtataagcgtttggaagatgacaatgaagagctgctgggctgcatgcccataaagcacatattcacgcacacctgcctgcacctggccagcaggaatgggcacaagaaggtggtggaaacactgctggcggccggcgtcgatgtcaacatactcaccaacgctggaagcgctctccacgaggcggctctctgtggcaaaaagtccgttgtggtcactctgcttaaggccggtatctacgtacacgccaccgatggaaacggacgcacagccctggacatactctccgattatccgccgcatgtgacctacgacattgtgggcgccataaacgagttcacccaagcggcgagggaacatcagaagccacttgtcgtagagaacggcacacaatcgctgccgaagcggctgtacgagaagaactcgcaacgacagaaggtgccgcccaggcagaggaaaaagcaagatcatcaagccaacggactttcgcactctttaagctcactggacatttttgccaagccgccggagaattacctgcaaatgaaacccatcattcaccagaagtcctgcgacaacatgagcgactttcggacgaatggcagcaatctgttgaccagctataagccggtgtacaagcaacccatgctgcccagctttcggatggacagcgacatctccaatggatccgtaccctccagatcgtatgagtacataaatctactaaggaacgggtcccacagcgatgataactccgccagcaccagtagcaactctgcggtgcgtcaacaagcggtggctacgtacgtggagatgaagctgccaacgccgccagttcctaaaccacgcactcgaataaacggcgaatacaacgactatgcgaatgtggtgccaatagaagaaggcagctgcgtggcagctgttgataataacaataatagcaatggtaatggcacgaaattgcgattggttcgccattcgcccacgccggattatccaccacccacagtgaccgaagcggaacgcacgatcttcaacttcatgcagccggctactttgcgcaaaaacagtttgctggaaccggcggaatcccctcgaaccactaactcagtgagctctgaccaggtggaggaatacgttgccgacataccctttgctggactattcaaaggatccactttgaacttgtcctcggatgtggtggatggcattggtgctgtgccgggagatagggagtttctgcaatcacccagcatggtgaggtcggcccacgtccaaaaccacagacgcagcctgtcaaagcagcgatactcagcgctgggcgaagacttcagcgcgtcccgagtgtgggctgaaatcgataccatttttgagaacattggcaacgaagtgtccacagtagagcaggaagtcgaggagtttgtagaagatccttcaagcttgtccttagaagattctcggcagtccctacacatacgagatcccgcggaattgctattgggcagaaaaccgagcgcagcctcctccaattggtgccactcgccatacacatttatctatggcgaaattcgatactctctgttttatcttggctcaacggtcattcgaaaactgcaaggaaccctttccactcgaaaatctatccagaaactgaagattgatgagaacttaaagtcggcggcgagcgttagtgatttcagcttgctggaaaactgcacaacctccacaaagtatttgaaggcagccaaccatcagacacgactcaatgtggacattgctgtatcctgcgttggcgtcaagttcatagaccacgataaaaagactgccatctgttgccatgacattgagaacataaattgtgtttgccaggactcggaggacttgcgctactttgcgtacataaccaaagaacaggacctgcactactgtcacgtctttatggtggatagcttggaactggccaaggaaatcatcatgacgctgggacaggccttcgaagttgcctaccagctagctctgagcagacagggcacgtccctcaacgaagagtgctaattctaagccatggaagtgccacaattgccaccgagcgtggttttttattatttatttcattgcatttcacacgtaaagttattttttttactcatttgctagtcgttgatgccatctcgatgctggctttgctccacataaggcagctcacatgttaagtattttgagagttttttaataaatttacaacattgctttt

SEQ ID NO: 23331 - protein, 863 aa, DROSOPHILA
MGKDQHLLEASRAGDIKTVDKLLEHSSKRHGPLSSFRRSPSINCQDMNGYTSLHHACLNGHSNIVRLLLSHNALLDVPDIRGSTPLFLAAWAGHQDIVKMLLMHSPTGANPNAQTIENETPLHSGAQHGHNAVVAILLSYGADPAIRNNSFQTALDLAAQFGRLQVVQTLLRVYPDLILPYKRLEDDNEELLGCMPIKHIFTHTCLHLASRNGHKKVVETLLAAGVDVNILTNAGSALHEAALCGKKSVVVTLLKAGIYVHATDGNGRTALDILSDYPPHVTYDIVGAINEFTQAAREHQKPLVVENGTQSLPKRLYEKNSQRQKVPPRQRKKQDHQANGLSHSLSSLDIFAKPPENYLQMKPIIHQKSCDNMSDFRTNGSNLLTSYKPVYKQPMLPSFRMDSDISNGSVPSRSYEYINLLRNGSHSDDNSASTSSNSAVRQQAVATYVEMKLPTPPVPKPRTRINGEYNDYANVVPIEEGSCVAAVDNNNNSNGNGTKLRLVRHSPTPDYPPPTVTEAERTIFNFMQPATLRKNSLLEPAESPRTTNSVSSDQVEEYVADIPFAGLFKGSTLNLSSDVVDGIGAVPGDREFLQSPSMVRSAHVQNHRRSLSKQRYSALGEDFSASRVWAEIDTIFENIGNEVSTVEQEVEEFVEDPSSLSLEDSRQSLHIRDPAELLLGRKPSAASSNWCHSPYTFIYGEIRYSLFYLGSTVIRKLQGTLSTRKSIQKLKIDENLKSAASVSDFSLLENCTTSTKYLKAANHQTRLNVDIAVSCVGVKFIDHDKKTAICCHDIENINCVCQDSEDLRYFAYITKEQDLHYCHVFMVDSLELAKEIIMTLGQAFEVAYQLALSRQGTSLNEEC

SEQ ID NO: 23332 - DNA, 4312 bp, DROSOPHILA
tgtttcatttatgtccttggtgatgtcatacacatacatgcttcggtgctcacatatacttttgtacatgcttgtatgagcctggtgatttgtggggcgtgtcacagccccttttgtcgtcatacctgcagaatagtgcagttgggcgtatctactttatctgcatgtggccacattgtggatgattataaaaattcaatgcattcataatagtgttgttgcttctgacaggagccatcccagttcagcgtttttcttcaggacaatggattgcaagttgcaagttaccatcttaaattcccgacattgtttcgtcgatttgatgtattgcaataatttaaatgtctgagcaccatggtgacctgcgatgaatcgagtgaaatgccaaaatgtccattaattaacagtggaatagaagaaagagattcgtttccattcaatgacaactcatcccagatttctcaacccaggactccagttttctttgtctcgtttttccgtcgattttttttttgtatttttttttgagcgtacaattaggcggcgcgggcctttctggtctgaactcaaaactgttgagttgtcgggagcacttcgagtttttccttattgacattcttcaacaaaaaatggccaaggcggatgaaaagatggcgaaagattgagtgggagagggcaccaaataactttagcacgaagttgaagcggaagtttggaatcaataatgacgagacagatttgctgtgaatggtttaactctgttggttgggggatgtatgaaatggaaatacgatgaaatctttaatgaatatatcaaaaagaaaatttgcaaccacctttattgggctaaagaaagtccatatttcatgttattcctttgaaaatcatatatattttctaattaacccataccggactatctggtattttaattttgagatacatttggtgttaaaataaactcagttaatttacaaatagtctaaagagccccttttgactagcaacccattttgcttagcgcatcggctgcagcctgtcccattgcattttccgtagatccttcgggttccattagcaggatatccctgctgacttggagcagcttgacgacctctttgagtcgccgctggaactcctgtcgtgagatctgtccgctctggaatgccgactgagccaaaaccattacgggggcatgcagctcgtacatgatgagtcctgcgatggaaaaacgtttcctaaatattccatgatctgtagaaggaacacccacctcgcagacgggtcagacccggatcgagtacatctacgatttccagaaactcgcggcagtagctctccttgcgggcaatgtcctctggggacatctgtggcagtaagtatccttcagttcgaccgtaaatctggcacaaggaatatttggccgagagcaggaggtagtgattcggtcgcaggacatcccgatatctgcaggacaatgatcgattggaagtcacgaaacaaaaggaaagtggtaagatatattattatccttctgctttaagtcttgttcatgcgtaaaccgatgaataaataataaaatgaaaggaaagaataattcagaattataatgcaaaatattaaaactgtcgcactcgcattagaggtagccatatttttttttccattttgttactgatcgatcgaccgaattgggctaaaatgattcttcaaattagttaaagcatttagatatgtatgtgaagatatttttaaatatatgtatgtatattagaagtatgcctatgacccgtgaatgcagacgcacctaaggagaaagttctccagtcctggaatatcgtggacatcaatgtcctccaggtcgttgttgatacgatccaactggcgctccacttccgtggctcccattttatgggcgcaacggtcgcagctaattggagtaagataagtatagggttactgtacagcccatctggcccaaggacatcgctcagtgagtggggtggggtgggtcaaaattttgtgaaaggataagatgccataagattatggcagattacgttgacccgcccatcactgcccaccatcgcgactgcccgctacactactcacgcccagtcgccggtctgctgcagtggatccaccgctcgcaccgatcccgtccgacaggtggcgcacacgagggcgctgcagtcggtgcccagctcgcggggatcggagcagcgccggcagcagcaccagaagagcttgccctcgtgcatgaaggcgcgccgcttgagtgtgccctgcagcgtgtacgcatagctgagcgtcagcgcttcccgctcgcgcacgcgccgcgaggtgcgcagcaggatctcgaaggagctcgggtcgtccgtgtgcgccgtgttcggtgtgcagtcgtgcgcgagcaggaaggcgctcggatatagcgtccgcgccttggcgccattctggccgatctcgaaacaattgacgtccagtatgccgcacacctcgtgcacctgttccgcctcgaggtcctccagctgccaggtgacgcgcagtcgctgcaccaccttctcctcgtagtggcgccacagcaccgcgttctgtcgtcgctcctccgtatgcgattccatgcgggcgatcagagcgaactgctccggatcgtgctggcgcaggaggagtatgcgaacgatcatcaccagttcgtaaaggtcacgcacttccgccggaccggcgcgttccgtcagcagttcgccggcgaccgcccgtcgttccgcgtacagttggcactccgtttcagtgtgaccatgtcgatgtttgaggccagcgcaagtgctgccgcagagtggccaggcgcagccgggacaacgatattgatccgccttaagggacaccgggtgatagcaacccaggcacacgggatcaccgctcacacacggcccaatggccagtggctcctcgcggatcagcgtttcgcccgcctccagttggcgattggccaccaaatatcgtccatatatatcggagtgttctacgcgatatggtaactccttctcctccgttggcgagggactctgctccttgtcctgctgctcctgcttatccttcgactgttgaccaccccgctggtgtctggctctgctgttgttgttgtttttgtggtggttctgcggggagcacaagcacaagagatgagagcactcattagtggcggcttccgttgctaattgtattctaattgctgtcccctgctctcgctcattaatcaccagttcggcccactgtcaacccccaaaaatggctcgctgaccagccttccatctgcccatctacccagctatccaactgttccgctgtcccaaagttccaccttcccacgcccaccagcacacgcccagtttcggccgttgtcaacagctggcaattaaatgccactcagttggccgcaacaggtgcttgttttgtctgttttgcacgcccacacatcgaggtgtcccaatcgatttggcccaaacgcacttgcatcgagtcgacatgttcgaacatttcatatcttggctggcttattagccacctgcttaaaccacgaacttaaaatgtctaataacctttcccggctaataaatgtaactctatattctttatacttttccaacataatagcttagatttgtgacagacacttctttggaatgtgctgttcgaaactagtcgcattacattttgcttgagattttattgtttgttgtgaaacgctgccaaattctacttttagctcgacaattgcattcgatgcatatgcaaattagcttattccatataataaacactggattgttgccaatttttcgcaatgtatttttaaattgatatttctggtgatctcaatgcgtgcttatagtcatgtaattatttcattatactgttttatagacttattcattttgaggttttgatctggtttgcttaaagtatttcgtaaaacaaacaaacaggctatcttttaatcatgctgttaatggactcaggacttacacaaataaatctgtacaaatttatcggacaattaaaagcactggttaatccactataaattgattaacttcattttaatacgctttccgcgggtattttaatattatttgctacctgcagttatctatataaattatatgcaaacaactttgattaatgtttaaggtagtttgcttatagagttatatattgttatatagggtatatgcaaatctgcttggcatagttgatttcctttcttgtttaacatttaaaatgccatttcgacattaaaaggcttacaaag

SEQ ID NO: 23333 - DNA, 1620 bp, DROSOPHILA
atggaaggctggtcagcgagccatttttgggggttgacaaaccaccacaaaaacaacaacaacagcagagccagacaccagcggggtggtcaacagtcgaaggataagcaggagcagcaggacaaggagcagagtccctcgccaacggaggagaaggagttaccatatcgcgtagaacactccgatatatatggacgatatttggtggccaatcgccaactggaggcgggcgaaacgctgatccgcgaggagccactggccattgggccgtgtgtgagcggtgatcccgtgtgcctgggttgctatcacccggtgtcccttaaggcggatcaatatcgttgtcccggctgcgcctggccactctgcggcagcacttgcgctggcctcaaacatcgacatggtcacactgaaacggagtgccaactgtacgcggaacgacgggcggtcgccggcgaactgctgacggaacgcgccggtccggcggaagtgcgtgacctttacgaactggtgatgatcgttcgcatactcctcctgcgccagcacgatccggagcagttcgctctgatcgcccgcatggaatcgcatacggaggagcgacgacagaacgcggtgctgtggcgccactacgaggagaaggtggtgcagcgactgcgcgtcacctggcagctggaggacctcgaggcggaacaggtgcacgaggtgtgcggcatactggacgtcaattgtttcgagatcggccagaatggcgccaaggcgcggacgctatatccgagcgccttcctgctcgcgcacgactgcacaccgaacacggcgcacacggacgacccgagctccttcgagatcctgctgcgcacctcgcggcgcgtgcgcgagcgggaagcgctgacgctcagctatgcgtacacgctgcagggcacactcaagcggcgcgccttcatgcacgagggcaagctcttctggtgctgctgccggcgctgctccgatccccgcgagctgggcaccgactgcagcgccctcgtgtgcgccacctgtcggacgggatcggtgcgagcggtggatccactgcagcagaccggcgactgggcctgcgaccgttgcgcccataaaatgggagccacggaagtggagcgccagttggatcgtatcaacaacgacctggaggacattgatgtccacgatattccaggactggagaactttctccttagatatcgggatgtcctgcgaccgaatcactacctcctgctctcggccaaatattccttgtgccagatttacggtcgaactgaaggatacttactgccacagatgtccccagaggacattgcccgcaaggagagctactgccgcgagtttctggaaatcgtagatgtactcgatccgggtctgacccgtctgcgaggactcatcatgtacgagctgcatgcccccgtaatggttttggctcagtcggcattccagagcggacagatctcacgacaggagttccagcggcgactcaaagaggtcgtcaagctgctccaagtcagcagggatatcctgctaatggaacccgaaggatctacggaaaatgcaatgggacaggctgcagccgatgcgctaagcaaaatgggttgctag

SEQ ID NO: 23334 - protein, 539 aa, DROSOPHILA
MEGWSASHFWGLTNHHKNNNNSRARHQRGGQQSKDKQEQQDKEQSPSPTEEKELPYRVEHSDIYGRYLVANRQLEAGETLIREEPLAIGPCVSGDPVCLGCYHPVSLKADQYRCPGCAWPLCGSTCAGLKHRHGHTETECQLYAERRAVAGELLTERAGPAEVRDLYELVMIVRILLLRQHDPEQFALIARMESHTEERRQNAVLWRHYEEKVVQRLRVTWQLEDLEAEQVHEVCGILDVNCFEIGQNGAKARTLYPSAFLLAHDCTPNTAHTDDPSSFEILLRTSRRVREREALTLSYAYTLQGTLKRRAFMHEGKLFWCCCRRCSDPRELGTDCSALVCATCRTGSVRAVDPLQQTGDWACDRCAHKMGATEVERQLDRINNDLEDIDVHDIPGLENFLLRYRDVLRPNHYLLLSAKYSLCQIYGRTEGYLLPQMSPEDIARKESYCREFLEIVDVLDPGLTRLRGLIMYELHAPVMVLAQSAFQSGQISRQEFQRRLKEVVKLLQVSRDILLMEPEGSTENAMGQAAADALSKMGC

SEQ ID NO: 23335 - DNA, 17308 bp, DROSOPHILA
ttcatcgactatttaacaacccgacagaaatgtgcaaaataaaagaataaataaaaataatgaaacaaaaaaacaaaacactttgtaaatgtgtgggcaaaatcgaaataaaagatttcaagactgaaagaagcaaattatttttcaaaaaaattggagttacagttttaggcggattaaatgtctggttctcaagaaaacaaatttgcatgctttatcccatgcctgtcgtccgtatcaacgctgttaccgctgaaactataataactggaaagtaaaacgaaaaaataatttccattttttattcctttactcaatacgtaatataggttaatagtaatgattgttgctgctcttgatcagctggctatcacactagcttcgttgaaaagtatgtaacttgcagaacgacgcgtttccgagcgtttaaactatatatagtcttcaccaggatcaatagccgagtcgaattttcatgtccgtctatctgtatgaactccacgatctcaggaactataaaagctagaaagttaagattgtgccatgccctttttaagttttcgtttattttttttcaaaaaattgttgaaattgttttgccaattttaatcggtacgccagaaaaatgtttaatattctcgttcatacttccactagctgagtaacaattatctgatagtcgaaaagctttactatagcgttttctcttgttttaattctgcaatggattcgtattttttcagggccatagtttaatttgatattgaaaacgccactgagtggttgatatgcatatcgatgtaaggcccgtttacactgcactaaccgcggagttatggttttacatatgtagatacctttgctattttgatgtgcatggggaacagttaagtgtagctttggtaaggagttgacccctatgtttaataatcgagtttattacatttttcgtctatcgaatgtcatgtcatctctaggcaacaacaaggtatcagattcaacgtttgagataggataatacattttcagacatttttcaatttgtgcccccgcacatgttgtttcttgcgaagtatggtgttttttcgtatgatttcatgatcacatgaaaaaacttcaaccaccaaaatcttcaaaatggaggtcgagttttctagtttaagcaacgtgctttaagagaactcacttgaattaccaactcaataagaaacctgcggctgtttaaaataacataacccttatattattacaaaccatttaaaatttgaagaactatatgtagattgctggtctgttttgcatcgactccactgagtaatatagaattttaaaattggaatagcgagacattcttttaattttaccgatatgtgtttctatgaaataagttacctaatctgtgctctgaatacttctgaattacattggcgagctttactttacgagcttcatgcccgatcttatacagagaagaatgcaagtttatactatgatggccgggggattctcaaatacatgcagtacccctttggataccatagaaccaacgctgtctgaaacttttgaaccagctagtgattactttataacaaaataatatttagagaaggcccatggtacctaaatggtacaacaatgtatgtatgtttgtacgttgtaagcaattttttgtataatttttgtaaaactgatttattatcttatatttaaaaatcgtttagaaaacaagaaataaaactcctgaaaagtgaaatctgtagagcagttgaagatctttagtcgcaatagattttcttaagtgtgccatcgcgatggctgcaccagcagcctgtacgcgtttttcggacaattacgacatcaaagaagagttgggaaagtaagtttaacaaactcaaggttaataaatttattataataacccgtctattaacatttcagaggagcattctcaattgtgaaaagatgtgtccaaaagtcaactggctttgaatttgctgcaaaaattatcaatacaaaaaaattaactgccagaggtaaggctttctgtgttctatgtaggttataaatcacatatgtacgcatttatgctatgcacacgcatgtagggaaactaagtgctgtttttaggtaattcgtcgagtacagtaaaagggtatactagatccttgatccttggaaagtatgtatattcttgatcaggatcaatagccgagtccgtctctccgtatggtcgtcgagatctcagaaactatacaagctagaaggcatacagattttagaaacaaatacgcagcgcaagtttgttgacccatgttgccacatgcgccacgccctcacttttgaaaaatgtgttgatattttttcacatttgtattggtcttgtaaatttctatcgatttgctcaaaaaaaagtttgccacgcccattctaacgccctttaacttctatcgatttgcttaaaagccgccaaccggtcacgtccacactttggaccaatttttaaacttttttcttattttattccccaatatctatcgttatcctagaaaaatgatgaaatttcgcgttcccattcacactagctgagtaactggtatctgatgccgttttttcaacggcgatatggcatatcgtaagaaatcagtagtaaacattgactgtcaaaaagttttcctgtaaaatgtactttctttttgctaagtacgcttttggaagggaccattctttttgtgtaatatcttcgtcgtccctatctatttgccacacaagtatcaaatagttctacagtaattaagttgtatttcttggtgttgtgctatttagtaattaataaatttttactgccaagacgtggccaaaataattttggaatagcagtattggcaaagtgtgtaatttacaaaaaatatattaaataacttttaagaagtttgagcatgacagctgggacaaattttgggcttagagagaaccatttgcttgctcgccaaaaacctcttattaacatatttgtacacatgcatgtatgcatataagagatgcttataatatatatatatatatattttttttttttgcttttagactttcaaaaactggaacgtgaagcaaggatctgcagaaagttacaccatcccaacataggtatgcaacgtgtatataaatataatttacttacttattctttaaagatacgtttttctgaagatgtatgatctacataaaagtagacgaacatggcctaatatcactttgaacatctactatacataatttttatatgtacattcaatcacggcttagaccccagtagtgttgatgacttgcaatgtgatcctgataaaggatggtttgacgtccacggtaacacaacgaagaaaaaaataaaatagagtttagtagatatatcaatccgcatctgcaagcaacattccattcctcgccctccctactctccaataacaaatcttccaagtaatttataattataataattataaaaacttgcagaacagcaaaaaccgaactcatgcaatagactttcctctcactaaaagcgtaacctaacaaaacagttatttacacggacagttcaaatctagaaacatcacttcctccagcgtcaccgacaaaatatataatatgttcaaaatgtattttataaacatatatttttatagcctttaaggcttataatcattgtcatccgtaaaaaaaaaacattaaatacaaatgtatacaactaataaattgttaatatgtacaatttcagtgcggctacatgacagtatacaggaggagaactatcactaccttgtttttgacctgtaagcattaacctgcatagactccttaccaaatatttaaattgcctatccccaaaagtgttttaaaaatatgagtttctaacaaatgcttgtaaatgtggcaatgactcgactattgtttattgagattcatacttcatccttttccctccgttcgttcatactataatatgaatatgaatcaaattttaaagccgcaatataatatatataatataatatgaatcaagttttagccgcaatatatttttgttatattagagatgtgttttctgctgtcgcaacttaaatataacctaaatttaaatttagagcttcaatcgcaaaatttgactatgcctacatacatttgcagtgtaaccggtggtgaactttttgaagatatcgttgcacgcgaattttattcagaagctgatgcatcacattgtattcaacaaatattggaatcggtcaatcactgccaccaaaatggtgtggtgcaccgagatctgaaaccagagaatttactattagctagtaaggctaagggtgcagcagtgaaactcgctgactttggtctagccattgaagttcaaggcgatcatcaggcttggtttggatttgccggcacaccaggatatctgtctcctgaggtattgaaaaaggagccctatgggaaatcggtagacatatgggcatgtggtaagcaattataattgttgtaacatttgcatgcacatgcatgccaaacggcagtcggttacacagttcaacaactattttatttttcctcaggagttattctttacatacttcttgtcggttatccacccttttgggatgaagatcagcaccgactgtactcgcagataaaagcgggagcttatgatgtacggaaactataataatttatgtggattcattatatttaaatataactttattttagtatccgtctccagaatgggatacggttactccagaagctaaaaatcttattaatcaaatgctaaccgttaatccaaataaacgaataactgcagctgaggctttaaaacatccgtggatttgtgtaagtgcagactaatttttctcttaggtttacataaagataatgaaaaaacattgttacagcaacgcgaacgtgtggcttccgttgtgcatcgccaagaaaccgtagactgtctcaagaaatttaatgcgcggcgcaagctaaagggagccatacttacgacaatgttggcgaccagaaatttttcgagtatgtaacttaacttaattaatcttgaccacatcaatatacttggcgtcaacacaaaaatatacaaaaagaataataaaaacgctatggccgatttcgttgacaattatatacccgttattcagcttgtaggattgatataaatatatttaacttcgtataaaaaataccctttactcgtagagtaaaaaggtagactatattgtttgaaaagtatgtaacaagcagaaagaagcgtttccgagcataaatagaataatattctcgatcaggatcaatagtagagtcgatctggaactgtccgtccgtatgaacgttgagatcttaggaactataaaaacaagaaggttgagattacgcaacctttattgatccatataaacactctaacgaccacaaaccgtacaaaactgcgacgcccaaacttttgaaaaatgtgtagatattttttcacatttgtattagtcttgtaaattttttatcgatttgcagaaaaaattgagacctcgttcatacggacatggccagatcgagtcgggtattgatcctgatcgagaatatacagttgcggtaacaaaatagcaccataagcacattttgtgtttgtcccagcgtttctccattttctgaaactttttcaaaaaaaataattgttaaaacaaaaaaaaccttcaaatttaggcggtaacaaaaatataactgttcctcgtagtttgctaaaactaaccaaaaaaataaaaaaataattcaacaaatggattatatcttaagaactatgtttaaagaatcttaatatttggttgcgggaccgcgcatcgccctggcatagagtccaccaagtcctggcctagcttttgaggaataaaaatgaccagaccccaaagatcgtcgttattattgggtttggcttcagaaacctatttttgacgtccgcccaaaggttttcgattggattcaagtcgggtgactgagcaggccagttcattccttgaatcgatttctgctttgaccactttcgagctttcttgctcgtgtgttttgagtcgttatcctgttgaaatgtccaaaccaacggcatttcatcctcggcatatggcagcatcacattttccaggatatctgtgtaaatgtgctgatccatgatgccttgaatccaatggatcggacctactacattgtatgaaaagcacgcccataccatgatgtttgatcccccatgctttaccgccttaaaggtgaagccgaggattatattcagttcgcggtggtagccgaacataagacctagagccattcccaccaaacaacacaattttggacattgagggctttcttcgccgtgtttcgttcttttcgacaaacagcactgctttgcggatcattttgcttgaacaaccgacaatgcgaccaatttcagcgtaggttttaccttcagagatcacgtttttaatcaaatttcttttttcgacggtacaatgctttccgtgacccatgactagagaatttttggtcttcgtttggaaaaaattcagttaaaacctttaatacaactccttatttcaaaatttttcgaaaaaaacccaaagcaatcactcctattattttaatcagcaaatacgtggtcagtgctatttttgttaccgcctcatttcgcgcacttttgcagcaagtgcccaccaaaaaaaagaaccgttacattgagagactaaaaatttcttgctcagagagccaacatatggtacttattattcatgcaatctgactttaaaaaatataaacatttaataattttttttaggaaatatacttttcacctgcagtagtgctattattttagcggcagctgtatacactttatatggtcggaaacgcttccttttactccacgagtaacgggtataataattaattaaaaaaaaaaacaacaaaaacaaaacatgcacgtacatattaaggtttaattaaatattataagatttaaactgattttaactaaaagtgtatttaatttacaggcagaagtatgataactaaaaaaggtgaaggatcacaggtcaaagaatcaaccgattcatctagcactactcttgaagacgatgacataaaaggtaagtaaataaaatatgtatttaacgttcatttatagtaaccaaataagtgaagacatagtagatcaggattcactatcaaccactatagctttagaacaagacatgggtttttagtgtaacgtagttacatagttttcattggaagaggctttgtgatcatattggaagtttaatattctgtaaagtggtgtccccattcattaagatatagttgctgttatatatttacattatttatttatttattttatggcaactttaggctgcatgtgatttattattattacattttaacaaatcaacttaaattgaagcattgtttacaatttcttattaaaggaatccataaatttcctcaagcttacgaaaaccaggtagtttccctaaaactagtggaaattaccagttttaacacattaattgtaaacctcatacttaaatgtatcgttaatataattttatctaatttttaaattggtgttagtattgtattttttgcacgtcttcgcttagacatacatataccaaataataaagtcaatagaaagttttgcacttttatattgtacaagaatttgaaaaatatacgatatacttctctttactttcattcccatactttcattactacttctcatcgttataattctttaatttaatgcaacaaaatgtaccttcgttttgatcttaagtgttataattcggtatacacgagttttttttcaaaaatcaaaagtgcttatatattataagatttcataagcttcggcttgagtaattggttccattcctgttttttatataacattttattatacccgttactcgtagagtaaaaaagtatactacattcgttgacaagtacgtaacacgcagaaggaagcgtttccgaccatataatgtatattattcttggtcaggatcaatagccgaatcgatttggccatgtctgtctgtccgtatggacgtcgagatctcaggaactataaaacccatgttgccacgcccactataacgctcagaaaccacacaaaactgccacgcccacattgaaacattgttggatactttttcataattttattagtcacattccatatgaccgttttaagacataatttgtatattatttgaaaagacgaaattatagttaaaaatatattgaaaatggtcttagtactggtatttttaaaacgaagaaaatatggaattaaagctaaaattacggttttagactttataaaaaactagttttatgctgaattgtcggtataaaaatattgtattacaaatattttgaagttgaagaatgtagtaaaaaacagtgtttcgagtttgtttgaattgtaaaaaagttaatccgccatatttttgccttttttaaagccaataatatgcaaacggattcctgttttacatttatttcaaccattaacattggggatttcaaatgcgtattttgaatttattataagttacaaccaaacttcattgcattaacttaataacagaaattgtatggtttaaactaaatcacaaaaacaaacacatttcattattttaacgtagaggaaatattgggacaattgcattttcaaatatgacatttttgtacatttttttcctagaagataaaaaaggaaccgttgatcgcagtactacagtcgtatcaaaagagcctgaaggtaaatgctaacatgaattttggattatttgataaaacaattttttttttgcatatttataattaaaatatacatttatttatccaattattcttagagaaagcagtacttataaatatatatatgttagtatacagtgcagggtataaaatactttataaaactaattaatcgaataataagttagtttagaatatatcgcaaattagagttacttagaaaatatcgcattgctgccagcgtgacattactttcacagtttatgcactttttgtcaattataaacagattagatcatatttaaaagattggtatctatttccatttcttatattggtttttatttcagctttgaatcttctccatttggattgagacttcaatgcaacaatatgtttaatattattaacataattttgtcgttactacaaatattattttttcaaatttaatacaagatagcagatattgaaagtaatttttataccctttactcatagagtaaaatgagtaacagccaaaggaagcgtttccgaccatataaaggaactatgaaagcaagaaggttgcgattaagaatacttgaggatctgtgccaatttgatgacccaagttgccacggccattctaacgctcacaagttgcccgaaactgacacgcccacatttttgaaaaatatttcgatttttcttcctttattatttaatcatcagcagaactagtttacagatgtgctccattagattccttgacaaacgtttccgaccatataaagtatacgtaatcagaatcaacagccaagtcgatctggccatgtccgtatgaacgcgtcgatctcagtaactataaatgctagaaggatcagactttagatatatatgacgcagagcaagtttattaacccatgttgcctcgcacactataacaccctgaatcatttttggatagtttttcataattttattagtcttgtgaatttctatcgatttgccaaacaactttttgccccgcccactctaccgctctaaaacttcccaaaatgccacgccggcatttttaagaaatgatttcatttttttgtggattaaatcagtttagaaaatttctatcgatatgcctaaaacattttgtctactgacgcctaaaaatagcccaaatatatcccatccacaccttagagtagtaaaattaattttttccctcattttcgatcaatattcccttaaaatgttgaaaattgtcggagtaacgggtatctaatagtcggggaagtcgacttaagcgtttatctcttattttctcataaaatagatattttgacatacatttattatcaaatatatatatacatatatattagatattagatattatttcaattaattttccgacctgttcctgggagatttagatcaaacgagataatatatcgtcggaaaactagtgtacacacaattagaaaacttgaccacctgtactttcttcactgcgttgcaagcttctgactaaaatcaatatatgcattggaagggtataaaaaaaagagcgctatgctccagttcctctgctaccagtcactctatctgagtacaagcgagtgaagaaaccaataaataataaatgaaaacaataaaataaaatcaaattgtttctgcgcgtgcgcgacatttttagccattgtgttagtcttcgagtagtggaaataatttctatacccatcgtaagcgaaacataaatttgtatcccaaattataaacagtaattttaataattaataaaaacaatttagaagaataaatatttatataaaaaaaatcaccattacaggcttgcaaatttctgtctatctgcaaggatatgaagagatttttattttaaagaaggcagagtgctatatatagtgggattcttcgattattagatagttactggaaggcgaacgagaaatttcatagttttttgggcatatcgatagacatttacaaaactagtagaaaagtataaaaatatgttttaatagtgtgggtgtggtagttttgggcagcgtctacgtctctggaatctgcttgcctaatctcaactttctatattttattcttcctgagatctcgaccttaacaaggatggacagacggacggacagaaagacatggcccgatcaacgtggacctgatcaaggtggtcggaaactctttcttctatgcgatgcaattttttcaacgcatctaatatactctactttagtcgacgagtaacgagtataattatttctatatgtatttctatggtatttctatagtcaaatacagtataatgtgcttaattgcctcaacacttaactgcacattacagataagtgcccaatcatacgccaaactgcgcatgaccgtttacatagtttgtttacaaaccaatttttcgaaattggtaaaacaaagcgaaatatcgggcttacaatcaaagacaaactatacataagcgaacaagttaaggataatgttaacaaagagagctttgcagttaaatacaattgtgatctttcaacaataaaccgcatcatacgtaaggggagagtgacacacaacaatcggccacaacagcggaacttaaatgcaagcgccaacggaaaggaaagcacgctttggtagagagcctgaattgttacggtaccttgacgacaaaagagataacaagtgatcttctgaatgagcacactgaagatggaaggtcagcatagcgacgatgacgatgagaatagcggtgatgaagaaccaaagctgccaactgtcaaagaaggttttgatgctatcaagactctggaacaattaggaatggtgtataattgttctgggttacttagagagcttcgaaaaattgaggaaaagatattgataataagggtaaagaacgttgttcaaaaaaatatatcagattagtattttaagtaatagggaacaataaattccatacatgaatgtatacaaaaatgtgaactatatctgaattgcgtgcatataaaagtgcatttttaagataattgcacatttttttgagttaaacatggtgaggcagttaagaacatattatactttatttaaaaaattaaagtgaattatacgctttattgcatcttgttgcatattaaatgctaaatcgggtctttttgttgaagaatgggtatatccatcaaattagactggagctatgtatgaattaaatgtttattcacaaaaacactattgccgttcgtagactttttattacatatttctaaccatttccattttatttgcatcacaaaatgtattttttatttcctattttatttaaatcatttccaatttgtataaaacattgatttttatacaaataaaaaatgtgcgttttagatataaggatactgtgtcctgcaaaaacttatcagcaaaatataggaaactcgcagtgctcttcaggtatgtatgtataccaagtgagttccaaaatcaaagaattttaagcttaacgtaacatcaaattttatgacggttgtaaaagtgtgaagttaatccataagaatttaaatatagtgttgtcctctgctaagaaagaaaaaagtatgtacatctggtttcaattcagaaagcacttgcaaaatccaagaatccgagcataaggaagagagattgatatagtcgagttccccgactattagatacccgttactcagctggaagttaaacgagaaaattaaatatttcttggaatatcggtgaaaattggggcaaaaaattattaaatgaaaaaaattaagaattgttcaaaagcgtgggcgtgacagttttgggtggtttgtggtcgttagagcgcatgtgaacatttatttggcaaaacatatcaaaccattttcaaaaatgtgggcgtagcagttttgggcgttagttagtataggcttggcagcattagaaaaaaactttggctgtaatagtttgaggcgttcatacgtgcaggcggacggacagacagtcagtttgtcagtcagacggccagtttggcctttgctaatgatcctgatcagaaatatatatatattatatggcggtaacgcttccttttgccttttacatacctttcaacgaatctcgtatatatatatatgtaaattataattatatataatacgtaatatacgtaaattataatttataatcgcttgcttgtataaataaatgcatgccaaccatagtttatccatatgcaacgcctttatatttaagatggtaaatttataatacaaactggaaaacaaactttgtgtgttttgttaccaattacgcttccttttttcctttcctttttttgtttgtgtacacctacccgggcccattttgggagtttttaccgttcaagtagaattttcctggaactgcctggcttttaattcactttaaatcttcgagtatttggacacaagggcttatatgtgtgcctactgatataccttgctggccctataaatatatttgacctgctttggtaggaatcaaaggagaatgtaggcgtggtagtgggcgtataaaaaatgttggcatatcgatagaaattggtaagacaaatgtttgggtgtgcgataatctcaactttctagcttttatagatccttagatcgaggcgttaatacagacagacaaacggacttggcaagtcgactcggctagtgactaagattatatggtcggttcgcgttcttttacctgttacgtactttttaacgaatctgttatacctttctaatcaacgagtaacgggtattaaaatttattacaagcaatgcagcaattgttttactttgtaagggaaggaaaacaataataatgaaaaaaataataataagaaatgtttataaactaaaatctattttatatattaatgttagccctattaggattgctaaaacaaaataaggataaaacatagatttacaaatgattatattattaatttataatgttaaaaaataaataaaacagttaacctttttaccaacaaagcagctagacgacaagaaataataaagataactgagcagttgattgaagcaattaacagtggcgactttgatggatacacgtaagtcaaaagtgaataatagaatgtacacacataaataaagtaaaggatcgataattaaaatgtaaatacttatttacaataaaaagttacttataaaaaaaaaaaagttaaatcaaaactccccaaaggtacaaataaaaatttctgtttcaaaaagatatctagaaagtaaactactaaaactaaactacgtcattcaaatttattacatatttaatggtttcccagtcatttcatatggacttatattttttattacatacaatgtttttatacccttgcagagggtatattgatttcgttcagaagtttaaaacgaagtaaaaaagtcatttggtgaaagtgaatatatactttttcagtattaacagtctgacatgatcgactcagctaatgatgcaataaacgcttccttctaatcgttgcacactttctgaaaaatatatatactttaaatatacgagtaacgattactaatatgaatatgagtaaattattaaaggaatcccttggtattttgtactcagataaatataaattgaactactaatagtaccggaacttaatactcaagtaaattataaattaatctagactttttgcataacttcttagcaaaatatgtgatccgcatctaactgcctttgagccggaagcactgggtaaccttgtagaaggaattgattttcataaattttattttgaaaatggtaagttctaaaaggcatttttcgcataatcttggctattcaaatctcattccagttcttggtaaaaactgcaaagctataaacacaaccattttaaatcctcatgtgcacttacttggtgaagaagccgcttgcattgcctatgtgagacttacgcagtacattgataagtaagttcctgaactatagaaacaatatccataaaaacttatttattacgcaggcaaggacatgcacatacccatcagtccgaggagacgcgagtctggcacaaacgcgataacaaatggcagaatgttcattttcatcgaagtgcatctgccaaaataagcggagcaactacattcgattttataccccaaaaatagtgggcattaatcaatggaatataaactgtcattatgcacatgttaatgaaagtgctacatttatgtttagagaacgcaatagtttattgcgaataaagatgctagtgcaaattttattaatttatttaccttttgaaataaaactatctaaagcatatatcacattttagatatctcattgaaccacatttacttgagaaattaaagtagcaaacacaaatataaagatcaatcacaaatatttgttgtaagtgtcgtggtaccaattgtaagcttaaacgttctcaacggaagaatcaagtttattatttaactattattattattattaaaataaaattgacaactttgtatctattggaacatctaaaataaattccaataactttattgacgtctcaaaacaattgcaaacaatttagaacccttgagttatctactaggatacgaatatcatttggtttgcaaagtccgcttattctcgttcttaaaataaatacacacatataaagtttaataaaacgtgtgagtacatgcgtttacaaattactgaagttagcactatcaatatatgtaactgtaaagcattaggttattacaatgaaacatataccatttggaaaaattaagtacgtttaaaagaaaaaaggaacgaaaattagctaactgaaatataaatctaagtcccaataattgaaattatgcgactacttcgaattacttatatttacataaatatacttaggcattttatccaagttaaaaaatactttctgtatttcaccgtacatatttctttctgatgttgaacaaactttttatattttatgttttaatagaaatataactttgttcttattatttgaaaagatgtccaaggcttaaaaagtaatcctttttttgttcatagaattttaaattcccttttgttctagaaattgattgcttgtcttaaaaaaatgcatgaggggagccaaagaattatgtttaattagtatcatagttgaaaatataaattcaatccaatatccatgtaccaaaagtaattccaatcaatccattgttaagctaacagacgtaacataatcaacggagttggtatcagtatattaacttgatcttttccaatagatgccgaatagctttttgattttttacaactataacaatgctaaccgtgttgacaccgattaaaaatgtaaccgataaaaaattttaaatatcttcgaagaatttttaaagataataataaaaagaattcttgggacgctaatgcacaaacagcaggaaaaatacctatatctgtcaatagaaacattaagtataattacaaaggttattgtgtttcgctttatattgtgtttacaccttatgggcaaatagctaatttaaacaatgcgatatgataaacataacaaaaattatatttcttttttactaaatgaataattttgtggtatgagcataactgcgaaaataacttgtaacttaacttaatcattgtgaaatgattatacattttacctgatagtacatgttaaaaaaaaacttggacttaaacacatttaaaaagtttgccagatatattttaaagtaaaaaagattatactacggtctacaataagttgaactttagttgcatcccacggttttccataattactcatcaattcctttaccaatgcttgcagagtacttgattctttttgtctaatactattggtctatatacagttgcttaaattcaatttttaggacctaaatgtcttcacaaatcaattttaataataattacacgataacaattatacgaacaagctttggatacattatattgatcgaaaagctttcgctcctaaggtaaaagcctataaaataataaccgaaaataatttatgtttctcaaagtatatccaaataattataataaatttttttgttagtggatgtcctttatattttgagggaattcaaagcataatgcaattttaagcaaagtccattacacaaataattccaaatactaaaaaaaattactctatatatatgatttattaaatacaaataaatacttaaaatgaaaatcaattcccctgatcgcgtgcattttttaattctataggcaacgtctgcaatcaactggctccaactccaatcaactacttttatgtacaaaagttgtttagattacgagtcttgtttttttgaagacagacagtttcaaaactggatgttccggatagttttatagtgca

SEQ ID NO: 23336 - DNA, 2899 bp, DROSOPHILA
acgtttgagataggataatacattttcagacatttttcaatttgtgcccccgcacatgttgtttcttgcgaaaaaacaagaaataaaactcctgaaaagtgaaatctgtagagcagttgaagatctttagtcgcaatagattttcttaagtgtgccatcgcgatggctgcaccagcagcctgtacgcgtttttcggacaattacgacatcaaagaagagttgggaaaaggagcattctcaattgtgaaaagatgtgtccaaaagtcaactggctttgaatttgctgcaaaaattatcaatacaaaaaaattaactgccagagactttcaaaaactggaacgtgaagcaaggatctgcagaaagttacaccatcccaacatagtgcggctacatgacagtatacaggaggagaactatcactaccttgtttttgaccttgtaaccggtggtgaactttttgaagatatcgttgcacgcgaattttattcagaagctgatgcatcacattgtattcaacaaatattggaatcggtcaatcactgccaccaaaatggtgtggtgcaccgagatctgaaaccagagaatttactattagctagtaaggctaagggtgcagcagtgaaactcgctgactttggtctagccattgaagttcaaggcgatcatcaggcttggtttggatttgccggcacaccaggatatctgtctcctgaggtattgaaaaaggagccctatgggaaatcggtagacatatgggcatgtggagttattctttacatacttcttgtcggttatccacccttttgggatgaagatcagcaccgactgtactcgcagataaaagcgggagcttatgattatccgtctccagaatgggatacggttactccagaagctaaaaatcttattaatcaaatgctaaccgttaatccaaataaacgaataactgcagctgaggctttaaaacatccgtggatttgtcaacgcgaacgtgtggcttccgttgtgcatcgccaagaaaccgtagactgtctcaagaaatttaatgcgcggcgcaagctaaagggagccatacttacgacaatgttggcgaccagaaatttttcgaaatttacaggcagaagtatgataactaaaaaaggtgaaggatcacaggtcaaagaatcaaccgattcatctagcactactcttgaagacgatgacataaaagcagctagacgacaagaaataataaagataactgagcagttgattgaagcaattaacagtggcgactttgatggatacaccaaaatatgtgatccgcatctaactgcctttgagccggaagcactgggtaaccttgtagaaggaattgattttcataaattttattttgaaaatgttcttggtaaaaactgcaaagctataaacacaaccattttaaatcctcatgtgcacttacttggtgaagaagccgcttgcattgcctatgtgagacttacgcagtacattgataagcaaggacatgcacatacccatcagtccgaggagacgcgagtctggcacaaacgcgataacaaatggcagaatgttcattttcatcgaagtgcatctgccaaaataagcggagcaactacattcgattttataccccaaaaatagtgggcattaatcaatggaatataaactgtcattatgcacatgttaatgaaagtgctacatttatgtttagagaacgcaatagtttattgcgaataaagatgctagtgcaaattttattaatttatttaccttttgaaataaaactatctaaagcatatatcacattttagatatctcattgaaccacatttacttgagaaattaaagtagcaaacacaaatataaagatcaatcacaaatatttgttgtaagtgtcgtggtaccaattgtaagcttaaacgttctcaacggaagaatcaagtttattatttaactattattattattattaaaataaaattgacaactttgtatctattggaacatctaaaataaattccaataactttattgacgtctcaaaacaattgcaaacaatttagaacccttgagttatctactaggatacgaatatcatttggtttgcaaagtccgcttattctcgttcttaaaataaatacacacatataaagtttaataaaacgtgtgagtacatgcgtttacaaattactgaagttagcactatcaatatatgtaactgtaaagcattaggttattacaatgaaacatataccatttggaaaaattaagtacgtttaaaagaaaaaaggaacgaaaattagctaactgaaatataaatctaagtcccaataattgaaattatgcgactacttcgaattacttatatttacataaatatacttaggcattttatccaagttaaaaaatactttctgtatttcaccgtacatatttctttctgatgttgaacaaactttttatattttatgttttaatagaaatataactttgttcttattatttgaaaagatgtccaaggcttaaaaagtaatcctttttttgttcatagaattttaaattcccttttgttctagaaattgattgcttgtcttaaaaaaatgcatgaggggagccaaagaattatgtttaattagtatcatagttgaaaatataaattcaatccaatatccatgtaccaaaagtaattccaatcaatccattgttaagctaacagacgtaacataatcaacggagttggtatcagtatattaacttgatcttttccaatagatgccgaatagctttttgattttttacaactataacaatgctaaccgtgttgacaccgattaaaaatgtaaccgataaaaaattttaaatatcttcgaagaatttttaaagataataataaaaa

SEQ ID NO: 23337 - protein, 493 aa, DROSOPHILA
MAAPAACTRFSDNYDIKEELGKGAFSIVKRCVQKSTGFEFAAKIINTKKLTARDFQKLEREARICRKLHHPNIVRLHDSIQEENYHYLVFDLVTGGELFEDIVAREFYSEADASHCIQQILESVNHCHQNGVVHRDLKPENLLLASKAKGAAVKLADFGLAIEVQGDHQAWFGFAGTPGYLSPEVLKKEPYGKSVDIWACGVILYILLVGYPPFWDEDQHRLYSQIKAGAYDYPSPEWDTVTPEAKNLINQMLTVNPNKRITAAEALKHPWICQRERVASVVHRQETVDCLKKFNARRKLKGAILTTMLATRNFSKFTGRSMITKKGEGSQVKESTDSSSTTLEDDDIKAARRQEIIKITEQLIEAINSGDFDGYTKICDPHLTAFEPEALGNLVEGIDFHKFYFENVLGKNCKAINTTILNPHVHLLGEEAACIAYVRLTQYIDKQGHAHTHQSEETRVWHKRDNKWQNVHFHRSASAKISGATTFDFIPQK

SEQ ID NO: 23338 - DNA, 3154 bp, DROSOPHILA
ttttgtgcgttgcgttgcgattgttggtgttgctgccgttgttgttgctgctgctgcagagaagagagaatttgttgctaactgagtgctgcattgtattatttatcttatgccacaccaaccacaacacattcgcacacacacatacacacacactaaggcacaaacacctcgacgacgccaaagaaaattttctttcgtgtgacgccactcttttcctttctctgcctttcacaatttaaacttgagcactggctttgggacacacggctaacgggaaaattcactaatgtaacccctgtaattgttgttccgaaaattcaaggcatatagaaaacaacaacaacaacaagagcaggagtagcaggatattcggttgcgggcgaatgggtaacgggggtggcgaaatgcgaatcaaggcgcaaagcggaattcaccgttagcctcgaacgtgggagcgcgcacagcaacaactgagcgacaaaaacggaaacaaaggagccagcagctttgtaactgacggccaggattgccaccccgcgcaatgaactaaggattgaaatcatatgtgttgcatgaatccccaaaaattaatttcgtttctagttagttttattagtatactctgatttcatatgtttaattagcattacttaatatgcttatatggtatacctaaaaaaatatgtcgactaagaaactctttattcgcaacatttggcactgaagcctctaagtaaaccaattccttagaagcctggcaacgccaacagctgatggggatttaccaaacggaatcaagagagatgatcaaacagcgcatgcgccaaaaaggcgcactttcaaaataccaaatttatgaatacaaatcttaaaataacaaaagtaattctttaaagtactatattcattgtaaaaaaaagtgtacatttgtattaaatagagtatatatataaaataaggagttaaaacctattcttaagatctgtgaaacgttaatctacttcgctttgaaaaacgatgcgatgcttttagtgcccttggctcctttggccagggccttctccttggcggtcagcgagcgctccttcagaggcgccgctgtgggcgatgtgatggtggcattgggatcgccatcgctgtccactagaccgctggactttagcttggcagcagcatcgctctcatttagcttgatcttcttggagtcgctgccctcgttcttgcccgccaccgacttgcgcttctgagaagctgctttctcctcaacaatcgcctgaatctcgctaggaatgtgcaggtaactggtgagcaagccgtgcagatccgcatccaaataccgtcccacataatcgcaagccatgcgcgtgtagtccatttcgttgctaacgttctcagctaccagtttctcgcttcgcacgaaattctgcgactgcgcactgtggccgcagtggacttgcttctccttcaggatcttcgccacctggcgcgtcttcagagccaaccaagccaatgtgcgctcttggttgtacttgtagaacttctgttcgccagagctcttcacatctgccacgcatttaaggttccctgggtcgaggatctcgttaagcagacgactggtgctggcctcctccacggcaatgttgtccagcgatattgctcctgattgtggttaaagattttcaagaatacaatagtatagtataccatcgaaagcgaatgataatatcttactttgcgcacaatgttttcggaggtgatgaagagccaggaacgtgggatccacgggcgcggtcatgtagattctgccgttggagcagacctcgctgtccacgaaccaactgcgtcggggttccgtgaacgccaccagctccatcattctgccatcgggatgggttatgaacagtgcctccttgccatgtccgggatggaaaaacatctccagccgaaggtgtccgtcgtccgcatctttgggcagcagttcctccgacatgaagaacaccttcttcagtgccgaggccttgcacatcttggcagatccctccgcatccggatcagcttttggttttctcgctcgcgtttcctttttgcccattttctcgaataacttgccaagcgtgaagcaaaagtcaataactgtggaccgaaccaaaacaaacgatttgccgcctttttggttattgatagaagtctatcgattaattttggtattttatatagtctgctaattttaacttgttcctataaactattttatctattttatgccaaatagaagagcttaaaaattaaataatctctgccactaacgtccgcatcttaatattgcaactagtctaaaatgggtattaactttgattgagaagcgcggtcacattgcttgaacagatgttcacagtgatgaaattgtttacaacagtatattgtttttaaacaacaaaatgagcgtagatatagccagcacgatcaagttccgggatatttgcagcctgttcgagaagattaaggccacgcaaaaggtggctaacaaggaggaggtcctcaagagctactacgagtccttctgtcgccaccgcgaatcctttcgccggcaaaccggattaaacaacgaccagccggaggacggtgccagtagcttctattccgtgctgcgactgctgcttccgggtgcggacactggtcgggatacctatggattgcagatcaccgcgctgggcaggctctacatcagggtgctccagctacccacggactgtgagtgcagaaacgtattggcaatggcatttaggcttatttagaatctctttgttgtctctactagccagcgatgccatcaggctgcagcaccgcaacggaaacatgtaccgggactacggtgatgttgtttattccgtgcttaagccaaggtgctttaatccgcccagcaatttgagactgaaagaaatccatcagatgctggacaccattgccaacgaggacacagaaggtgggcgcttttaaactgatctgaacgactgaacgtcttaatgagaccgctctttgcagttaagcagcagcaactcatccggtttacggagcaggcctcgcctgaggaacagaagtggctaattcggttgctgcttaagagcctcgggctggggatcggtgagcaaaa

SEQ ID NO: 23339 - DNA, 1082 bp, DROSOPHILA
ttttggttcggtccacagttattgacttttgcttcacgcttggcaagttattcgagaaaatgggcaaaaaggaaacgcgagcgagaaaaccaaaagctgatccggatgcggagggatctgccaagatgtgcaaggcctcggcactgaagaaggtgttcttcatgtcggaggaactgctgcccaaagatgcggacgacggacaccttcggctggagatgtttttccatcccggacatggcaaggaggcactgttcataacccatcccgatggcagaatgatggagctggtggcgttcacggaaccccgacgcagttggttcgtggacagcgaggtctgctccaacggcagaatctacatgaccgcgcccgtggatcccacgttcctggctcttcatcacctccgaaaacattgtgcgcaaagagcaatatcgctggacaacattgccgtggaggaggccagcaccagtcgtctgcttaacgagatcctcgacccagggaaccttaaatgcgtggcagatgtgaagagctctggcgaacagaagttctacaagtacaaccaagagcgcacattggcttggttggctctgaagacgcgccaggtggcgaagatcctgaaggagaagcaagtccactgcggccacagtgcgcagtcgcagaatttcgtgcgaagcgagaaactggtagctgagaacgttagcaacgaaatggactacacgcgcatggcttgcgattatgtgggacggtatttggatgcggatctgcacggcttgctcaccagttacctgcacattcctagcgagattcaggcgattgttgaggagaaagcagcttctcagaagcgcaagtcggtggcgggcaagaacgagggcagcgactccaagaagatcaagctaaatgagagcgatgctgctgccaagctaaagtccagcggtctagtggacagcgatggcgatcccaatgccaccatcacatcgcccacagcggcgcctctgaaggagcgctcgctgaccgccaaggagaaggccctggccaaaggagccaagggcactaaaagcatcgcatcgtttttcaaagcgaagtag

SEQ ID NO: 23340 - protein, 340 aa, DROSOPHILA
MGKKETRARKPKADPDAEGSAKMCKASALKKVFFMSEELLPKDADDGHLRLEMFFHPGHGKEALFITHPDGRMMELVAFTEPRRSWFVDSEVCSNGRIYMTAPVDPTFLALHHLRKHCAQRAISLDNIAVEEASTSRLLNEILDPGNLKCVADVKSSGEQKFYKYNQERTLAWLALKTRQVAKILKEKQVHCGHSAQSQNFVRSEKLVAENVSNEMDYTRMACDYVGRYLDADLHGLLTSYLHIPSEIQAIVEEKAASQKRKSVAGKNEGSDSKKIKLNESDAAAKLKSSGLVDSDGDPNATITSPTAAPLKERSLTAKEKALAKGAKGTKSIASFFKAK

SEQ ID NO: 23341 - DNA, 3568 bp, DROSOPHILA
ggatctgccggagcagcgctggtggcagccgctctttgtgggcaacacgcgacccagtccgcgatacggacaaatacaggtggagttgggaaggaaccatctgctgatcgtgggaggatgtggcggtgccaatcgcgtgtacactgatgcctggctgctggacatgaccagggatgtatggagctggaagtctattgctgtgcgcaacaagcgctttggagccgtccacatgtggtgcaatcccggttgcaaggtcaacaactacctggtggtcgtgggcccatcgcccaacatgccgcaggacttccaaatgatgaagcaaagcagagtccccgtcgttggaggccgtggacctccgccgccgaatcctcttcaaaatgtacctccaaggggataccggataccagttccggatcgtcgactaggtggaggtggattgggtggacctggccaaaatcgcggaggaaacatccgtcctggagtgggaggtgcagcagctgcactgggtcctcaagaacagtatttggctaaccggagagcaattcttaatcaacacatgcagcaagcgcagcaattcctgcacaacagcaatgtgaacaataataacaataattaccaaccgcgctcgggaagattgagtgatctgcatgccccgccagctgcggctgcagctgcttctcctccatccccgccagtgcgaccaaatgctccgccatctcccgccgacggcgatgtggatgccgcacagcgtttgcaaagaaatttagctctaaggtgtcgtgataatgaacctaggctaccaaaacgtttcgatgagctctatgaggtgagtgattttaagtgcgcctatcatggacctcttatttatttcctgtttcaaaaggatccctttcgaatggccgccttcaatgtgcccacacgatcgcggagtgcttcgcgggatcacaacgagcgaatacgacgcatggaggagaagatgaacgccattcgcaattcgcgacgcagcgcaccggcggccgcccaagtggaaccacaaccgctgcgcgcaccctcgcccaaacgattgcgctgcaatgtgcaatccctgttcgtgtgtgacatctccggcattttggacagcagcgaacccgccctcgagtgggtggaatacaaaaacttcggagtgcttaagggtgctccggatcggctaatcctctcgagcctcattgctggcaacggcgagctcatcctcttcgggggcgtgcacaaggagacactaacggacatcacacatcatgtgtccaattccatacacttcctgagtgtgccacgtgatattatctaagctctgaaccgacgcccgtcctagtccaacgttacgcggatagcactttgttgctggtaaccccacttcccaaatccttcaaagttcggcgtaagaggttcatttaggcattaaattgagtgtaatgaagaatatgttttatgattataaacgattatttactagtggatctccaacgattggctttaattattgctttccagcacttttattaggtcgtaagcatgttggaaacgcatatcacagaagtcatcttggcatgctacacactgctccaggagcagctgcagcttttcgttgtccaaattcttaagcaagtaatcccttagcaaaaggcacgcctggtagatattggcatccagctgatggccggagcagaatgcagagacatcaaatgtgaatccctcgccggtcagcggctcgtacttttcggcatgtcctgctgcgaacgaagcgtccaccaggaccacggagtccaaatcaatgaggtacaccttcttggtgtcttcgtcgtaagccaaattatcggccgtgaaatcggttaagataatgcgaaagtccgcgaatccaaaagtcagcttgagggagagctggatcaactggagagccagctccacacgcaaaccttcttcagcatcgacgtaatgagctaaagtacgtcctgcattggattgaaaatgtgttagtccgcaggaggcgtaggtggtaggcactggaaatccctgcagatgcagttcctgcataagcagcggactaacgtagtacatcatgtagaaccacacactggcggcagcatgtccacgctgctccaagtacgaaacaaagcggggttcccttgccagagttcggcagagatgaaaaccaccaggtcgctcctctagttcatagaaatcttttttcacattttttatctgattactctgtgcatcaatgatttttcttttggccaccagctggacttcctgatcccggtcttttagccttagaaagtaaatcgctcggcgatcaacgagcaacgaaatggctttcacaagtctactccaatccgagggctctgcaattttctggaagatttccccgcacggctcactctgtccaacgaaacagtctggacacaagcgcagatccttctcgaaaagttcctggaacacctctcgctgcggcttcacctgcagctcctgcagcagggccaaaatgagcaccactttcagttggccgtgtgacaggtgcatcacagggagctgcaaagagacggaagagaaacgaatgaaggggcttgccaaacaacagaagaagccacacgtgtgtgtatccaaagaaatgtgcgtgagggcccagcctccagtccactggccacattacctgtttggcagctacacgccaaaagtgaacctaagcaccgagccaaagaggcagctggttatgaccgcttaacgaagcgtctataccctttcgctacatttagtttaatttgctattaagctgtatgtattttaagtatggaatttccctttttactagttcctaaaagcaataccaaatgcttccatttattctattatattttttaagcacgtctaagttatagatctttaatttagtcatgatgacagctgattagattatgataccactatcgcttttatcacaccagcttctgggctcatgccgaaatggttatcccacaaggtccgaagagtatggcgtcggggggacggacttacagaaataactttggttctgaagaagagccaattcaatgggttcaaggttggccatcacgctgggagcaagaagcgaatcagacgcttaatttgtaatctctgcagaggtgggagagtagccattatggcgataccagtcgcatcctccaagacgcactccatctcgccttgccctgtacttcaaaattaagtgtgcccagaatggacttgctctgtggctcattctttggcgacgacgaggagcataatgactcggctaaagattcagcaccattgcccacgacttcgccagtgcctcagactatcaaaagaaaatcgcgtgtaagatttagccgcagcaccatacgaaaactccaactcaacgaactggaacagttgggctccacaaacgcctttttcaacttcctgctcgcccagcgaattcgggaattgggcttggtcggtctcaactacctggatgtgttcaagtcccagcgactaatttcggggaaacgcatctggaactgcatgtatgagttgg

SEQ ID NO: 23342 - DNA, 1568 bp, DROSOPHILA
cagctccctgtgatgcacctgtcacacggccaactgaaagtggtgctcattttggccctgctgcaggagctgcaggtgaagccgcagcgagaggtgttccaggaacttttcgagaaggatctgcgcttgtgtccagactgtttcgttggacagagtgagccgtgcggggaaatcttccagaaaattgcagagccctcggattggagtagacttgtgaaagccatttcgttgctcgttgatcgccgagcgatttactttctaaggctaaaagaccgggatcaggaagtccagctggtggccaaaagaaaaatcattgatgcacagagtaatcagataaaaaatgtgaaaaaagatttctatgaactagaggagcgacctggtggttttcatctctgccgaactctggcaagggaaccccgctttgtttcgtacttggagcagcgtggacatgctgccgccagtgtgtggttctacatgatgtactacgttagtccgctgcttatgcaggaactgcatctgcagggatttccagtgcctaccacctacgcctcctgcggactaacacattttcaatccaatgcaggacgtactttagctcattacgtcgatgctgaagaaggtttgcgtgtggagctggctctccagttgatccagctctccctcaagctgacttttggattcgcggactttcgcattatcttaaccgatttcacggccgataatttggcttacgacgaagacaccaagaaggtgtacctcattgatttggactccgtggtcctggtggacgcttcgttcgcagcaggacatgccgaaaagtacgagccgctgaccggcgagggattcacatttgatgtctctgcattctgctccggccatcagctggatgccaatatctaccaggcgtgccttttgctaagggattacttgcttaagaatttggacaacgaaaagctgcagctgctcctggagcagtgtgtagcatgccaagatgacttctgtgatatgcgtttccaacatgcttacgacctaataaaagtgctggaaagcaataattaaagccaatcgttggagatccactagtaaataatcgtttataatcataaaacatattcttcattacactcaatttaatgcctaaatgaacctcttacgccgaactttgaaggatttgggaagtggggttaccagcaacaaagtgctatccgcgtaacgttggactaggacgggcgtcggttcagagcttagataatatcacgtggcacactcaggaagtgtatggaattggacacatgatgtgtgatgtccgttagtgtctccttgtgcacgcccccgaagaggatgagctcgccgttgccagcaatgaggctcgagaggattagccgatccggagcacccttaagcactccgaagtttttgtattccacccactcgagggcgggttcgctgctgtccaaaatgccggagatgtcacacacgaacagggattgcacattgcagcgcaatcgtttgggcgagggtgcgcgcagcggttgtggttccacttgggcggccgccggtgcgctgcg

SEQ ID NO: 23343 - protein, 348 aa, DROSOPHILA
MHLSHGQLKVVLILALLQELQVKPQREVFQELFEKDLRLCPDCFVGQSEPCGEIFQKIAEPSDWSRLVKAISLLVDRRAIYFLRLKDRDQEVQLVAKRKIIDAQSNQIKNVKKDFYELEERPGGFHLCRTLAREPRFVSYLEQRGHAAASVWFYMMYYVSPLLMQELHLQGFPVPTTYASCGLTHFQSNAGRTLAHYVDAEEGLRVELALQLIQLSLKLTFGFADFRIILTDFTADNLAYDEDTKKVYLIDLDSVVLVDASFAAGHAEKYEPLTGEGFTFDVSAFCSGHQLDANIYQACLLLRDYLLKNLDNEKLQLLLEQCVACQDDFCDMRFQHAYDLIKVLESNN

SEQ ID NO: 23344 - DNA, 13739 bp, DROSOPHILA
cagaccctacactctatccgccgagtataagactcgtaatttaaagtgcgatcaattgattgtacttcgcaggccagaaacacgcccaccacatgaataatgggtaaatgggaaaattgaattacaccagcaaacacaaacaagccatgaaaagaaagtgaactttatcagtaattacaaaaagtcacgttcgtggctcaatgcggcttactgaattttttaggaactcgtgggtggacagagtaaatattaatgccaattgttatgattccaattccaacacgaagtgtagggaattgcccagcgttatgataaacaagatataaaaaaggttaagcctttcagcctgctacatacatgtatacccctcgatctgttaatcagatttccacctgtccttgactttaagcatgattttccgacgtgttcgtgattatttttcttgcccaccataacaagcagagataacaaagagcgtaattaaatgccagctcaaaagtgtttatataaataaaagaaaatctctttatcacgtgcccaattaactccgattagatacgaataaaagcaaaggcagccgaggtaattaaatgcctgaaaaatagcaaagcgaagtgttgtaaaaaataaaagcaaagccaaacaaaacaatatataaaagcccgataaaagctgaaacaaaatatctgcctaccacaagcggaagtatggcgaatcaacaaatcagaaaacgtacaaaaggcaaaacgcaacaaaaaccatgataataattttttacgttatgatgtaagcaatgaaagtgcggtaagagaaagacttacaaggaaaacatttacaacaaaacgccaatttagggcaggaaaatattgtatatgacactaataggagggccaatcaacttcgaaatgcgattgtaatactaactaaattgggcataatgccgggttacgttactttgatatgggggtgtgctataagctatcctagtttatgttccaacctaataaaccctcttatggtatatcttcttaagctgaatagacatagaatagacacgactcacctgctcgtggacaatctcctggaggtcaaggccgtgggtggcattgggctcactgcccacggtccacatgcgcagctggtggggcgcgcccttgaagagtccttgggtggcgcggagggagaggttcaggtgctggccgaaggcgctgaacgagacgttgtgcgacttgatggcactcacttccggggcgaacaggtggttgccgcccgaggcgagagcctcgtgcttcagttcgctgtagtaggcgttcttgctgagatcctttttcacgtggtggggcggcagggcggcgttgacctttggtcccttgccgatgctccgccgccggcggttgtggttgttctcgtggtgctggagctgcacgagctcatagtggggcactgcgtcgtgggtgtccacgtggaagactgactgcagctgctccggcgtcatttgtttgtgcaactggaaagcgacaaaggcgagacagaaaacgaattcaggttagttgcccggggcaatgacaacaaattgtagcaattgtcagatggaaatggtataggggataggggataattgaaaaattatcaataattcaatgcaataatcgagtgtttgtttgccaagcctcgttggtggcgctcgctctctcttggttcgtgtctgctgtttgcattggaccctcaagagctatctggagattatcgactaagccagagccaaagtcacaatccgaatccgaatccgaatcggctgggttttgagtatcttcgccaactgggtcagggtcaatgtggcgtttgatagatttatttattgtgagcagacacacacatgtatttaagtatttccgaatcaaacgaggcgaatcgaacaagaagcaatgaaataaatatcgaatagcaatcttatccgagttgcgtgtaaactttttctttataagcgcattgtgtgcttggccataattgcgaatttcaattaaaatcaaattaatttcgtattgatattaatgggcttttaatctgcgactgtggtcagcgcttattcaatcctctattcagtttgtttagccccgaagaatggtgcggaatttccaaaacgagtatatttctgtaaatgaagtagttaaaattcattcataagctactttgctttgagtgcccaaagtgccattctaaatgacattctacatgactcaatctttggattttttccgtacatcaaatgcatttccgttttatttatctgccagatctgcatctcacttgcaatccaatcagcaaagcagcagcggccacaaaaacaagatctgttacagggtcaaagctggagtagaatttccttaaacaacgtctaagatgcaagcacaaaaacaaaagactcaggcagcgaacttgctggcggcatgctggccggctagtgggcctgcaatttaggcaaatttcttgcatttattttgcccaaaatggcctaaagtgagtcagaaatggactgactgcaaatgacgacagcgccggacaagaaacggtcgaaaagaagccgaaatcagaaaagcagaccaaagcgaaggcgaacaagatggccagttgtcttggccaaagtaccagactcacatttacagttaagatcgccgatgagcggtgatgacactggcgggcatagccgtaaggtgccagcatgataattctattataattgaaatcccgcggaaagttagttggcaggtgaacaaacggcagaagaaaaaaccagactcttggcgctcagacgctcgtctcgtctcgcctcgactcggcacaatgccaaagagtttttactttcatttgaaacgtgttttcgaccacagccaacaggagccagctgtttggggtcgcattgagcaacttttgccgtcatcgcaccgtcgtcgtcgccccattgaaagtgaaactgaggcttgagaaaggaaaacgcagacgcaggcagctactctactcttttggtgcgtcgtcgagttggccactcgagtgcaattggagttgagtgcaatcgccggctctagggctctcgactcgccgcatttggaaagtttctgcacctgcagcactcgcaattattctttggcctctccgtatgcaaatctcccagttaaacgaccacacccagacagcaatcaacacttagctccgcggcccttgtggccaattaatcgcaattaaaaacaaatgagcgagaaaaaactacgatcggcaattacgaattatgcaaaaaagacggcatccaatgaacaagatcaccagcggcgattaaagaaccagggttgccaaaggcccacagccggaaaatccgtttagagtccccaaatggcccaaacattatgtaaatcattgataggcatcacaaattacagctcaaaaggtgttgaaagccagcggtaagttttccacaaaattcggcagacaattgctagcacttaattacagataatcagctggccagctgcgagaataattacgtctttaattttaagaagctattattcgtgtctataatatttaggtaatccttctactcttgactttaagtgttattttagaaggcgcaaattatttttggtaatcaattattatttatatcattttatataattttgtctgtcttccttattgaagtgacacccattctccatattgctcaaatggttctctgcattcactatcatattttcccacaaattgcagttcattagaaactcgagaaccaaaatcaactgcgtctagatatccgtcgaagcaaatccagccctagctcgagttgtcattcgattcgatcgccattaagctgctgtttacccagctatttgtccaagctaaagtttgattttattttcggttttcgccgagtgcaatgacggatgttgtgaaatttgcgctgtttgtaatttgtatggctagctgtgttgctgctgcttgatttggatttggattttactggggctgctggtgctgctggtgctgctgcgcgggcaattactgaaattgtgcgagattactcatacgcccggtgtgcgcgctacgctataaccggcattgcgacgactttagcttcgatggcggcggcggcgaccaagtgcaatcagagtcaagtcaaagtaaaaggtgtagccgccatattaacgcaaaaagtgtgcttcaaattggctctggttgaggccaatacactgtttatggccaacactgtttgttgtgcaattgttttccccgcgtttttatcagccggtcaaagtcaacagcggcagacgctcgaaagagtgtcaatcgacctttcgcgcagtcagtcaaatacaaagaaatgattttcaagatttgtttggcacttcgtttgggcttttgcaaatggatggatggcagcggcagccagcaaattgcaaactcgtcggcgttcgcctcttttcaatccatttccttggatatttgggtgtgttgaccttgtcgcctcggctgacaggcggcggaaattagcaaccgcttctgtcggcgttaaattttctggttttaacttctctcgcttttggaaattttgtatttatgccagcgattaacaaagtgtgaaaagttcagggtgttacgaaacctccggaatgagctgcgtctaatcggaatggcaaatttgagtgatttttttttgtctggcaattgggtgaatatggcggatcgaatgctaaaaatattcacttcaatggcaatttcgtttaaagtaagactaaagtggaattgatttaatacacccattttatttatcatcttttaaagaatctctgcaatatctacctttatcgcttggattatcaattaagatctttgcatttttgtacgctgtctatgcgtttccattgcgattgcataatctcttaaacaaccgacaattactcattcactgacaatcgaccgattttcctgtagctccacgcacacaagtaactatatatataaaaacagcggggagaacgtgacccgagaacccgaactcaaaaatgattaaatagaaataaagcaaatctcaaaccgtgacacagagcaggcagctgtagacaaaaagcgaaagagccgatcagtagctaaacaaaaaataaataaataaataacaaaatacgagtccaggaaacaacaacaaatcgtgcggctaaccattctggattgcacaattaaaggcttaatttatttggccggcaattgataggccgcaaacatttagatatctcatattcctttgcatttctgacagcacataaagcaaaaatgcaaacctacaaaactgccaactgccgactgctgactcactcgaatccgaatcgatattctggtggtgttttgcatgaaccaacctcagttcgttttttacatcactcttttcatgctcggctgggatttgaagggcctcgtcaaagttgttgttacttgggctgttttagtcgcttttgttgttgctggtgtagcgtgtcaactttaattgcagtggaaaacggagacgaagtcgtttatggggcacttttttatgccagcactttggcaaggctagggggtcgatgtctccgccaacacgaacttgctccaaaatcggaacccaaaatatcatggtctatatttaagtgtttccaaaaaaaaaaagtcaagggaacgtgaaaataaaatgtgggttctcgtgctaaatttgaatatttcattgtaataggttacgaaaacggaaagttactactattattattaatattttttattctttgaatttcagcagttttgaatacagccaagagacaattttagcccaaacgttccttttacaaatcaccctattccttttgaatttgctcaatgaaatgatcctggaatcttgggatcttctccacgtaaccgctgaactgcgtctccggctctcggctgctgaggaagacgagtttctgggcacagagcttgtagagccaagggatgtccaagtagttgcagccctccatgattttgcaaatgctatcgatttccacgcgcaggaactccttgtcccaatcggagatctgcagctcaatctcctcggccggaagaggatctttgctgtccacccaggcgggctcttcgtgtttctcatggtactcagcccacagcaagatcttcagcaggacattgctgtgtataccgtgcagcggcaggacgaagtcctcatcctctgggacctggccaacgcggcacatctcccggatcaccaaggatttctcgagcagagccagatttacgcttatcgtacggccatcccttgtctcgaatcgcaccattcttgaaccgaatttcgaataacaaattaagagcttcggatcagaaagtcagggcctactgcttgcaatcaatacgaactaaaccacaaacttgtgcctactctacctctggaaattgttcaaattggagttcaatatcgaaataaaccaccatctgctgtaatcacaaagtttccaagcgaccaaccaaagccataacctccgcaacaaaggcagtgacaatgaaagagaaaagtgtaaagaaggcggctagcaaatggccaacgacagcagaataataaaataaaagttagtaaacaaacggagggagggacagtctgaaattcacttgaaataattacaagaactttttacgtccgaccttggccataattttgctggccaagctttttctcgaaaacgaaaagcaaaaaaaaaactcgagacaaaagctgtgctgtgtgtcaatgagatacgtacccatacaggcgcactcagaaacctggcccacaatgcaaacacacaatgccaatgttttatttctaacgacgactctcttcggcactgcgctctgctctgttttgtaatttaattaatatacaaaaaatgttttgtatttctcgaaatgctaattacgcacaatgcgaatgacaatgaaaccgccgactggcggccatttgttgttcgtttttttttttttttgcccctttttatccgttaacagctggctttatggcattataagagcccaaaggttatttatatcgcaccgattgattgatgagttcttgcacttggcattgatcatatctgcgggtacttacatctggcaggccctggcatattgtgctgctgaccaggaggagcgctgtgaaaaggaccagtggtgaggacatcttactgcttcggccgcctagggtgctaatataatccttaaaaatgcttaaactgcaaagagacgaaggggaaacgaaaattaaataaattaaatattaattattattagccacatcccatttgccaatatattcacgcaatgggccagcatgcaaagtatttatttcccaaataatggtcttaccacctcacatgaccattagttccctgcccacaaacccgtcctggtcatgctcgaatggacagcactgtgtttgcaacgcgagtacagttagcatctgttgttgcaactcaaacgccgcttgctgcttcaattaatatttacttttagttttgtagaaagaaacctagttttctggcccgctggccgagtaattaattattgcataaggccaagaagcagcctcgaggcataaaacaatcttgtgctgccctgttgattgctgtttgtgctgccgttgcagttgcagttgcacatccgcccgccatcgaatgcggctaattgtcaataatgatgcagcgatgcgtggcgagggggtaacagcatccatccaaccttttgacaaaccaaccaagaaaacaaacagaactgaccagcggcaacaaaggcagcaacagcagcagcagcagcaacagccgcttcacgttgccgtgtcgcaacttctcagcgacatttacgacaaattgcatgacattttatatcccaaaggttttgcacaatttgcatgcaacgtgctgcaagatccgaactgccgtggcccacttcgagtgaaagaaagtctcgccggcgaatcgatcatcatcaatcgtaatgaaatgttcggctgagcaattgccaaatgtgggtggtacccagcccaaggccaatgccccaagacacttgctcatggattggcgaaaattgtaggtaagcgcaaggaaagttcactttttcctatttcagccggcgggcaggcaaaaatgagaaaatggaatcgatattttgagtaaacatggaaagcgcttcaaaacaaaagacttagaacacgaacttgagcttagaagcatgacaaggaagcttgcaagccacgttcaaagatgtgtagctacaaataagtgtaaaatcttccaaataatatgaaaaccattttggccaaaggtcaaccgacttttgccaccatgtaatggccgtcagaagtccataagaaaagcatcaatgctaacagaaagtgccagttggcaaccttcgcggcgagactttcacccaaaagcaaaagtgaatcaagagcattgaaaagttttaactgaatcgcaactaatgtgcattggctgcacgccaaattatcaggaaattcatgcgcacatttaacagcgatggtgataaagtaaaaaaccaaaacgtcacggcttttaggtgaccgcgaacaatctggttgatattccgattcacatattacaatacaccacaccaaatcagttggaatagagaaacagttatgaggcaagatggcaactcgatttggtctatcatttgcataattaaggccgattagggtcgaatcatttgccatatgtgcgcatgcataaatctaaatctgagccagctcaaggttacggctatggcaaaactgttttttgacttgaactcggcttgcataattcccgttcatattttttatataattacgggccaatgaaaaagtatatagaaaacaaaacaaaaagatacgcatcatcaaatgtcaaccgaacagcttcaaacagaagctggccgaaaagtgtttggaaatggaagtgggaatggaactgtgccaaaagcccccgaaagccgccaaaaaccgaaaagcaagttgcattgtcagcttccgcataattatgccgcctggccgaatatgtttttctttccccttccccccccccctcgttttttgtgggtcttgtgccttttaccataaagtcagcgtctgtttcggtttatgggaattttttgtgtgctattgctggctgcttttaacttttgctttcttaatgatttgctgacacaacccgccgagtgcgactctgttgtaagctcgttgtctcgatctttttgtagggcgtcagcgttttagtttaaattgacattgacagttgttggccacctctctccaccatcctctgccagcggtgtgtcagacaaacagctgcttctgttggccgataagcatcggggattgggggaacctgtgtcagcacctgagtcagtagcacaccatttggcttgataatgaacccatttcccgcatatatcgctcgtctgtctgacagcgacattggctgcgagaagaactggaaccacagggcgtatgagtgacgcagccaacccatttcccagacagacgcagaaaaaatatgtggatcacacataaatcggccaaaatgtgacataacaaagttcaactgcgaacattttgcccaggagataataaatttagccgatacttcgccgacaattccgctgcaagttgcagacagcgatcaagtggcggtggggattacgtaaagtgtctgtgacctgaactttttgcatttgtatgcctgttggctggaaaagggcgagcgaatcttttggccattgttttataatgataaaacaatgaatgcggtctgggaacctgcaccttgagtcgctagtccgctgttgaaagcacgtcaacgcgagttgagctgaagaaaaaacagctgtgcaaatttggctaatggcgaacaaaaagatataaagtgcgggccaaatgtcaaacactaatatttgaatgagaccaatttaaattctaggttcgctgacataatccatcgaagatcatggctgccaaaactggtttcagggccgtcgcctaaatggttgtcttaagcatctgttcctgagcatattattcatttatgtatattagatggttagccaagaccatctagccgatggttctgcatacaacaaagacttggcccccggtgcgtatacgtaatgtgcaagaggagagggcgagcacaagagatacatcaccgaaaacaagcttgaagttattttttctacatctgccacccccccccccctcttcaccatacgaaataataatcaaaatgccattataaaattataaaatgcgcaaatattgaaaaactgcaaaaggcaaaggcaaggaagaggtggcaaataaaaaaaaaacaacactacgtatacgtaatatgcgagactaattaaatttaaagatgggcaatgacaagcgaaaaggcagcgaaagaaaataaatgaaatatttgccaaaagaataagcagcagagtaaaaagcattgcatttcggaactgagttgctgctcctgtctttcgttgtttctggcttctgctcttgcaattgttatgattttttccagccgttgttacaacatgcaactttgccacaaactgcaaaaacaacaacaagcacttgcgctgattgcgtgctgcgtcggcgtcgcagtcgactgcgctgccgcagttggcgttgcggtcgaagtcggaaaagccataaaccgcattaaaatgaaaatgaaagtgaaattgtaattgaaattgaagaagacgtcggctaaaatgtttgacttcaactttgcttcgatttgtgtgatggtttgcatgggtttttaactttattcccattgcatttggcttttgttgttttttttttttcgattaccgcttgtggcgatgcaatcataaacttttagcatttaaatggaaattttatgggcttgcaataaatatagaaatattgctatagtttggtaaagaaaacacaaaggatataattaaaaaactgttcactaattaaaagtaaaataaatattttacctattagtagcttaagtaatgctgagcaggattttacatgaaatgccagcgaaatatgaatgaaattcgcaaaatgatgactacgcaaaaggttaagcttaagtaacactttacgggcaaacagtttatgggtaaataaaacataaccgagtacattgactacaccgacacaaactattccatgaatgctaaacaaactgaaatagcaacaacaacttagtaagctgagtggctgggcgactgaaacaacacaaataaaaatataaacaaacaggttactcgggtttcgtcttcgccgatgtcaatgaaaacgctgaaaagatccccagaaacaaaacactcgatacaagatgaattgaaagcgaatcaaacgccaaaccgaatctgatgaatgatcgctatcgaatggcgcaaataatgcctatttatggaaaatctggacaaagcccagaagggctgttgttccgcagaatatcaatggcatagaaagtggcgaatccatggggtgtgggtatattggatttataatcgaacaaaggccgatcagaaagctcaaagctcgtccccctctctcactctctctctctctctctctcgcactctctcgctctcactctttgttgaaatcaaaagtgcaataattgcagcaaaatcactaaaattcactacgaaatgtggagagcaaagcgtggctggcaataataactgtagcaatattacaaaatcgcattggttcgaggctcgcaaaagccaacggaaaacacacaacaacaatgggataataagcccacaaaacaccaacacagcaacaccaacaactactccaacaactacaccaacgacaacaagaagtcggcacgaaaagttgtttcagcgaaacaaaaatataaaacaaaacccgctcgaactgaacttaaaactgggaaacaagcccattttgtgggccgaactaaaagccagacaaaagtcttgtgcacgtacatatggcacatatagtatagtatagtatagtatagtatagtattccccgcccaagagccaagatcctgctctagaaaaatctcgttttacagggacagcgcactgcatctcgcctccttggcatctcacacatcccatttggcattcagttcctctggctcggttccgcaattagcaagttcaaaaccaaactcacatgtgtggtaataattatgccccgaaacttgtctgcaaattagtaggagccacccaaccactttttggtatatgaggtaataatcaaagatctacgatagcagaagaccaaaagtgctgactacttggatacggaatccaactgcttctacaatatatctattatttgtaggaacacttcttctgctgatttagaaatttatactgagatgagtgttgcacttatggaaagattaactttcaagcacttcctgttgcttcctttcccattttctagttacttaaaatatttttaagctgaacctcacctaagtttgttcctgtctgctccactggccaaacaatggtggcgaatcaaacggattttcgaggagttttcaagttttattcagcactttcataggcaggcacacagcactatcttctatcttgtgagttggacttttcaagtttaaggatggatatctgtttcgagtgctggactacgcgacgcggcgagcaattggaaggtgggatggggctgggactcggactcgggatcggattagatcggtggccgttactggggctaaagccggagctatctgtccagaatcggggcacagaacactcgcgatcgcgaatcgcggaacgtggcggaaagaaagacgagcagcgattaagctggaggcggtcggtgagcgacgattaaatacggcgtgaaatttgcttggcagtgaattttttcctctcattcgctgcgatattttttgattatttttcgtaaacgaaatttatttttcactcaatttcgccgcattgcttttattattatggcttgcttccccaccttctggggggggaagaacacaaaaaaacataaacaatgaagagcgcgacggcggcgacggcgacgtcgactgcagcggtacgatcttggctttgggtgcgagcgggatgccggacagcagattcacttttttatcaactttttttactggcttttttgcacgatgctattacgaaagcgggctgaagcgggcggcggatcgcaaattgagctttgtttggctggggaattgcacttttgagctgccctgacgtcacgatcttgccgatgcacttatatacctgatatacatgatacatatatgtatatatacaatatatatcttctgatagcagacagtcacttgggaattttttgggaatttaattcagcgaccgtttctcgaattcgaatcgaaatcaatgtccaaaagagtcggtggctaagtctttgacggttttttgtggccgtctacggaaacaggtcggcgcacactaaagttaacgatcgctcggaacgctccacggagtccaaaaccgatccaaagctggctgcccgagcgagacggcaccatcggcggtacgagagctgagcggagcggagctttgggccaaaacttatagctgctagacgatctgctggccatatcataaccgaaagccaagccaagccaagccaaagccaaagcctt

SEQ ID NO: 23345 - DNA, 822 bp, DROSOPHILA
ctcgccgcgtcgcgtagtccagcactcgaaacagatatccatccttaaacttgaaaagtccaactcacaagatagaagatagtgctgtgtgcctgcctatgaaagtgctgaataaaacttgaaaactcctcgaaaatccgtttgattcgccaccattgtttggccagtggagcagacaggaacaaacttagtttaagcatttttaaggattatattagcaccctaggcggccgaagcagtaagatgtcctcaccactggtccttttcacagcgctcctcctggtcagcagcacaatatgccagggcctgccagatttgcacaaacaaatgacgccggagcagctgcagtcagtcttccacgtggacacccacgacgcagtgccccactatgagctcgtgcagctccagcaccacgagaacaaccacaaccgccggcggcggagcatcggcaagggaccaaaggtcaacgccgccctgccgccccaccacgtgaaaaaggatctcagcaagaacgcctactacagcgaactgaagcacgaggctctcgcctcgggcggcaaccacctgttcgccccggaagtgagtgccatcaagtcgcacaacgtctcgttcagcgccttcggccagcacctgaacctctccctccgcgccacccaaggactcttcaagggcgcgccccaccagctgcgcatgtggaccgtgggcagtgagcccaatgccacccacggccttgacctccaggagattgtccacgagcaggtgagtcgtgtctattctatgtctattcagcttaagaagatataccataagagggtttattag

SEQ ID NO: 23346 - protein, 192 aa, DROSOPHILA
MSSPLVLFTALLLVSSTICQGLPDLHKQMTPEQLQSVFHVDTHDAVPHYELVQLQHHENNHNRRRRSIGKGPKVNAALPPHHVKKDLSKNAYYSELKHEALASGGNHLFAPEVSAIKSHNVSFSAFGQHLNLSLRATQGLFKGAPHQLRMWTVGSEPNATHGLDLQEIVHEQVSRVYSMSIQLKKIYHKRVY

SEQ ID NO: 23347 - DNA, 3473 bp, DROSOPHILA
ctgcaagatgagcaggatccccaagcccaatagaggtatgtatagaaaactaaagcagttctgttcgtgctaatatacgtttttttttcttcttaggtgttataccgctaaacaaaaccatcacacccagcaaggtgaataagcgcaccaagatgcccaattttgctgccatgcatgagagacagtttgccaagatggagagtctggtggaccacgtcgaacggaaggcggaacgcgccaaggtgctaaccaattctgtacagaagcaagtgccaggatcggcggcgaagaaaatgcagagcaccacgtctgtggaggatcgtgctcgtccaagggcaatgaagaagatcgacatgtccgccgatcggaccgtggtaatggatcatccgtccgataagctgaactcatcacgtttgcctttgaaggccaccgctcccgcttctaatgtagctccaaagccagctttcaatttgtccacctccacggtgaagacattcaacgccacgttttccagcagaccggccgattcgcacgacaacaagctggctgagcgacgccagcggcgcattgacatgttcaagggtagaacaaccaaggaccagaaggagaaaggagagtttatccgcggagtgcgcctcaaccgacgttttgaactccaaatgcagcaccgtcgacacctggaggaggattagtttcttaacttgattcgttaattttactgcttactacctatgcttactcatatatgtatattcgctttaacatgtcagatttgtcggcgattcgtcagaaaacatttaaattttgctggttccaataaagttgtttaccatttctgtattttgcactttcccactctttttattcaaactttaagtaagagcgatgcccaacactggccgcatagaatccgtcaacgcagcaggctttgttttttgtttccgatacattccggactttttggtagccataagttcataggacttaaacctattacacatcactcgccagttcttgtgttatttttttttaaatttgacttatcttttattcaaattgagaaaactttgactactacgttcttttacaccaaaaggaatcagttggcattccagttcggataacggcactattcgcgttttacagattccttcgtttctcgtccgtattcttctttctatctccgtcacacttatatttttctttctctcaattcctttttcgcgtaaagcaatacgcgggacgcaaaatgtgtgacgaagcgaatccagcgaagccgtggcagcttcccgatgtggtgtacggcaatgggattccggcgctgtgcctgctgcaccaggagatcgagcagttctacaactacatccggtccacgccaacagagttctgcttgcgggcaggtgcagtgcgtcgcatcgaggatgtggtgctttccatttggccaagcgcatccgtcgatctctttggctcatttcggaccgggctaaatctgccggactcggacattgatctggttgtgtactataagttctggaaccccaggctgctgcatgagcttcaaaacgaactagtcagccaaggagtaactgatccggacactgtgaccgtcctcgacaaggcctctgtgccagtggtcaagtttacggacctcatttcccgcatcaggttcgatgtgaccttcaactccgtagcatccggcgttcaggccgccgacctgatcaaggactttatccgccattttcccgaactacccaaactggtcatggtgctcaagcagttcctcagccttcacggattcaacgaggtctacaactccggcggagtctcgtcctacgcactcacgctaatggtgatcagctttctgcagcagcatgcgcgctccaacaggcgtttaagtgaacacagtaagctggccctgctgctcattcagtttctagactactacggccgcaagtttgacttcttcaagtatggaatttctgtcctcggccaaggcggttgcgtggagaaggctcgacttcgctccacgctcggcgagaacaactggcagtcggtgctttgcatagaggatccagtgacgccgaccaacgacatagggaggagctcctatggggtgctcggcgtgatgcagggattcggggcagccttcgtgaagctctcgaagctggtggactccgactcgtccaagatcgtcggccccatactggccaacattgtagaggtgccgcagtccatcatcaactaccgggcttgggtgcactacaacttccagcaccttttgacaccggaattgccttgtgccgattcccttgtacaaccgtcgcctacgggatccacatccccctccgcctccgcctccgcctccgaggatgagcgctcgggcgggccggctactattggattcggccgatgtgatgatcctccccaaaacatagacatagttgccgaccttgcaaaccttaagatgaattaagaatggtacgcttatactaccagtgatttttaaaaactaattatatctttttattagcatagttttatgcgtggcatatgaaaacaaacaaaaatttatagactacttttgcattttttatttattgtctaacaattgtttttcgatacataacgacaactgctcatgtaattagctaaattagaaagcacaaaatgcagaattgtacaagagatgtattcttagaatatccaataagacacctattaactaaatatgtaatttatctgtgctttataaatataaaaacagaatattgtagaatatttaataaaagcagtgtcgtaaaatcatcgtcatgttattggtaaacgcattttacaataacaaatgtgaattcgagaagtcacacacattcggcattccacagtcttcgggtggagacgtgtttctttcaagctacgaatagcaagttctaaaaactacaacagtatagtgaaagttaaacacaaagtgtaaagtgcagtttgcacaactaacaattattgactatagtaattatttactaaaataaataattattccatattgttctggtaattgttatatgtggacttagaacaatgaatcaaaacgacatacgttctcagcgacaatgtgaacaagacgagcgccggctctctttacaacgcaacaatgcatacttttctttcgtctcaccgcaaatcggtgatcgagcaaccttcaccttcaactaactcgaaacttttgccctcagcgaacgacagaccgcgttcttgctctccctctctgcctgcttcggctcacaagtcgtggagcgaagagaccgcctctcctaccccgctcctctcgcagcgccaaacgaccgtcccgggtaactgtaacactgcaataacgagtgcagtgacctcactggcaactgccacaacatcaacttcgtcagcggcccaactaattattcgctgtgccagctgtaaataattcagcagcactgaccgtt

SEQ ID NO: 23348 - DNA, 1473 bp, DROSOPHILA
tcactcgccagttcttgtgttatttttttttaaatttgacttatcttttattcaaattgagaaaactttgactactacgttcttttacaccaaaaggaatcagttggcattccagttcggataacggcactattcgcgttttacagattccttcgtttctcgtccgtattcttctttctatctccgtcacacttatatttttctttctctcaattcctttttcgcgtaaagcaatacgcgggacgcaaaatgtgtgacgaagcgaatccagcgaagccgtggcagcttcccgatgtggtgtacggcaatgggattccggcgctgtgcctgctgcaccaggagatcgagcagttctacaactacatccggtccacgccaacagagttctgcttgcgggcaggtgcagtgcgtcgcatcgaggatgtggtgctttccatttggccaagcgcatccgtcgatctctttggctcatttcggaccgggctaaatctgccggactcggacattgatctggttgtgtactataagttctggaaccccaggctgctgcatgagcttcaaaacgaactagtcagccaaggagtaactgatccggacactgtgaccgtcctcgacaaggcctctgtgccagtggtcaagtttacggacctcatttcccgcatcaggttcgatgtgaccttcaactccgtagcatccggcgttcaggccgccgacctgatcaaggactttatccgccattttcccgaactacccaaactggtcatggtgctcaagcagttcctcagccttcacggattcaacgaggtctacaactccggcggagtctcgtcctacgcactcacgctaatggtgatcagctttctgcagcagcatgcgcgctccaacaggcgtttaagtgaacacagtaagctggccctgctgctcattcagtttctagactactacggccgcaagtttgacttcttcaagtatggaatttctgtcctcggccaaggcggttgcgtggagaaggctcgacttcgctccacgctcggcgagaacaactggcagtcggtgctttgcatagaggatccagtgacgccgaccaacgacatagggaggagctcctatggggtgctcggcgtgatgcagggattcggggcagccttcgtgaagctctcgaagctggtggactccgactcgtccaagatcgtcggccccatactggccaacattgtagaggtgccgcagtccatcatcaactaccgggcttgggtgcactacaacttccagcaccttttgacaccggaattgccttgtgccgattcccttgtacaaccgtcgcctacgggatccacatccccctccgcctccgcctccgcctccgaggatgagcgctcgggcgggccggctactattggattcggccgatgtgatgatcctccccaaaacatagacatagttgccgaccttgcaaaccttaagatgaattaa

SEQ ID NO: 23349 - protein, 407 aa, DROSOPHILA
MCDEANPAKPWQLPDVVYGNGIPALCLLHQEIEQFYNYIRSTPTEFCLRAGAVRRIEDVVLSIWPSASVDLFGSFRTGLNLPDSDIDLVVYYKFWNPRLLHELQNELVSQGVTDPDTVTVLDKASVPVVKFTDLISRIRFDVTFNSVASGVQAADLIKDFIRHFPELPKLVMVLKQFLSLHGFNEVYNSGGVSSYALTLMVISFLQQHARSNRRLSEHSKLALLLIQFLDYYGRKFDFFKYGISVLGQGGCVEKARLRSTLGENNWQSVLCIEDPVTPTNDIGRSSYGVLGVMQGFGAAFVKLSKLVDSDSSKIVGPILANIVEVPQSIINYRAWVHYNFQHLLTPELPCADSLVQPSPTGSTSPSASASASEDERSGGPATIGFGRCDDPPQNIDIVADLANLKMN

SEQ ID NO: 23350 - DNA, 4140 bp, DROSOPHILA
ttctccaatttcgtttcccgctttcagccgcactttgtgtacctctctcaggtgtggggcaatctgaacaactacctgaaccacattgttgagttaaacaagctgagggagcaggtggaggcattggtcgtcgacgacttgatgaccctgacaaaggctacgattgccgagctgcaggcgcttcataagcggataaagaagcccaaggtctgcagctttgaggaacgcatggatgccgtgaaggagttgcagaccgatggcaacttttgcaagctcaacaaggcagatataaaggagttttgctctctagccatgaccattaccaacggcctgcttatgccggcccaggtgaccagaaagctgtgctccaatgtggacattacatttggtttccgggacccaagatacgctcgattcgcggagctgcgatttgagcctttcatagccgcctttagaaaagtggttttcaacaatgcgaacctggctctgctgttcaaattggacgatgcgctaatagagcaggaactgcagaatctggtagttgagccaccaaagcagacagattttgagtgtcaaaccgaaatggtcgtcaccaacgacctaacgccagcaaactggataaacgtaacatggaatgcgtgggattatcatcgggagacaatccacttggccaatatacgtaagaagcagaccaacgacgcgcagaccaacattagttacggaaggcgcaacgcacagaatcaaacctacaactgtcggcaacataagtagagaacggctaagaacatatactcaccgattttcgattttcttaaatcaaagaaacctagaacacgattcacaataaagtatataaagtggtcctgccacacaagcgagtagacttcttttttgtgcggcgtccgtaagtgtgtctttactttcatgcgctccacatccaggatgcccacctgttgttgagttgtatatttaggttcaatatccaataaaatagacgaaatcaaagccataccgttccgtcgaaggtgccaaaggccagttccaagcagtttggactccaagccaggcagtagacgttgctggacacataaacgctgtcgatgggcaggcagctggtggtgagcttcgatatatcgaagaaggccacacggcgatccgaacaacccaaagcgattctaaacgaaaaacagtttagcaacgtttgcgaatggcatattatcttattagcttacttgttcatatcatctggacactcggccatcgctcgcactccaaacgccactgttccgtaaaagtcagccatccggccagttttaggattcatcattccaatctggcgattgtttctgcacaaccatatcatctctttgctggagtcacaggcaaaggacacgatgtcttgcaaatggcagctgtgtgatttatccttgctgatcttgtagcgtagcatcttgcgctcgaactccacggaccaaaagaataactgatggcgactcagggaaacaatgacatggttgttcagccagtagacgttgttaagcttgcctgaagaaaagatcccagttgaatgcttgctttcaatggtttgattctttccacttacccgccgtcttgcttttgctgtagttcttgccagcatgcgctcccgtattggtattccagatcatcatcacctcatcgccgtcaatggacacgagcagagtttccaagtgggtgctgttcacggatgtcaagctgatggtctccgcgctgatggccggcacaacttggagattactctgaggctcagacttggtctgcggtgttcctgaagcatgtacctcggcctggtggtagatgtgatgcaatacttctcttttgggctttgctgcctcgccatcgacgatcacggcatcatcactggacgagctgtactggatgacctccagactgccctcggtcgagtcgctggcatcgttcttgttgctaatggtgctggcatcacttaagggacccgtaggctttgtgggctcgcagtcatgcagcgtgacctccacgtgctgcgttttatcctcctggcgactggctaagagttcggctttcacactctcgcaggcctcaacgaaatctaagacagcggcaccagctggcttctctagacccacaaattcgccgccacaatcctctgaagatttgcggcggcgttcagctataggtgcaccgaactcgtactcaagatgatcaaagttgtatatgtcgaaagggtcgtcggattcggctgccttcgatttggtcagtggtggtggctttgtcttgggtttctcctcctggccgccattgcggcttcgccactcttcagcacttaacgccagattattggttttttcgtcctcggcagcaggcacctcccgccaggctaagccgcatatgggcgctttgtggccgtggaacttgtagacgatgttcattttgcgcagatcgcagaccagcacattacccatagccgttcccacagcgaacaaattgtcattgtagggcgagcagcgcaccatagtgagttggtgatttcggggcgagatgaaagtggagcgacggcagtaggtgttggatgccacacaatagatgaccagatcactggcgtccatggatagaatgttaccattggccaggtagctcatcagcacggagttggtagtgtggtgcacgacgcgcacatcccgcgcctcgtgctggtgctgatgggccttgtgcccgatgacggcttcgcccaatgcgcagtcccacacctgaacgcttagatcgtcgcccacaatggcgaatggcttggtcggcccaccgttgcccaagccccacatgggactaacgtccagggccagtatgttgatccgcgtcgacatggtcaccacttggggctgctctccgtttgccggcggcgcggatatgtagttgatgcagcgaatgccggcgtacagcaaaccgccgtcgggagcagcggccgccaaagatacgttgcccggcggtgtgggcacattgtggtacatcacctgcgagttcatggcgaacaataaggacttggcatctgcaggatgaaggaatatttcccgctaacagttggcgtcgttcggggaaaaaacttctgtaaagctgttagtgttaggcagcttcttaaactttgccagcgatgccacctggaaggcacggaacttaacagttaattaaaattgataataattaaaatataaatttgttattttcgaacttgtatttataacaaaaatctggatctgctttatataaataatttaaaaatataactaagtaccttatgctacaaagcctaaaatctagggatcacgttagctttagtatatttaaattacccgctatttaccacagacgttttttgtctatctgccaactctatgcaatccatttcctgtgaatggcaaccagcaggtagagaggaagaagaagacacacaataacaacgcaaaaaaaaaaggtagaaaaatctagcaaattctaaaagtctccgtaaaaataaaatacaatcggccacaatggaagcaaagcgcgagagaaagtcatccctggtacgtaccttgtagatatatgcgaagaagaaagaaaaccctgatagaagtgcgattttcaggcaccactttcgccatgtccaattccggatattaccgatgacgatttggtgagcatttcggtaagggatcttaatcggaccctcaagatgcgtggcctgaaccgcgaggagatcgttcggatgaagcagcgccggagaaccttaaagaatcgcggatacgcagccagttgccgcatcaagagaatcgaacagaaggacgagctggagactaagaagtcgtacgagtggacggaactggagcagatgcacgaggacaacgagcaggtgcgccgcgaggtgtccaactggaagaacaagtacaaggcgctgctgcagttcgccatccagaacgagatacccattcccagcgagctggagggctgctgaacgattgcccagtcacattcctgtttctgtcaaaattacaataaacccaaaacggaaaaaaacacctgtaactaaagtacaatagctggcaaatatccttcctcaataaacgtaatctgctcaagaacctctgcatcgcc

SEQ ID NO: 23351 - DNA, 2025 bp, DROSOPHILA
ctgcctaacactaacagctttacagaagttttttccccgaacgacgccaactgttagcgggaaatattccttcatcctgcagatgccaagtccttattgttcgccatgaactcgcaggtgatgtaccacaatgtgcccacaccgccgggcaacgtatctttggcggccgctgctcccgacggcggtttgctgtacgccggcattcgctgcatcaactacatatccgcgccgccggcaaacggagagcagccccaagtggtgaccatgtcgacgcggatcaacatactggccctggacgttagtcccatgtggggcttgggcaacggtgggccgaccaagccattcgccattgtgggcgacgatctaagcgttcaggtgtgggactgcgcattgggcgaagccgtcatcgggcacaaggcccatcagcaccagcacgaggcgcgggatgtgcgcgtcgtgcaccacactaccaactccgtgctgatgagctacctggccaatggtaacattctatccatggacgccagtgatctggtcatctattgtgtggcatccaacacctactgccgtcgctccactttcatctcgccccgaaatcaccaactcactatggtgcgctgctcgccctacaatgacaatttgttcgctgtgggaacggctatgggtaatgtgctggtctgcgatctgcgcaaaatgaacatcgtctacaagttccacggccacaaagcgcccatatgcggcttagcctggcgggaggtgcctgctgccgaggacgaaaaaaccaataatctggcgttaagtgctgaagagtggcgaagccgcaatggcggccaggaggagaaacccaagacaaagccaccaccactgaccaaatcgaaggcagccgaatccgacgaccctttcgacatatacaactttgatcatcttgagtacgagttcggtgcacctatagctgaacgccgccgcaaatcttcagaggattgtggcggcgaatttgtgggtctagagaagccagctggtgccgctgtcttagatttcgttgaggcctgcgagagtgtgaaagccgaactcttagccagtcgccaggaggataaaacgcagcacgtggaggtcacgctgcatgactgcgagcccacaaagcctacgggtcccttaagtgatgccagcaccattagcaacaagaacgatgccagcgactcgaccgagggcagtctggaggtcatccagtacagctcgtccagtgatgatgccgtgatcgtcgatggcgaggcagcaaagcccaaaagagaagtattgcatcacatctaccaccaggccgaggtacatgcttcaggaacaccgcagaccaagtctgagcctcagagtaatctccaagttgtgccggccatcagcgcggagaccatcagcttgacatccgtgaacagcacccacttggaaactctgctcgtgtccattgacggcgatgaggtgatgatgatctggaataccaatacgggagcgcatgctggcaagaactacagcaaaagcaagacggcgggcaagcttaacaacgtctactggctgaacaaccatgtcattgtttccctgagtcgccatcagttattcttttggtccgtggagttcgagcgcaagatgctacgctacaagatcagcaaggataaatcacacagctgccatttgcaagacatcgtgtcctttgcctgtgactccagcaaagagatgatatggttgtgcagaaacaatcgccagattggaatgatgaatcctaaaactggccggatggctgacttttacggaacagtggcgtttggagtgcgagcgatggccgagtgtccagatgatatgaacaaaatcgctttgggttgttcggatcgccgtgtggccttcttcgatatatcgaagctcaccaccagctgcctgcccatcgacagcgtttatgtgtccagcaacgtctactgcctggcttggagtccaaactgcttggaactggcctttggcaccttcgacggaacggtatggctttga

SEQ ID NO: 23352 - protein, 586 aa, DROSOPHILA
MSTRINILALDVSPMWGLGNGGPTKPFAIVGDDLSVQVWDCALGEAVIGHKAHQHQHEARDVRVVHHTTNSVLMSYLANGNILSMDASDLVIYCVASNTYCRRSTFISPRNHQLTMVRCSPYNDNLFAVGTAMGNVLVCDLRKMNIVYKFHGHKAPICGLAWREVPAAEDEKTNNLALSAEEWRSRNGGQEEKPKTKPPPLTKSKAAESDDPFDIYNFDHLEYEFGAPIAERRRKSSEDCGGEFVGLEKPAGAAVLDFVEACESVKAELLASRQEDKTQHVEVTLHDCEPTKPTGPLSDASTISNKNDASDSTEGSLEVIQYSSSSDDAVIVDGEAAKPKREVLHHIYHQAEVHASGTPQTKSEPQSNLQVVPAISAETISLTSVNSTHLETLLVSIDGDEVMMIWNTNTGAHAGKNYSKSKTAGKLNNVYWLNNHVIVSLSRHQLFFWSVEFERKMLRYKISKDKSHSCHLQDIVSFACDSSKEMIWLCRNNRQIGMMNPKTGRMADFYGTVAFGVRAMAECPDDMNKIALGCSDRRVAFFDISKLTTSCLPIDSVYVSSNVYCLAWSPNCLELAFGTFDGTVWL

SEQ ID NO: 23353 - DNA, 40152 bp, DROSOPHILA
atagttgggcttgggcatacaaatgcagagtactctcgatcttgatctttatttgtgggtataacaatcggtatactaaacttagtcgttacttttcaatgttgtttggttgtgggtttgttctcttatattttcacttttgtgtttcttattccggcatggtaaataggttacaacgctacacataacaactatcaacatttagggtatgcataataatagcgatatcataataataataataataataataatagtaataacatcagttacaactttatttgtgtgtgttcgtcgttccttcaatataattgaaaataaaaatgattaaaccataaacaaaataataattgcattttctttaaatcaaaagtcttttggaatttctcgcatattcattatattcgtagctacacataatatgtattttttttttataaattattaactgtataataataatttcttttcgtggttttcttttgacccaaaattaaataagcttaattttactgccaaaacatttagttaggctttaattgtaaaatatacctaaaattctcaaacaaataaaaaggaagttttcaaatcagacttaattataaaaataggtcttccagcaaagagcgtaatcaacatttgttttatgaaagttggttctttctataattatcgattttcaaggttgataactgaatttttcattttcggttttcattcttcactttcgggatttcacttcatatttcataggtatatggcagtcgttatcattgttttaatttaaccttttgagataagttcatcatttgttttttaaatcaatattaaaatagcaaaaaaaatcaaaaaaaaaaaaaacattaaatttaggtaattatattaaatagggtttatgcctaaacgtaagcaaatctaaagctacaaatctgtttgtgtttgtggtttttattctctgatcccgtttttactcctttctcttggtcaaaaagttggtccacatgaaacctttattccgtcttatcgtttgtttgtgtatgtctctatatactacatatatacttaagcctaagcctgtgtaggagtgacatttatagttgataaaaaaaaaagcaagtccacatagtttaatttgttgatctgaagccgtttaaactgtaatcaatagaaaatcaattagtatgtaagcaatacacataagatatcatatgtacaaaactcacgctgatcaaaggtgctcgggttgatgtagctgatcagatcctgatccgacatcgtggtcagctcctggggaatgggcggctgcaccgccacggcggccgccgcagctaccgctccaaccgctgccggaagtatgctacccgctgtgttcggggcagatgcctgttgcgtcatcactgctccattggtggtcactgcggcggtggccaccgacttttgcagagcattctcgctggccagcgcaacgatcagagattcttgtggtgtcggcggcaccaccggcaagtggtgaccacgatggtggctggtcacatgcccggatacgtgtcctgtgacgcgactatggccgtggccgtgactgtgaccatgatgaccatgatggctgtggtgactgtgattcatcgactggaagttggctgcttctacagctactgcggcagcggcagcagccgctgtttctggtgtgtttgagtggttcaatagcaggtcaaccaatggatccgatgccgtctcggcaggattaccgctcactccgacagctgcctgtggcgaatgggagtggatgcgaccgtggtgatggtagtggtgttgctcctgctcctgggtggttataaagtccgccgccgccttaataatcatgttgctgaccgcagtggatgtggcagtggctgcgacctctggctgcatagtagctggtgttggtggcagtgtgtcaccaactcccacacccgatgccgcggtgggtggactcatcatgatgttgctcaacgccaaggctgctactgctgcatcctgctgtgttggttccggctgcatggcaatatcgttcaaaatggagttggccatggtcacttggtgaggtgcgagtatattcggcactacggcagtggccgctccatttgcggagcacaaaatagtcgatggtgaaacggcgggattcataatgatatcggtggacagaccaccggtgacatcgacaggcgccgggccacccaaggcagcagctccggccagagctgctgccggttctgaattgagtatgatatcctgcgtcaaaggtgaactattcggcgaactctcactgccgctcatggagctgctggaatttgtggagcttagggacaaactcctttccagcaccacattgggcggcgcaatgccaactttggcctgcagaatatcggtcagggcatgatcgatcaccgccgaggtggtgaacagagctggttcggtggtaccattgctggaaaccaccgatgtggatttggtcagctcgtcaataaacttgtgcacctgttgctgctgctgctgttggggttgttgttgttgctgctgttgttgttgttgttgctgctgctgttgctgctgctgctgctcgtgcatttgctcctgcatctgctggtgctgctgtacgacatgcttgacaatctcattttttacggccagttccaccgccacggccaccgccgtcggatcaatatcaactgcagcggccacggcggcagctgtagccggcgccacaacggtcgggaaaccgggcagactgttcgactgatcgtacataatggtgtccaggctgggctttcgtgcaaagcgatgatactgcaaggctgcgttggggctatccggtgtggattcaccggtcagtgggctatgcgagttgctgtcgtcgagttccgtcttcagggcctcggcactggccgccactgcgttgagatggaccagctgttggtccgtgatcatgggtgtgacactgggcagcgaggagcgtcgaacgcccatcggtatttgggtggtaatgggcggaggcatcatgcccgaatcgatctcgtgtttggcctccacattatcgcctgtagatgtattgttgccggaaccgcctgccgcactccaaccactggagccactcgcattggacgctgatgtggtgtccatgaaaccgctcacatctacaagaggaacaatggacagaaaagagtcatcttagtaatctcattttggtggtatgtcatgcaagaatcacggggtcataatataagaaatcataaaagaaaaaacaaagatataataaacggcagggtattttctttttgttttggtgggttggggtcctcttaatcctaggtcaggtttctgagaataagtcttggaaggggattgctaagggagaggtccgtaaaatccgagtgcctttcactttattccgggtctactacaacttacaaactaaaaaaaaacttaaactatagcgatagcaatagaaaagcactcgaattctttggatctgccatctccgcagggacgttggtatctaattctaatacttaaccactaattaagactagatttattttatatatatattaggttcttaagagtatttaagcttggctacgaaatttcactggcaactcctttcacacggcaattacaaaagggaatggaacaacaagatagctacgaaagaggtcatcaaagaattcttagaacatttcatctttcaactgaacacaaaatgaaagaactgactgactgactgactaaatcaaaccacaccaagctgaacagatcgataataaaaggcaatcattgaacactacaaatgacaagacgaacccgacccgaaaatggatcagacagactcctctaagtaagccttaagtcttcatcaagcacacagctaaagacaagatttgtttaacaaataatcgcaaaggatcacactttacgaaactacataaaccattcaactaattactcaatcggcaatcgcacaaatcaaacaaacagtcattcaccaatcgtaaagtttatacactcaatcattcattcaatcaaacacatcaaagcacactccaagctttttcgttgctctaattaatagacttaatagttacttctaattgctgaacttaagtactagtgcttagatttaaagtgtttatggattagtatattaggagccagaaaacccaaatatctcagttctcgtttcctaagcgggatcgcaatgatctaaacctgatgtcgttctctaggcgtaatgttgaggctctgaagtcgagcgatgctttgaatttccactcattctagacgagtcccatcactaccacctcttatttggggtctttcagaccaagttcccgcttatggtttcttattgttataatcatgtcttttcattaagacatttttaagtaaagaacttttaattgaaccctgacactgtctgcatattgaaaatttccattcaactgaagttcagtcttcacatagaactgcaatttctgtatcatgaattgtatggttagacaggagagcacagaaactgatctttaaagggtatgcaatgaatgttatagggaagaaatgtcactatatagattaccatacattttcataatttacacacctctattttatgaaatttctggaaaagaagttataagaaattattgtataagtaggagaataaagatgtaattacatcttgcaattttcatatgaattgattgaaatattacggtatttatgaaggattgcgaaatattaaaaaatatgtcaatgattctgaatgaataaaattagcaacaattttcgtaccctgttgaaaatcgaagcaatttcttagctaatctagccaaatgaactgatccctaacatatgacaactcctgaacgatcgcaaggattcgcaaacaggacaggacaaaaaatctttgaatggtgttagctttatgtgagtacgtaaaatatatggtatatatatatatagacgcttaaaggtaatgctctaaggttatatgtgaaatcggtttcccttatagttaatagtaatggtatatgtggtgtgtgtgtgtgtgtgttttaagggcagggttttgtgtgtgtgtgtgtgtgtgtatgtgtgtattcattaatagacatatagaaaatggattacgaaatggcaaaaaagaatttgtacgttggtcaatcggtaattattgtttggtaattggtttctgtaagagttgaatggttttttttttttttaaccagtaccctaaaattatccttgatgctgttgttgttgaacgttagagatggggctagagatgagcagatgtggctgttgaagtctcgttggggctgaaaatccgtcgccgatcatcatttcacatgcggttggataggatattgctgcctcggtgccataggtccttcaaataatttatattttgtttttttttgatttctgtgtgtctgtgtgacgtgtgtgggtgtgtgagtatctatcgccatcgaacgcaagcgattgtcagtcacttatcgagcgattgctgcgattcattcgattacatcgcttttttatccagcgttgctttccaggcaagctttcgatttatttcgttggccactttgctatggttgctgttcgtgtttgtatatatagagagatacaggatatatcggtgtctatatacttgtttatattgactgtcgattaatgacttaattttgatttaattttggccttgcattttatagcactcaaaaatttacatatttgactatatagttagattgagcacctaaattgctaagagaaggggaaggaggaagaatataaagtaaaaatatatatatgcatatttttttttttttgggagggagaggtagttttttatttttttgatttttttttatttttgttttttatggtgggggagggagtttttctcggttgttttcatattttttttttttaaagacatcctgatctttaatgttatttatcatttttcctgacatgaaaaacagattttatggggggatctgccttgctgttcttcttgtctggtttataggtatatatcctcccgatatttctgctgcttctgctgctgctgaatcatcgtgtgtcggtttatgttcggtttcttttatgttatcgctttggtttttgctttccttcatctgttactgggtatttttctcggctgaacatgatcaagaaaactctgcaattcattcaaaatacccccggcacaaacacacacgtattcaaataagcaaacacacatccaaacactcgaccaaacaaacaagcaaacaaacacaggcacacgcataacataagcaagaagaaaagtccccaggaaaagcgaaacttttgttttgtttaagcgcttatttttaaaaaagcaaggaaaatcgactcaggcatggttgaaaatattctacacagaaaattatattaaaatagaatagaaaaaactattcttcatcatcgcaaaggaacggtttggagggaaaaatcaagttcattcattcggcagagttgtttcgatcagtttccggttccgctcctgattttattttttttttctttttttggcggagggttggagcagagacgaagagagagagagagagagaggagcagagagtaagagtgagagacgggaggtgggggaagactgcaggagttggttctccgaagatttgcacaatcctgtgccttaatcatttatggttattaatttaatttagggttttctttttgttttatcattctgttgttgtgcttatagattaagttatattttatgttatacttttcgttggatttgttctttttttttcctacttaattatataaggtattgatatttccatgcgttattcggtgctaaacaaagagtagtaggtaggtagagtagtatgaaggaaagaggagcagaaaaggtagcaggcaagaaatgagcatcaaatcaaacccttcttagtgacccatgtgtatgcatgaatattcattaatttagtagaattttatgatttgccaatgaattcgacgtcttttagtttagtttatcagtcaaaatggatgggaataatgacagaagctattaaaattattccttttaagccttaaactaactattcttaaacacatttcgtactttaaatatatttttgccctattcggcttattgttttaaatataaagaaatggttttaaaagtcctcgaatttgtttaatttaccttctgcattttatctcagttcaaaagcatattaatttggcaatttgacaatttcgtatagtctgctttgttctgttagctacacacagacttgctaattgttaaatatatatttaataatgaatgcaaatatttttagccaaaccgcaaacaaagagccaccaagggaagaagagaagagcaaataaaaaggtagaagaaagataaatagaatgggaaagggaagagcagaataacgcatgaagagatcagattgtttttacctatcgcttatcagtttatacgattcgaattatttttatttgagtaatcgcaaacggttctagtttagctaatttatattcgattcttggatctgaacaatataagaactaaaaaaaaaaaaaaattgcagcttcaacatggttgaggcacaataaaaaatgtcactaaacatacactttaaataactgcctaaacctgagtacctcaagtatgtatcttaatatcgttttttaacgtatttcgatttgttcgatttctttcgatttctatacagctaacgattcgcgatctccggctgggagtttgtgattggtaatttggttggttgggtgcaatcgaacgcttagtcaacaaatagataccttgggcgtggattgtgttacttaacgtgctggccgccgccagcgtcgtgtactgtcccttggccgtgtaggtgaacgtatgcggttcgctcttcttgccgctggagacgatcgacacttgaacctggaccggtttcaggatgttctggtgcagatacggtggcaccgtgcatatcagatgagtctgcgggcagaattgcagtcagtcgttagttaaacacattcacatacacaatcaatgctaacaatagacacgcacctggtgaaggtactccttatccggcagaacactctgttcccaaagagcggctgtaccgccgatgagctgctggcgcactgcaatttccgtggccggatcgtcaccgttgacgctgtcgtatgtctcctgaaacaccacgtgtgtgtccttcagaaagttcttgccgataatgaaaagctcgaggccgccatcaacgggacatgagtttaaggatttcttgcatatttccggcacgccaggtggttgagctaaaaggcacgaacatcaattttattatacagatacaattaaaaagctaaatgtgttgagcactcactgcagatgattggattcgagcagacctggagggtctcggtggtgccatcgtcacgggtcagctgggtgcggaacaccatccggcagcgagtcgatttcttcttgttcttttgcgccagatgctcgggaaatcggtgctccacatccacattgcgttcctgcaagaaaaaaaaaatgaaaggttattagaatctatcaatctatctaaattgtcatcatgaaggacttgtgctcctgtgtagtttcgtgcacccaccttcaagattccaacgcaatcgcatgtgatggtcatgtccgtttcgggcttgaaatcgatctcaatgaccatggtgccgtcgaccttcttctcgttgcactgcgtcgagttcttgccggcaaccttgcaggcctgatagaacatgtgcggtgccacgcgtccaatgtccgtgccgatgaagacctggaggacggcaaccttatcgtatccggtcagtcggacgatcgggaatccattgccgctgcgatccttgacggcaccgcggctgccctccgtttgatagcgtgcccggtgctgttgctccggctgcgacaaaatctccagctgcacctggccatcgttggagctggcgacgctgttcagcggtgtagtgggttgacgtttgttcgccacacgcgtgacattcctggccgatatgaatctgtgggttggagaacaagtagagacgttcgaattgtattagtctgttcactggcgcacaacttttccattcgatcgttaaaaatcgaaggctgagtttatttgtctaaggatcgttaaaagaaaattcggaacttgtacttgaactttggccgatgaggaaaatctagattcgattcgtttcgattcgatttgggttaaatgatttatgtattatttttcacatgtgctggccaaaaaacaaaaaaaaaagggatgttgggtcggcatgagattgcatgagttcttttttagatacaaatagaaaaaaggcagctgggctgcgagtacacacagatacggatttagttaaatgtatgtatagctaaataatgaatgatatatgagttttttaaatgctgttaattactcacaaacatacacacacgcacatgaaacataaaaaggccgaaaaggaattttcgcaaattttcattgctgcactttgcattctgttcggttcgtatcgtttcaatttgttttgttttattttgttttgtttaacacaaatcttagctttgaccaattgtttacaattgtttcgaatttatacgcctttgtttacaaacggacacacataggcacatgtatatatgtgtaaataatacatacggaaagatgggtacaaacgcacatttggaaattattaaagaacaaaagtcaaagccatcaaagtaaataatctgggaataacaaacgtgttctttttttttttttgcgcagagtcaattattctggcagcgaaataatttatttggcggcttctaattgttttgcgtgtttctggcacttgttgtttaaattttgaaaggtaatctagtaatttgtcattgcttaaacatttctgggtcattaaaatattatcggtactacttctttcctagtcgtttgttttataaatttattttaagtaccaattttttttttttttgcatatataaactttaacaatataatctcaatattttctgtttggttaacgaaagttttgctacaaattttgtgtccgtctaaattatttggttattaaaatcagatgtaaatcaattggcaatgcttttgccaatattatgtgctcctaaggtgcatctatctctgcactttggttacacaatttgtggttttaaaatatagaattgaattaaactattgaaaatgtaccaagaaacgtagtattagttatttagtgtggcaaacactgttttctttttaacgctgcaaaagaaaacacgccgcttactttgtctcaatgttgttgttgttgttgttgttgttgctgttgccgctgctgatgagcggcagaaggctaacaatggtcgtggcaggtgcaacggaggcgacaatgggcggcggcgagggcgtggcctcaagcgtgggtgacatcgttaccgaactggcaatcttgcgaatgaactcatcctcgctgcaggcatcatcgttgtccagttccacttggttgcactcgagcttcttgcgtttgatatgcttgccatggcggtgatgctgttgctgttgttgttgttgttggtgatgcgactgttgctgctgcaattgctgctgcggctgcaacagcaatccgttgtactgaaagagttgatgctgttgctgttgcaccgaatgctgctgctgttgcaagttgaaggcattaacggctgctgccacggctgcctcggttgcctgaaagacgcctccaaatggatccgaactactattgccaccggttgtcgtcgttttggtgtcgttcacaaagcccgtgtcctcgtccaaaccggccggcgttgcgatggtcgagctgtcctccgaggacgccgatattaggtccagatcctccagacagtgagccatcactttcgtgttgttccgcgatctatacgttaacatatatatacagacattcatgtacatggatacacaacagcaacacacgcacgcattacataatgtttataatacatatatcgattcatggatcgtgtttttttttcttttttatctattgtaaagtatatgcctgaatagattaaatttctgcatatagaatcacctatctacaaacataactgacaggatgccatttaatcatctaggtagaatcataattggcataaaatagacgagggcacagtattgtttgtcttgaaagagattacaaataaatagatttcgaattccaatgcgccaatcaatgtccgattgcatttcgaatgcattcaacgaacccaaatcgatgctcagctcaatagaaaatagctaaaccgaatataactgaacggatctcggcggaactcaacggaactgatcggaactaacggcctgaactcaatcgaggactgaattcatttaaatggacaggaaaatacaaaacaatatcacgcttcaaggttgcaagaataagggaaaaactataatcatttacacgctaaaagctaaacaatttttcgaaagaaaagaaaagaaaattaaaagtaatttcaatatattttgctcacaacgtacaattggttcaaatcgaaacacaaacgattggctgacaatcaatcaaaaataactagtttcatgtcaatggactcggttctttgcacctttttccagtttggatatgcgcttgttcaagttactcatgagaaagtccacatgatacttgttgagttgtgaaactaggttcgcccattagctaataaaactgataaagtcgcatgccataatttccctgcatccataacgggcatacgtaatcttcgcgcagatactgcgcttcaatcctaacccaaatcgggcgaatggagcactgagagtgcagctgattgataataaacggagcaaagcaaagcaaagcaacgcaaagcgaaatcacgaatcgcaaggcggtcggcagcaacagtgcgtataagtaatcgcgtccatatactaataacagcaacaaccagcaagaaaacaatccgcatctaaaagtcattggccaaagtgcgacagagaaaaattgcgtattttcatgcatgctaattaaattaagccaagccaaagaatgtgcaaatctgcaagaggaacaaaagctggcaaacaaactgaaaaacgattaaatggaccacagaatattcaaatatttgaaaactcattttttgaacattagaaaatattagaaaatatacaaacaaaaaaaaaagaaatgcgcttcttgtagaaaacctctgctagttgtatgtcaatgtcaatgatagatatatatatataaaaagaaaacaggcaagcacttaacaattaaccgatcgttcctgtaattaccgaaagccctaaataaagccccaataaaaatcacaacacttccattgttttcccagtggatttctcagagataagcggttggggttgcccccaagagccgagcacctactgaattagcccacctagttttgccttttgcccacttttcagattcccaactgcaatttgcaataactgataagccgataagataatgcggcgatttacacagatagcagtcatgcaattacaatacctacaactacaaaatggctacaaaatgacaacaacagcacaaacagcaacgaaagaaaacacattgggatcgcgcacacagacagaccatcatcatatttaaattgaatccgaaatctcttaatccgcgcatcgagtcaaactaaattataataaacaaattcaccatgacctacaaagcgctaaaacctgtccagcgagcgtcttcaaaagactatagagtgtggagaaatggaagctaatttgtgcaagaagaaggctcaaggattgaaaggattcactttcaactaaatactcgtacatataactcaattgtatgcggtagtatagatgtgttcatatacctttgagtttcccatagatatctttgcatttttttttttttttaaatccgatcagcgcacgagcacacgcgttcctatcgaaacgaaattccaaactgaactaataaagttgttatagttattggcgagcctcagttgccaatgttcttcctgaaatgagttttcagctttttgagcccgaccattcccaacaaacaaacaaaacaaatattaacaaatgcgaaccagtatttccccgaagttcaattaatgcaaattctggatttttattattgttagaagtgtagcagcagaaagtcagtctcaaaatgcattgtctcatcatcatcataatcatcatcatcatcatgatcataaagaaagcagggttccgaatctataaacaagttcaacatattataaacaagacctaaaggttttagtttatattgtatgatgcggccccatcgcgtctaggctatgaaatctgttacctttatttacgaacatgcagacacatgcggaccaatgaaataccttagtctggtaaataaaagtaaaatatcttcgagtccaaacatttaaccaagattcccttcgatgtgtgcgcgcatgtgtaagtttgtgcatctgagttgtgcgatgtatttgcggtggggcaatattcaatcaatattcattcactcgaaaccatgaatcgaacgcaaaacgaaatgaaatcatgagctggcaaattatctcgagttgcgcctgcgcatgaactcgcatgaagatcgtttgggacatatctacatatatggctggattttgggtgggacaggtggtggccagtgactcaccttgatacaggtatcgctctgattaaatgctgctgcggtgaatgttgttgctgctgctgctgttgttgttgttgctgctgctgctgctgttgttgctgctgttgctgctgctgctgttgatggtgctgctgatgctgctgcaacgtgttgctggccaccgcggcagctgctgcggctgctgcagcagccactgtgttggttaaagcgctattgaccagcaaactggatcgctggccagagttggagccactgcctccattggccgccggatcagtaacgcccccagctcctgccgaggatctcagctccgtgtgctgatcgaaacccagcccactgtcgttcgagttgtcgcagggcggcggatggggtcgctgtggtattcgcttcccaggaaccattttgccaggacccgtctagaaaaatgccacggatatggaacgcatcagtacaataactttgccattttcaagtcaccagccaagtgaagtttcccaatgtttgtgcttatcttttatgcttatctcatgtttttaagtatgctagtttaattattaattaagactcaccctggttatggtgtgcaacttgccgggcaatcccttacccggctgtcttttcgatggtatgcgaaatccttttcgatgtatacgcgcactcattgtggaattggtggacatggtcattctcatgcctggaatgtaaataaaacaagatatgtgattagtacttatatcgcatgtcttttgtttcatccattggatgaggccgagtcaaatggaagtgaaaactcctatacgcgtacaacgatcgcctcattcccagttctacatagcgcctatggtactggcctttattggagcacaaaagaattaaaatcccgatagaggcgaaccaagaaaacattgtctgatttgtggtgcccgttcgcaagttgcaagttatatgccaggggaaactgataatgctgcgacgtctatggggtgcattgaactccgccggagagtgcaaacccggagacctaaagtccgtgtagtagtagtcgccttcgcctgagtctgagcccgagttcgagcatagaatctgttgcagctgcactatccgccttcattgtaacaatgatggtgatggtgatgctactgtcgcattcattgttgatctcaattgaagctcaatttccatttgcattcgcattcgcatttccatttcaatttcaacagcagttaagcgttatttcacttcatttcatttcatttcacttcattttattttatttcatttcatttcattttattttctgctgctctacatggagttgttgcctacaagtaaagctacacatgtacgaacatacatatctcatctggctgcgagctgtttgtacattatcatgggcaccgagagaaggagcagcagcagcagcagcagcagcacagccagcggaacaatgagccggagtgcgctgataaggaagccagacaaacccgaccaaactaagcgaacccaacccattaacaagccgccacttgggtccaggtccacactcctctggcagccttattttctttattattattatttcaataccatagtcgatcgtatatttggctttcgctgtttccctttgtgaacttacatgtgtatttcacagagcatttaattaaaacgcgaatcaattgcaaacataatttgataatttctttggggacgcgaaggcgagtggaatacgattgggtttatatctgccatatgagggggcgttgggtattctgggttctgaaatatttgttgggataggccaaagtcgaggcaaaagtaaattaaacggaaaaaaaaataaaacgatacaaaaaacaaaggaaatgagaaaaaggaaaaaaaggatttttggctcaactgcctaagcttaatatgcatttacagataaaatagctcctttcgcttccaatgggaaaacatagataaatgcaaacaatcaaatataaaaaagtgtcaaatgcagtaaatgatgacaaataaaaggcgtaattctaaaaagaaaccttccataaaaataagctcacaactattaaattactttgtcaaattcgaacgcccaattcccaacgaaatccatttaattctgtagaaatctcccatgaaactatgttccgttccttaattccggtaaaatcgttaaacaattacgagctaatttatgagataagaatcgagcaaacaatagcgcctttgatagcagcaacgaaagcaaacaaactttgatcttcaattacgaatatccctcggtgacgtgcgttgcgctcccaaaaaaaacaaattcggaaaaagatggaaattatgtagacatacatgggtggtacacaaattaggaaggtgagaaaatctgttcgactcttggctcttgtcaagagggcataggtacaaaaaaaaataaataaataaataaataacacccacgcgatccgcacccttttggcctaaccttggctggcaatcaaacaaagaggcaaacatttattgttgggcttgcggaacgcgcccaactacctgcacacaaaagcgggaacccgcagaacggatcccgccaaatgggctttacctggcacggctgcagataaggcagatacacgggttgggatccgtggcggggtgggtggtggtagatgatacgcggcgatatgcgcccattgtttccaagcagctaaactgtcgtcttattacagagcagatacagatacagatgcagatacagatgcagatacagatatatatgcagatacagatacagatacagatgcagatacagatacatatgcagatatagatactaaagatactgcggttaaatggatacgttaacgatatgacaatcggagctagcctaaagccactttcgtctatctaggatgatacaccagaagcagactcaggctttgcactcaattggctgacaaaacgaataaggtgactttaattcaattcacagcggagatcagggcgaggttggtgtaaagaatcaacctgaatagttaaacacagatgttggttgtctcgggaatttgcaatttctataattaaacgcagactcctccggacgaaataacagcttcgtagaggtgaatccaaaacagattgtcaataaaaacaataaattaagtgtattgaacccagcccactgtgacccactgtgctccacccccctaacaccccccctcccggtacgctattgtacatccttcactacggtgaaagatgagcccctaccggtcaagtggatcgaaaaccatgtcatagcggaaatgaaaacctaagaagtcgggccaatttgttcaattgaaagtagatggttgtaggtactttaaaatgttccacatctttaatagaaatattcaattacttttccatgcatattttgtttagatcgctcaacaatcacttcttctccatgctgatctcatttttgttaccatctccccacaatccaattagcggactggtcaagtggttcgggcgtttgattgaaatgcctgcgtcttggctatagttttactgttttgccagtaatcttatcgctcggccaaacttggcaactggcgaaaagcgttaaacaagaaccgacaaccgaccaagaagtaaaaccgatatgaaggagcatggaattgaatcaccggagacaactggcgcctctcgcgtaatcggagattggggacctcgacattttgtgcttgaatgtttggatcttttgctgggctggctggctaggaaatatcggcctggaacacccatccatatcgattatgacatgttatcagagagcggaggcgcaacaagagatttgtttttcttttttgattcgcctaaacaactgtggcgtgtttgccgataagccagcccattagcatttgatgttgggatagtacaattaaggcgatgtctggatttcgaatgtatgtttgtacatacatacaaatacaaattggtgaataaaaaacgtttaactcttgttgtcagctggcattccagcgaggtctaactatcgaaaaaccgtagcaagatattagaaactcataattttcgagaaacgaaggggtatatatctttatggggcacctataaaattgatacaataacagaatgttgggcactaatcaaacattcatgagtactcagagtgtaagtacaagatttgaacgaacttttcttatgcaaatatcttaaggatactttctattgtatttcatactacatctcgtaacacattcttaccgaaattacttttgtaatgatgctgataggcttggaaatttgtgttgttattgccgccattgttgctattattgtgatgggcatagtgatggccactattgttgccattgttgttgttgttggtgtggccacccccattattattattattactattattgttgttattatggctcagattatgcattttagatggaatccgataaccggactcataatgtttatactgattgtaggtgaatcgcattttgattgattttcactggactctttaaataactttaattaactcttatggctatttgtggtgcaattaatttattttcgattagtgattgttctttccactctttctactctctcctcgagtttctcgttctctttttgggataagtgcttttagtatattttataattatgtttacaggcatcgattttgttgtcttccctctgacttgtattgtttttgttgatttggtaaatattgttggcacatttaattgtttctttgtgttttaaattaatatttgtaattttggattgactttgtacatttgttttgtgtgttgttgctttgtttgttggtaaatttgctctgcagttgctttaattgtttgtatctaccagctatttaaataaaaaaagaaatacaacttagtataatgcatgagacgcgtgaaaatcgacagaaaaacgcccaaacgtaacgtttttaagcattttgcaacgcttagaaaacgctcgtaaaacgcactcgaaacgcttcgaaaacaggttgaaaaattcgttgtttcgttttgttttgtttcggcacttcgcttatttatttattcatatggccgtttggtttttttttttttcttttttggatttttgttttgtttttgtatttcgtttttacagctcgatgcgaaaaaccgaatccgactgagcgatgtaaaaatgttgcttttatacttttatacacacatcatctttaatagccggcgcggttcaaagtccaagcgacaagagcaggcagaaaataagaagatcgcattggtttaatgatcattttgttgcatattgataatgattatgataatcgggggagaagttgcattgggcgggggaccttaagtgcattctttttccctttccccaaactggtttcgttgtccaaggcgccttgaaaaagttgaactcgtttctgttttccatttttcatcttttttttttttttgatccttcaatagcttcctggtatctgtcttattattattttgtttttgctacatgatcttcgtacccgtttacagttagagttcggaatcggaaaacgagttccacacgatctcgagattcttccctgttctacttgtttggatgcccttttacttttcggagaggaatgtaaagcccttttcagtggcaagttccacaaggtctcaaagaactacacattacacgcttcaataccataatgatttaggcactcagaactacaatttatgctgagaataataaaattacagaaatcttcaactatgaatgccgtgataagaactagtctcaaaagtattgaataccattttacatattctataccgtaatttaccgactttaacaaccgcttttcgctcagtgcatttcagattttttttttttgtacacgaatttaacgactaatcgaggtgacacagataagtgtgttagcaccgacgaccccgccccttcttctgtaagccccaccacaccaccgcctcctttgggcattgccttcaatggcctgtggtttcggcatggattggtctgtactctggtattattttttttcgttttttgacaatcaaatgccaaggcaagttcttggcttgattaaatgctcattgaaattgtacggtgtatttatcagcaatcggttttttttttttaatatatatatgtgtgtatgtgctgtgtcgtgtgtaatgtgtgtagcgactatgtagccgttggttttgtgaaaaatcatgatcttgtttcattgacccacattgaacgtgtaataaacgagcctcgaagtgagcagaacaaactaagctgatcttatctgatctgcgcgcagctcagattattattcgcttttaatttacgatcaggaagcgttgggaaatctgtgaggatgctcagaaatttcacggattaaggaaactagtctggaaattcgagttgccattgttttccgacagcaaccagctaaatcccttcaaaaatcttctcgctgactttaatttaaacatcttaaatcttacacaaaaaaaaatctctttggaaatatgcattaaaataaactattcagcgaaatgcattaaaaaaagtcccacgaaaatcgaatcgatttgcattaaatgacaaaactactttgtttttaactttaaaaaaaaaaaaataggtattttaatatattttttattaaaccgtcccaagtctagagatcatattttaacaatcgatttcgataagttaatatttttgccagctctgaagaaaacacttctttcaccgacttctacgatcacttattataatcatttcttatttattcttatttctgctttgcttgtttgctcattggccgcatttaaatttgttataaacaaaagtttttaacgcgatattcggtatgcggggactcacagacagaaagtgaattaattgtgtatagaattgtgttgtatttaatttcttttttttttggcgcttgggagattctagacgggttccggttgccttcgttgtggtctgcggctctggggatttgcgactggaaccgacttacatacatataggcacagggactgtccgcttgtcgaattctgcccctcggcccaaaatccgataagataaaccccgagcaaccgaaagaatctatttgggcctcactcaaaaaacaagaaccaaaaaaaaaaatgacactacttatagtttaaatcaagattttcagtaaaaaaaagagaacttgcattaaggaataaacagggatctttagagaataaagcttaatttaaggcagttcaaaattattcctctatttacatgaacgacttaagaaaataaaaagaaagtagataatttttttaaatttatatataaattttctttttaaattaaaaaaaaactgaaatacttttaagttcagttgcaacgtgctaatattaaaattcctatgcccaagcaccaataaatacaacccaatgtaaacaggtttagtataaatatatagtttctttatctaaatttcttcgatttacggtcgatattatatcttgatcgtttttctcctataattgtagttatgtgttttttttttcgaattccgcgatcaggtcattattattcggctggtaataaaagggcgcaccagttttaacatttcaaataacgaacgttaattgagcacatcacaccagaaaaaaaagcgggtagcacaaagtgcgaatttttagcacgagttcgtagccgtaattgtaaccgtaagccgtagaccgtagttcgtaagtcgcgaaacgcaagaccgtaacccgcaaaccgtgacccgtaatcggaagaggaagagcggcgacgagtggcgatgcgaacacttacgctgagatcgatggactgcggcggaaaaaggtgggcgcgctatataactttagcgcagactcgaacccgaatccgaaaccgagccggagaattctctctctctcaagtgtccggtccgggcgaaaagaacgaatcgaatcgaatgatgctgaatgaagacgtggtgagcgagagagcgagcagaggggcatgtattaaagaggaggatgaggagcagagctgcccaagagagagagcaagagccgactgagatggagcaacaagtgtacgcgtggccgaatgacgacaacgggtttaattgatttcgatgtgtgtgtgagcaagcagatcgcgcgcctagtttctgtttgttgttgttgctttccttgtccgcactgattgcaaacgcaaattgataaagcagccacaaagagagaggaccgcaaaagagcgagagggagagagatggagccgcgatatcaatattaaaatcaaaagatcgatctgcaacctgcacattccatcttcatctcttttcgctctattttatgcatcgggccgccgctgcgtatgcgcactatattagggtgaaccttatatgcataaatgaaaatctaggaaaaactcatatcagatatcagaacagataatatctgtatgtataacttgattatttagaactatgggacatcatgtcgtatgtgtactttcgtttgacaaaatattcatttgagacttttgttttcccaaattttacctagagcggtccatcccatttcatgtttggcttgatgcgtggctgttaattaacactagacagcacacgttcgctttgcggtcacttgcagacagtcagggccactctacagaacggagtgccaacataggtccgcacatataaacactgataagtggacaaacaaacgaatgccagggattgtgcactggaagaaaaaaacactatgccctatgttttatattgttgcgaataaatgatactcttccgaacgatttcaatcaactaagaatcccctattatttccggataaagataaaatttgtaagcagtttctttttttcccagtgcatttgtgtaaatttttcgcttgggcgcgaacaactatttggcaagtgtgaccaaaaaaaaggcaaagcttaacaccaacaaatttgagttcatttatggttaatttaatctcatccattagatgttgttaatttgattgctatttgaaaaatagaaaaataatctgctgtcccattttgacgcacattttcctctatgtttctcgtcatctccgggccttaaatgctattaaaatcttgtgtgcagctataacggtgaattttttcttttcgaaattcgtttgccccaaatttagtcacaccacagtcacgcgtaacgaggggggttggtggggcgtcgctttggccccacatgtcaagtggcccagctgagcgtgagcttaagcgtagcggacacttgtaaagagagcgagcgctcccattttccgaatgtatgcgaagcactcccgaagcgatacgacaagcgatcgtgccaacaactataaaagtatcagcaatggcgttaatttcttattggttgacgatggacgaacagtggtacgaaataaaacagaaaggcacggttttttgataaaaactgttagtggtataattaagcactaagttataactttagaaattgtgttattgtgtacgaaattcctaatcgtctggaatgtttctgctacattatggttttagcacgctctagcccactgtggcaaagcaacaactataacagtaacaaaacaaacacagcatacaacacatgtaaattgttaacgccgacgtcaccatgaaaggcagcgcagtcgcagtcgccagcggcagaggctctcggcagagcaaagagagcacgcgcacacctcaggccgtgttatcaaaacaagaacaacaacaactattgatgatagtttttttttaattttgacatttttcggtttagcattgaaaatgatcgaggggatggggaccagccagagaaggcggggtagggggaaatgtgggagcgtgtatgcgaaggtaacatgaaaataaaggcacacacacactcacgcatacgcacctaataatgcgcatacgcagcgttgacgcccatttttttatgcgcgttatcaaagaaaatacataataaaaacctgaatatttacttttggcgcttccttttcactgggagggataaggcaaatgtagacgatcaaaacaaaacaattaatatgtaattaagtaatggcaataaagcaatttgttcactttgcaaacgaaccaattcgaaagaaactcaaagcaatataatggatgggactaggcaatatcagaaaatctattccacaccatgttttcacacctccaaaatgaattctagattctgtttgattcgattggggatggtagctagcactaatcgatcccaaatcgcagcgcagtgcgtaagcttagctcgattcgcgattaaattgaattaataactaacatatttaatggccatcgtgcacatttgtcactcggcgatgtataatttataacattttgttcgttgacagtatagctcccctcgaaaacccccgatggtcccgaaaaaatgatgattacatctcgtgtatttgctgattgttgtgttcgctgattgttgttgctgttccgatgaatgtattatattataccctacttttagtgcgtggcgaccttagcaatgaacacagccaggcaccaacaacaagaacaacgataataaaccaacaaccacatacaataaatatacttgggtatttgtcaaggttcaaggttacaacctgcacttattaatacggtttattgtacttttgtttcatcacctgcatcagtagtttcagtagtacaaccaacaaaaacaactacgcggcagcaacaacgacaaaacaaaacaactacaacattagctacttgacctgcaggagcaattggcttctataattatttatacgatgtttcatttgtttcggaattttaccagttaccgaagttgcaacgacaaaaaatatacatataggcaaaataaagtaccaggggtacagtaataggcggaaaactgtactttaactcttgaaggagtttgcagtttatctacaaagtagaattctaaatacttccgttaaatatatgaaaataattaagaaaaattacatacaaacatttattattttgcgttgtactataaaagcaactattaaatactccaactgtctgggcatttttccccacgaccttacaaccacgaaccgcactgtctgggccggcacatatttaatttgatttgacgcgcttcgatttgtttcgattggcactctaattagtatagctacaaaaattgccaaattatttccaatcatttgtctccgcattcttgttttttgcgtctcgtttcaaattctgaattagccaatgggaaatcggccagaagagatctcgatataagacatttactttccgccggaggcggcagaacgaaaaaaataaaaaaaaatattttcatatccaacggatgctgtacattatgtgatatatcgctctatacatacgtagcccaatatcttaatcatgttaaatgcctaatcacgatctcggacgatttatttcgtatcgattaacgcgattcctcctctccatttcccttttttctccacctatccaaatcccttctgactggcgacgccacgaataaatgctaaccacaaaggtaaacaaaagaagaggaaaaagcgtacaaaaagcgttcgaacctttttttggtcaagttttttggttaaagaattttttctacagcgctacgatgttgttttcaagcaaaaagtttagctattagttgtattatattatcacaattaaactaaataaaagtgtgtgtttttttgttttttttgactaaaatgaaggaacatgctggataaaacctacaattgttaacaaatcttttttacattttcggtaaacaattttagtgttttgtacagcaataaaaaaaaaacgaaacaccagacacgaaatgttattgaaaacgttttgcgtatggcgcttttttacggcggctgctgatcgtaaaaaaagttaaatcaacagacagaaaaactcgcaaaaatcaaattgttattcccctgttgcacgtacaacaaatggtaaaaacaataacaacgcaactgaacttcaaaagacacacaaaaacaacaatcaaggaaaaagagtttttagtgcttctttttttcatcgcgtcgtttcattgttgtattgtttaattaatttgcttaaatttgttgtaattgccttgctgacgctacattttgatttaattatagcactggcaaaagcagtagaaaatatcacgcatacgccgcattggccgcccgtccatctcagctgttaaacgcatgctcacttaacagcgcccgcagggcagtaacagccacgtacgttaacgttaacagtagccggctgtttatataattgatacatgatgataaatgacaaatgctcctaagtactaataaccgcatatcgcagtcttataatccgattagatccgttccgtattgatgggcaatttcaatacttcaatagcaagcaaatcattttcggaaatccttcggaaacacttaaaacatcaacaggctgcataatcaaaggtttaaactattgataacagtacaatttgagttgattacttcagttcaatggcaaaaacaacaaagcatatttagatcgcagacatacacttgtgtacttgtgtaattcccgaaaaactaaaaccttaacacctgcttcaaagaatagatttgaattgaaataagattgtcgaaattgtatttaaagacaagtgatctcgtttgtttcgtatgcctataaaaaaaaaaaaaacgaatattaatagaaactgagcacatattaaaaggccatgaaggatcagcacttgagagcccctgatctttagttccttccatgttcgatcttcgcattcgaattaatctcttctgcttcttcttgcacttaatgggaattattgcgcgtgtcttctaatcgccagtttcttttcatagattatgcaaacgcgcttggacacaggcagcgtgataaggcgcggaattatggcgaacggggagggggggggggggggtaattgggggaaacaccatatcatatcatatcagcatactatcatcatagcgaaaactgagagatcgccgactaattcccaatgccgtacccccaacaatgaaggcgcccgagaaagagagagagagaaagagagagattggagaatttgataagcgctctgctcgagtttcgctcataatttaatttttactcgtattctaacgaacttccgggggatctatgtttattttcggcgaccataccaatgtacctgcgtcgtctctatggatgttgtgggtggctggttgttgagtggtttggcaagtgcttgttttttggcatcacgtggatggatggggatttgataacacggccatgacaacaccttgtccctggtttggtattttggccacagcagcagcgggagaaatggttgtttgtcgtgtggcctttccacttttaagcatatgtaaatgggccacgcccactagacttcaaagagattgaggtgaaaagcgaacggtaatatatataatttgcatttacgcgttaaattgattagcataccgtctagttgcggggggattcactaaagatcaattaaagatagccgttgtaagggttcgattttaatttattatgtaatttatcatattgtcaagttgagaagtttggaaacattagcttaaaggcaaagcacttcattcgaaatataatattatataataaattgtataaagtgttcaataagctgattggtcagcatgtttttctacaatatttcaatgcagtaaaaacgattgtgttagcaaaagaacacatgttacatatataattaataatacatacactggcttgcgggaaaaaaaagagggtacggcataaatgcaaaaactaacttgattcgactgaagtttagatcttatatcttacgtagggagtgagttctcttatcggcgatagaaaaatgaaaaataaagagaatggctcgagaaaaatgtctctaaaacgaagagtaaattaatcaagaactgaataaattgctgttaattgatgtatttgtgtttggtttgcttgtcgtgcgttttcatcaattcataggatcgaatggatgactaaactgcccagcaatgtcacgaaatgcgctaaataataatacatttctccagcccctctttttttgccctatcttttgtttttaatctcattctagatctttttcttcttctattcacacagccttcaaatctttcatcaacattttcatattcgtacattgttctgctaatttttttttttaccaggcttttttacttttgaacgctgggcgatttattattgtttttgtttacacacatcaccatataattctcaactttagttcgctcgcaacaataatggaatataaatcgatgcgaattgcagggtaatgagagtagccatcataatttgtggagcacatatttctttcattctttcaaaaaaaatattaaaaacaataccaaaatacatatgtacgtatgtacatatgcgccggcgttttatgaatattcaaattatggattgtataagacagcaggaacaataaaggaagctctaatttgtttatgaatggccgttttatttgattccatgaatgaaaaaccagcgcagtttctaaaacattcaagagatgaacccgggcgcagatagattgtcgaaaacaattacggaacaatcaaagccgaagaaagtaaagaaacaaaccgttgaaatgagaagaaaggagcccgaagaattggcgagggaagaaatggtgagcagatagcgggcagcgagcgcgtcagaaaacgcggacaactgaggcacgcgcacgtcacgtgacttgggccaaaacaaaaagccagcaatcggaatcagcaaaaacaaaaaaaatacaatataatataataaacaacaacagtagccagcggccagccaggcactcacaaacgacctaaacatatatacacgtatctacatatgtatgtatgtacattagtgtaagtgtagacttttcaagatgctgaaatgtgcgctcaatcgcgatcctcaatcaaaaaccgacatcatcgaagcgcccaagcaaatcgcagtgttcgtcatagctgctgtatcgcatgtacatacatatgcatgtatgtacatattcgttttctcacttctcgacagcaattttcatagaattcgtaatcgtacctcgtaagtgttgtacatacaaacaaacatacatatacatatgtatatttggtagtgccgaaaaatcgagagaatcgcgagacagccgccaagcgaaaagtaaacaaaatcttatcagacaccgctcacgcccagctcataaaagatacagatacattcggcggtgatcacatatgtacatatgtacaaatgtgtacattagacgtctgcgctcgcgaatttcacaatacaaagcgaaaaagcaacaaaaacacgctcagcccacaaagtagtatgtatgccaacgacctgtgaatgccctgcggtttcaaagatcatccactggactcgtagagcatgcgaaaagccagccaacagcgtatttccttatataaacgtgatcagagctgtatggaatcttctaagctaagcttacaacatgaaagtatatttagtctgtattgaatttgaattgcattttttttaaaaggccttatattaacatgatataccccataagtaagtaacgccaatagtcttacccttatagcagggtattctcaagtcaaccttgaccacttacattaccgaaaacgactagaccgacggcaatcgctaagctgtgcgtctgcgatttgccttgccaaaaaaaaaaagaaaaaataaaataaagtaattgcaagacttttgtctgatcgcttcgagtatgctatggtatatggtgtggtctggtcttgatgggttttgggttttgggttttgggttctctgatcgttaaaaaacccgccgcagactgcgtggaagaggaagcagaaatcgtcatcaaaatgcgaacgcgaatactcgtacgaatgcgaactacttttgcgatctgatgtgatctggtttgattcggatttgtttgccccgtcgagtcgggatccctattattatctcgcagacagactaaatagtaatagtattgcggctgtaagtgaagccttagccctactctatctaactctatctagcatacccccacccccccgcgtggatttttcgattcgaaacgggtgctacacgtgtcgcgtagccgccagagttcgccagcacaaagcccccactcaaggtagagcataaattctaataatctcttacataaaacgataaatacaaaaggcaaatatttacgcaataggggaacacaacggtcaggggaattcgaacatacgaaatacaagaaatacaaaatacaaaatacgaatacgaaaaatagttcagttcaaacaggtaagtttcgtttgggtctctcgctatttgttctttatctctgcgattctgtttttctgctgaccccggatgataagatcttttttgggtgttctatttgctaccggtatgtacatacataatgtctcgggatttatgggatagtaaaagttatattcggcaatcttcacactttaatcagttgtcagtaaaatcaagaaaaggttatacggtatattacatttcaactatcaatctgtacgttttccaacacttttcgcgcaaagccattcactgcaattcgataaatccccgtattgagcggcattaactttacttgagtttttcataaccagctatgcaaatgttatgatagtgttatttagacagtttgagtccattcatattcaaattaagccattttcggctcatgtgaggatctctatagggctggaaaactcgtctgaagcggctctaagttgtttttcaattgtgttacttttttacagaccccttttcattgttattgttattattattattattagtttcttctttttttttaattgtgttacccttttctgttgaatgggtatgaaaaaaacgttcgtttagcacttaaataataaaagtaaataggcaaacaaagatttcaaatgcgtttctggctcagtgtcgccacccgcacaacaaggcaaacaccccatctacacccatttacagccatcttgctctaacttcaattagagtcgatggaccaagaccgcccccacactcacacacacacacacacacactcgggctagctaaataacataaaatacaaacccatctcacacacacccccacttgatatttgccgaaggctgtgcgttgggacccctccccaattttctattatatttggtggggctcgtcaaccaaaacagaaaaacgccaagacaacaagccgcacagccaatgtacacaaataatttggatgatttgtgtctgggtgtccaaagtgcaaaaaacgtccgaaacgcaggagaaaataaaagattcgtacgcgaaattcaggtatattatcaggtatatacgagtatctggcaggtgagaatcggcaatgtctgcgacatttccgtattttctctttttttgttaacaaaacactagtttattgtgatgttgttgttttcttttcgtaggcaaacaaaaacaatcaagtgttaaaaattacaaaaaaaaaacgctcttttggttaaataaaatcgtaggcttaacttgaatatattagttattaaggatatactcatttgtaattacatttttatctcaaactataatagaaacaaaattctaaaaataatacgtaacctgcaagtaaaattccgtgttcaattgaacaatttttgtgtttttcattttgttttggtgaaacaacgagaatgccgtttagtcacgttcaagatactgattttacaaaagtcgagagagataaacaaacattaggcaaatggtacaatatacatacaacaccgagccgggcctttttttgattataacgagcgctgcaagttatcatttctacttcatttcgcattttttcttgccgagtattaattcggtttttttttgttttcacccattttggtatggcaatgtgaatgacacacgggaagggttcaaggccaagtcattttggatagacaacaacagcagaatattacagatattgacaataaaacaatgatggagatatatgtatgtttgcatttccaatgcaagaaagtagtagatattattattattattattactacaacctacgaaagttaactttaaagtgacattgggcttttctaaaaatattaaataaaaagaaatctacgatgatcgtcaaattgtaacttttaatcgaaattactcaatttagcaaatagaaacttggtgaaattcaagacctacattgcgaagtaataaatggcttgaatcgcttgaatcgaatcccggtttacatctcgatgcgttccatcggctccattggcgttgattataataattcataaattaataaattaataaacgttcgcgtcgcagtgtcgattggtgccagttgctgacgtcacggccaagacaattgatttggggctgatatatccgtgccttcgcatggagtgccagaaaaatcgcagtgaaaataaaaccgcaactcaaatatcgacagtcggggtctttagcctgacagcgttttatcaaagggttaaactgctcaaaatgcggtcaatataaattgaaaaataaaaataaaaattccctcaactatgcggacttttaaatgccctgaacggaaatagcgcatttttagttatgaaactataggtgtatacggtgattaactattaagttttagtaaaatatatattcaattatggaatattctagtcagcgagggaattcatatttgttattacacaaataattatacccgtgttactttttattatgattcacatttcaagttagttagctagttagtggaatcaagcacgaacttttccaaataatgaatgatcaggtggctattttcgttcctctggctattgagtcattcatgaataacgatatgaataagaagtgttggaagatcatttatcatgactggtatttccacagatcagcatcgaatcgatatgatcgcgaaacgcactgtatcagcgctagacttccaatttacaattaccggacctgcataacaaataaattgctaacgctaatttccattccggcggggcggcccactctctgcttgcgaaactccccacctcatctcacctggatgcccgactccacgtccagttcacctgccccgtcctcatctttatatcaccctcaccctcggatgcatttcgaaaccggctgtcggacgaggggactcacctgaatgacgacagcagaaccacgttgtcgtgtacgtcacaacaaaagccggagaaaagtttttcactccacggcatttccggacaaccccaatgcactcgaaaaaaaaaaacaagtacagtgttcagaacaaaaaaggagtacacgagtatctagtatctagtatctagtatctagtatctaatagttgggttctaattttcttctaaggcctcaaaaccacaaatattttaatcagtctaacctcttatttagcaaatatttctttcagtgatcttctgagccaattgcgttttgtaatagtcgatggcgattgcgggtcactgaagggccgacgaaagggctatatgaaatcaaatgggaagacggcttctggactagatcaattttccaagaaacgcttgccagcgttgcgttttgaccttagacaattgttggctcgcgttttcctgctgcttattgcagtggaataatctagcaacgtaatggaatttaatgccatatcgaatgacaacaatggagcggagaattctagatgaatgatcatggagtaggttggttatctaatccgcacgaacgaatgcatgaatgaaaacatccaaagaagatacattcggttaaatagctgatcgtgcatagaataatgcgtatcttttaagttctcaaatatatgtacatatatattatacatatctagaaaactacaaatatttcaaataaaatatggtagtggtaggatttattttcgattgtttgactcctcatatgaaaataacaaaatgttccctcctcctcctcctcctccccagtgagcaattattaatgcagaatgcaaattcaaacacactcatttaattactgcatatcgcatatgcgcatatgtacacacatatattctgtgaattgggccaatcatcagctgcattaatattgttctcacggccgttcgttcagttgtttcacttatttattacatttactgagaattaattgtgaaatgcagctggcgagggaagtacattttcgagcgtcaaatgtcctgtagatgacgcattctttgagaaatttcaatcaatatccggccacacaatacggtctcactaatttcgatttgctttggatcaaaaattatgcccccataaacgctctgattgcattttattgtctcctgtttgtcgccgtgctttaatgaaagcaccgagcacacacacaagcacacacaaaagcaaacagaaagtcccaaaaaaaaaaaaaaaaaaacttggcaaaaaagtcatttaatgggggcatatataaatttcggagcggacttatcggccgacaggcattacaatatctttatttcgatttttcacttggctggcaaaggttggttatttttatgttgttgtcaggtaatcataaaagccaaaccgaagaaattcaggtggagccataaaagaggttggtgagatttggcaatcaataatgatagtaattgaacttaatagttttggcgccctctgtctatcaaattctagatcgtgtttttgaaaaaagagcaaagaaacttatttggaatcttgtagaaaagcaaattgtaacttaaaaatcgatgcaaaaagtttaaatttcagagacagcagattttattcaaaatgttgttaacaaattcctaataaatacgcatgaaaggaatgttgtttttacttcctgctctgcttagtcaacaaaccatttctttaataacatcaatcaacaaaacgtgatgctgccgccaaaaaaaaaaaaatttttaatcattttgttttgaacgaaaagtttatttgaatgatgcatcgacatcgggcaaatgatgaacttgctccacctgctcccacccattcctatagatatgtatcttatatctcctacctctcatatatatgaatacatacgtatgtatataaatatatgtatttatgtacatatatgcgtgttggcgtcgcaataagaaaataattgaggtgggttcgcaaaaaatgatcaaatgattcatattcatcgacttggatttacccttatggttagaatatttgatgttaatacaatgaatttgattactaataatgttgaataatagttgatcaagaaatggctatagtcgaacaaaatatagcatttcattaacttgaaaattaagttataccaatgaaatactatgtagagatatttaacaaatatttctgaattgccaatcgaaatatgtataataaagttagctgctacaagttgcaaacaactgagtaaatagaaaaacccttgaactttttcagctattggacatccaaacgaaaaataagagaaacaagaaagcaacttgaaaagtgattgccattgaaaatttttgggtgaaagccgcagagaattagaaagagaaaaaaaaattgagaagaactggtaacataaaatgggtaaaaacataaaaattggagaaaattggtggaaaaaaaagtgcggaaagagagctcgtgttaggtatttggtattttttttttttttttgtggattcaatcccagacaaacaacgaagttgagggcaaagcggaatgcgagcaaactataatagtgtcgcattggcaacaacaacaacaacaaacgaaacgattttcatacataattaaattgattaactaagttgaaattattcaagtcgctgttgtcgccgccgtagctttgcatactaaaatgaaaaaataaacaaattcgaaaaacaacctgtagccagacgacgacggcgactagcaaaacaaaacaaaacaacaacaatagccaaagcaatagcaatggcaatagcaacgagagtggccgccccagcgacgacgatcattaactaatctagagagcagaaaattgtattaaattaaccaataaacaattgctgactaagtcaagtcacgagacttgcgatgcaattaacagacaagcagacagacagacagacaaataatggacaaatgtcgcaggaggcacaaagtccacttaatttacagtcagcatcctagggcttcccagctggacgaaaataaacgaaatgcatcatggacagctgggatacagtggtcgttcgctaagcggaatcactgctccagcgatgttcttttttaagatcttattgctagctactacatttatatcactttaagtaagttaatacaacagatggaattgtttataacattatttagatgccaaaatatccatagaaagttcaaaacttgttgaataatttctatttgatatatgcaaattactgaccactgtacttgctgctcaacaagtgcaaccacacactttgttaattccttgtcctgccactttcaattgtctccatttccatttcgctttcgagtgggttttcccatctaaaacagacacaccctcgcaaaaggaaactatatacattaactgagttttccagcaggttgccaaggagccgcgaccttgttggaaaaacatcccattcaattcaattcaattcaatttgattatatgggcattaagcggagcaaacaaatggctcaagagagcggaatgaaatgagacagttgagcggggcgggggcaggggccaggggctcagggcgtgctggtaagccggaaaaatgggttgggaaattgaatagcgagcaaacagttgaaggaaaaacttgaaaaggattcgcaaggtgtttcctaggagttggatctccagaaaaacacttttcacttgtcttggtcgcagagaaacgattatgaaaagaatgtcaaaaaaaaaaaatataaagcacatgtacaattacagtgataactcatacggtgaaacttgaagccaacaaaaacagaagcagaggaaatttgaagttagaaagtgatgtgtttataactggaaatacagacatgcttacactttcttgcgccagaacttactggaaattatagagccgcaataaacaataaacaataaaagctcaattcctcaacacaactgtgaaccagtctgtcggtatcaattaccctcagctggtgccacatattgaggaagccctgtagtcgcccgtgtcagcattgtacacacataatgcgtgcttgtgtgcgtgcgtgtaagcataaatgcacgtgtgtgttggtacacgtgcgtggctttcaatgtcgcaaagtttgtgggggccaaatagtattttccttattgtttttgtttgtgtttttcttttaacgtggctgatgatatcgttagagtataatcgagagtgggcgacgaaacgtgggcggcagaaggggcggaaatcaatcaagaattatttgtgggggagcaatatttttacccaaaatatgtgtacaccttcggacggtctatttttgtttgccatctatttgcgtcaagtgcccacaaaccgtacgaaagatacaaataacaaatgaactctctcaaagatctattgaacgacaccttctacataaactaactggataacaagtagtggtatttatcagtcatactattttcgttgttattaacatttttcagttcaaataagagctaagcccttatcttatgtacacaaatgtacatatgtacatacatgtgtatatatacaaaggttcaccaccacccattttttgcaagtaaacaaaaacaggttctaatagagccgaaagaaatgcgtagcaaaattccaatgcccaatagaaacagttaacaataagaacattttgaccaagtgtttgattatattaacaagctgactattgaattgaacgaaaaattcgtaggaaatgtataatatcatttaggataagttctaagtatggtttgaatatatatcttaattatttcaatataactttgagtgacttaaattaaaatgtgataatctgagacccaagcctcgattagccataatttcaattactgaaattcggacgtcaatgtgggcaaggtgtattatttatactgtttggcgtaccttaaacttaacaaatcaaaacaaaaagagagcaaagagaagtggaaagcaatgagttagagggcacagggagagggagagggggtaaggggcgatagagagtggggtacaaacctgttccacgggccgcgtaacttgttgttgttgcctgcatggacgccgaactggtgactgtcgcgggggcggtggtcagtagcggtacggccgagggtccagcgccactggtttttgtgaatttcaaaagcatagttttggtccgtcgtcgtacttgttgttgttgtttttgttttgttttgtgttgatgatgctgatctcgtattccttgatatcgttattgttattgctgctatcgatgtttgttgttgttgttgttgctcgccgggagagcgttagctggctaacgggacaaagtaagagtccaagtggccaacaaggctgcgacttttgcctgcgtcaacgcttcttcttcttgctcttatttgccgtcgtcttcttcttcttcgtgccctgtctatttgttgctatttttagcaacaacaattcctcctcctttttcagctctttttcgctgtcctcttactcgctctctctctctctctctctctttccctcagccacagccgctctttcactggattcctgctcctgacgttttttgttttatcaattatattacagttacagttcttgcctctcgctcactcacacactcgcgctatctctttttttctcttacacgagtgggtgcctgcacatgtgtgtgtgtgtgcgccttgctcaattgttattgttgcgtggccaagtgttttgcattgtttttctggtcccactgtcacttgcattcaatggcttaacaatgtcactgttgcacgttaacaaaaaaacactattttgcgcactatttgcggacgctgtttctatttgcttcttctatttttcaacttgttgcacagagctgccagaccggccacgtacgttatcgacattcctaaggggaatatcgataacaggttggtgtgttagctaatttgatatcgtgtggtgtatagcttgggtggaaattcaccttgaaataatcaacacacccccactagtatttttaaatcttttaatcaaaaaatatattttttatatttgggaaacagatatttatgcttattcaaaagcacacaactagtttgtggtaggtagcagagcagaactagccaggactgcaattcaaagtggggaacttgattagaaatttacaacggtacgtcatcgagttttgatcagccattcgatagcagtttcgattgtcagttctatcggtcgagcggggacactggttcgcacgtgttgcgatttgcgtgcattgagtatttctgtttctttcgagcatttctcgcgtgggggatcatgggcaaattccgatcgaagctaaagcgcaatggcaagggaaagacatggagcagaggcgaatcggccacctccaatcccacccagatgaagcaccgcatgaaggccaaatcgcgattctttcagcccaatttaagtttgggtgagttcttccttacttgccatcttatgttagcacctgtaaccaaattccttacagctgcagccacgaccaccggcctcaccatggaggcggtccacaagcatgagcagagtcaggcctttaatgcggaaaccacaacggttaacgatgtggccggcagtttgagaagtttcaaactggatgacgatgatgacggaatgtccggttccggcaccgctcccaccggcaccgcccccaccggcaccatcaaaaccttccagaccttcgcctccaactacagcggttgcagcaacacatgcttccagaaactggtcaccagcttccggtcctcgtccgctcttcacaaggagatgctggccattctgagcgccctcaccgaaataatccgcgagaacggcggtggcga

SEQ ID NO: 23354 - DNA, 5109 bp, DROSOPHILA
acaagttgaaaaatagaagaagcaaatagaaacagcgtccgcaaatagtgcgcaaaatagtgtttttttgttaacgtgcaacagtgacattgttaagccattgaatgcaagtgacagtgggaccagaaaaacaatgcaaaacacttggccacgcaacaataacaattgagcaaggcgcacacacacacacatgtgcaggcacccactcgtgtaagagaaaaaaagagatagcgcgagtgtgtgagtgagcgagaggcaagaactgtaactgtaatataattgataaaacaaaaaacgtcaggagcaggaatccagtgaaagagcggctgtggctgagggaaagagagagagagagagagagagcgagtaagaggacagcgaaaaagagctgaaaaaggaggaggaattgttgttgctaaaaatagcaacaaatagacagggcacgaagaagaagaagacgacggcaaataagagcaagaagaagaagcgttgacgcaggcaaaagtcgcagccttgttggccacttggactcttactttgtcccgttagccagctaacgctctcccggcgagcaacaacaacaacaacaaacatcgatagcagcaataacaataacgatatcaaggaatacgagatcagcatcatcaacacaaaacaaaacaaaaacaacaacaacaagtacgacgacggaccaaaactatgcttttgaaattcacaaaaaccagtggcgctggaccctcggccgtaccgctactgaccaccgcccccgcgacagtcaccagttcggcgtccatgcaggcaacaacaacaagttacgcggcccgtggaacaggcatgagaatgaccatgtccaccaattccacaatgagtgcgcgtatacatcgaaaaggatttcgcataccatcgaaaagacagccgggtaagggattgcccggcaagttgcacaccataaccaggacgggtcctggcaaaatggttcctgggaagcgaataccacagcgaccccatccgccgccctgcgacaactcgaacgacagtgggctgggtttcgatcagcacacggagctgagatcctcggcaggagctgggggcgttactgatccggcggccaatggaggcagtggctccaactctggccagcgatccagtttgctggtcaatagcgctttaaccaacacagtggctgctgcagcagccgcagcagctgccgcggtggccagcaacacgttgcagcagcatcagcagcaccatcaacagcagcagcagcaacagcagcaacaacagcagcagcagcagcaacaacaacaacagcagcagcagcaacaacattcaccgcagcagcatttaatcagagcgatacctgtatcaagatcgcggaacaacacgaaagtgatggctcactgtctggaggatctggacctaatatcggcgtcctcggaggacagctcgaccatcgcaacgccggccggtttggacgaggacacgggctttgtgaacgacaccaaaacgacgacaaccggtggcaatagtagttcggatccatttggaggcgtctttcaggcaaccgaggcagccgtggcagcagccgttaatgccttcaacttgcaacagcagcagcattcggtgcaacagcaacagcatcaactctttcagtacaacggattgctgttgcagccgcagcagcaattgcagcagcaacagtcgcatcaccaacaacaacaacaacagcaacagcatcaccgccatggcaagcatatcaaacgcaagaagctcgagtgcaaccaagtggaactggacaacgatgatgcctgcagcgaggatgagttcattcgcaagattgccagttcggtaacgatgtcacccacgcttgaggccacgccctcgccgccgcccattgtcgcctccgttgcacctgccacgaccattgttagccttctgccgctcatcagcagcggcaacagcaacaacaacaacaacaacaacaacattgagacaaaattcatatcggccaggaatgtcacgcgtgtggcgaacaaacgtcaacccactacaccgctgaacagcgtcgccagctccaacgatggccaggtgcagctggagattttgtcgcagccggagcaacagcaccgggcacgctatcaaacggagggcagccgcggtgccgtcaaggatcgcagcggcaatggattcccgatcgtccgactgaccggatacgataaggttgccgtcctccaggtcttcatcggcacggacattggacgcgtggcaccgcacatgttctatcaggcctgcaaggttgccggcaagaactcgacgcagtgcaacgagaagaaggtcgacggcaccatggtcattgagatcgatttcaagcccgaaacggacatgaccatcacatgcgattgcgttggaatcttgaaggaacgcaatgtggatgtggagcaccgatttcccgagcatctggcgcaaaagaacaagaagaaatcgactcgctgccggatggtgttccgcacccagctgacccgtgacgatggcaccaccgagaccctccaggtctgctcgaatccaatcatctgcactcaaccacctggcgtgccggaaatatgcaagaaatccttaaactcatgtcccgttgatggcggcctcgagcttttcattatcggcaagaactttctgaaggacacacacgtggtgtttcaggagacatacgacagcgtcaacggtgacgatccggccacggaaattgcagtgcgccagcagctcatcggcggtacagccgctctttgggaacagagtgttctgccggataaggagtaccttcaccagactcatctgatatgcacggtgccaccgtatctgcaccagaacatcctgaaaccggtccaggttcaagtgtcgatcgtctccagcggcaagaagagcgaaccgcatacgttcacctacacggccaagggacagtacacgacgctggcggcggccagcacgttaagtaacacaatccacgcccaagatgtgagcggtttcatggacaccacatcagcgtccaatgcgagtggctccagtggttggagtgcggcaggcggttccggcaacaatacatctacaggcgataatgtggaggccaaacacgagatcgattcgggcatgatgcctccgcccattaccacccaaataccgatgggcgttcgacgctcctcgctgcccagtgtcacacccatgatcacggaccaacagctggtccatctcaacgcagtggcggccagtgccgaggccctgaagacggaactcgacgacagcaactcgcatagcccactgaccggtgaatccacaccggatagccccaacgcagccttgcagtatcatcgctttgcacgaaagcccagcctggacaccattatgtacgatcagtcgaacagtctgcccggtttcccgaccgttgtggcgccggctacagctgccgccgtggccgctgcagttgatattgatccgacggcggtggccgtggcggtggaactggccgtaaaaaatgagattgtcaagcatgtcgtacagcagcaccagcagatgcaggagcaaatgcacgagcagcagcagcagcaacagcagcagcaacaacaacaacaacagcagcaacaacaacaaccccaacagcagcagcagcaacaggtgcacaagtttattgacgagctgaccaaatccacatcggtggtttccagcaatggtaccaccgaaccagctctgttcaccacctcggcggtgatcgatcatgccctgaccgatattctgcaggccaaagttggcattgcgccgcccaatgtggtgctggaaaggagtttgtccctaagctccacaaattccagcagctccatgagcggcagtgagagttcgccgaatagttcacctttgacgcaggatatcatactcaattcagaaccggcagcagctctggccggagctgctgccttgggtggcccggcgcctgtcgatgtcaccggtggtctgtccaccgatatcattatgaatcccgccgtttcaccatcgactattttgtgctccgcaaatggagcggccactgccgtagtgccgaatatactcgcacctcaccaagtgaccatggccaactccattttgaacgatattgccatgcagccggaaccaacacagcaggatgcagcagtagcagccttggcgttgagcaacatcatgatgagtccacccaccgcggcatcgggtgtgggagttggtgacacactgccaccaacaccagctactatgcagccagaggtcgcagccactgccacatccactgcggtcagcaacatgattattaaggcggcggcggactttataaccacccaggagcaggagcaacaccactaccatcaccacggtcgcatccactcccattcgccacaggcagctgtcggagtgagcggtaatcctgccgagacggcatcggatccattggttgacctgctattgaaccactcaaacacaccagaaacagcggctgctgccgctgccgcagtagctgtagaagcagccaacttccagtcgatgaatcacagtcaccacagccatcatggtcatcatggtcacagtcacggccacggccatagtcgcgtcacaggacacgtatccgggcatgtgaccagccaccatcgtggtcaccacttgccggtggtgccgccgacaccacaagaatctctgatcgttgcgctggccagcgagaatgctctgcaaaagtcggtggccaccgccgcagtgaccaccaatggagcagtgatgacgcaacaggcatctgccccgaacacagcgggtagcatacttccggcagcggttggagcggtagctgcggcggccgccgtggcggtgcagccgcccattccccaggagctgaccacgatgtcggatcaggatctgatcagctacatcaacccgagcacctttgatcagctttaaacggcttcagatcaacaaattaaactatgtggacttgcttttttttttatcaactataaatgtcactcctacacaggcttaggcttaagtatatatgtagtatatagagacatacacaaacaaacgataagacggaataaaggtttcatg

SEQ ID NO: 23355 - protein, 1419 aa, DROSOPHILA
MLLKFTKTSGAGPSAVPLLTTAPATVTSSASMQATTTSYAARGTGMRMTMSTNSTMSARIHRKGFRIPSKRQPGKGLPGKLHTITRTGPGKMVPGKRIPQRPHPPPCDNSNDSGLGFDQHTELRSSAGAGGVTDPAANGGSGSNSGQRSSLLVNSALTNTVAAAAAAAAAAVASNTLQQHQQHHQQQQQQQQQQQQQQQQQQQQQQQQQHSPQQHLIRAIPVSRSRNNTKVMAHCLEDLDLISASSEDSSTIATPAGLDEDTGFVNDTKTTTTGGNSSSDPFGGVFQATEAAVAAAVNAFNLQQQQHSVQQQQHQLFQYNGLLLQPQQQLQQQQSHHQQQQQQQQHHRHGKHIKRKKLECNQVELDNDDACSEDEFIRKIASSVTMSPTLEATPSPPPIVASVAPATTIVSLLPLISSGNSNNNNNNNNIETKFISARNVTRVANKRQPTTPLNSVASSNDGQVQLEILSQPEQQHRARYQTEGSRGAVKDRSGNGFPIVRLTGYDKVAVLQVFIGTDIGRVAPHMFYQACKVAGKNSTQCNEKKVDGTMVIEIDFKPETDMTITCDCVGILKERNVDVEHRFPEHLAQKNKKKSTRCRMVFRTQLTRDDGTTETLQVCSNPIICTQPPGVPEICKKSLNSCPVDGGLELFIIGKNFLKDTHVVFQETYDSVNGDDPATEIAVRQQLIGGTAALWEQSVLPDKEYLHQTHLICTVPPYLHQNILKPVQVQVSIVSSGKKSEPHTFTYTAKGQYTTLAAASTLSNTIHAQDVSGFMDTTSASNASGSSGWSAAGGSGNNTSTGDNVEAKHEIDSGMMPPPITTQIPMGVRRSSLPSVTPMITDQQLVHLNAVAASAEALKTELDDSNSHSPLTGESTPDSPNAALQYHRFARKPSLDTIMYDQSNSLPGFPTVVAPATAAAVAAAVDIDPTAVAVAVELAVKNEIVKHVVQQHQQMQEQMHEQQQQQQQQQQQQQQQQQQQPQQQQQQQVHKFIDELTKSTSVVSSNGTTEPALFTTSAVIDHALTDILQAKVGIAPPNVVLERSLSLSSTNSSSSMSGSESSPNSSPLTQDIILNSEPAAALAGAAALGGPAPVDVTGGLSTDIIMNPAVSPSTILCSANGAATAVVPNILAPHQVTMANSILNDIAMQPEPTQQDAAVAALALSNIMMSPPTAASGVGVGDTLPPTPATMQPEVAATATSTAVSNMIIKAAADFITTQEQEQHHYHHHGRIHSHSPQAAVGVSGNPAETASDPLVDLLLNHSNTPETAAAAAAAVAVEAANFQSMNHSHHSHHGHHGHSHGHGHSRVTGHVSGHVTSHHRGHHLPVVPPTPQESLIVALASENALQKSVATAAVTTNGAVMTQQASAPNTAGSILPAAVGAVAAAAAVAVQPPIPQELTTMSDQDLISYINPSTFDQL

SEQ ID NO: 23356 - DNA, 6676 bp, DROSOPHILA
gaaactgtttgatgatagcgacgacgatgatgatgatctgtttgccagagctcctagtatccaaaccgccagcaagcccgtccaagctaaacagccccccaaaccagcggcgacttctcttttcagcagcgatgatgaggaagccgaagtgcctgtaaagagtgctcctgctaagaagttgccagtgaaaccaagcaaaagtctctttagcgacgacgacgacgatgatgacctgttcggaggaagctccacgtccaaagcagctgctgccaaaaagaccaaacccgcggccaggacagcaagtaaaccacctgccagtaaaaccaccacgcccactgctaccattccatcaaactccggtgataatccattggccgatcttcttgatttcaagtgagaaaacagttacgccttttattacaagtatgtacactttttgatctgtggatggttagactgtcgatcagagtattgttattcgtattcctattaactataataaacaatgaatgtcaatgttcatttgtgttcgattcttagaactagacttgggcaattttcatacagtgcctctcttattgggggggtatgctttttgatatttgtttgttttagaaatatctatttatatttttgagtacgtctgatatttcgtgatatttactattacgattacttttatttgcatataaaattatatccccatggagtctcatatttagtacacttttatttgcaaataggtcgtgttattcagtaaagcaaataaaactgaatgcagacccatttaagctacaaattgactggcgcataaacgcgctatacgattctcgcagtgtaacgttagtctacgaactgaaactgagttagtttgtggctctttggtcgttattccgaggaatctcattctagatcgagcatatcctacaactagtgagcttaacctaaacgctgactgatgatcgattgggatccggtttccagaaccaaaaaaacggactcaaagagccacatcgcggtacttccggtaatcgtcggactcgttgcccagcgacaacttgctgttggccgtgatgtacggattggtgtagttggcatagccaaagcccccgtaatactgcatctgctggctgtgcgtggagccgcgtcgctgcatcggctgggccagcacggtgccggcgaatccgccagtggagctgcaattggatggcctgcggtaaatgccgccagcctgctggtggtgcagctgttgctgctgctgctggtgaagcagcatggccaggtaatactgctgctgctgcgtgtagttctggagtagattgttcccgtaggcggtcagatcattctgcaccttgctgatcccgtcaaggttctccagggatacgcaattccgggacagtttacccggtggtggctgcttgtgtgtgccgcgtggacgatggtggctcctctgctgtgccggtggcggtgtcaactgcttgggctcaatggagcagtagatgggatcgttgctggtggaaccgatcagcgaaggcggcgatggtcggtgcgagtcgtggagattgttcttcaaatcgtcgatggtgatgttgaagtacttggcgtttttatcctccgtatcgagcacatgtcgtggattgtacatgccgggcagagtgcagcgcagatccatcagcgactgggcgcgatgaccaccacctgctccgcctgttccgccgcgctgcatcaacgtggcattgttgaactgctgtgccaatgcgggtgcaaacatgctggcgttgaattcgttctgcgagccaaatgcttgactgcctccacactggttgttcatgcccagtcccattcctggccctagtggcaacttggaagctgtttcatcgcacagctggtagccggcattctcgaatccacttagccgctggctggatcgccgggaatctgcctttgtaatgggcacactgggcgctggagtctgcagggaaagtctggtggccaatccttgcagctgactcaacacctgagtctcccgtcgccacctgatgcccgtgggaatcacacagatcagcgcgaagcagttgatgatgaggcgaatcaggtaggaggtgagctccgttaatccatgcacagattgcagaccctaatgttttagtcgtatttagaatagttgtagttttagcatttataaattagttacttcattttacttcaagaagtcataaattcaacttacccagtgctgtgtggtcatgatcatgacaaagaccagctctggaattgagaggagaccgatgatgcccgaccaggcgaacaacggccagcagagtccgctgaccaggccgtggataaggatcgtggtggccacgaacatgacaaagtagagcgagcagagcgtgtaggcggcgaagggcagctcgccgtgggcctccagtatccacgagacctcacacgagaaggcacccagatagacgatctgtagcgaggcagcgagatcgcaaatgggaagaagaagaagtgaaatggaaattagccgagattcgcagaagaaaagcgaaaacataaatcagtcgatggcagccagagatatagatgcacgaaaaacataaacataaaaagccggagacaactgtgctccgcaaccatccatcaatcaattaatgagctacctcgcacctctcctccctccacagctgtcaacttggacagcaacaaaaagagatgaaatttttacatttgcgcaaaaacgatttcatttcattttcacttaatggagcagaaatgttttcacgctgataacggtaacggacagtccgacggacggacgaagatatagtgggttggagagatggtggcgatatggagatatatatctcacctagagatatacttaccagcaatagaaccgccaccacgcagcagataatgaatagattcgcctttatgaagcgctccataatgcgatcgttccaaaagttttgtatgctattgccgttgcccggcggccgcttcttcaatgaggacgacgactgcttttcactggccttctgataattcattattcgtgttattcggttgttgcggttgtggtgtgaagcaaatgtgtgaatgcggtttttcaagagaaattatgctggctagcgggagggtggccttggttcccctttttcaaaggaggaggccagtggtgcgatgcgatacgatgcgatgcgatgtgttctagttcttggtttatgttcgaatgggtttcgagtccagacctcttctgggttgaatgaaagcgttaagtagcggcccaattgagcggtgtcatgctaggttggtgctgaaatgagaattccgagatgaaatgcgatgagatgcgtcgtccagttcgatacggttcggaacaaaagacttaggcaacgaacttgtttcggctgctacacatatgtacgcgcatacaggccaagacatcagcaaacaaacactctcagccactcagctaacggactgtgctatataatttagaagattttcacttttcgacactgcgagttcgttgtccaagtcttttgtttgctcgtcgaagcaaatatttgaccctaaaccttctggttaactgctgactgaaattgtttacctattgccagttacaagtcaacttatgtcatgacaaatgaattcgctagatcggcattagcaaacctattaatcaattacactgcgctgcaaaaatttatttagtaaataaatctcgtaataactttaagcaactaagcaagcaaaagaaaaatgaaaagtgaaatgtattaaatgaatcgtgatgcgaaatgtgaggcaattaacaaatggatggtaatctaatgatttatttcaactcattaagaaaaccgattccgtgggcacttgtagtgaaaaaaaaccagaccaattatcccattgcctggcccacgaaatcgtgttgtggagtgtaaacaattgagatggctcgccaacacatcgcccagagatgcggagcccagttatccgcttattcggatacggtggtaatccgcccataatagacatcgtcatcaaaatagaggcgacgaacttgtcggctcaatgtcgtcagcacgcaggtgcgccgagctcatcgtgctcatcatggtctgcgactgtgatgatgatgatgatgatgaggatcatagtcatcgcgggcgtatccatgggtttggctgcgtgctcttcgtcttgcggcccaaaaaaggagcgacgcaccggatatgcgcaccttaaagcgttggggtggccacttgccccattgacattccgccgacgttgcaagccaagacaccaatcaccaggttttttgttttttcccgagctactgtggatgtgactgtgactttcttcaatggccggaaagaattgcaagccaagtttgttttattgctaattagctggacacactcattcttggctgggctgtccggtttttcgggggcagagctgtagttattttcaaaacgggtttttcggcggcattcgaccaccatttattagcactcagcgccgggaaaaggtggcaagcgatttcgcagcgcccttgactgagtgccacacccatgcggcgaggattacgaaattatgcagatccagcatgcataatttcggtgaacccggtgggagcgtataaatgcgagcaacatttcaaaatattttgcattgtctgcacgggcaattaaattaattccatttcatttcgttattgtttactatgcgagttcaatagcataagtgcaacaatgtgaacaacagtggatgcgaatgcatgaatgagcaacaatgcagcggtaaagttatgcaaattgttattatgaagtcgcagctaaatcgaaatggaatcgaaatcaaaatgaaaaggccaatccaatgcgttgccgctatgctgcgccagtgcgtttcaaaatgcagtcatctattatgtgtatataatatggatatggatatggatatcgatgcgatgtaaaatgtacctttcacttcgcattatgattgttattgcaagcgatccatccagccagccatccatcccaagcagttacaacaggcacgagaaataccaaaaactaaatgaacaataagcgcggctcgtagaaattatcagtcaagcaagaaatgttttctcagcgacgcactcacacacgcgttccaccaaattgtttagcgttgagtcactcagcgtagtacaaattgttgaaaagattcgaagctgtcgctcatgcaaattgcgtcgcccgaccgacgacgactttaatggggcacgtaaagccacacacaacaaaaatcagcgccaccaccaccagcagcacctagtggttcttggcacttttactgcgcgcacaaattaaataaagagcggagaactcgtttgcctgcgtgttttttgtctcatcgcaaaagcgaaatgtgcttgcatgcaattataatttgattgttatttaattgtacaacggtttggccaccagcaccaggtcaagtcagagtcagagttgacggacgtgagaatggtcgatatatgtgtgtggatcactcacttcgtaacgtgccgcgctaacggtacgcgtacgcttcaacttggcgcgcttgcaaacggttaaaagtgaaattcgaaagactgaggaaacgaacttggttcgccgaacgactctgcgaccactgcgtcggctacggcggctgtttggcaactgaagagcacaacagcccgaagttttgtttgccagctctagcgctctagagttttgctctggcctgtgtcgttttgttgatttacatttttctgttggtttcgtttgttttcgctgctgctgctgttgtgcagcaagttcagtcgccctgactcttgttccaacaattaaaacttaattcccaactggcggcagtgatgctgtcggcgggctggggaacccggtcatttgcataatgtgatgccaaagcccagacgaaaatggggcctaacggtcatacttttgtttgggccagcttttacgcctgataactgatggtttctggccgccggaacagctgcttgttctaattaaagcccactggagctgcggtttctttttctcgctttttcgtttattcgaaattcaatttgtgtgtgtttgttttactagctattgtgccattgatatatgtatcttgtattcatcttttcttaagggtaaattaaattaaaataaaagtatagcaaaggcgactcaaatcggtttcaattccacacagtttctggctattcaaattaatggaaaacatttgtaaatgcctaactaatagataatagctttatgattgtatcgggggatttcaaatgagttacactagtacagccagtttcagctaaaagtacgcttacaaaaatgttgatttaaggcttaatgctcggcagtagatccattgtggatcggctcattgggagcacaaccatctagaacgccgcccagctggccaatccgtttgatttggtccataagatcggcaatttccggagtgcagttgcggtattttcttagataggagtatccacgcagcatctcattgtccagaacgcagctgttaagtgattcagaaaggatgcttaaacatttgtctatagtttagttttagtcacttacatcagagctgctgctgcaaagttacccgtcccctccagatg

SEQ ID NO: 23357 - DNA, 1929 bp, DROSOPHILA
tggtcgcagagtcgttcggcgaaccaagttcgtttcctcagtctttcgaatttcacttttaaccgtttgcaagcgcgccaagttgaagcgtacgcgtaccgttagcgcggcacgttacgaacaccaacctagcatgacaccgctcaattgggccgctacttaacgctttcattcaacccagaagaggtctggactcgaaacccattcgaacataaaccaagaactagaacacatcgcatcgcatcgtatcgcatcgcaccactggcctcctcctttgaaaaaggggaaccaaggccaccctcccgctagccagcataatttctcttgaaaaaccgcattcacacatttgcttcacaccacaaccgcaacaaccgaataacacgaataatgaattatcagaaggccagtgaaaagcagtcgtcgtcctcattgaagaagcggccgccgggcaacggcaatagcatacaaaacttttggaacgatcgcattatggagcgcttcataaaggcgaatctattcattatctgctgcgtggtggcggttctattgctgatcgtctatctgggtgccttctcgtgtgaggtctcgtggatactggaggcccacggcgagctgcccttcgccgcctacacgctctgctcgctctactttgtcatgttcgtggccaccacgatccttatccacggcctggtcagcggactctgctggccgttgttcgcctggtcgggcatcatcggtctcctctcaattccagagctggtctttgtcatgatcatgaccacacagcactggggtctgcaatctgtgcatggattaacggagctcacctcctacctgattcgcctcatcatcaactgcttcgcgctgatctgtgtgattcccacgggcatcaggtggcgacgggagactcaggtgttgagtcagctgcaaggattggccaccagactttccctgcagactccagcgcccagtgtgcccattacaaaggcagattcccggcgatccagccagcggctaagtggattcgagaatgccggctaccagctgtgcgatgaaacagcttccaagttgccactagggccaggaatgggactgggcatgaacaaccagtgtggaggcagtcaagcatttggctcgcagaacgaattcaacgccagcatgtttgcacccgcattggcacagcagttcaacaatgccacgttgatgcagcgcggcggaacaggcggagcaggtggtggtcatcgcgcccagtcgctgatggatctgcgctgcactctgcccggcatgtacaatccacgacatgtgctcgatacggaggataaaaacgccaagtacttcaacatcaccatcgacgatttgaagaacaatctccacgactcgcaccgaccatcgccgccttcgctgatcggttccaccagcaacgatcccatctactgctccattgagcccaagcagttgacaccgccaccggcacagcagaggagccaccatcgtccacgcggcacacacaagcagccaccaccgggtaaactgtcccggaattgcgtatccctggagaaccttgacgggatcagcaaggtgcagaatgatctgaccgcctacgggaacaatctactccagaactacacgcagcagcagcagtattacctggccatgctgcttcaccagcagcagcagcaacagctgcaccaccagcaggctggcggcatttaccgcaggccatccaattgcagctccactggcggattcgccggcaccgtgctggcccagccgatgcagcgacgcggctccacgcacagccagcagatgcagtattacgggggctttggctatgccaactacaccaatccgtacatcacggccaacagcaagttgtcgctgggcaacgagtccgacgattaccggaagtaccgcgatgtggctctttga

SEQ ID NO: 23358 - protein, 513 aa, DROSOPHILA
MNYQKASEKQSSSSLKKRPPGNGNSIQNFWNDRIMERFIKANLFIICCVVAVLLLIVYLGAFSCEVSWILEAHGELPFAAYTLCSLYFVMFVATTILIHGLVSGLCWPLFAWSGIIGLLSIPELVFVMIMTTQHWGLQSVHGLTELTSYLIRLIINCFALICVIPTGIRWRRETQVLSQLQGLATRLSLQTPAPSVPITKADSRRSSQRLSGFENAGYQLCDETASKLPLGPGMGLGMNNQCGGSQAFGSQNEFNASMFAPALAQQFNNATLMQRGGTGGAGGGHRAQSLMDLRCTLPGMYNPRHVLDTEDKNAKYFNITIDDLKNNLHDSHRPSPPSLIGSTSNDPIYCSIEPKQLTPPPAQQRSHHRPRGTHKQPPPGKLSRNCVSLENLDGISKVQNDLTAYGNNLLQNYTQQQQYYLAMLLHQQQQQQLHHQQAGGIYRRPSNCSSTGGFAGTVLAQPMQRRGSTHSQQMQYYGGFGYANYTNPYITANSKLSLGNESDDYRKYRDVAL

SEQ ID NO: 23359 - DNA, 2998 bp, DROSOPHILA
ttccctggccagtttcaaacacgaatttgctgccccgcagcagggaggagtcgaagggagcggtctcgccctcccagtagccactgtaccgaaccgagaccctagccttgttcggcaccgcctcccgatccacgtgaccggtgcgagtgatccgcttgtaaatgttttcgtcgatctcgctcatcagcgcacgcagttcgtcgaatgaatatgtccacggtgaacgtagctcctcgccgtccacgtccagcgcatcctcgtagtcgctgtcgctgtcgctgtcgagacccagatccctggcatggttctgctgcgaattgtcgacctcgaactcaacgccctttttcacgagatccctgcagaatgagttgcacgtggtcatgagtgcctttaatatgtatcttattactcacgaataggacaagggattcttgagcaactgtggggtgtacggttcgaagttttcttccattatcgcaaaatttacagaatatttacgaaacgaattccggaatgcgctgagttggcgctattcttttggatgcgtttgagaaaagagctttccagcgatggtatcaactggaattcgattgcttgatagctttagcgaatcgattggtcgctgttgtccggaagttatcgaattcaaacaaagaactatatatctttattagggcgcgagcactgcaactcgagatatcttccgaaaatgtataatgtattccaatccagacggggaaacactaggccagatatacttgctttttatatgaatctttatttaaaactgaacacttatcgctctccaactacgagcactccattgagagaattgttttggtgtgtgtaacaataaaaaactaggaaacataatgaggaatgcattcttaatggccttgtgaagtgctcaccgtgcgatatggtatggctaagatttgtatattaagggagggctattctaagcaatgatcaatacaatagtatgcgaatgctcgcttgttcacttcttcagaagcttgctcatgtccttgttctgcttgtgaatcttcaagtcgacatcctcaattttgtagttcatgttatccagcaattcattttgcgactcaatttcgccacccagatcggtggccagcatcttcagcaccgacaggttgctgcacatctcctccagattggaatcgatctgggcctggaagggattggccgcctgtcgctggggctggtaggtgctgctgggatcaccacgcagctggctaaccggatgattgtcgtagcgctccgctggtgatagcggagccgaggggctagcaccgccacaggcaccctggttaatgttgctattggcctcctgggaggactgactgcccgtgggcgaaccagtcgcggtgggtggttggtccctgttgcccgaaaggtagttcttgaggccgccgaagacactcttcagaccagtcagatggcgctggctgaagcgcagcgtggagctgatctcgtccaactgatgtgatgtcttctccagttgctcccgctgcttggccagctccacggccgtcgccttacccacctcctgggtttcgtagagcagacctgggggttgtaggagagagacgcatcaataacgccccttaattggctggcaattgaccccatgtttacccaagcttttgttggtagagtccagagttcgctgctcaatggcccttcgcttctcagcataggccagtcgctgtgcggccactgatggcgacgaggttatctcctcttcgtcatcgtcatccatctcgaagggattggtgctcctctgctgcggaagcttggctgctcccgtccgtttgttctgcaggaataggtcgtcgtccacgtcctcgaatctgtccacgtcatcgaagtgatcgtgcactggctgcaggtagttatgggccatttcttgtggcgagggaaacttccaaaatgtcgaattttgttatgttttcgtaaacttttattttctttgttgttgtctggagttatcgattgcaatagcgatggtacaaatgtagtatttgtatgcagttcaatcgacttataaatagcttgacattgcagaggcttcaataaaataagttattataattaaaatgattttgaagatacgataaaaattgaatttgtatgtaagaaaacttgaagcttgatctaataaataaaaaatcgtgtaacgagcgaataccgaccgaatccccctaccgatgatctagcggggaataaagcggcttgccatctccgatggatatcgaaccagcacttctgtcaattttccagcaggcgtcgcagtttctgtaactttttggaactgaccaagacggaagctttagtttaatttaagaaactgtcgcagccgaacgtcacaggtttcaggacacgaatcggcggagcaaagcaccaaaacatcaccacatgcatagcacatcgtactttgtggccgcgacatgcgcggcgctgcttctgctggcggcgacggcgcagtcgacggcagcagcgcagtcaggactgcagccaggtggcaagttaatcgagttggacgaggacaactggcacctgatgctccagggcgaatggatgatcgagttgtgagtgcgaaagggtggctctgagtagtccctacccacatgaaaccccgctgcccctgacgtaacataaaggggcgtggtgcgccggctttctccagccggcaagctggttctttcgttctccgaaataccagacattcctttgcggcgacgatgactcatcggcagctgtgttaaacatatgtttctccctccattcacagctttgctccatggtgcccggcctgcaagaacctggctcccacctgggagcggtttgcccgcgtggccaaggatgtccaggtgcaggtggccaaaatcgacgtgacaacctcgccctcgctgagtggacgcttctttgtcaccgccctccccaccatctaccagtgagcaccacatagaccttttca

SEQ ID NO: 23360 - DNA, 929 bp, DROSOPHILA
aacaacaaagaaaataaaagtttacgaaaacataacaaaattcgacattttggaagtttccctcgccacaagaaatggcccataactacctgcagccagtgcacgatcacttcgatgacgtggacagattcgaggacgtggacgacgacctattcctgcagaacaaacggacgggagcagccaagcttccgcagcagaggagcaccaatcccttcgagatggatgacgatgacgaagaggagataacctcgtcgccatcagtggccgcacagcgactggcctatgctgagaagcgaagggccattgagcagcgaactctggactctaccaacaaaagcttgggtctgctctacgaaacccaggaggtgggtaaggcgacggccgtggagctggccaagcagcgggagcaactggagaagacatcacatcagttggacgagatcagctccacgctgcgcttcagccagcgccatctgactggtctgaagagtgtcttcggcggcctcaagaactacctttcgggcaacagggaccaaccacccaccgcgactggttcgcccacgggcagtcagtcctcccaggaggccaatagcaacattaaccagggtgcctgtggcggtgctagcccctcggctccgctatcaccagcggagcgctacgacaatcatccggttagccagctgcgtggtgatcccagcagcacctaccagccccagcgacaggcggccaatcccttccaggcccagatcgattccaatctggaggagatgtgcagcaacctgtcggtgctgaagatgctggccaccgatctgggtggcgaaattgagtcgcaaaatgaattgctggataacatgaactacaaaattgaggatgtcgacttgaagattcacaagcagaacaaggacatgagcaagcttctgaagaagtga

SEQ ID NO: 23361 - protein, 284 aa, DROSOPHILA
MAHNYLQPVHDHFDDVDRFEDVDDDLFLQNKRTGAAKLPQQRSTNPFEMDDDDEEEITSSPSVAAQRLAYAEKRRAIEQRTLDSTNKSLGLLYETQEVGKATAVELAKQREQLEKTSHQLDEISSTLRFSQRHLTGLKSVFGGLKNYLSGNRDQPPTATGSPTGSQSSQEANSNINQGACGGASPSAPLSPAERYDNHPVSQLRGDPSSTYQPQRQAANPFQAQIDSNLEEMCSNLSVLKMLATDLGGEIESQNELLDNMNYKIEDVDLKIHKQNKDMSKLLKK

SEQ ID NO: 23362 - DNA, 4037 bp, DROSOPHILA
tggaagacgattcgagcgacgaagataaactgcagcagaagctagtacccaagcgtgtacgcaagggtgatgatgcgatgagcatgaaatcgggcaaaaccactgccagtagtcgctacactgccggtggcaagggcattcatcgacagctgacagctggaaactcggatgccatgtccgtgaagtcaggcaaatccaccagccgcccagcgggcagtgagtacggcagcaagaaggccaagggtgatatgaagaagagcggaaaactggatccatatgcgtatataccactcactaggaataacctgaacaagaggtgtgtatccaaaatgtttaatattattaatatacccgtccctatctaatactccatctctttcgcccccagaaaacgttcaatgaattcgcgaaaattcaagagcgtattgcgaggagctggcgctgaaaatggaggagccggcggtggccgggtgtccaagaaatacaaatagggcagacgattcaagccaactggctaacaggctcgtaaagctatagagatatagagatgtataataacactgggatagtgcggtctgttgataaggaagctaagacgttgatgattatttcccctgttactttgcttaaatatataaatataacttaatatatatatatgaacatgtggagacgttgtaaatgccacagataaagaaaaacagaaacagaatagttatgtatttttttttttttttgttttgatctgcaaagactttgaataaagaattttgaaagcaacatagttcgatgcgtggcagaaagaagagcagtaacgttagattaaatccacacaagctttatgttctttaaagatatagtaaatatgactatttattatcgcaaatgccagagtcaaaatacagattggtagaatattagccaattaggttattctacaaaagaggaaagtcttcgaacgagatagttgcgtcaagaagttgcgtcatcctgtccgtggtcaaacgccgttttgaaaatccttttcaatgtgggtcttgttccattcgccgtgcggatccaatccagtcattgtctcctcaatgaagtgcatcttattctcgctgtccaccaggacaacggagtgtgtacggctgccataggcatgctcttcgatatggacgtttagggaactcaatccctcgccccagttgggcgcacgtgtctttagctcgtcgtccggccagaatttgtgcttgttgcggagcaactgcatcagctgggcggacagagtctccacgctggcttccccatgagccttaacgatcgcctcgaactcctgtttgccatgacgcaccttctcgaacggagagtgcggcagactgttgccaaatccgtagcactcgccgttctggaaatcctccagcgtgggcggcacattgctcagcagcttcacgcgagcgggctgggatgcagatctgttgagaacgaaggcgtgcagtagatggtatcaatgtttcgctaatggttccctaatgttattgcatattattcagaatttatacgtataattcggagataaagacagcataaagcaatatatgtacatactaatatgcatataattagaatatataataattcaggttaacctgaatgggcgcagactcacccaatttcgatggacacaaagttgaaggcagaatacttggtgcaatctttgagcagcctttcgttgtagttcaggatgctgtgctcctcgtccgcccgggtaacatagtccgccacaatcatgccgcgccctagtaagaaatgttcgttattcgattgccccctactcggattcgtattcgggttctgaattggattcggattcggatgacggtagctgttggaggtggtggtcttggggcaaaggttaatgccggtgctgttgctgttgtgattatgcggttgcaaaatgtttttgtgcgcttcaaacagaaaacagaaacgaagaaagtttgtttttgctttgctttttctttggtcgcggttgtgaaagttttagttcgggccaagtgttaggtgtatggatgagtgtgtgtgcgtgtgtgtgcgcgtcaatttggattagtaagtagctcaaatgggtttaccaactgcatcgcgtggcttgggctcgccggtcagattgagcagggcgcccaccttaaagaagccagcggagtggccgatcgccagccaggtgccgccctcgcgtcccggctccagatcgatccctgaaatgggggaatacataaatatttactcaagttgatcccgcactcatgggtaagatggcttgaaatccaattaggttgctgggaaacagatcttgtgagaggtgttcattctaacaaactgctatcaaatcatcttagtgactaaactataggtaacatcttgatgaatacaagctctcaaggattatactccatctaagcataggcattcaagggcataagccccaccacttacctccgtaaacatgatcggcattcgcccacttggctgccgatagggtggcgcgggcaaagaactcgtcccgattggaggccaggatgagcttgtagccacccggttgcggattcgagtccgcacaaaagaatatcacgcacatcgtcggaatcctatacttatttggctattgttgcgatttgtagtgccttgaggttgtgggacaactgcgaatgggatccggaaaagtgggctttaatctcggtggggcgtcggtatcaaaatggcaggttgttcggctcagtcttctctttgttactttgtggcagtggaactatagcgccggttttatcaccaaatagccgtacgtacgtacagctgatatacagtcttatccgttgtttgcgagaccagctaatctaagtggtaaatgtaaatggtttggattggtgggtgttctctgtgagccgtgcctctatgtgatatatacatatctacggggcaaaaagcattcccgttaacgcaaacaaagcagtattttctgaaatttcaatgaccgggttgccttgttttgatttctcttttaattttgtttttgttttgttttggcgttgccagctgacaggagaatcgataagaaaatcgttaacactctgctgccctgtgcaatattcttttagctattttattaattgctaattatttatttgtgcagtctatgacttatcttaatttgtacttttaaatttgaagattttagttcctcatcgtgcgctgaaacaatgattgaccaatatgattgtgtaatttatttccaaagccatatataacgtatatataaacatattagttttttttgtcgcctgtgccgatccagataacaaactactattttgaaattggcgtaacaggtaggtaggcattatcgccagttgcccatctctattgtatgaccgtgggcccggcaatcgattggcttacaacttatcgatgtttgaaaactaaccaaaaaccctgtaacataggcttgtaattaaaactagaaaataccattacatagctatgcactgcaatgcataaattaactaacagacctatacaggcccttaaattggtaagaaaactgatcgctaaaattaaagcgaaagagtggattttttaggacaaaaataccggtcggtcgagaacatttggggggaaaatcatgtcgccatctggtaacactggcattcagcagagcagtgaaaacgacgttaatatttctgatcaattaaacaattggaaaatccggccgcagatcgcgatctaaacgtatcgccctcgccacgcccactgccgcccacgccccctggcgcggggtcacatcgatagagagctttgcgtgtgtgtgtgtgtgcgtgcgtgtatgtgtcggtcgagaggagaggtggaagacgaagaagaataaaaaaaacaggcagcgaaaagcgataagaaacggaacacaacacactggaaaaaaattgcgataagaaacggggcggagcggagcggaaattgccaagactctgggatggattagcggcacagccggactctga

SEQ ID NO: 23363 - DNA, 1440 bp, DROSOPHILA
agaaatcaaaacaaggcaacccggtcattgaaatttcagaaaatactgctttgtttgcgttaacgggaatgctttttgccccgtagatatgtatatatcacatagaggcacggctcacagagaacacccaccaatccaaaccatttacatttaccacttagattagctggtctcgcaaacaacggataagactgtatatcagctgtacgtacgtacggctatttggtgataaaaccggcgctatagttccactgccacaaagtaacaaagagaagactgagccgaacaacctgccattttgataccgacgccccaccgagattaaagcccacttttccggatcccattcgcagttgtcccacaacctcaaggcactacaaatcgcaacaatagccaaataagtataggattccgacgatgtgcgtgatattcttttgtgcggactcgaatccgcaaccgggtggctacaagctcatcctggcctccaatcgggacgagttctttgcccgcgccaccctatcggcagccaagtgggcgaatgccgatcatgtttacggagggatcgatctggagccgggacgcgagggcggcacctggctggcgatcggccactccgctggcttctttaaggtgggcgccctgctcaatctgaccggcgagcccaagccacgcgatgcagttgcgcacaaaaacattttgcaaccgcataatcacaacagcaacagcaccggcattaacctttgccccaagaccaccacctccaacagctaccgtcatccgaatccgaatccaattcagaacccgaatacgaatccgagtagggggcaatcgaataacgaacatttcttactagggcgcggcatgattgtggcggactatgttacccgggcggacgaggagcacagcatcctgaactacaacgaaaggctgctcaaagattgcaccaagtattctgccttcaactttgtgtccatcgaaattggatctgcatcccagcccgctcgcgtgaagctgctgagcaatgtgccgcccacgctggaggatttccagaacggcgagtgctacggatttggcaacagtctgccgcactctccgttcgagaaggtgcgtcatggcaaacaggagttcgaggcgatcgttaaggctcatggggaagccagcgtggagactctgtccgcccagctgatgcagttgctccgcaacaagcacaaattctggccggacgacgagctaaagacacgtgcgcccaactggggcgagggattgagttccctaaacgtccatatcgaagagcatgcctatggcagccgtacacactccgttgtcctggtggacagcgagaataagatgcacttcattgaggagacaatgactggattggatccgcacggcgaatggaacaagacccacattgaaaaggattttcaaaacggcgtttga

SEQ ID NO: 23364 - protein, 340 aa, DROSOPHILA
MCVIFFCADSNPQPGGYKLILASNRDEFFARATLSAAKWANADHVYGGIDLEPGREGGTWLAIGHSAGFFKVGALLNLTGEPKPRDAVAHKNILQPHNHNSNSTGINLCPKTTTSNSYRHPNPNPIQNPNTNPSRGQSNNEHFLLGRGMIVADYVTRADEEHSILNYNERLLKDCTKYSAFNFVSIEIGSASQPARVKLLSNVPPTLEDFQNGECYGFGNSLPHSPFEKVRHGKQEFEAIVKAHGEASVETLSAQLMQLLRNKHKFWPDDELKTRAPNWGEGLSSLNVHIEEHAYGSRTHSVVLVDSENKMHFIEETMTGLDPHGEWNKTHIEKDFQNGV

SEQ ID NO: 23365 - DNA, 3115 bp, DROSOPHILA
gggacagaaacaggattagaatcaggataacgatcagaaccgcgcaccaggccgtagccaatacaattccaatgtttcgcctctcttaactttacgttcccatagccaattgattgttgttttttaaactagcaatggactggtgaacttctactataggataacttgagcggaaacttatggatgtagcaaatattcttcgagcaattttgtaatgtaggaaaccctttaggccatcaattattaacgttgtataagttagacaatgaatttaaaaagaacctttttcgtcatcgttaggcaattcgtaatcaattattttcgggcatcatctatgccataagtgaaacagcacaatttgaactatgtatagttttgcaatacacgactatatttcacatctggtttccgaagttttgcttagagcagttcgccagaccattgcattatattgtacattatatatatgggtgtacagacattatatacatatatatatatatacatacttgcatgcattgtatttgcgactctacttaaggcaagtccaccttttggactggctctccacctaatcgcaatctctcggtttctgttgctgcatgttcttaatactatttcacctagctccccacccctccccacatattatattcaattttttttatttaaccaaaattttagttaaaaaagagacaattcagattgtaatctatttaggcaagtggtagggtatctctagcattagaagaagctaaaagtaaaaacaatttcgtaaaaccaaaattttttctctaggatcataattattaagctgagctaaaaacgaaaacaaattttaactaactaagaagggacaaaattgaaataagatcaaaaaaggaaaacatgtacattttggaagaaaaatcaaagtccacaaaattttaacgaatgagaggcaaaaaatcagacaaaaatgaaccacaagagaatgaaaaaaaaaaacaaaaatggaaataggtttctaagatgttttaatatattttgtaataacaatgctcgagtatttttcatgtatgtagtttttgatccaaaattgagcgatcaacaaaggcaaaggggttctcaacgatcggttcctcgagaggatttgccaatcatcgatcatagggctctattgctgaacgctttgttttgggcacaactacctcctccgcttggcaccggcagtagcctcgtctgtggaggatctggtggtccgcttccgtttctggctgctagggggcttatcttcggcaacttcttcttgggattcggatgcctttgcctgcttcttttgggctttcggttgtctcttcgttttgaccaactctttggattgcttcgcttcctttgaatcgacttgagttggctcttcctcggatttctgttcctttttggatttacgcgaagttgaagttgaagttggtgccttcgtttttgataaaaacaatatttagttaattttttctggacttattgggccttccctacctcgttttcctgtgcttcctctgtggactccgacttctttggcgatgctagagcctcggaccccggtaaatcaattttagataacttctgcgtgttgatctgttccttggactcctgctggtcacctagaatccctacaatccgatcgtatacctcctccacagtgggaaacttgcgagcacgtggtggaccccgctttagacccgaccaaagtgccacctgctcctgctttcccattccgccggcgctcaaacttaactcgaaggctcctcgccgtggtgctccaagtgcattcagctggagctgaagctgttggagaccacgctcccggagagcggagtgcagctcctccgctcgacgacgaaagactcgtcaggatcggcagtgctctacgtagagcaccggcgcattgggatccagctcttcgcctgcatcccgctcagcgattggcgcctgtagaatcgtttggaaatgcatttagctattgaaataatgtagtatttcaatcgtacctctgcttttttgttccgttttggtggcatgatcctaaagtaatcagaatttttaagtaaatggcgcactttttatttggcagtgctgccagatggtttagtaacactagggtgtcaatcgcgactgcatccctggaaactatcgatttgccgataacaggcgttaaacgacgcgcgattcccaatcaaactgagtaaacatttaatttaatcaacgtagtttcaataacgccaagatgtcgcacctgatgccccggcggaccagcgagttccgtggcgatgtactggaggagcgaggcactgccgataagcggcaaaccaggtgagcatcgaaatccaactgatcaaatcttgtcaacgatgcaaatgcgtatccttttccagggcaacaaagcggagcgcagccacgcacactccgtcctccagccaggcggcacccagaaggtatgcacaaccatttgattatcgaaggcacaaccagtaatgtttgaatccaatccgcataggccgtccgcatcgcgtctgccgcagccgctgaacttggagcgcgatcgggccagtcaaatgggcgtgacgcccaagcgaggccaccggtttgtgccctccactgcggagcgcgccattgcgccacactccgacaagaaatgggtggcggagagggcacagcagatcctggaatacctacatggcattcagaacagcgaggcgcccactggacttattgcggatctattcagtcggcccgggggtttgcgacacatgaccatcaagcaatttgtttccattctcaactttatgttccaccacatctggcgaaatcgcgtgacagtgggccagaaccatgtcgaggatattaccagcgcaatgcaaaagctacagtatccttatcaggtaagcaactcggatgctcttaggtttccagtgttcgtttaattcttaaatccacttgtgacttgcaggtgaacaaatcatggcttgtatcgccaacaacacagcattcattcggccatgtgatcgttctgctggactttctcatggactttttaccgcctctgccctcgtcggatgtggtggaggaggagtttccg

SEQ ID NO: 23366 - DNA, 994 bp, DROSOPHILA
cagcactgccaaataaaaagtgcgccatttacttaaaaattctgattactttaggatcatgccaccaaaacggaacaaaaaagcagaggcgccaatcgctgagcgggatgcaggcgaagagctggatcccaatgcgccggtgctctacgtagagcactgccgatcctgacgagtctttcgtcgtcgagcggaggagctgcactccgctctccgggagcgtggtctccaacagcttcagctccagctgaatgcacttggagcaccacggcgaggagccttcgagttaagtttgagcgccggcggaatgggaaagcaggagcaggtggcactttggtcgggtctaaagcggggtccaccacgtgctcgcaagtttcccactgtggaggaggtatacgatcggattgtagggattctaggtgaccagcaggagtccaaggaacagatcaacacgcagaagttatctaaaattgatttaccggggtccgaggctctagcatcgccaaagaagtcggagtccacagaggaagcacaggaaaacgaggcaccaacttcaacttcaacttcgcgtaaatccaaaaaggaacagaaatccgaggaagagccaactcaagtcgattcaaaggaagcgaagcaatccaaagagttggtcaaaacgaagagacaaccgaaagcccaaaagaagcaggcaaaggcatccgaatcccaagaagaagttgccgaagataagccccctagcagccagaaacggaagcggaccaccagatcctccacagacgaggctactgccggtgccaagcggaggaggtagttgtgcccaaaacaaagcgttcagcaatagagccctatgatcgatgattggcaaatcctctcgaggaaccgatcgttgagaacccctttgcctttgttgatcgctcaattttggatcaaaaactacatacatgaaaaatactcgagcattgttattacaaaatatattaaaacatcttagaaacct

SEQ ID NO: 23367 - protein, 167 aa, DROSOPHILA
MGKQEQVALWSGLKRGPPRARKFPTVEEVYDRIVGILGDQQESKEQINTQKLSKIDLPGSEALASPKKSESTEEAQENEAPTSTSTSRKSKKEQKSEEEPTQVDSKEAKQSKELVKTKRQPKAQKKQAKASESQEEVAEDKPPSSQKRKRTTRSSTDEATAGAKRRR

SEQ ID NO: 23368 - DNA, 4724 bp, DROSOPHILA
cctggaaaaatgcgagcagaagctggccaaagcggaggaccagctgctcgccgtggaatcaaaggtcaacgcgactcaggccaagctgaacgaggtggagcaaaaggtgtactccgccaagctgccatcctttcagcccgtgctagatgccatcaagaatcattgatttgatccggatgttttgttgtagtccagttgatctgtaaggaatttattaaagagtattctttgttttcaaattaaaaaagacaatgaagctgtctgcaatgttcaatgttttatgttttatgaaatgcatttatttttgattacatttgaattaggtaaattgagttgaacacagcggttcctggacaaaggaggggatgatactccataatatcagatttcttaagttctttattgccacacgtattacggatttcattacggatctccgctgccttttttgggattacaaattgcacttggaacggtttagctttacatggttatacatatgtatacactgagtggtgggtaaatacggcaagggtaacttaagcgtaggtatctataaatattaaataatattatcatttggccaattttgtgtagtttagcgtgcgattgacttgtgccacaaaaaagttgcagggaaacgtttgcatttattgctattaaattaattaatttggatatttcatttgtgtgcgcttttttcgtattcgtagatatatattttgtcatttttgggcttaaaataaacgaaaatgaggtattatttcaattagtagtgatgtatctcatagtatattgtcgctcgatcataaatcctaggtttctgtgtaccacaagtcaaccaactacagaatatgtatgggtatacaaaaaaataggggggaagttcgagtagtagttataaattcaacattgagactgagacaatatgttgtgtaataaataaatatcatttagcttagttcaattctatacaatgaccccgatagtgctaacgtcctcagacaatgaagacatcgccactgctgcgctccacggccgaggtggccacatcgccgccacatcctggccgaccggcttggcttgcagccgcaatcttgggctcctccgattgcgcagttttgtccaacagctccgcctcgcgtccaatctcgacgatgccttgcggcttgtcgcagctgacgctctgtgactcgtgcgactcgtgtgcctcttcctggccagccaggtggatgctgactcccgccacgtcaaggtcttcgacgtccttatgattctggaatgtaactgagatctcttgggctgcagctccttcgcttacatccccttcctgcccattcgagctgctggtcgcaggccctgcatttgttgcattgggcggggccgtcgtgatggatgaccaccagctggagaaggcgcccttggcctgggatatggcaccgcccactgcacgactcgtcgtgtttaccgcctggttgatttttcgcccactctcgctattttgcatggttctgcaaatttcaagtgtttagaaacttagttccccttcggtatggatttcaggattttaaccgcttactgtgctagttttagtttcatgtccgccacggacaaggtgccggcgaagggatgaccagcgggcagggcctcaaagaactcgggttcgggcctaacgtcgtaccattcctgaaagcattgggtgcgcttgaaggcgcccatgaagtgcgcattgaaatgatcgttgtcctttggcgtggcatctgtaaacaaacaaatttacatttacatttgatggttcaactaaaagctaacaaagattgcacacacctggagccacagcagttcgcaagagtgcgagaatatagccctgaaactgctcccgtatccagtactcgctgccctcggcatcctcctttggcgattgcacatgcttcatgatgtagtccatgtagcgcagatcctcggtgctcagcaccagctgacgcctgagctccggatcgtgggcatccagattggccgcctcgatgtccaccaggacgtcagccagctgacgtttctgctggaaaagcacgttggaggtgccgatgacataggagagcaccatgggatcgctgagcaggtccatgtacggtagcgacagatacggcaggcagaggttgccgctggcgaagatgctgaccggtgcccgatactcatccggattgacagcgcacaaggcggcgaggttggctatggacgaaacatttacacggatcagttaactgcgtcatacgtaatatttaatgtctgcacgctcctatctcctatctagaatgattcacttatatggcatgatatgtataagaataaacgcaataacaaaggttacaattgactaaaatgtgcctaaatctgctagttacgccaaacacggggatagacttcttgggctactcacacgctagtgtgtccacgctggcctctctggtcagcgagctgttcctgccgttcgatgagtcctgcgactgtgagttgggcgtggaacgcgtcgacgtgtcatcgccactgacctgctcctcgcccgccgacgctgcggatgagacgagggccagctcttcggcctcgccctccaccgctgtggcgctctcgggcgtcagtttctgctcatcggtggcagctgctacggaagccactgcctccagttccgcttcggcttcggcctgcgcctcccgctgcagggagtcagtgaaatccggcatgggcgacaggggacgcgacgtgcgcacacaggccacctcctggaagcccttctccagcagccgcggcaccagcgatgccatgcccaggatcagcacacacatttggcgtacgggcgaaccgaaacacaccactcgtcgctgcagcagcattagtttgaagagcattagcgtcttgtggcgccagtggagtacgatctcgcgcagcgacagccccacgtgaaagtggcgcaacgggcggcgcgactcgtcgtcctggaggcaggcatttagctgctgataggccttggccagcagttccgtgccggagaagtcgccctgatcgaaaaaggcatcggcaatgagggctagcttcacctcgatgtacccgtagatgggcaggcgggccaatatgcaaacggacttctgaacggtgctgcgcgtgaggtccgctgtccggatctttagcttctccacgcgtatctggcgatagcaggacacgccgtagatactctcagccggctcatacaaactgggcaggttgaagaacaccgtgtcctcggcaaagttatgcgagccgtcgggcagagccagagtgggcaggtacttccagccggaggggcattcgttgcgtcccgtggagcccgagattagcggcggatgcgagaactccacctggcagcccagcttgtggtggaagcccaccacgaggatgtgcaggatcggtggcttgttctccggctcgctggccatcgttggtcgttatccttgtaccaaggagcaagcggtgtccacaaaaaatgcgttttttgcctgcaaaatgaatatccaattggattggccactaccacatcggccctctcgctcgcactcgtgtaaccacgccacgcaattgttgttctattcggaccacggcgcacttattttgtgttgcaattatctatctgtcgtatttaactttctttctttacgatttccaagcgattttgtttttattctattttcttgtttgtgatagcgtatcgatatcaggaggcgttattttgtactccaattagatgtgcatttgccggttatcgatatgtttcgcttcgaccaacggcattatcgactacaccagtacgaaaattggcggttacttttgaatttgaaataaccattgaagaattagaatcacgctaatatgaacgaaaataaaacttcacagtgtaatttgtttttgtatctcattaatctttattaagaaacaatacaagaaatatatttactttaaatacaagataaaatactattcagaaaaaaaggataattaaattttttgattttaatgagtgaagttacaagtttcacgagatcagaattaatgcatggtaaaaaaatgtatttacttttatacaaaaatacccgtaagcatcatccaacttaccaaaatcgaaactatcattacgagtatgttgaaatagttgtaacattttggttttagtcgcgattttgttggcttgactactgatacacatttccaagtgtcaacaagccgaaaattaagtcaaaaacaaattctgaaaataaacgtgtaatactatacatatagtagacggagcattaggtactatatagccagactgtgtatgatggctctgttcttaaacgtttttatattttctgctgttttcatcttggggtttcttctatgtgtcttttttcttatggatttttccgttgtttccttttccccaatttttttttgctttttttaattggtctgttttcatttcatttaatttagttagagcgtatttttaaatcgaacatccaacatatagattctaaaattggcacacatcgcttgtttgttctttacaaaatatgtttgcttgacctgatcttattcattgaaaagtttatgaattatatattttaactttaaactggaaagtgcattgatttaatgtgttaaatacatttaagtttataataggaagctcttactattctggtcactaaaatcta

SEQ ID NO: 23369 - DNA, 2381 bp, DROSOPHILA
aacaagaaaatagaataaaaacaaaatcgcttggaaatcgtaaagaaagaaagttaaatacgacagatagataattgcaacacaaaataagtgcgccgtggtccgaatagaacaacaattgcgtggcgtggttacacgagtgcgagcgagagggccgatgtggtagtggccaatccaattggatattcattttgcaggcaaaaaacgcattttttgtggacaccgcttgctccttggtacaaggataacgaccaacgatggccagcgagccggagaacaagccaccgatcctgcacatcctcgtggtgggcttccaccacaagctgggctgccaggtggagttctcgcatccgccgctaatctcgggctccacgggacgcaacgaatgcccctccggctggaagtacctgcccactctggctctgcccgacggctcgcataactttgccgaggacacggtgttcttcaacctgcccagtttgtatgagccggctgagagtatctacggcgtgtcctgctatcgccagatacgcgtggagaagctaaagatccggacagcggacctcacgcgcagcaccgttcagaagtccgtttgcatattggcccgcctgcccatctacgggtacatcgaggtgaagctagccctcattgccgatgcctttttcgatcagggcgacttctccggcacggaactgctggccaaggcctatcagcagctaaatgcctgcctccaggacgacgagtcgcgccgcccgttgcgccactttcacgtggggctgtcgctgcgcgagatcgtactccactggcgccacaagacgctaatgctcttcaaactaatgctgctgcagcgacgagtggtgtgtttcggttcgcccgtacgccaaatgtgtgtgctgatcctgggcatggcatcgctggtgccgcggctgctggagaagggcttccaggaggtggcctgtgtgcgcacgtcgcgtcccctgtcgcccatgccggatttcactgactccctgcagcgggaggcgcaggccgaagccgaagcggaactggaggcagtggcttccgtagcagctgccaccgatgagcagaaactgacgcccgagagcgccacagcggtggagggcgaggccgaagagctggccctcgtctcatccgcagcgtcggcgggcgaggagcaggtcagtggcgatgacacgtcgacgcgttccacgcccaactcacagtcgcaggactcatcgaacggcaggaacagctcgctgaccagagaggccagcgtggacacactagcgtccaacctcgccgccttgtgcgctgtcaatccggatgagtatcgggcaccggtcagcatcttcgccagcggcaacctctgcctgccgtatctgtcgctaccgtacatggacctgctcagcgatcccatggtgctctcctatgtcatcggcacctccaacgtgcttttccagcagaaacgtcagctggctgacgtcctggtggacatcgaggcggccaatctggatgcccacgatccggagctcaggcgtcagctggtgctgagcaccgaggatctgcgctacatggactacatcatgaagcatgtgcaatcgccaaaggaggatgccgagggcagcgagtactggatacgggagcagtttcagggctatattctcgcactcttgcgaactgctgtggctccagatgccacgccaaaggacaacgatcatttcaatgcgcacttcatgggcgccttcaagcgcacccaatgctttcaggaatggtacgacgttaggcccgaacccgagttctttgaggccctgcccgctggtcatcccttcgccggcaccttgtccgtggcggacatgaaactaaaactagcacaaaccatgcaaaatagcgagagtgggcgaaaaatcaaccaggcggtaaacacgacgagtcgtgcagtgggcggtgccatatcccaggccaagggcgccttctccagctggtggtcatccatcacgacggccccgcccaatgcaacaaatgcagggcctgcgaccagcagctcgaatgggcaggaaggggatgtaagcgaaggagctgcagcccaagagatctcagttacattccagaatcataaggacgtcgaagaccttgacgtggcgggagtcagcatccacctggctggccaggaagaggcacacgagtcgcacgagtcacagagcgtcagctgcgacaagccgcaaggcatcgtcgagattggacgcgaggcggagctgttggacaaaactgcgcaatcggaggagcccaagattgcggctgcaagccaagccggtcggccaggatgtggcggcgatgtggccacctcggccgtggagcgcagcagtggcgatgtcttcattgtctga

SEQ ID NO: 23370 - protein, 707 aa, DROSOPHILA
MASEPENKPPILHILVVGFHHKLGCQVEFSHPPLISGSTGRNECPSGWKYLPTLALPDGSHNFAEDTVFFNLPSLYEPAESIYGVSCYRQIRVEKLKIRTADLTRSTVQKSVCILARLPIYGYIEVKLALIADAFFDQGDFSGTELLAKAYQQLNACLQDDESRRPLRHFHVGLSLREIVLHWRHKTLMLFKLMLLQRRVVCFGSPVRQMCVLILGMASLVPRLLEKGFQEVACVRTSRPLSPMPDFTDSLQREAQAEAEAELEAVASVAAATDEQKLTPESATAVEGEAEELALVSSAASAGEEQVSGDDTSTRSTPNSQSQDSSNGRNSSLTREASVDTLASNLAALCAVNPDEYRAPVSIFASGNLCLPYLSLPYMDLLSDPMVLSYVIGTSNVLFQQKRQLADVLVDIEAANLDAHDPELRRQLVLSTEDLRYMDYIMKHVQSPKEDAEGSEYWIREQFQGYILALLRTAVAPDATPKDNDHFNAHFMGAFKRTQCFQEWYDVRPEPEFFEALPAGHPFAGTLSVADMKLKLAQTMQNSESGRKINQAVNTTSRAVGGAISQAKGAFSSWWSSITTAPPNATNAGPATSSSNGQEGDVSEGAAAQEISVTFQNHKDVEDLDVAGVSIHLAGQEEAHESHESQSVSCDKPQGIVEIGREAELLDKTAQSEEPKIAAASQAGRPGCGGDVATSAVERSSGDVFIV

SEQ ID NO: 23371 - DNA, 4390 bp, DROSOPHILA
atctgggacataaggcagccgagcaatatgcgtaatcgcagtcgttctagacagcaagtcgaccccaccacatgggactaccgatggaaccgcgttccgcgggaatgtaagctcgtgcccgttttattcttggaaaatttttaacgcccacctatcttgtcggcagtttacaatccgcataagccactggaaggagactccagcataatgacctaccgcggtcaccgagttaccaaaaccctgttgcgggcgaagttctcacccatggagcagacagggcaacgctacatttacacaggctgtgccaccggacgtattataagtgagttcacacctttatcttgcagtatttctctgattttctttcacaaggctatctaaaatacattttctagccagtaagttcgccaagtatttttagaaattctctatccatcaaaaatttggttgtgaaaccaaaggccatttctgtgtttccgttgataaacatattatgttttcaaaataatccaattttcttacagtttatgatgtacttactggtaagattcaagaggctattgaaggacataggactgtgataagagatctggactggcatccggatcgctcagaaatcgtgtctggctcggtaagcatcgaaatatgagtaatattcctctgaataataatgcacactcaactgcctacgcagtgggacacccatgttcacctgaacaacttcagccgcagcaacgccaatcgtccggtaaagcgatcacatagctcggatcatgacaaaaagcccctgagaagatcacgacgtttggcgaatcgaaatgttacaccggactagttgtaaggtttagagtataagctagtaaggtcccctttgatattacatttcgttacattcattcatagtggcttgcctaagcgacgcacgagaatattcaccacagtcgggccggctgggataattggttctattaaataagactgaagaatatgtcactcacttgaaatgtatagttcagtttaattagttagcgtgttatacaaaacagtacattaaaatgtaaaccatgaagcttaccaactacctacttaagttgtttatgtacaaaaacaatcataataagaatcacgttgaaatatatttcgtttgctcgatctaaattccttgaaaggcgactctcttcttgaccgctcgtatgctagttctttgcacccttaccggatacttgctatgctgtttgcttttaaaatgctcaacggctttgtttttccaaaggttgcgaatgcgcgtttcatcgtaaggacagtccaccacatttagctcgacgttttcgctgattccgtagcccacgatctcgcccagcgacgaattgtgaaacgcactcatgtcgaacaattgaaattggtctgcacagaatttagagatattaaaatgattgaatgatttgagtttttcttggatctcttccagggataagaggtccttaggcaggtcttcatcggctgactgaacgcttttattgccggaattattcttgtcagcacttacgtcgttcctatcttcgcctcctgtgtcctttcgattatcgacagccgcctccacggcgagcgcaaatgaggtgatctccagtttagtcgagggctccgcagacgattttaatttggatttcttcttcgatttcttttcagtagcttccgaggcgggaggtgtttcttctaaatctttttcatcattgtccttacgcttctcttccttggatttctttttcttcttagacggagcttcggctgttaaatctatggtaatttcttcctgaatttgagtggtttcttgactgtccttagatttacttttatttttagttctattttcattcgaagtatgcgattcattatttctgtgtaagtcgtcatcatcgattacaattacttcgtcggatttcttagactttttcttttttttcgcagctggttcttctatcgaatcttctgcaatctccttatttttatctgactttcttttctttttttggtcactctcttctgtttgtatcgacacttctgctgattcctcctcttttttggactttttctttttggaggaagtcctttcactttcctcagtgatttccgccatctctacgcagttgttgtccgtcttctcggtttcatcgacagacgatcgcttagatttcttctttttcttaagtttgggaacgtcctgctcgatttcttccacagcagttggttgctcgctagtcctttctttgcttttaactaatttttcctcaacaaagttgttctccgactgctcaatttcatcgagagacgatcccttcgatttcttctttttcttaagcttgggagcgtcctgctcgatttcttccacagcagtgggttgctcgtcagtcctttcttcgctttcaactaatttttcttcatcaagggatgatcgctttgatttcttctttttcttaggcatggaagcaacctgctctggttcttcctctttagttggtggctcgtctgccctctccttgtctttcttttttttctttttcttggaagtcacttcatcattatctgctgaaatctgttcaaacttttcagcatgaccattggtctgtgcctcgttgttgtcttcaacttgggagcctttctttagtctgtttttcatggcttccattttctgcttgaaataatcagtggtcgacaggcccgtgacaattgtctgcacgccagcgaagttggggtttggctcctcgggttggacagccagcacgggttctggatatctctcgacgtcctcagttgccttcttgccgaatatattggctagatccttttcgctgtacagagccaagtccttgccgcgtgtgaacttcttatagtggacgcgtgccctgctctgcttcgaccgctcctccagcgacattccactggtgttctccttgagtttcttcttagacggctcctccggttcaatggctttgaagccaaagcccataggtctggcctcctcttcggactccggctctttgtctatgccgccgctatcttccccatttagcgacttaagcagcccattgaagccatcctcgtgtacagtccactgatcatcgcgctgctcgaaacccaatccttctgcgtcatttttaaagcgaatgcgcacaaaatccttttcgccattcagattggcgcccaggccactgcctttcgtccagcccattttctccagcattttggtaccgaagcgattttcatctgttaaagtttaagaatttacgatttaccagtcacatttggagtttaatgctcaccttcatagagagccttgccgcgcggacacaagttgtactttttgcgccgacgtggttcagccagcatagccattttagtctataattatttataatctacttcgttttaaatgtaaattgcggataactaacaaagatacaattcgtaaattgcgaacaacccaacacgtgctatcaaatatcgatagcaagtttaaacaagatatatcgatagcgattgtcgaaacagctgctcagcaggcttagggatgagcgttggctgtgcgctgataacaggtgattaactatcgctcatctctatttgggtgtcattactaagtttgttgttgttgctcttaattagttgttattattttctgacttgcgagcttgcagtcgactgataatggatataagcgcggatgtggatcagataatagcccaggctccggactggaccttcgcgggcgactgtgctctgctggcgctgatgaagcgcatttcccaggttaaattcacatacgtgcatagataacaagccaatttgataaaatttttgcaacagaatctggaagaaaggggcgaaaggaccagccgcaatctgcgagactttgagacgagcgtgaagcaagtggatatagcgctgaacaatgccactaccagcctgcgatccctgcagtttggaaatcagttcgtggagtatcgggtggaggaagtggatgacgcagatttggccatgcccgaagagaagaaaaagaaggtgcaataagcgatggaattttgcaggctgctgtgtttacagatcttaatatgcttgcagccagagctgccgctcaagagttccgaggaattggcaaaggagtttctggaaaacaaccttcgtatgttccgcaaaaactacgagccggtgaccatagaagtgcccgattcggatgatgaggatggccccgtccactcaacgtaagtgactacactacgattccgatccatactaactccactttccacagaaccgtattccgtgctaagaatccctatgatgcgatacctttgccctatattattggtaccaaagagtggcaggaacacaagta

SEQ ID NO: 23372 - DNA, 2334 bp, DROSOPHILA
atggctatgctggctgaaccacgtcggcgcaaaaagtacaacttgtgtccgcgcggcaaggctctctatgaagatgaaaatcgcttcggtaccaaaatgctggagaaaatgggctggacgaaaggcagtggcctgggcgccaatctgaatggcgaaaaggattttgtgcgcattcgctttaaaaatgacgcagaaggattgggtttcgagcagcgcgatgatcagtggactgtacacgaggatggcttcaatgggctgcttaagtcgctaaatggggaagatagcggcggcatagacaaagagccggagtccgaagaggaggccagacctatgggctttggcttcaaagccattgaaccggaggagccgtctaagaagaaactcaaggagaacaccagtggaatgtcgctggaggagcggtcgaagcagagcagggcacgcgtccactataagaagttcacacgcggcaaggacttggctctgtacagcgaaaaggatctagccaatatattcggcaagaaggcaactgaggacgtcgagagatatccagaacccgtgctggctgtccaacccgaggagccaaaccccaacttcgctggcgtgcagacaattgtcacgggcctgtcgaccactgattatttcaagcagaaaatggaagccatgaaaaacagactaaagaaaggctcccaagttgaagacaacaacgaggcacagaccaatggtcatgctgaaaagtttgaacagatttcagcagataatgatgaagtgacttccaagaaaaagaaaaaaaagaaagacaaggagagggcagacgagccaccaactaaagaggaagaaccagagcaggttgcttccatgcctaagaaaaagaagaaatcaaagcgatcatcccttgatgaagaaaaattagttgaaagcgaagaaaggactgacgagcaacccactgctgtggaagaaatcgagcaggacgctcccaagcttaagaaaaagaagaaatcgaagggatcgtctctcgatgaaattgagcagtcggagaacaactttgttgaggaaaaattagttaaaagcaaagaaaggactagcgagcaaccaactgctgtggaagaaatcgagcaggacgttcccaaacttaagaaaaagaagaaatctaagcgatcgtctgtcgatgaaaccgagaagacggacaacaactgcgtagagatggcggaaatcactgaggaaagtgaaaggacttcctccaaaaagaaaaagtccaaaaaagaggaggaatcagcagaagtgtcgatacaaacagaagagagtgaccaaaaaaagaaaagaaagtcagataaaaataaggagattgcagaagattcgatagaagaaccagctgcgaaaaaaaagaaaaagtctaagaaatccgacgaagtaattgtaatcgatgatgacgacttacacagaaataatgaatcgcatacttcgaatgaaaatagaactaaaaataaaagtaaatctaaggacagtcaagaaaccactcaaattcaggaagaaattaccatagatttaacagccgaagctccgtctaagaagaaaaagaaatccaaggaagagaagcgtaaggacaatgatgaaaaagatttagaagaaacacctcccgcctcggaagctactgaaaagaaatcgaagaagaaatccaaattaaaatcgtctgcggagccctcgactaaactggagatcacctcatttgcgctcgccgtggaggcggctgtcgataatcgaaaggacacaggaggcgaagataggaacgacgtaagtgctgacaagaataattccggcaataaaagcgttcagtcagccgatgaagacctgcctaaggacctcttatccctggaagagatccaagaaaaactcaaatcattcaatcattttaatatctctaaattctgtgcagaccaatttcaattgttcgacatgagtgcgtttcacaattcgtcgctgggcgagatcgtgggctacggaatcagcgaaaacgtcgagctaaatgtggtggactgtccttacgatgaaacgcgcattcgcaacctttggaaaaacaaagccgttgagcattttaaaagcaaacagcatagcaagtatccggtaagggtgcaaagaactagcatacgagcggtcaagaagagagtcgcctttcaaggaatttagatcgagcaaacgaaatatatttcaacgtgattcttattatgattgtttttgtacataaacaacttaagtaggtagttggtaagcttcatggtttacattttaatgtactgttttgtataacacgctaactaattaaactgaactatacatttc

SEQ ID NO: 23373 - protein, 726 aa, DROSOPHILA
MAMLAEPRRRKKYNLCPRGKALYEDENRFGTKMLEKMGWTKGSGLGANLNGEKDFVRIRFKNDAEGLGFEQRDDQWTVHEDGFNGLLKSLNGEDSGGIDKEPESEEEARPMGFGFKAIEPEEPSKKKLKENTSGMSLEERSKQSRARVHYKKFTRGKDLALYSEKDLANIFGKKATEDVERYPEPVLAVQPEEPNPNFAGVQTIVTGLSTTDYFKQKMEAMKNRLKKGSQVEDNNEAQTNGHAEKFEQISADNDEVTSKKKKKKKDKERADEPPTKEEEPEQVASMPKKKKKSKRSSLDEEKLVESEERTDEQPTAVEEIEQDAPKLKKKKKSKGSSLDEIEQSENNFVEEKLVKSKERTSEQPTAVEEIEQDVPKLKKKKKSKRSSVDETEKTDNNCVEMAEITEESERTSSKKKKSKKEEESAEVSIQTEESDQKKKRKSDKNKEIAEDSIEEPAAKKKKKSKKSDEVIVIDDDDLHRNNESHTSNENRTKNKSKSKDSQETTQIQEEITIDLTAEAPSKKKKKSKEEKRKDNDEKDLEETPPASEATEKKSKKKSKLKSSAEPSTKLEITSFALAVEAAVDNRKDTGGEDRNDVSADKNNSGNKSVQSADEDLPKDLLSLEEIQEKLKSFNHFNISKFCADQFQLFDMSAFHNSSLGEIVGYGISENVELNVVDCPYDETRIRNLWKNKAVEHFKSKQHSKYPVRVQRTSIRAVKKRVAFQGI

SEQ ID NO: 23374 - DNA, 3026 bp, DROSOPHILA
gcagtgcgcaggaaatcctcgatcgcagcattgtcaattgtcttttttaattcataaagtgttataaccagccgattaacaaataacatgcagctggccaaaagagcaacaaaatccctagcgcgttcgccagttaataccgcagatagcggtattttcgtattcgaaagcattgagggtatttcgacttataatatgttgctttttccgggaacgatggaattgaaaatgtccttggaatatttgaataaaataattaatttgaattcttttattctaaatgaaaaaacacataaaataatcaaatcaaattgcaacaaaactatttaaaaaacggaagagtacgttttatatatagttaaaaggctaaatgatatttgtatatttatgtatatatttaatatctgtatatacgtttcactaatgaagtgtagaaaaatgtaaaatgaacaacgatttcacagtttattaaaatcattcgagggtgttgaaaggcgggcactacttataaattgcaatattaagttatacatctgggcacatatgatttcaataaactgcaattcaatcttgatcttgttaattagatctgaaaggtattcaccgccaatccctgcggtgggcactccacaacaattgctatattgagcgcaccgaatcgccaccatcaactgattacacgccctaatgccgatccaatccactttttccacccgataatgggatgacaatttacccctgaagggcgtgaggtttggtacttgtagatggtgacccttcaacccccattcaagtccttgtttttcttcccacaggcttagccggctgagccctcaaaagggtgctaagccagttgtcccggatgatatgaaaacaagcaaagtgttacacagatcttatttatttaacgcaattcgctccaaatagtcagtaaaaataatatcaaaataactgcattcatcaaaatgtatactaatatttacatagatattagtggattctatatttgatcgtataagcatttcatttgacggccatggccattctggggtcccttgagagatgggcccaggtatttcgatcctgctacaggattcttccggccatccaatttgctcgacttgtccttcattatgtaaatggcatgcctctcctgcttgcgaaacttggctcttctgttctggaaccagacctaaaacacacaatggttttttttttttttaatttcgattactaagtcgttttgtatccttcaacaggatatgactaaattcgtttcgattgtaagctggcttcgagaaacctataatatttgaacctatcaacagcagatcgagttcttttcaatagttatattatattatgtaagtattatttgttatatgttaattattgaaatatgtgtatcctaaactacccactcacttaaccagcaattcaatctcattagttttcctcacctgaactcgagcttccgtcaagtgcagcttggatgcgatctcttccctggtgtagatatctgggtagtgggtttccaggaagatcttctccagctcgttcagctggttggacgtgaaagtggtgcgaatgcgcctctgttttgatttgtcggtcaggctcaagccgtcgtctccataggacttcaaatggaagtctatggcgaggtgagagttggttcaagattacaatccataatcgatccatccaggtgcactggctgcaggtggaactgatggccactgtacttacccgtgttgtaggagccaatgttatgggtggccgggtaaaactcggagacagtggtgattttggagaacaataagctcgactcctggttgagggaaccccggattgcggactcgttggcgcagagcttgtaactggagtcaatcatgaggttgtagtgatttatgtgattggccacggagagtcctcctccattggcgccgctgttgtagaactccgagttcgcggtgtacaaacaatccttgtcgaagttcgccttgttgagcagtgaaaattccatcgcatctgcaggtaaattcacacacggcactcgattgaaattttacagcccgctaatgagtcattcggccataaaacacatagttatagtagctccgcggccgcacacacttttaactgcccttgaataaataagcttcgattacgattgtatcaactacaggacatccacgttggacgaacaaggatgctgcacttgtctcgggagagcgggacggaaaatttcattcgtttccgcgtttggaggcggtcctaacgagctccactcgacataggggtggaaatctgactttccggcgcgtgtcgtgcactgcgcgaaaattcaccgcatttccccaattgacttgtcacagcatgtctaaagaattggttttggttttaatttcattgattgcatcgctgtctgttggctctgatctaatcttcactcagaaatcttcttttcaatgaatatttcttcaaaatctgaatattttccaagctccatctttaagcgaacttttctttgagtgcaccaattttcacaggcctcaaaaagcaacactcagaagattaaattggcttatcgggcaaccatgacgctgggatgtcctgtctgagcgattaaaggaaatgcttctctgggataatataaaaagtaagaaaaatgaaaatcctctttacgttgcaataactcttaaggaacagccaaagtaacataaattataaaatatatttaaacttcatatatgaaatggaaagggtatcggacagtccgtcatcacgagtacagcacttcgccaacttgataaaacaaatggtgttgtaccgcacacaatggataagagacaccttactatcttttcttgtttataacattgggctgattgaaacattgtttaaagtcactggcaggatacaacccctgttttcggaaacaattatttgctctgcggattatttcgattagttaattcctgctaatcagagtcctgcctaatttttatttactctgcgctgaa

SEQ ID NO: 23375 - DNA, 663 bp, DROSOPHILA
atggaattttcactgctcaacaaggcgaacttcgacaaggattgtttgtacaccgcgaactcggagttctacaacagcggcgccaatggaggaggactctccgtggccaatcacataaatcactacaacctcatgattgactccagttacaagctctgcgccaacgagtccgcaatccggggttccctcaaccaggagtcgagcttattgttctccaaaatcaccactgtctccgagttttacccggccacccataacattggctcctacaacacggacttccatttgaagtcctatggagacgacggcttgagcctgaccgacaaatcaaaacagaggcgcattcgcaccactttcacgtccaaccagctgaacgagctggagaagatcttcctggaaacccactacccagatatctacaccagggaagagatcgcatccaagctgcacttgacggaagctcgagttcaggtctggttccagaacagaagagccaagtttcgcaagcaggagaggcatgccatttacataatgaaggacaagtcgagcaaattggatggccggaagaatcctgtagcaggatcgaaatacctgggcccatctctcaagggaccccagaatggccatggccgtcaaatgaaatgcttatacgatcaaatatag

SEQ ID NO: 23376 - protein, 220 aa, DROSOPHILA
MEFSLLNKANFDKDCLYTANSEFYNSGANGGGLSVANHINHYNLMIDSSYKLCANESAIRGSLNQESSLLFSKITTVSEFYPATHNIGSYNTDFHLKSYGDDGLSLTDKSKQRRIRTTFTSNQLNELEKIFLETHYPDIYTREEIASKLHLTEARVQVWFQNRRAKFRKQERHAIYIMKDKSSKLDGRKNPVAGSKYLGPSLKGPQNGHGRQMKCLYDQI

SEQ ID NO: 23377 - DNA, 2810 bp, DROSOPHILA
tttgtttaaatgtaaactacatatatacatatgtgcactggaataagcatatatttgtggcttcagccattgtttactgccggacaggcaaaatgaaacaattagtgcctacccgcactgacactttgactttcctggcccctcgcccgattgtgtaaaatgtatctcgtcctcttcactatctcgaagctgagaatggtccttggtccttgcagaatatttatgcaattcatttttgtctaaactaataagttgctgctgtaactgcaagtccagcaggttgttttatctcataatgaaatagtagactgactgactctatgcaaataatgcggatacacatgtctcgcctggctaccaagttgttaacatattcattgaatctgaatcaacttttccactcccgctcccttgaccaggcagctgtgaaatatgactccttatccaggccaaaacgaaggacttgtgtgcctccttccaaggactttctcacttaatatgtgaagacctgtgtaattgaacattatgcaggcaatctaattgggtttcgttttcccctgccgaaactaactttaatccacagaatgttttacgagaagtcacttttatctttttctcagatgttatttaggctttattttctgtattatttaatcttttaaataatcttttattcaataaatatatgatacaaatattatatatgcaaaatacacaagaaaaagccccatttgccagtcacatttcgctatatcaacaaatgccaaggttattgggtcaaagtcagatagcgcgtatataacacctcagtgaataatcaaataggaagttgagataaggcaaaaatcactcaaattggcgaatggcaaacagatttaattacacagtctgttgacaagccgataagttgcgacacactgccgctgatataaagccaagacacggaagtgccattcagtcagacggtgccatgtactcaacgaaatttttatggtggctaatggcactcgtggcatatgccggagccacgcccactcccggcgatgggcggattgtgggtggcgaggtggccaccattcaagaatttccctatcaagtatccgtccagttgcaaggccggcacatatgcggtggagccatcattggcatcgacaccgtactgacagcggcccattgcttcgaggatccctggagcagtgcagattacacagtgcgagtgggttccagcgagcatgagagtgggggccatgtgctcagcctgcggcgagtcatcgcccacggcgattataatccccagagccacgacaacgacctggcgttgctcatcttgaatggccagctcaatttcaccgagcacctgcagccagtgccactggccgcattagcggacccacccaccgcggacacccgtctccaggtcagcggttggggtttccaggccgaggagagtgcagtcagcggtgaagttggagtgtctccgcaacttcgtttcgtggacgtggatctggtggagtcgaatcagtgccggcgtgcctatagccaggtgttgcccataacccggcggatgatctgtgccgcgcgtccaggtcgggatagttgccagggcgactctggcggaccactggtgggttacgcagcggaagaaggtccggccaggctatatggcatcgtttcctggggcctgggctgcgcaaatcccaactttccaggagtgtacaccaatgtggctgccttccgcagctggatagatgagcagttggacgccaggggatgggatgaactgctggcgggctggagtagattgcaataatgtgcagaaaaatgtaaaacctagtagataatagtattaagtgttatacaaatatttgttttaaaataaaataaaatgtatttaaataaaaaaaagctgtttaattaaattacgtgattttagctgattgttgttggggaaacttataatattattgatattgtggtaagaattaatttatttcaactggtctcacagaaaaaaaagaaacaaataaaaaaaacaatttatattcttttgtaggagaaaccccatgaccaaataatgccaaataaatccactcaaatgagtctctgcaatataagctaaactcttcgtctgggaaatcccaatatactgaacaagttgtgtgtggctggctagccggcctaatgtttattttcgcctaagttacctgaccacaccttcctgggattgcttttcttgttgtgatttcatttgaataaatcaattgccacatgcgcctttgttgccacaccgaccgcaacaaccacatagcagaccagacttggccaaaacagtcggtcgtggcagttcgtcggtcgcagagtcattttgtcagtttgctgctgcggttttcacacttttttttttggcagctacgcagttatctttggtgttatttcaatttctgttttccttacattttggcccactgcccggaaaagtcaacgaaccgccagcgaaatatttagcaagtccataagccttttcgtgtggcccacgaaattggattggctgtcgatgctgatttaggcctaatctcgatatttggctaatcggcacacagtcggccaataaattgccacggcttaaaaatccagtcacattgaatgggatcctctcaagaggcgggaccataaataagcatgactgtcagaaaataaaaggcgatggaagttgggcagttggctaagtgaaagtcctgttccgatatctcgcacatttatttattttattttaccacaaggaaattcttctttagatgtgcggaaaccta

SEQ ID NO: 23378 - DNA, 810 bp, DROSOPHILA
atggcactcgtggcatatgccggagccacgcccactcccggcgatgggcggattgtgggtggcgaggtggccaccattcaagaatttccctatcaagtatccgtccagttgcaaggccggcacatatgcggtggagccatcattggcatcgacaccgtactgacagcggcccattgcttcgaggatccctggagcagtgcagattacacagtgcgagtgggttccagcgagcatgagagtgggggccatgtgctcagcctgcggcgagtcatcgcccacggcgattataatccccagagccacgacaacgacctggcgttgctcatcttgaatggccagctcaatttcaccgagcacctgcagccagtgccactggccgcattagcggacccacccaccgcggacacccgtctccaggtcagcggttggggtttccaggccgaggagagtgcagtcagcggtgaagttggagtgtctccgcaacttcgtttcgtggacgtggatctggtggagtcgaatcagtgccggcgtgcctatagccaggtgttgcccataacccggcggatgatctgtgccgcgcgtccaggtcgggatagttgccagggcgactctggcggaccactggtgggttacgcagcggaagaaggtccggccaggctatatggcatcgtttcctggggcctgggctgcgcaaatcccaactttccaggagtgtacaccaatgtggctgccttccgcagctggatagatgagcagttggacgccaggggatgggatgaactgctggcgggctggagtagattgcaataa

SEQ ID NO: 23379 - protein, 269 aa, DROSOPHILA
MALVAYAGATPTPGDGRIVGGEVATIQEFPYQVSVQLQGRHICGGAIIGIDTVLTAAHCFEDPWSSADYTVRVGSSEHESGGHVLSLRRVIAHGDYNPQSHDNDLALLILNGQLNFTEHLQPVPLAALADPPTADTRLQVSGWGFQAEESAVSGEVGVSPQLRFVDVDLVESNQCRRAYSQVLPITRRMICAARPGRDSCQGDSGGPLVGYAAEEGPARLYGIVSWGLGCANPNFPGVYTNVAAFRSWIDEQLDARGWDELLAGWSRLQ

SEQ ID NO: 23380 - DNA, 3166 bp, DROSOPHILA
ccaaacggtgtggtgcgcttaagatactaaccgctttcccctccttgatagcccgagttcaggaacgagattgacagcacctatgagagctccacggagccgagcaagcagtacagctcgctggctttgatcaaccccacgatcgccaccaccggcgactacaagtgcgtggtgcagacctcgctgaacaccttctccagccaccagagggttcaggtcatagacctgaggaactacaccctggagctgtcccacaagacgatccacaatgagacgcagctgaactgcaccgtgacgaacgtgtatcccaggcccaccatcacgataatgtaaggacgagcgcctgccttgtcgtaagacagccttgtagtaaacaacgtcccaactcaactccgctcctattacagatccaacgacatggacgtggtgaagcgggagcccatggtgtacgagaacgaggagggatacttcgatggcagcgccgtggtggcggcctacgacaccgacgacgatcccgatgcctaccagtgcgtggtgtccttcgagggatacggcaagaacctgaccacggtggccacgtccgcggcggcgggcaggagccacgtcgacttcagcctgtggctgttttgttttctgtactacctgctctgcaagctgaaggtattggcctaaataaaagcgttgttatttattgttactaaattaatgtttattgaattctgtttgccattcaactaccttttctacgccccttcggcctagttaaccattttgtaaataaatacgaatacttcacaaaaccaactacgttagttaactcttaaggttgctctggaaatggatgccgtccttctccggcggggcttctagattttaaatctacgactgcccttgtcggcttacagctattacattttgtaaattaactcggcttgaactcgaactccatgcgaacaaatgaaaatatgggctgcaattcggaaatgttgaatatttctgtttattgatatgtggagctggagtccagcagtagattggaacagccgttcaggtaggccttgtgcagcttgttggcaaactccttatcgttctggataaggtacgtgaaggcctggacgaactgcgtcgagttcagcagtggctgctgtggctgctgtggctgctgtggctccggattgccgttgttgggcgcgtcgaacatggtgggcggcatgagggccggcccgggcttgtcgccagccagcagtctccgcaagcacttgccggcatcgtcgttggccatcagcgccgacgaggacggggcgactgtcggagattgagccgtagcgtagcttttaccgatcttcaggtcgctcaggagctgaatgttaagctgctgcatcttctggaagggcgacagccggctctcgtgattgtccctgcctgccgggggcaacagatcctcgccaggcgtggctgcccgctgctgtttctccagctggtccacggagagcggctggacgcggtggaacagtgactctgccgtggcctgcttggccgattcgaagaacttcaacacattgccggccgttacgttctccgccgaaggcgtcttcggctgcccgccgctcacctgggcattgtagtccttctgggccttggtcagcatgttgaatatgctggccggctggctgctgtcctgctttggctgctggggcgcggagacgtgacgctgggcctggccattcgttccctgatccttggacttgagcagcccgttcaccaagccgctgatgcggtcgcactcctcgctgttgtagaaccagaagccgcggatgcgcgagcgctcgttgcggtagagcaggaacggcggctgcgactgcagctccaggctgccggtgatgggctccacgaaggacgtggtgttcagtcggttgttgatgaagatgctgtgaaagggctccgcgttgcggtggtatatgaagaaggctccctccacatcggtcttttcccactcgttctgcgacgagttgaacgtgtagaaggcgacgtgcgaggacgaatccacgatctccttggcgtacgggtcgatcttcttgatggccgccaggttcattcgcgtgatgctctcgtcggccattgtaaattgtatgtaatcttcagttttggctgtgctattgcgaattgcaattatttgtgaatttaacggcgctctggtcacactgccccgtggatgttttcccgtgtttatcaacgactgtgctgcggtcacaccgaatgacaataaactcttccttttgtctattaatgatttgtttgagaaatattaagtcgattgacttgcatataaaaatggccacaattgtacgtaataatatttctcaattatgtagcataaacatttaatttatgtttactaataaaattttcaacttcgatagcatttccatttcaatatatcgatactgaagaccagctctagaaactggcgggaactaattgcattgcaatttgtatttatttgaacacagaattgccacaaaatgcaaaagtctataacgtaatttacgatttaacaaatgctaagtattgccaatctaacaatcccccgtttcagctccttcttcaagaagaaatccgatgccaccgacagcccctcgccgcccaagaaagttcctaagtaaatggtgccgctgttttcttgtttcattactaaattcctcgacaaatcataggattgatgcgaagaccgaactcccagatgaaccccacatcaagagcgaaagtgcctccccggaaactaagcccaaggtagaacctatgtctgtggattccgaggagaagacaagtccggtgaaaaatgttaagaaggaaccaaaggaagtcgatgacaagaccactgacaagaaggtcacaaccataggtctcaactccactgccgctactaaggaggatgtggaaaactacgatccatccgccgactcctatcatccgctcaagaatgcctactggaaggacaaaaaggtgtaagtagtgcaggattttgagcctccaaggcgaattatatcaaaggaaacactttccagcactccctacttggcactggcccgcacatttcaagtaatcgaggagaccaaaggccggctcaagatgatcgacacgctgagcaacttcttctgctctgtga

SEQ ID NO: 23381 - DNA, 1166 bp, DROSOPHILA
caattcgcaatagcacagccaaaactgaagattacatacaatttacaatggccgacgagagcatcacgcgaatgaacctggcggccatcaagaagatcgacccgtacgccaaggagatcgtggattcgtcctcgcacgtcgccttctacacgttcaactcgtcgcagaacgagtgggaaaagaccgatgtggagggagccttcttcatataccaccgcaacgcggagccctttcacagcatcttcatcaacaaccgactgaacaccacgtccttcgtggagcccatcaccggcagcctggagctgcagtcgcagccgccgttcctgctctaccgcaacgagcgctcgcgcatccgcggcttctggttctacaacagcgaggagtgcgaccgcatcagcggcttggtgaacgggctgctcaagtccaaggatcagggaacgaatggccaggcccagcgtcacgtctccgcgccccagcagccaaagcaggacagcagccagccggccagcatattcaacatgctgaccaaggcccagaaggactacaatgcccaggtgagcggcgggcagccgaagacgccttcggcggagaacgtaacggccggcaatgtgttgaagttcttcgaatcggccaagcaggccacggcagagtcactgttccaccgcgtccagccgctctccgtggaccagctggagaaacagcagcgggcagccacgcctggcgaggatctgttgcccccggcaggcagggacaatcacgagagccggctgtcgcccttccagaagatgcagcagcttaacattcagctcctgagcgacctgaagatcggtaaaagctacgctacggctcaatctccgacagtcgccccgtcctcgtcggcgctgatggccaacgacgatgccggcaagtgcttgcggagactgctggctggcgacaagcccgggccggccctcatgccgcccaccatgttcgacgcgcccaacaacggcaatccggagccacagcagccacagcagccacagcagccactgctgaactcgacgcagttcgtccaggccttcacgtaccttatccagaacgataaggagtttgccaacaagctgcacaaggcctacctgaacggctgttccaatctactgctggactccagctccacatatcaataa

SEQ ID NO: 23382 - protein, 372 aa, DROSOPHILA
MADESITRMNLAAIKKIDPYAKEIVDSSSHVAFYTFNSSQNEWEKTDVEGAFFIYHRNAEPFHSIFINNRLNTTSFVEPITGSLELQSQPPFLLYRNERSRIRGFWFYNSEECDRISGLVNGLLKSKDQGTNGQAQRHVSAPQQPKQDSSQPASIFNMLTKAQKDYNAQVSGGQPKTPSAENVTAGNVLKFFESAKQATAESLFHRVQPLSVDQLEKQQRAATPGEDLLPPAGRDNHESRLSPFQKMQQLNIQLLSDLKIGKSYATAQSPTVAPSSSALMANDDAGKCLRRLLAGDKPGPALMPPTMFDAPNNGNPEPQQPQQPQQPLLNSTQFVQAFTYLIQNDKEFANKLHKAYLNGCSNLLLDSSSTYQ

SEQ ID NO: 23383 - DNA, 3554 bp, DROSOPHILA
tgatatcgaggaaatcaaggtccaagtctgtgtctacatcttcgatctgctgtacatcaatggcactgctctggtgaccaaaaacctgtcggagcgtcgcaagctcctgttggagcactttcaagaggtcgagggcgagtggaagttcgccactgctctggacaccaatgacatagacgaagtgcagcagttcctggaggagtctatcaaaggtttgccctgccaaccaacctaaaagttgtttacttaagctttatttcactaggaaattgcgagggcctcatggtcaaaacattggatgaggaggccacctatgagattgccaagagatcccgcaactggctgaaattgaagaaggactacctatccaatgtgggcgactcactcgatttggtggtcattggtggctacaaaggcaagggccggcgaactggaacctacggaggatttttgcttgcctgctatgacaccgaaaacgaggagtatcagagcatatgcaagattggaactggcttcactgatgaggacctgcaaacgcattccgagtttttgggcaaacatgtgaccagcgccgccaaatcctactacagatacgaccccagcctggagcccgatcactggtttgaaccggtccaggtgtgggaagtcaaatgcgcggatctgtcgctcagtccgatccaccgagcagccattggcattgtggacggagagcggggcatttccttgagattccctcggttcattcggatacgcgacgacaagaatagcgaaaacgcaacggacgccaatcaggtggcccacatgtaccagtcgcaggatcaggttaaaaataatcaaaagtcgagcacacaaatggagatggaggacgagttctactgaccggtctgctccagccatgtgtacacgatttatttaacaataaaagtctgttatcgctatttgacgctggtgctgctctcggaggatttggagaagcgacgagtttcgagctcacactccttcacctccttcggtttgggtttgttgcgccgattggggcgtttgttcctcttcgaagtcttctcctccaccacggaagcctctccatccgagccatctttgccgcctgcaccttggggcagctcatctgatgcacgaattcgggctttgggctggtaaatggcaatcgatggtcgatcctgtaaacatcaagcgggttagtaaaatgtcgaggggggtaataggtgagacccactttattccgaatgcgccgctcctctgaagctcgaaattgagcagccttgatggcttcctctgcagtttcgtgggcggaacctgctggctgcttgtctgcgccggttcttttttccttgcgaccacctctggcagccggtgtaaaaaccttgacagcagcttctggtgtctcggtgttttcagtcgcaggcttttctttcgaggcctccgcagcgttagaagtggatggcacgtccaaactctcgtttgattctggcttgtttgctttcttcaagataacgatgtccatggactttgaatttttgttctgcttgccgctggatggcttgcctttgtcctgtttgtcctgtttgtcctgcttgccctggccgtcatcctttttcttgtcccgcttgactagcttacgctgttcgtgttcctcgcgtcgcctctgatcccgctccgttcgtcgtttggagcgcgaggccttggcatcattggcttgggatccagatgactgcggatctttgacatcctttttggctggcttcttcgtgtctcctcctccgccgcctccttcggcctccttaagcttgctggcgtccgactgcgctgccaatcgcaacagcttctgctcctcgcgttgcttccgcttctcctcgttccgcctgcgcgcctcctcccggcgcttctccttcttgttggccaggtactgcaggaggggtgtagacttgaccttctcttctgttcgccgttcgaagttgaagtcgatcttgacgtcgcccatgcgactcgcctcctcgcgctcttgggccagccgcttgatgaactcctggtagtggggttcgctctcgatggtgttcaccttgctgtcgtcgttcctggccttgttcttaaggaagcactggaagggagcatactccacgatggccatgtactcgacgcccttgtggtcgacgaagacgtagccgtcgaagcgatcccggaactgcaccacctcgcctatgtccttggaggacatatcgatgtaggcgcgacaggtggcctcctggcccagcgaccagtctgccttgcagtagtaatacgagtcgttctccggcaaaggacccacctgatccaggaactgcgcctccgtcatggtcggcggcaaatgccgcatcacaatctgcaatgaatgcattagtttcggaggatcgtgggattaagacagtctggacggtaccttaacgatctgattggtcttgtccttcttgtccttgcgcctgcttgccttggacttctccttgggcttttcctcggcaaaagtttcagccattttctgttcctttttatttacaaaaatcaaaacaaagccgaaaagccaacaaatgcaaacatgatgtggaaccgatagagatggcactttcggctcgaactagaagaaattctaaagttcacaagtggaacctatatccaattattctagtaaaaaaaaatagattctatcaaagaagttagtcacttagttagttagccaaatattaggaaagtagaacttgaaatatctgtgccatttctggcaattacgacaaggctctggtatctagatctttggaactagttctttaaatccacattgcaagagcgctttttttgaccggtacgcagatatcatgctcaacttttaaacagtttcgactgttttggcacattaaatgctcgaattgaatgaataaaaggaaacttggtcaaggtaatgagtaaatggacattctagagagcttgacacatgatgcagtaacatcgttttcaggaatctgagcattgcaaaatgatggcgccggtagatccaccagtgggatcctttctgaagtgcttcgtctgcgtctccgatgagggcaggacttggacagaattgatacaaggtttcaccaaggaatcggacaaggtggaaaagaaccttgctcacctgcaaacgcttctggagaaagcacatgtgaagcccagcgtgatatgcagaggctgcaatatgcagcgatactgcagcctgtcccatctcgtggcggatcgtcaagaacacaagccactctgcgaggtgctgagggatctgcagaagtccatgaagatcgatcacccgttgaagctgctcggccaaatcaccgatcgcaggaagcttcagctcgtcatttcgcagctaaagatggtcctgctggccaagttgggcagaccactgaatcagcgggagcatcagctaatcggcaacccagccgtgtgcgatgtgtgcttcagcactgaagctctcgaggactgtgaaggatgtgccggagtggccttctgctccgcggcacaccaacgcctagtca

SEQ ID NO: 23384 - DNA, 1497 bp, DROSOPHILA
atttttgtaaataaaaaggaacagaaaatggctgaaacttttgccgaggaaaagcccaaggagaagtccaaggcaagcaggcgcaaggacaagaaggacaagaccaatcagatcgttaagattgtgatgcggcatttgccgccgaccatgacggaggcgcagttcctggatcaggtgggtcctttgccggagaacgactcgtattactactgcaaggcagactggtcgctgggccaggaggccacctgtcgcgcctacatcgatatgtcctccaaggacataggcgaggtggtgcagttccgggatcgcttcgacggctacgtcttcgtcgaccacaagggcgtcgagtacatggccatcgtggagtatgctcccttccagtgcttccttaagaacaaggccaggaacgacgacagcaaggtgaacaccatcgagagcgaaccccactaccaggagttcatcaagcggctggcccaagagcgcgaggaggcgagtcgcatgggcgacgtcaagatcgacttcaacttcgaacggcgaacagaagagaaggtcaagtctacacccctcctgcagtacctggccaacaagaaggagaagcgccgggaggaggcgcgcaggcggaacgaggagaagcggaagcaacgcgaggagcagaagctgttgcgattggcagcgcagtcggacgccagcaagcttaaggaggccgaaggaggcggcggaggaggagacacgaagaagccagccaaaaaggatgtcaaagatccgcagtcatctggatcccaagccaatgatgccaaggcctcgcgctccaaacgacgaacggagcgggatcagaggcgacgcgaggaacacgaacagcgtaagctagtcaagcgggacaagaaaaaggatgacggccagggcaagcaggacaaacaggacaaacaggacaaaggcaagccatccagcggcaagcagaacaaaaattcaaagtccatggacatcgttatcttgaagaaagcaaacaagccagaatcaaacgagagtttggacgtgccatccacttctaacgctgcggaggcctcgaaagaaaagcctgcgactgaaaacaccgagacaccagaagctgctgtcaaggtttttacaccggctgccagaggtggtcgcaaggaaaaaagaaccggcgcagacaagcagccagcaggttccgcccacgaaactgcagaggaagccatcaaggctgctcaatttcgagcttcagaggagcggcgcattcggaataaagtgggtctcacctattacccccctcgacattttactaacccgcttgatgtttacaggatcgaccatcgattgccatttaccagcccaaagcccgaattcgtgcatcagatgagctgccccaaggtgcaggcggcaaagatggctcggatggagaggcttccgtggtggaggagaagacttcgaagaggaacaaacgccccaatcggcgcaacaaacccaaaccgaaggaggtga

SEQ ID NO: 23385 - protein, 410 aa, DROSOPHILA
MSSKDIGEVVQFRDRFDGYVFVDHKGVEYMAIVEYAPFQCFLKNKARNDDSKVNTIESEPHYQEFIKRLAQEREEASRMGDVKIDFNFERRTEEKVKSTPLLQYLANKKEKRREEARRRNEEKRKQREEQKLLRLAAQSDASKLKEAEGGGGGGDTKKPAKKDVKDPQSSGSQANDAKASRSKRRTERDQRRREEHEQRKLVKRDKKKDDGQGKQDKQDKQDKGKPSSGKQNKNSKSMDIVILKKANKPESNESLDVPSTSNAAEASKEKPATENTETPEAAVKVFTPAARGGRKEKRTGADKQPAGSAHETAEEAIKAAQFRASEERRIRNKVGLTYYPPRHFTNPLDVYRIDHRLPFTSPKPEFVHQMSCPKVQAAKMARMERLPWWRRRLRRGTNAPIGATNPNRRR

SEQ ID NO: 23386 - DNA, 3005 bp, DROSOPHILA
ttctgtaaataatagatatcgaaaatgtaaatacaagcagaagtagcagaacagacaatttatgtatttacatatttaatattttgtatagatatacaacaaaaaatttacaaatactaaatactctttaaagttaacaatacaaacttcatctcaagcccaagtcacgcagatcacgctacaggtaaggcaaggcattttgaactcctgatactgtttgaccttcctgaatacgtttttattgctgttcaattttaaatttaaattaaaactaataaaatgcactcatagtttttatatgtgaatgtatttttgtatattaacacaaccgacatcagaaatataataatacttaacgtaaagatggggaattgatacagggcaataaataactagtcgttctatacttttttaaaacaaaggtatggcaaacgattagattgtatgttattcagaatgatcagattcttaaacttttggatacatggttatataatcaaatattttagggattaagtgcattaaacatgataaaatatcatcacaaccaaacatatgcatacaatgatgaataagacttacacatatacacaaccatctatgtttatataaattcagttttattttccagcgttattatcgctgaatccataatgttaaagttgcccacgatatatttaacaaccaaccaaaacttcaaaaagattttcaagcggatagggtacacttttctttcttccatagccgtctctttcctacgcaactcctatttgccagatgtgcgcacgatggattttgttgtaatgcctctcttcctcatgtctctatagctatctcttttcacggcacggaaaacagcaacgttgttagctatcgctgactgcaaatgaaaagagacaactagagcaacgccgccaaaatggctggccgatgtgttagccgttgctcttgccagtgttttttcgcatgagagctcattaacgtttcgcttggctaagtgcgcacctcgtcactgaaaccagttagcaaaagaaatttttgttcaagcttaaaccgatacctacgtcactattcgatcattttgaatgcaaattattcccagattaataaactaggtcgccatccgtggcgctgccgccgggctgcggacccgtactttcgacggaaaatatcgggaccattttcataaacgatctatgatacagttttaaaacactttaacgctttccatcgtgcacacttaaaacaaaactcataaagtgaaagttcatatcctggcaagtaaaaagtgataaatgttaaaacgtctgaagtgatagtctggagtttgattaccaggtgaagaagataatatatatgggatgtacaaagttggcaacgaagccccccttctaacaacaatgaaaaagggagtaatcctactttctcactttcaataataaacatacgcacgtcagccaccgtcgaagtctccaacgccgcattaaaaataattaattatgatgctaacaactgaacacataatgcatgggcatccccactcgtcagtcgggcagagtactctatttgggtgctccacggcgggccatagcggaataaatcagctgggcggcgtatatgttaatggccggccactgcccgattcaacgcgtcaaaaaattgtcgaattggctcattccggcgcacgtccttgtgatatttcaagaatactacaagtgtccaacggttgcgtaagcaaaattttgggcagagttggtccatttgaagcctcgggaaggctattactaactaatgcagatgatgttcgttccgcaacgttgattgctgagttcacaatccctggagtcgagttgtttgacgttgcgacggaggaagatgcagttgttcctgaaggattatttgccgtgctggttcgaccactgccgtccacggtatcggccgatcgtctctgagttcgcattttttcttctcggcgccatttagctcgtcggtttgaaaaccaaacctattaaaaatttttcacgatgaaggttattgatttttatatattaaacgaacttaatatttctgaaaaaaatatattttaataatataatatagttaattaactatttaaactaaaaaaaaagaaaataattaagctaaataatgtatgtagctacaaatttttagttactagactgccatagaaatccgctaaatcgacttttttttaagcacttataataatcagcttatcagaagcttcttaaaattacttcaaatttagtatgtatttactaagaagttttttatagccgttaccaggttcgttaagaagtatgttacaggtagaaggtagcgtttccgaccctacaatatatacatctatctattttgttgatcaggatcaaaagccgagtcaatctggccatgtacgtccgcctgtccgtcaagattttagaaactataaaagataataagttgaaacgagtgcagattccagagacatagacgcagcaaaagtttttttccccaaattttgcactttgtaaaattatttaatattttttatattagtcttctaaagttatcaaaagtttgaccacaccgcttcttacgtaacacaagtcgcaaacaaattaagttattcgtagactaaaagcgtatactagattcgtttaaatctatgtaacaggcagaagaaaacgttttcgaccatataaaatatatatttttttgatcagcatcaatagcgtctagatctcaggaactgcaaaagcttaaaggttgagattaagcatacagattccagagacaaagacgcaattttgtttacttatgttgccacgcccactctaacacccacaaagcgataaaaactgccacgcccaatactttaaaaaatgtgttaaaattttttcacttttttattagtcttttaaattttgtttgatttgccaaacgctcaaatgttttgattttcctttgttttgttgtttgtcctgccaatttttatcggtata

SEQ ID NO: 23387 - DNA, 2368 bp, DROSOPHILA
cgcacctcgtcactgaaaccagttagcaaaagaaatttttgttcaagcttaaaccgatacctacgtcactattcgatcattttgaatgcaaattattcccagattaataaactaggtcgccatccgtggcgctgccgccgggctgcggacccgtactttcgacggaaaatatcgggaccattttcataaacgatctatgatacagttttaaaacactttaacgctttccatcgtgcacacttaaaacaaaactcataaagtgaaagttcatatcctggcaagtaaaaagtgataaatgttaaaacgtctgaagtgatagtctggagtttgattaccaggtgaagaagataatatatatgggatgtacaaagttggcaacgaagccccccttctaacaacaatgaaaaagggagtaatcctactttctcactttcaataataaacatacgcacgtcagccaccgtcgaagtctccaacgccgcattaaaaataattaattatgatgctaacaactgaacacataatgcatgggcatccccactcgtcagtcgggcagagtactctatttgggtgctccacggcgggccatagcggaataaatcagctgggcggcgtatatgttaatggccggccactgcccgattcaacgcgtcaaaaaattgtcgaattggctcattccggcgcacgtccttgtgatatttcaagaatactacaagtgtccaacggttgcgtaagcaaaattttgggcagatattatgaaactggatcgataaaacctcgagctataggtggttcaaagccacgagtagctacaaccccggttgtgcaaaaaattgcagattacaaacgggaatgtcccagcatatttgcgtgggaaatacgagatcgactgctatcggaacaagtttgcaatagtgataacattccaagtgtttcatctattaatcgagtcttacgtaacctggcctcacaaaaggagcagcaagctcagcaacaaaacgaatccgtttatgaaaagcttcgcatgtttaatggccaaacgggcggatgggcatggtatccaagcaatacaacgacggcacatttgacgctaccaccagcagcttccgttgtgacatctcctgcaaatttatcaggacaggccgatcgggatgatgttcaaaaaagagaattacaattttcagtagaagtttcgcatacaaactctcacgatagtacatcggatggaaactctgaacataattcatccggggacgaagactctcaaatgcggttgcgcctaaaaaggaagttacagcgcaatcggacatcattttctaatgagcaaattgacagtcttgaaaaagaatttgaaagaacacattatcccgatgtttttgcgcgagaaaggcttgctgataaaattggtttgccagaggcacgtattcaggtttgtctttcagtttggttttcaaaccgacgagctaaatggcgccgagaagaaaaaatgcgaactcagagacgatcggccgataccgtggacggcagtggtcgaaccagcacggcaaataatccttcaggaacaactgcatcttcctccgtcgcaacgtcaaacaactcgactccagggattgtgaactcagcaatcaacgttgcggaacgaacatcatctgcattagttagtaatagccttcccgaggcttcaaatggaccaactgttttgggtggtgaagctaatactacacacaccagctctgaaagcccaccccttcagccagcggcaccgcggctacccttaaattctggattcaacaccatgtactcatctattccacaaccgattgcaacgatggctgaaaattacaactcctcattaggatcaatgaccccgtcatgcttacaacaacgcgatgcctatccttacatgtttcacgatccgttatcactaggatctccctatgtgtcagcccaccatcgaaacacagcttgcaacccctcagctgcgcaccaacagccccctcagcatggcgtttataccaatagttctccaatgccatcatcaaacacaggtgtcatttctgcgggcgtttcggtgcctgtccagatttcaacgcaaaatgtatctgacctaacgggaagcaattactggccacgtcttcagtgatcgtcaatctttggctcaccattagatcatttgtcaaaggcgactgccgctgcaatcattgccgcacaagcagctgagaaaagccataaacaccgaaaagagcattcaattgttagtatacacaccacaaaaagaaagaaaaacccacctagtttgaagagacagacaacgtgctgttcatccagatatttaaacatgaccttcggggcggggaaggatgtagat

SEQ ID NO: 23388 - protein, 539 aa, DROSOPHILA
MHGHPHSSVGQSTLFGCSTAGHSGINQLGGVYVNGRPLPDSTRQKIVELAHSGARPCDISRILQVSNGCVSKILGRYYETGSIKPRAIGGSKPRVATTPVVQKIADYKRECPSIFAWEIRDRLLSEQVCNSDNIPSVSSINRVLRNLASQKEQQAQQQNESVYEKLRMFNGQTGGWAWYPSNTTTAHLTLPPAASVVTSPANLSGQADRDDVQKRELQFSVEVSHTNSHDSTSDGNSEHNSSGDEDSQMRLRLKRKLQRNRTSFSNEQIDSLEKEFERTHYPDVFARERLADKIGLPEARIQVCLSVWFSNRRAKWRREEKMRTQRRSADTVDGSGRTSTANNPSGTTASSSVATSNNSTPGIVNSAINVAERTSSALVSNSLPEASNGPTVLGGEANTTHTSSESPPLQPAAPRLPLNSGFNTMYSSIPQPIATMAENYNSSLGSMTPSCLQQRDAYPYMFHDPLSLGSPYVSAHHRNTACNPSAAHQQPPQHGVYTNSSPMPSSNTGVISAGVSVPVQISTQNVSDLTGSNYWPRLQ

SEQ ID NO: 23389 - DNA, 3578 bp, DROSOPHILA
gtccgtctgatcgccaaatgtttcgattccttatctgccgcatgagtcgcgtctcagccggcacaagtgatctacatgaatcttcttataggcctcgttccgagctttcctcctttcccaaaactttgctctctgtatcccactcgtatgtcctttttgtttcggatttcgcacctctgatcccgtcgagttttcactggcatctgccaagtccactgccaaggttcacaatttaacctcatgccggccggacgatacgcaattggacaaaacgattcattaaatttaatgagcgtgccggggcggacaaaaggatttcaagttcacgttccgcggcgcacatttgtatgctacgaaagtggcgtgagcgcggccttatcaagatgcacctggcgcacctgataagacgacggtggggcggctctaatgagtggtcgtgcagaatgtgcactaactgaaataaacggcacattcaagggcgccgtttaatttcgtatttgcgcttgcactcaacgcggcttaaatcaaatgcccaaaagtatgcagtgacttaatatctgtaaggtttccacccatttttcatcctttatttatatttgtatgattgaatacaaaactttttttgaatttatagcacttatagcacattaggattcttgatatttcagggtatatatgagagttcatttacacaagtttgggaatgccgaattaaaaaacaaaatctatattgaagttttaaaaagttttctaaaattcaataaacatggtgttggataattgtggtgttaggaacaaattaacaccgttttgtaattaacaatttttggggaaattcaattttaaaatgaagtcatttaaatttttaaatttttgattttaccgcattcgaccaaactttgcgtaagcggtcacactgctccgcttaaaagaagtgtgaaaatatcgatatcatcgaaatgtgcatcgatgttcatccacctctagcaatcagtccatgtggtaaactaggtctttcgttttgaaattataaatgaaactctagcagtatgctgcgcaagtcaaagaaacagccacagacggtggccgagaaggtcagcaagctgcttgcccatccgaacgagagcgacagcgcagaggactcggacttcgatgtggccacagggccacgtctggtggacttcgaggaggaggagtacgacctgccggatgcccggagcaccgactttaggaagaggaacgtcaagctgctctcggagcagagtgaccgctacaaaggaaagatcagcagtcgcaaggagttggatgacgatgaggataaggatgatgaacaagaggtgtcctacgaagaaagcgatgaggatgatgagaacttgacaaactttaagcagaagttaaatgctggaggagctgaagactccgaggaggaaacggctgctggacattccgaatctggtgaagaaagtgaggagattgagagcaatttgacagactttaaaaaaaagtttgaggctggagattttaagtatgatgatgatgaggaggaggatgatgactctgaggaagaagaccatagccaggaaagtgaaggagatgacgacgattcagaagatgatgaagcagaagacgacgcaatcaaaccctcggatgtaatgtccaaaaccaaccatcaagctgaaatccaaaaaggacttgccgtccaaaaccagctgcgcatctgggagcgtcttctcgagctaaggatcaacacccaaaagttcaccagcaaagcgaatcagcttcctgcaccggaaactctaacgaaactggcatcggaaagcgatgagcttcagtcggtgcttaacgaggcccaggagcgttcatccaagctactgcagcaactgctctccctccagtcagctctccaccagcaatactccgagatgaaaaagtcggtgaagcgcaagcagcccacagaggattcgggtccggcggtcaaaaagtttggttctgtgctgcagagcaatttccaacaaatgattgggtatcgcaatgaagttctgttaaagtgggacgaccgtacgaaactcctgacccccggagcgggtgtcaaacgcaagtccttgcaggaggactacgacatcatcaaaaagatcggcagcgccctggcgaaccgagaggcgctcgtggaaaagtcccagaccccaaagaacagccaggcggagcagcaggaaaacacgcccgtgcagcgattgaagcacatctacgacgacagcgatttctaccaccagcagctgcgggagctcatcgagtacaaggccagcacctcgtccaacatgagcgagattaccaagcagttcgtggagctacagaagctgcgccagaagatgaagaagaaggtggacaccagggccagcaaggggcgaaagctgcggtacgtgaagcagagtaatatatctgcaagatttactcacgaacatttaaatatactttcagatacgtggtgcacaacaagctcatcaacttcatggcgcccaatgagagtagcgactggacggatgcctccaagtccgagttgtacaaatcattgtttgtctagactgtaataaactaatatatgaagttttaaataggaataaaatctatgaaatgtcataattgttaattgccatttaaaagaattataatagtagcactatatacctaaacaaaaaaaatcaaattaaaagaaaaccgattttaaattgttctttactttatatatttatttatttatttatattttcatttgttatttatttttaactgctaaatttgtatgttcaacatttcattttcgttaattcttatttcttctcaactgggttatttatgcagcaagtgcataacaatatggcttgaatataatcgcaaacgttcgaaattaccgcttcataaccgattcgtttagcgggtaatcgtgtttcggagattgtgtactgttatgtatttattgctgtcttcattcgagttgcgtttttaattcggttcgataaatataaattaattttaataatttttttatgtattatactagttgtccgcagacgcacatacttgacttttattcatttactttgctagtctcgtgaattacttggattacttcaatccatttataaaatgttcacttcgtttactttagttttatatttaatattggtttcttagtgtgttcgtcgtctaagtcattgttagttatgcatacgttaatttatatatttataaatatcatgtataatgttagtaaatcagtgcataactgcaataaacgggagcattgtgatgatgcggatttgacatagaatggagtcgaaatacaattcaataaataagtttttaaattttacgcctatgatttagagaatacaaaaggttccatctaaaaatactataaaaagttcgacacatttataaaataatctttgtgacttttgttcaatagaaatgcttgggttttctctttgggaaatgagtttcgggttatattcgatcgcaagctcttattaaaaattaattaacaatcagctgaaagtgtatagagcacataatatcatcgt

SEQ ID NO: 23390 - DNA, 1516 bp, DROSOPHILA
tggtaaactaggtctttcgttttgaaattataaatgaaactctagcagtatgctgcgcaagtcaaagaaacagccacagacggtggccgagaaggtcagcaagctgcttgcccatccgaacgagagcgacagcgcagaggactcggacttcgatgtggccacagggccacgtctggtggacttcgaggaggaggagtacgacctgccggatgcccggagcaccgactttaggaagaggaacgtcaagctgctctcggagcagagtgaccgctacaaaggaaagatcagcagtcgcaaggagttggatgacgatgaggataaggatgatgaacaagaggtgtcctacgaagaaagcgatgaggatgatgagaacttgacaaactttaagcagaagttaaatgctggaggagctgaagactccgaggaggaaacggctgctggacattccgaatctggtgaagaaagtgaggagattgagagcaatttgacagactttaaaaaaaagtttgaggctggagattttaagtatgatgatgatgaggaggaggatgatgactctgaggaagaagaccatagccaggaaagtgaaggagatgacgacgattcagaagatgatgaagcagaagacgacgcaatcaaaccctcggatgtaatgtccaaaaccaaccatcaagctgaaatccaaaaaggacttgccgtccaaaaccagctgcgcatctgggagcgtcttctcgagctaaggatcaacacccaaaagttcaccagcaaagcgaatcagcttcctgcaccggaaactctaacgaaactggcatcggaaagcgatgagcttcagtcggtgcttaacgaggcccaggagcgttcatccaagctactgcagcaactgctctccctccagtcagctctccaccagcaatactccgagatgaaaaagtcggtgaagcgcaagcagcccacagaggattcgggtccggcggtcaaaaagtttggttctgtgctgcagagcaatttccaacaaatgattgggtatcgcaatgaagttctgttaaagtgggacgaccgtacgaaactcctgacccccggagcgggtgtcaaacgcaagtccttgcaggaggactacgacatcatcaaaaagatcggcagcgccctggcgaaccgagaggcgctcgtggaaaagtcccagaccccaaagaacagccaggcggagcagcaggaaaacacgcccgtgcagcgattgaagcacatctacgacgacagcgatttctaccaccagcagctgcgggagctcatcgagtacaaggccagcacctcgtccaacatgagcgagattaccaagcagttcgtggagctacagaagctgcgccagaagatgaagaagaaggtggacaccagggccagcaaggggcgaaagctgcgatacgtggtgcacaacaagctcatcaacttcatggcgcccaatgagagtagcgactggacggatgcctccaagtccgagttgtacaaatcattgtttgtctag

SEQ ID NO: 23391 - protein, 488 aa, DROSOPHILA
MLRKSKKQPQTVAEKVSKLLAHPNESDSAEDSDFDVATGPRLVDFEEEEYDLPDARSTDFRKRNVKLLSEQSDRYKGKISSRKELDDDEDKDDEQEVSYEESDEDDENLTNFKQKLNAGGAEDSEEETAAGHSESGEESEEIESNLTDFKKKFEAGDFKYDDDEEEDDDSEEEDHSQESEGDDDDSEDDEAEDDAIKPSDVMSKTNHQAEIQKGLAVQNQLRIWERLLELRINTQKFTSKANQLPAPETLTKLASESDELQSVLNEAQERSSKLLQQLLSLQSALHQQYSEMKKSVKRKQPTEDSGPAVKKFGSVLQSNFQQMIGYRNEVLLKWDDRTKLLTPGAGVKRKSLQEDYDIIKKIGSALANREALVEKSQTPKNSQAEQQENTPVQRLKHIYDDSDFYHQQLRELIEYKASTSSNMSEITKQFVELQKLRQKMKKKVDTRASKGRKLRYVVHNKLINFMAPNESSDWTDASKSELYKSLFV

SEQ ID NO: 23392 - DNA, 3222 bp, DROSOPHILA
aagaatcttgtcggaataataaatggcggtttgtaaagtatcctattttcaaaacggacatgtttagaggtgaaaatgtaattaacatttttctaaagggctgttgttttcgaatcaaaagttcgctgttttgtttagtcggtggtagaaatgcaaccaatattttatttttatattattttctctaccataaattttctgttcacaggaaaaagtcccttccacttcagcattcatggcattgacacactatttataacgcaattcgcatggcacaccaattcccatagttacatagttacgtggacacctcccgcaaatttagcggcgaccctctccgcaaatagtttcataatatacctgccacggaaggcagcgtcaagttggcgcccgcatcggcacacgaaccgttataatcagggagccggactcaccttttggcccttcggagcaccccagcccagacacttgaccggctattcgagggccgtcgggtcagggactccgtcgaggggggggggagtgggctctaagccgggccattaccgcattagcgacgacccactcgagattcccaatctgtgcgccaggatcatactgcgcctgtgccggcagaggctctcagctggcacagcttgcactgctccccagtacactgggcaaaaccacacaatagaatttcagaatatttcagacttaaaactgagtttaagctaatcgatagatcaactatataccatttaaaggttctttatttaaaacaatgcttacaaatatctttaaatgatttaatggaattaaatagcatgattccaatgtgtttagggttttctaaagttaaattttcaacttttaccacttcaaacatttcatttttctgcgtgcactcgagccgctgtcgcgaggatgagtcactgggcaggagcgccgcatggggcgtccttgctccacctgcgagtgttcgccgcggcgcttcctcgttcagttttgtttggatagcccaacgggttgcagcggcgatgaggcaaatgccccggctaacggacgcaactccgatggaagggcaacaatagccactgtaattgcagcgttcaattagggaggtacaaagcgacagcgacacaaagacatcgtcagcatgtcgcacttgctgaggcgcaccaagaagtcctgtctgaaggttagtcctcgcgtggcgcccaaatgggtggccatctataggaaatcgatggcgacccgcgccgcatgagaatgttcagtaaagttcgcatgcccgtgctttcggcacgttaatcatacgccgcgttggccgctaacgctatgtttatccgtatcgatttctgtccttgcagttcctgcgcaagatatcgacttcaaagcagctctttgtccagcggctggacgaggaggacggggacgacgaggaggtggaggaggagctcaacctgcagcgagatctggagctggatgtgaacagcaactgtccggtgacggaggccatctacgaagagctgcagctgagcgagtgcaaccaggccttggacttggccacctccaaggaggtggaggtggaggaactgcagccagcggccaagcatgacctgcgcaccaaatacatgatgagctgcggcaactacgaggtgttggacacaccactaacgaccatcgagttcgagcgggtgaaatacaaggcgaatgtacgctacctgcggcacacgccctccaattccagtctggatctgcagctggaggaacagaaggaggagcagccagagcagcagcagcagcagcaggctactccgcggaaacagcaagtgctgcagcaggcaactcctaggaaacaacaagtgcagcaaaggattcccacgcccagccgctaccatccctgcagtatcagcctgggctccaagctggagggcaactaccacagcgtggtgatcatggagccaccgcacgacgacttccccattgttaagtgggacatcaacgggaactccctggacgacgacgcctgcgatcgctgggatgacttcgaagccaggtggcggcaggcggcggcggccaccagatccctctcccagtcgcaaaagtccagccaccagtccagctcctgcaccctggagacctgggtggacgacacggagcccctcagcctggagctgcaccgacacgacaatgcagtaggcggaaacaactgcaatctttgccttaggagcttctgagaccggaaacggacactcggcggctttgtaacctccactttgcgtccagcgatagagcacgaaaaccagtcttgtgagaattacctacatacgagtatattatacatatatgtaatcgagtatttgagtcggtagaccgcaattttcattatagaaagttgttttcgagaatatccattaacaataaagtgtgtatgtgtgtgcggcgccatacctttggctccataccttgagtaatgcacttcagaatgcgaatacgaatgcgaatgccctgtgccccgtgggtgggagtaagttcatcgcccacccatccatccatcgatccattccggcgcacgacccgcacgtgtgctggacgctcgtgagaatccgtagacctttggctttcccacgagccacggctgcgatttcgtgggttcgtcccgttgtcggtggtgcaacttgcccgccactattcatccacttgatttggggtgggttccggcgattcggagcgagtttgtcccacgctggcactgccactggcattggccattagacattaggcattttcactttgctgcttgccgcactcgaaacctgagcgacagcatgccgaatcaaatgaaaagcactttttataattttcgattttgatgtacgtttttgaaattgatacggggctccattatagtcaagcttacgcctcgaccatcgaaattaatcgagaaaatgggagaaatgctacactaaatcattttgtgggggagaataactaatgatatttccagttatatgcgaaattgcaacatataatagtaaagggatataaaagtatatacaatagtatagggattcatatagcaatattgggattctttagggtgacaggacaaaggagttgaaatgaacattttaacatagatatctacagaagaattatttttgcataacgataattcaagtatagtttttattagggaaagttatgtcaaaccacaacgtacatatatatgtaaat

SEQ ID NO: 23393 - DNA, 1050 bp, DROSOPHILA
ccaacgggttgcagcggcgatgaggcaaatgccccggctaacggacgcaactccgatggaagggcaacaatagccactgtaattgcagcgttcaattagggaggtacaaagcgacagcgacacaaagacatcgtcagcatgtcgcacttgctgaggcgcaccaagaagtcctgtctgaagttcctgcgcaagatatcgacttcaaagcagctctttgtccagcggctggacgaggaggacggggacgacgaggaggtggaggaggagctcaacctgcagcgagatctggagctggatgtgaacagcaactgtccggtgacggaggccatctacgaagagctgcagctgagcgagtgcaaccaggccttggacttggccacctccaaggaggtggaggtggaggaactgcagccagcggccaagcatgacctgcgcaccaaatacatgatgagctgcggcaactacgaggtgttggacacaccactaacgaccatcgagttcgagcgggtgaaatacaaggcgaatgtacgctacctgcggcacacgccctccaattccagtctggatctgcagctggaggaacagaaggaggagcagccagagcagcagcagcagcagcaggctactccgcggaaacagcaagtgctgcagcaggcaactcctaggaaacaacaagtgcagcaaaggattcccacgcccagccgctaccatccctgcagtatcagcctgggctccaagctggagggcaactaccacagcgtggtgatcatggagccaccgcacgacgacttccccattgttaagtgggacatcaacgggaactccctggacgacgacgcctgcgatcgctgggatgacttcgaagccaggtggcggcaggcggcggcggccaccagatccctctcccagtcgcaaaagtccagccaccagtccagctcctgcaccctggagacctgggtggacgacacggagcccctcagcctggagctgcaccgacacgacaatgcagtaggcggaaacaactgcaatctttgccttaggagcttctga

SEQ ID NO: 23394 - protein, 303 aa, DROSOPHILA
MSHLLRRTKKSCLKFLRKISTSKQLFVQRLDEEDGDDEEVEEELNLQRDLELDVNSNCPVTEAIYEELQLSECNQALDLATSKEVEVEELQPAAKHDLRTKYMMSCGNYEVLDTPLTTIEFERVKYKANVRYLRHTPSNSSLDLQLEEQKEEQPEQQQQQQATPRKQQVLQQATPRKQQVQQRIPTPSRYHPCSISLGSKLEGNYHSVVIMEPPHDDFPIVKWDINGNSLDDDACDRWDDFEARWRQAAAATRSLSQSQKSSHQSSSCTLETWVDDTEPLSLELHRHDNAVGGNNCNLCLRSF

SEQ ID NO: 23395 - DNA, 8751 bp, DROSOPHILA
acacgcacgcacacacctgcacagtcacacacacctgcacacccacacacatgtaattggcctgcccacgcgtgtgcgtgtgtaggtgtatgtttgtgtacatatatatgtatgtatttacgccgcccgctacacacagaacggcagcaacaacaacaacatcataggggggagatgtcagctagttcggcgtcgatttttcccacagtaaaaacggcaggtttaggccggtttggccgcgcccatcggtcttaccccattgtattcgttctttggcgctgactgagtgcttccgcagcagtttataccaatgctagtcggttttacttatgaatttcacggttaaaaaaaataaaacacaaatgtctagagctggaaccaaaatcgatgtttgtatggtgctatcgatgtttttactggctcaacaccatcgatgatttatttattagcttccaagcatcgataacacatgagctcgtataagagcaatgattcttatcgaataatttaatcgctgtaaagcgaattgcaaattaattaagataaataaatactaaatatgtttgtctgtaaggcaccataacaatgtaattttttcaaaaacatgtgtagctgttgaagcattgcatttaaatgacggaagttacaaaataatttcagataaaagtgataagtttttttgactgtctagttgtgcgcctacatgtagtttgaatatttgttagatatggttttctttgtgcggtgtggcagcattagttttagtacacatttttctaatacttgacgataggtcaaatggcaactcctgatcggcaataatatttgcatataatttagctttgaacataaatagactgccacaaaaactttaaaacaacacattttacttctatattttttggacgaaatagaaccactgaaaaaattcatgaaatgtagtacattttgtagtgaagaaccagggttggtttacggattttagccgttttgccatctggtaacactgaccagtttctcatcgttaaaaaatccatttggaattcggtttatttaattaaaagcagccgggacacctatgcgaagggcaaaaagcggccagagttgttgttgctgctgctgcccagccgccgtgcgatcgatcggggtacgtgttccggcgtaacgaggagtacgaggcgattttctcgcagcctcttttttttcacacgaacgccgtcccactaaaccgaaatttcaggtgaaaaactcattggaacgcatttaaaagcggcgtaagctcgcacctgctgctcgtttaaccctgtttcgggtatatgtgattgcaaaatgcgacagcgacacacctaggcacacaaaatatgccagttatgcgaaagagaaaaagtactgtgcctgtgtgcgtgcgcgtgtgagtgtgtatgccgtgcgtgtgcccccgcctgcgacagtgtgcgtatgtgttggtgtagaaaacttgttatcaatgcggcgcctatgataagtctcattagacatgtttctcccactatgctgggtatttcaattggaatggctagcgaacgtgtgtgtgtgtagtaaaatatccggactccatagaatggacattttgtatgaattaattgaatttactttataaattcaattaacataaagaatttgattttatgcagaagaagctacagcattaagtatctcccatatgcggaatcacagacaaaaattcaatcacgccaattcatttatgatcaaggatcaaattcaagaaactttagaaaaacgcgtctagtttttgtgcttcggtaacagcgatagtggtacaatctccgcacaaaatgtacctacagccaaaatcctgtaacctttattcccctctctgtctcgcacagtctggcggccccaactaaataatgtggaacatgatgtgcgacgtaatgcccacgatatccgaggatagcatctcgcagcgctcctcgcagtttagcggggaggatgccaactttgagcagctgatggtctccatgctggacgagcgggacaagctgatggacagcctgagggaggcgcaggagcggcttaacgagacggagaacaagctgcgtgacgtcgagaaggagcgggacagcctgcagcgacagattaacgctaatctgccgcaagtaagtggcctctgcatgctgataccgcagtttacctaaaatcttttcctgatctttctaggagtttgccaccctgaccaaggagctgacgcaagcgcgggagacccttttggaacgtgacgaggagattggggagctcaaggcggagaggaataataccagggtaagtgattttcgaaaatttagatccttggtatttcaattactgagacaattgagtaatggttagatcaggtagatcatgacaagatttgctagactaatttattaatttaggtattatagccattgctaaattacatatcccattgttattcaaacaagaaacagttgtaggtacttgcttttgcgaattagtcacatataccgggaacaatacaaaagtttactctgtccgtcttcatttttatttcgaacatggcttgtctatttgtttacttatcagtgactatacaaacattgttacagccttttaagaattagttctttgtattcacatccgtcttaaaccataaaaagtgaagtaaactgtatttataagtcctttccgcttcattgaatatcaagaaaatcagttttaattaaatttctacggtaattttacttttaaagagacaatttaaacgtcggttactgcgtgaaataatatatttttaatgatctaacttgactatttcagcttctcctcgaacatctggagtgcttggtgtcccgccacgagcgttccctgcgtatgaccgttgtgaagcgacaggctgccgcccagagcggcgtctccagcgaggtggaagtgctcaaggcgctaaagtcgctgttcgagcaccacaaggcgctggacgagaaggtgcgcgagcggttgcggctttccatcgagaagaacaacatgatggaagaggaactcagctctgccaaggaggaactggcccagtacaaggcgggcgtggtgccagctggcgtgggcagtggcagcggagcagggagtgccgcaaccaccgccggtggtgggggcgccgagaacgggctcaaagagaaggtgcgttccacattcgaaatgcagtcaagcatgtccggtttaatatatctcttctattttccaataccctagatggcgggcgtgggcggatctggtggcgttaatggcgaggcaaatgagctgaacgactacgcagccaaaacccacgagctgcaaaccattattgagaagcaggtgaagattgcggatctgtttccagtctgcatatggtgaacactttttaaaacgctctttccttgtcagacctcggaactttcacaatggcagcgacgcgtttctgatttgaacaacaagattagtgagcttgaggagaacatgtcgcgagtgcaaaaggaacactgcaaggcccaagaccagtgtgccaagctgcagcgggatctgcgcgagaatgttgcccagaaagaggatcaggtgagtgaataatactcacagcatggtttcagttttttacttatacgttcatttttaggaggagcgcattaccacattggaaaagcgatacctgaatgctcagagggagtctacatcgttgcatgatctcaacgagaaactcgagcaggaactacggcataaagaggcgcagctcaaggtgggtaaaaccaaggaaattacagcttatggttaaggcaggcatacatatctttacttttattcatgaggatcgatttttttttattatatttcgataagcgcacagtccatttgttcaaaaaaatccattgattactcattaccttactgtaaagttatttccaattgaatagcagataaatttttcatgatcttacaagtcaagcaattatcgctagtatgctagagtaatgaaataaaattagcagcgaaatctagttcgtatagcatctgtgatattttgtaaaaaatcgatccactctgtttctaattgtgccctagcctgctctttcattaagctccccttaagcgtgactaatcaattgcatttacatacgcaactattccccccgacaactaatcgaacaaacacccgccccaaatacgaaccacaaccaatccatgccatatgatcaatgccgaatccgaatcagctgcacgaggagaagatcggggccatcgaggagaagctggagctctccgaacagaagctcgcccagcacgccaagctgcagcccgacatggaagagcagctaaaggcacgcatggaggcattgactaaggtaggaaacaaggtatgcactcgaactaatatgcgcgccggacaggttccatatgacaagtatcaacaacaaatattatcccttacaacttctactctgttttgtgtaatgttcttatcttttgcgtattttctgccacaagaaaccaccaacaacttcaacaacaactcagtttctatgtactatacctactatttctatctttgtactgcaccagaactttctactctaacgcacccgaaaccaaatcaaaatcagacctaacaattctctcagtataccaattacgaaggtttccaatatctcatataatgtggttatatttggtagatatcaattcacgacattatacattgtcagcatttatttcttatgttttaatgtatttggattgcaatgggtacctaagtgtagttggtatacaagagaatatactcactattagctttcattactaaaaccagaactaacattttcctccgccactgattaaaccgtgtggacaagttcattaaactcgctggctgaaaccatttgcaggctcaagaaagacacggttctgcagaagaccgcatccggggactggagacgaacctcgacgagaagaccaacgaggtggtaagactgaaccagcgtctgaagatgaacgaggagcacaacctacggctttcctccacggtggataagctgctctcggagtcaaacgagcgtctgcaagtgcacctgaaggagcgtatgcatgcgctggacgagaagaacgccctcacccaggaactggaaaaggcgcgtaaggtggccgaggagctacaccacgagaagagcgaaatcatgaaggagctttcgaagacgcgcctggagatcgagaactttaagcggcagctgctgcagcaggagatcgcctacaacatccagcaaacggaggcgctcacgcggagcctttcgcccagtagcgtagtggaccccagtggcgccttcagccggagcaattcgcacgccagctttgagacgcactccctgcgccgccagagcaaacagcgactgtccgaggagaacgccctggtccgctccatggccgagcaggaatgggaaaaactgcagcaggcggcgcatgcccagcagcaggcctacgagctggccagcgctgcggattgcgatgactctgatgtcctgtacgcagcggccaccgacatgatgtctccttcgggacacacagatgcccagacattggccatgatgctgcaggaacagttggacgccattaacaatgagattcgcctgatccaggaggaaaagcagtcaacagaggcgcgggccgaggagctggagtcgcgtgtcggcagtctggagcacgtaaacctgctggctcgcggtcgctccatggacaggcagagtccgccaatgagtggccggagcacgcccaacagtccgcagcgggatttcatgcagaagtatcacacggtaagtggcttacgatatttaagttaaggggaatatcataatcgaaaaaattaagaataacattaatgacgctttaaacttttgccttcattaacagctcaacttgcccgtgctgtccagcgatgcctctcgcgaagagctccacggcggcatgtccaccacaggtgattcgagttccggcggagcggcctctccactgaccgcccgctctatgcgcctggagcgtgtggcccaggccttggcccacagccaggaggagctaaggcggcgttccattggccttaatcccaatgcttcagtggcgcccaaccacactggcggtcacatgcccctgagcagccacagttacggactgtcgccgcttagctctcgttacggcagccaggagtcactgcgtcactataacacaatgggatctatgtccatgctgcagacacctacttcgggcgtatccagggaagcggcagccgctgctgtccaaaagaagaagggcattaagtcctcgctgggtaggttctttagcaaaaaggagaaggtgaagggcgtgaaggatacgctgcccgacggctcgcccagcatgatgtccattggcaacctgtcgattggactgagcgaggtggactccaactatgatgctatgagcatgactggcggaatgatgccccgcattgccagctcccagggatccaaaataagcagcgttgactacggcaggcagaagaagtgagcactttatatacaataccaacaatttgaatgtgtatgattaccatttcatttattaaccagggagcatgattaccgcaatgacttgctgggggaggccatgaaggcgggcacaccgtttgccctgtggaatggccccaccatagtcgcctggttggaactgtgggtgggcatgccagcctggtatgttgccgcctgtcgagccaatgtcaagtccggggccatcatgagtgcgttaagcgatacggaaattcagcgggaaattggtatgagtctgattctttctattgcttttgcttgctaacttttttgttcgacaggcatcagtaatcccttgcacaggctcaaacttcggctggccattcaggaaatggtttcactgacctctccctcggcgccacaaacctctcgcaccactctggcatttggtaagctttcatatagtgtgttagtcgaggcttttattattatttattttgtattgcatttttataacatccagtatgttaacttgaatcctattaatcatcattattataggcgatatgaaccatgagtggatcggtaactattggttgccaggtcttggcctgccccaatatcgcacaaccttcatggagtgtctggtggatgcccggatgctggaccacctcaccaaaaaggacttgcgtggtcagctcaaaatggtggatagtttccatcgcaccagcctacagtacggcatatcgatgctcaagcgccttaactacgatcgcacggagttggagcacaggcgcaagatgagtgaaaacggcctgtgtgacgtactagtctggagcaacgagagagttatccgatgggttggcagcatcggattgaaggtgagtgtgtcagcttagaaaatatcaaggataaatttaacaactccattttaaaggaatatgctaataacttgctcgaatcgggagtgcatggaggattgatggccctggacgagggtttcgatgcgaatgccatgggcttggcccttcaaatacctacacaaaatgctcaggtgagccaactaaacaccatttctttgattaagtgaataattgtgattttttcatttaggctcgccaaatacttgacacggagtttaataatctgctgcagattgccacagatcgcaggccggagaatgagcagcgcagtgcttcctgatgcagctacagcccgcccacgtcctcggtggatgagtgagcaccagccaaggggggcaggacgaaaaacagacaacaaaggcaacctacaacaataataacgtaaagaccaggggcaaagtttcctaaacagcaacagcaaccgtaacgacaagctgaactagaagagatgaatgaaaatgctagcaagcaactaagccacaaaaaatctaacaagaaagacgcaacgcaagagactccccagcatgatgcacgtctaatccacatatttaatatatataaatacacgcatagtcacataatccataacaagacaatgtatacaagacatagcacatactctacatagggcatacgtagttgcattggcgccaagtcgctgccgctgccaggcgtgtacaagttttagaagctaatcagttttcgattgtaaaattattattgtatttttttatatagtgtaattgggcttgcaatagactaacagtattttgttttagatgatgcagaggtggaaagagatgacagcgtgcttcgaaccaaattcgtaaccaaacttgtttgttatataatttttatggcatttgtacagttattaatttaatccaattttaatttctttaaaattaaaacaactaacatacgctttacatatgacattatcgtgtttctgtttagatttttgtagaaggcagagacggcgtaccaattgagtttataaactgaacaacatgcacaacaatcaggcatacatatatagagtataacagctgcatatatatacgatttataaattataatgaatcataaatctaataattaaacattatgaagcatacgtgtaactaacaacaaagtattaaatgtgaagtaaacaaaagaggaagggaagttgtagaagtcgcaagcgcccattgaaatcaactatttacataattacatatacgagatcatttagtcgaaaaatcgaaaaagctttaaaggcgaactaaacctaaacc

SEQ ID NO: 23396 - DNA, 3786 bp, DROSOPHILA
gtaacactgaccagtttctcatcgttaaaaaatccatttggaattcggtttatttaattaaaagcagccgggacacctatgcgaagggcaaaaagcggccagagttgttgttgctgctgctgcccagccgccgtgcgatcgatcgggtctggcggccccaactaaataatgtggaacatgatgtgcgacgtaatgcccacgatatccgaggatagcatctcgcagcgctcctcgcagtttagcggggaggatgccaactttgagcagctgatggtctccatgctggacgagcgggacaagctgatggacagcctgagggaggcgcaggagcggcttaacgagacggagaacaagctgcgtgacgtcgagaaggagcgggacagcctgcagcgacagattaacgctaatctgccgcaagagtttgccaccctgaccaaggagctgacgcaagcgcgggagacccttttggaacgtgacgaggagattggggagctcaaggcggagaggaataataccaggcttctcctcgaacatctggagtgcttggtgtcccgccacgagcgttccctgcgtatgaccgttgtgaagcgacaggctgccgcccagagcggcgtctccagcgaggtggaagtgctcaaggcgctaaagtcgctgttcgagcaccacaaggcgctggacgagaaggtgcgcgagcggttgcggctttccatcgagaagaacaacatgatggaagaggaactcagctctgccaaggaggaactggcccagtacaaggcgggcgtggtgccagctggcgtgggcagtggcagcggagcagggagtgccgcaaccaccgccggtggtgggggcgccgagaacgggctcaaagagaagatggcgggcgtgggcggatctggtggcgttaatggcgaggcaaatgagctgaacgactacgcagccaaaacccacgagctgcaaaccattattgagaagcagacctcggaactttcacaatggcagcgacgcgtttctgatttgaacaacaagattagtgagcttgaggagaacatgtcgcgagtgcaaaaggaacactgcaaggcccaagaccagtgtgccaagctgcagcgggatctgcgcgagaatgttgcccagaaagaggatcaggaggagcgcattaccacattggaaaagcgatacctgaatgctcagagggagtctacatcgttgcatgatctcaacgagaaactcgagcaggaactacggcataaagaggcgcagctcaagctgcacgaggagaagatcggggccatcgaggagaagctggagctctccgaacagaagctcgcccagcacgccaagctgcagcccgacatggaagagcagctaaaggcacgcatggaggcattgactaaggtaggaaacaaggctcaagaaagacacggttctgcagaagaccgcatccggggactggagacgaacctcgacgagaagaccaacgaggtggtaagactgaaccagcgtctgaagatgaacgaggagcacaacctacggctttcctccacggtggataagctgctctcggagtcaaacgagcgtctgcaagtgcacctgaaggagcgtatgcatgcgctggacgagaagaacgccctcacccaggaactggaaaaggcgcgtaaggtggccgaggagctacaccacgagaagagcgaaatcatgaaggagctttcgaagacgcgcctggagatcgagaactttaagcggcagctgctgcagcaggagatcgcctacaacatccagcaaacggaggcgctcacgcggagcctttcgcccagtagcgtagtggaccccagtggcgccttcagccggagcaattcgcacgccagctttgagacgcactccctgcgccgccagagcaaacagcgactgtccgaggagaacgccctggtccgctccatggccgagcaggaatgggaaaaactgcagcaggcggcgcatgcccagcagcaggcctacgagctggccagcgctgcggattgcgatgactctgatgtcctgtacgcagcggccaccgacatgatgtctccttcgggacacacagatgcccagacattggccatgatgctgcaggaacagttggacgccattaacaatgagattcgcctgatccaggaggaaaagcagtcaacagaggcgcgggccgaggagctggagtcgcgtgtcggcagtctggagcacgtaaacctgctggctcgcggtcgctccatggacaggcagagtccgccaatgagtggccggagcacgcccaacagtccgcagcgggatttcatgcagaagtatcacacgctcaacttgcccgtgctgtccagcgatgcctctcgcgaagagctccacggcggcatgtccaccacaggtgattcgagttccggcggagcggcctctccactgaccgcccgctctatgcgcctggagcgtgtggcccaggccttggcccacagccaggaggagctaaggcggcgttccattggccttaatcccaatgcttcagtggcgcccaaccacactggcggtcacatgcccctgagcagccacagttacggactgtcgccgcttagctctcgttacggcagccaggagtcactgcgtcactataacacaatgggatctatgtccatgctgcagacacctacttcgggcgtatccagggaagcggcagccgctgctgtccaaaagaagaagggcattaagtcctcgctgggtaggttctttagcaaaaaggagaaggtgaagggcgtgaaggatacgctgcccgacggctcgcccagcatgatgtccattggcaacctgtcgattggactgagcgaggtggactccaactatgatgctatgagcatgactggcggaatgatgccccgcattgccagctcccagggatccaaaataagcagcgttgactacggcaggcagaagaaggagcatgattaccgcaatgacttgctgggggaggccatgaaggcgggcacaccgtttgccctgtggaatggccccaccatagtcgcctggttggaactgtgggtgggcatgccagcctggtatgttgccgcctgtcgagccaatgtcaagtccggggccatcatgagtgcgttaagcgatacggaaattcagcgggaaattggcatcagtaatcccttgcacaggctcaaacttcggctggccattcaggaaatggtttcactgacctctccctcggcgccacaaacctctcgcaccactctggcatttggcgatatgaaccatgagtggatcggtaactattggttgccaggtcttggcctgccccaatatcgcacaaccttcatggagtgtctggtggatgcccggatgctggaccacctcaccaaaaaggacttgcgtggtcagctcaaaatggtggatagtttccatcgcaccagcctacagtacggcatatcgatgctcaagcgccttaactacgatcgcacggagttggagcacaggcgcaagatgagtgaaaacggcctgtgtgacgtactagtctggagcaacgagagagttatccgatgggttggcagcatcggattgaaggaatatgctaataacttgctcgaatcgggagtgcatggaggattgatggccctggacgagggtttcgatgcgaatgccatgggcttggcccttcaaatacctacacaaaatgctcaggctcgccaaatacttgacacggagtttaataatctgctgcagattgccacagatcgcaggccggagaatgagcagcgcagtgcttcctga

SEQ ID NO: 23397 - protein, 1205 aa, DROSOPHILA
MWNMMCDVMPTISEDSISQRSSQFSGEDANFEQLMVSMLDERDKLMDSLREAQERLNETENKLRDVEKERDSLQRQINANLPQEFATLTKELTQARETLLERDEEIGELKAERNNTRLLLEHLECLVSRHERSLRMTVVKRQAAAQSGVSSEVEVLKALKSLFEHHKALDEKVRERLRLSIEKNNMMEEELSSAKEELAQYKAGVVPAGVGSGSGAGSAATTAGGGGAENGLKEKMAGVGGSGGVNGEANELNDYAAKTHELQTIIEKQTSELSQWQRRVSDLNNKISELEENMSRVQKEHCKAQDQCAKLQRDLRENVAQKEDQEERITTLEKRYLNAQRESTSLHDLNEKLEQELRHKEAQLKLHEEKIGAIEEKLELSEQKLAQHAKLQPDMEEQLKARMEALTKVGNKAQERHGSAEDRIRGLETNLDEKTNEVVRLNQRLKMNEEHNLRLSSTVDKLLSESNERLQVHLKERMHALDEKNALTQELEKARKVAEELHHEKSEIMKELSKTRLEIENFKRQLLQQEIAYNIQQTEALTRSLSPSSVVDPSGAFSRSNSHASFETHSLRRQSKQRLSEENALVRSMAEQEWEKLQQAAHAQQQAYELASAADCDDSDVLYAAATDMMSPSGHTDAQTLAMMLQEQLDAINNEIRLIQEEKQSTEARAEELESRVGSLEHVNLLARGRSMDRQSPPMSGRSTPNSPQRDFMQKYHTLNLPVLSSDASREELHGGMSTTGDSSSGGAASPLTARSMRLERVAQALAHSQEELRRRSIGLNPNASVAPNHTGGHMPLSSHSYGLSPLSSRYGSQESLRHYNTMGSMSMLQTPTSGVSREAAAAAVQKKKGIKSSLGRFFSKKEKVKGVKDTLPDGSPSMMSIGNLSIGLSEVDSNYDAMSMTGGMMPRIASSQGSKISSVDYGRQKKEHDYRNDLLGEAMKAGTPFALWNGPTIVAWLELWVGMPAWYVAACRANVKSGAIMSALSDTEIQREIGISNPLHRLKLRLAIQEMVSLTSPSAPQTSRTTLAFGDMNHEWIGNYWLPGLGLPQYRTTFMECLVDARMLDHLTKKDLRGQLKMVDSFHRTSLQYGISMLKRLNYDRTELEHRRKMSENGLCDVLVWSNERVIRWVGSIGLKEYANNLLESGVHGGLMALDEGFDANAMGLALQIPTQNAQARQILDTEFNNLLQIATDRRPENEQRSAS

SEQ ID NO: 23398 - DNA, 5138 bp, DROSOPHILA
ttttggtggaatagcgatcaaagctgtcaaaaaaaatagtgaaatcaaaaatatcaaaacatttttcaaaagttttagattgacagcttgtggccattagactgggagtggccaaaatatttttaaaaaatatgacaattttgcaaaagtatggacgtggcagttttagccggtttgtgtccttaagagtaggcgttgcaatcttctgtaacaatctagctcttaatcctagtaactagttttacattcatgcttttatagttcccgagagctcagcgttcatacaattacaaggaacaattaaggaagttataagattagccaattcagcaaaaaatttagaatggattaaatcatgtgaatattcgaaatgcagtgacaaagcgcatctaagagtttataatggcaaatcaaaaagataaagaaaaagataaagctcacgtctgctttttcgtaaaattgtacaacatatttacgttttaccgtcgccatccaagttccttatatccctttgtgatgaaacgctgctttcgataacattaaagtgaattatttccgcattagcatatttctaggtaaacaagtcgattttacctcgggcaatttctaggtcaacttcggtcacctgctgccgcagtcgttgttatctcgtctcctgctcctgcttctgcacctgtggatgttcccgttcccattccggacccgggatgccgcaaccttgagccggcactgacctagaactgtgtgggccacccaccagcacgcgtcccactgcacagatagaggtcaacggcggctgttgcacttgttggggctttacccggcgccacgcgatgccacacgaccggcgcgtgctccagtttgagttccatggacgggtgcagccgctccagcggcaaacaagtggacggcggacgccgccagtttgtcgcccacggcgccgattaaaggccgtgctgcagatgctttagatgctttagatgctttagaggctgctgaaaggctatatcagatggtcgggcgatacaatcggatgaatcgatgacagaggcttgctcatttgccggcgctggtcgctccttgtcgcacactctcacttgctcacttggcggcgatcgccgcgcggcgaatatgtttgcttcccgtttcctaccccaatctcggcaagcacgcgctgcgcgttgccagggggtggttgctgctgcatcttattggacggctgccgcaggcggtaaaaaggggttgagcggcggcagcggagggcaggtcgtccgctcgacgtgtgctacagaatcagtcgaacgccgttcgcgcacacgataagtcacgtgctcaaactagctccgccagcccggtctagccgccaactgcatctgcctctgcaactagcagcacgcaaagctacagctcagcaacagcaacatcaacacagtagtgtcaagtgcgcaggagcagcgagtaaacactggtcaccacacacaatggatcacaacatgcacgtcaatgcgccatcgctgcatcactggggctacgccgccggacccggcgtggtcatgcccggcgccaccgccaccacaccccagagccactgggtgccgccgccgcagagccaccacagcgcccacagcaaccacagccacgggcatagccagggccatagccacggcatcggcagcctgaagcggacgctttccgagagcgactgcgacgatctctactccgaggagtcctccaaggaacagtgcgtactcgtgacttcttatcaaaatttgtttttcaatttagtgcacaaaaagctattcgcagttcccaagttaggagttgtcttgtaaaatgaaacctttgaaaataccatgcgatgtgcaaacgttttatgttgctaaaaaaaatagtgcgtcatgatatttacttagtgaatcgaagtcatggataactccacttaacgcaaagttgctgataaaccatcaaaatataaatcactaaactatagggttttaagaaaagatagattttaaaatgttctgtaacttagaggtttttttagtaacaccatagagtgtttttcagtctatgaaagattaagatattaagattaagaatctatcattaacttcaatccatagctaatagaaaccctttcctctgttccattagaatctcgcccagtgagccgggcagctgccaactgatgagccgcaagaagcgacgcggagtgatcgagaagaagcggcgggatcggatcaactcctcgctcaccgaactcaagcgcctggtgccctccgcctacgagaagcagggatccgccaagctggagaaggccgaaatccttcagctgaccgtggagcatctcaagagtctgcagtctaaaagtaagtttaccaagcccacttgagctagcttaaagaggttttaaaaagcaaataggctagctgcaccacagacctcctcactgaagttaaacgcttctatgggtcattaatcacaataggagcaaatagagggttaacttgggcagccaactaagttggttaactaaaagaagtaaagtgtaaagaaagtaatttcttatttcgacagttaatattacattagggcccatttagcgcactaattaatcaaggcatatctgacatacatatgaacttcaatacattataaaaaattggaatgggaaaaactgcaagcagaatccctaaacgcaagccgctgtgggaaacaattgagtaacgatattaaatacaatatgcggcaaattatcacaaatctgggtaaacaatcctgacctgttgtcccgaacagggtcgaattgtgggaaaattatgattgccgtaggcaaagcaggaccaccaccaccagcgccagcctagcgctcaagtgaatctcgaatctcggggcttcccacgctcagtagcggcaccaccacgatggcaaccttgtagccaggcgcgggctttcaccccccgatagccacctcacaacaagccatcccgccgaaggacatgggggttgttctttatgctcgtcgcgtgggaacagctattttaattgtttgcctgaactgggattagacagcttattgactttctccacctcctcgtatcttgttgcagctctcgactcgcttagctatgatccgcagcgagtggccatggactaccatatcattgggttccgcgagtgcgccgcagaggtggcccgctatttggtcaccatcgagggcatggacattcaggatcctctgcgcctgcgccttatgtcccacctccagtactttgtgcagcagcgcgaactgtcggccaagagctgcgccagtccgggtggctggtctccggctgctcccagctcctccggctatcagccaaactgtgcggctgctccctaccagagctatgcggcgccagccaacccgggtgcctatgtgtccagctaccccacactaagtgcctcgccctctcagcaggctcagcaactgggaggacgcaccagtgtctcgcggacaagtggaagtgccgtaactgaatcgctgcccagccatgatctccactctgacagcagcagccaacagcagcagcaacagcagcagcaacagcagcagcagcagcaacaccaacagcagcagcatcagcagcaacagcaacggacgcagacaacacctcagccgacgcagcagcaacactatacccacgaccacagcgcagtgcattccgagcagcaggttcccacctacatagagctgaccaacagcaatcgtccagcggccataggttccgatagccttagctatagtgctgctcctcagtatccggtcagcggactgccaggccaggactacaacaactccagtgtgctgcagtacgccactcccaacggagcaaagccctatcgtccttggggcgccgagatggcctattgattgtgggcataagcctcagaagggatatttcaacctctagtcagagcagaccaagtgtgatagtcttaagtttcgcatcctacacagagagaaaaaaatggagaaacaacgcagtgagattagctagtcccgtaagcctttaagcttaagttataccctatgataactataactttgaacactttgtgaatctattgtaaataaacgcatgagtgtataagtgaatatgttgaaactcgcttgataattgatattcggatcaggaaagcctttctagttgttatatttcgtgaaatctcgacgttcatacagacggacagacggacatggccagattgaatcaggtattgattccgatcaaaaatatatatataatatataatatataagaatatatataatccacgagtaacgggtataattattaaaaacaatcaaaaaagtttaaacaagtagtgacgatccacattcaaaaatttgaggtatatcaatgacgcatactttgattagtgctattattggattatcagagaaaatattaattttaacgaacattcttgaggtgcgctttgtcactgcgaggactaccagttcgccgtcatagcggctgaattatccttagctaaatgggaacaattcgttgcagcgaaaaatttaccgaattctttttagttttacacgtcagatagcttagggtttctaaaaaaaaattccaagaaattaagttcggtctatgggagaagacagttcgaggcgcctcccgcgctggtggtttggaggggtttgcgctgcaatcgcagtcaccggcacccatccgattgatctcatcaaggtacagctgcagacccaatcccaagcggaccggaagaccgtgggggagatccttaaaggcatacacgagcggagcggaatcttgggcttttacaatggcatttcggcctcctggtttcgccagctgacctataccaccactcgcttcgccttgtacgaggccggtaaggactacgtcgacacgcaaaaagttagttccaagatggccctggccacctttgcgggaatcgtcggtgggattgtgggtgtacccggggacgtggtcacagtgcgactccagaacgacgtcaagttgccggaggagaagcgacgtaagtgagtactaccgggggctcctgtaccatagatctcccagactttgtccatctgttcgtttgtcttcatctccacgtgc

SEQ ID NO: 23399 - DNA, 1984 bp, DROSOPHILA
aggctatatcagatggtcgggcgatacaatcggatgaatcgatgacagaggcttgctcatttgccggcgctggtcgctccttgtcgcacactctcacttgctcacttggcggcgatcgccgcgcggcgaatatgtttgcttcccgtttcctaccccaatctcggcaagcacgcgctgcgcgttgccagggggtggttgctgctgcatcttattggacggctgccgcaggcggtaaaaaggggttgagcggcggcagcggagggcaggtcgtccgctcgacgtgtgctacagaatcagtcgaacgccgttcgcgcacacgataagtcacgtgctcaaactagctccgccagcccggtctagccgccaactgcatctgcctctgcaactagcagcacgcaaagctacagctcagcaacagcaacatcaacacagtagtgtcaagtgcgcaggagcagcgagtaaacactggtcaccacacacaatggatcacaacatgcacgtcaatgcgccatcgctgcatcactggggctacgccgccggacccggcgtggtcatgcccggcgccaccgccaccacaccccagagccactgggtgccgccgccgcagagccaccacagcgcccacagcaaccacagccacgggcatagccagggccatagccacggcatcggcagcctgaagcggacgctttccgagagcgactgcgacgatctctactccgaggagtcctccaaggaacaaatctcgcccagtgagccgggcagctgccaactgatgagccgcaagaagcgacgcggagtgatcgagaagaagcggcgggatcggatcaactcctcgctcaccgaactcaagcgcctggtgccctccgcctacgagaagcagggatccgccaagctggagaaggccgaaatccttcagctgaccgtggagcatctcaagagtctgcagtctaaaactctcgactcgcttagctatgatccgcagcgagtggccatggactaccatatcattgggttccgcgagtgcgccgcagaggtggcccgctatttggtcaccatcgagggcatggacattcaggatcctctgcgcctgcgccttatgtcccacctccagtactttgtgcagcagcgcgaactgtcggccaagagctgcgccagtccgggtggctggtctccggctgctcccagctcctccggctatcagccaaactgtgcggctgctccctaccagagctatgcggcgccagccaacccgggtgcctatgtgtccagctaccccacactaagtgcctcgccctctcagcaggctcagcaactgggaggacgcaccagtgtctcgcggacaagtggaagtgccgtaactgaatcgctgcccagccatgatctccactctgacagcagcagccaacagcagcagcaacagcagcagcaacagcagcagcagcagcaacaccaacagcagcagcatcagcagcaacagcaacggacgcagacaacacctcagccgacgcagcagcaacactatacccacgaccacagcgcagtgcattccgagcagcaggttcccacctacatagagctgaccaacagcaatcgtccagcggccataggttccgatagccttagctatagtgctgctcctcagtatccggtcagcggactgccaggccaggactacaacaactccagtgtgctgcagtacgccactcccaacggagcaaagccctatcgtccttggggcgccgagatggcctattgattgtgggcataagcctcagaagggatatttcaacctctagtcagagcagaccaagtgtgatagtcttaagtttcgcatcctacacagagagaaaaaaatggagaaacaacgcagtgagattagctagtcccgtaagcctttaagcttaagttataccctatgataactataactttgaacactttgtgaatctattgtaaataaacgcatgagtgtataagtgaa

SEQ ID NO: 23400 - protein, 421 aa, DROSOPHILA
MHVNAPSLHHWGYAAGPGVVMPGATATTPQSHWVPPPQSHHSAHSNHSHGHSQGHSHGIGSLKRTLSESDCDDLYSEESSKEQISPSEPGSCQLMSRKKRRGVIEKKRRDRINSSLTELKRLVPSAYEKQGSAKLEKAEILQLTVEHLKSLQSKTLDSLSYDPQRVAMDYHIIGFRECAAEVARYLVTIEGMDIQDPLRLRLMSHLQYFVQQRELSAKSCASPGGWSPAAPSSSGYQPNCAAAPYQSYAAPANPGAYVSSYPTLSASPSQQAQQLGGRTSVSRTSGSAVTESLPSHDLHSDSSSQQQQQQQQQQQQQQQHQQQQHQQQQQRTQTTPQPTQQQHYTHDHSAVHSEQQVPTYIELTNSNRPAAIGSDSLSYSAAPQYPVSGLPGQDYNNSSVLQYATPNGAKPYRPWGAEMAY

SEQ ID NO: 23401 - DNA, 3121 bp, DROSOPHILA
acaacacctcagccgacgcagcagcaacactatacccacgaccacagcgcagtgcattccgagcagcaggttcccacctacatagagctgaccaacagcaatcgtccagcggccataggttccgatagccttagctatagtgctgctcctcagtatccggtcagcggactgccaggccaggactacaacaactccagtgtgctgcagtacgccactcccaacggagcaaagccctatcgtccttggggcgccgagatggcctattgattgtgggcataagcctcagaagggatatttcaacctctagtcagagcagaccaagtgtgatagtcttaagtttcgcatcctacacagagagaaaaaaatggagaaacaacgcagtgagattagctagtcccgtaagcctttaagcttaagttataccctatgataactataactttgaacactttgtgaatctattgtaaataaacgcatgagtgtataagtgaatatgttgaaactcgcttgataattgatattcggatcaggaaagcctttctagttgttatatttcgtgaaatctcgacgttcatacagacggacagacggacatggccagattgaatcaggtattgattccgatcaaaaatatatatataatatataatatataagaatatatataatccacgagtaacgggtataattattaaaaacaatcaaaaaagtttaaacaagtagtgacgatccacattcaaaaatttgaggtatatcaatgacgcatactttgattagtgctattattggattatcagagaaaatattaattttaacgaacattcttgaggtgcgctttgtcactgcgaggactaccagttcgccgtcatagcggctgaattatccttagctaaatgggaacaattcgttgcagcgaaaaatttaccgaattctttttagttttacacgtcagatagcttagggtttctaaaaaaaaattccaagaaattaagttcggtctatgggagaagacagttcgaggcgcctcccgcgctggtggtttggaggggtttgcgctgcaatcgcagtcaccggcacccatccgattgatctcatcaaggtacagctgcagacccaatcccaagcggaccggaagaccgtgggggagatccttaaaggcatacacgagcggagcggaatcttgggcttttacaatggcatttcggcctcctggtttcgccagctgacctataccaccactcgcttcgccttgtacgaggccggtaaggactacgtcgacacgcaaaaagttagttccaagatggccctggccacctttgcgggaatcgtcggtgggattgtgggtgtacccggggacgtggtcacagtgcgactccagaacgacgtcaagttgccggaggagaagcgacgtaagtgagtactaccgggggctcctgtaccatagatctcccagactttgtccatctgttcgtttgtcttcatctccacgtgcttttttggtttgctattgataattagtcattaggacagcaaatttcttccccccatacgtacgagtcatataattaagacgaattccgcagctacaagcacgttttcgacggccttttccgcatctacaaagaggagggcgtgtccagtctcttccgcggcacagtgccggccgtttccagggcagtcctgctgaccatcggaacgaatgcagcctacgaccaagtaaagcagatgctcaagatcgcaacgggggcaggagagggagtaccactgcactttgccacatccacgatagctggatgcattgccgtggtgataacgcagccgctcgatgtgatcaagacgactttcatgaacgcccagccgggggagttctccgggatcggaggtgcttttctgagtaccgccaaacagggcccattggccttctacaagggattcattccggccctgatacgagtgtcacccaatacgattatcaccttcgttttgtacgagcaggcgcgaatgcgatttggatatctgccacctgacaagtagggatgccccaaaattcgtatccatttggcatttttacataaattgtattttatacacgtgatttgaaaatatagaatctttcataccagaccattgaatcggaagtaatccgggtctaatcagcagccactgtgctcattagcatcgctggaccaacgagaaccgctgaccgctgaccatcgaccaccgaccactagccgctggtcagcgagctctgggggtcaatgaatgccgctcacggtttatgaaatttgcatacccagcaataataaacacatgagcacccaatccgcggcggttagctaagccggctgcacactcgctgcactcgtaattagggagcggggttagcaaggtgcaggggtcgcaaccccgaacaccacgaggaacgggaaattatcgaggaaaactggaaagctggcgaccgcaggatcttgtccctgctccagaaacataatccccaaaagggaaacagtgtcacaaaggtagcagggttaaaatattttaatatacgctggcatattagtttagtttagggtgctttcgtaggccaaatgtgtttctagagggactggtggctacctaagctgctcaacatgttcccgaaaaaagggtttctgttttggttccaatggtaaactaacgagcaaaacgttctaatgacccagaaattagatgaaaagcggttaaaaacaatgcaatgcaaaatgaaacaattgttaggaatgctagtctagaaacctttacttaattctaagttaatttcctcaattcgcatgcttaagaattgaaatatttatcgcaaatcccgagctcatagtttaatttaattcaacacactttagctacttgtaatttgttctcttggcccacaaaaatcacttgaaaccaaaattacaattacattgaaacccagcaaccgaaattgctgtccatggagtgtgggaacattgcgaaacaccacccctggcaataaaaaacgagaaacaatcttttgcgcattaatttctttttgccggttaaacacatataagtgattcgggcgacctaccacgttcgcgaccatgtgagagacccctgagctttg

SEQ ID NO: 23402 - DNA, 951 bp, DROSOPHILA
atgggagaagacagttcgaggcgcctcccgcgctggtggtttggaggggtttgcgctgcaatcgcagtcaccggcacccatccgattgatctcatcaaggtacagctgcagacccaatcccaagcggaccggaagaccgtgggggagatccttaaaggcatacacgagcggagcggaatcttgggcttttacaatggcatttcggcctcctggtttcgccagctgacctataccaccactcgcttcgccttgtacgaggccggtaaggactacgtcgacacgcaaaaagttagttccaagatggccctggccacctttgcgggaatcgtcggtgggattgtgggtgtacccggggacgtggtcacagtgcgactccagaacgacgtcaagttgccggaggagaagcgacgtaactacaagcacgttttcgacggccttttccgcatctacaaagaggagggcgtgtccagtctcttccgcggcacagtgccggccgtttccagggcagtcctgctgaccatcggaacgaatgcagcctacgaccaagtaaagcagatgctcaagatcgcaacgggggcaggagagggagtaccactgcactttgccacatccacgatagctggatgcattgccgtggtgataacgcagccgctcgatgtgatcaagacgactttcatgaacgcccagccgggggagttctccgggatcggaggtgcttttctgagtaccgccaaacagggcccattggccttctacaagggattcattccggccctgatacgagtgtcacccaatacgattatcaccttcgttttgtacgagcaggcgcgaatgcgatttggatatctgccacctgacaagtagggatgccccaaaattcgtatccatttggcatttttacataaattgtattttatacacgtgatttgaaaatatagaatctttcatacc

SEQ ID NO: 23403 - protein, 287 aa, DROSOPHILA
MGEDSSRRLPRWWFGGVCAAIAVTGTHPIDLIKVQLQTQSQADRKTVGEILKGIHERSGILGFYNGISASWFRQLTYTTTRFALYEAGKDYVDTQKVSSKMALATFAGIVGGIVGVPGDVVTVRLQNDVKLPEEKRRNYKHVFDGLFRIYKEEGVSSLFRGTVPAVSRAVLLTIGTNAAYDQVKQMLKIATGAGEGVPLHFATSTIAGCIAVVITQPLDVIKTTFMNAQPGEFSGIGGAFLSTAKQGPLAFYKGFIPALIRVSPNTIITFVLYEQARMRFGYLPPDK

SEQ ID NO: 23404 - DNA, 6008 bp, DROSOPHILA
ccagagcttcatcagccaggtgctggccataaacgatgacatcggcaacatgtccgtggagaattgacagttaaaggagcctaaggatgtcgctgctacggaaacggaaacgaagatggaggaacaggcgataaaagacattgacaacgcagctgcaacttagagttccgaacctatttgaatactttgaatactttgtcctttccacagtaatattctttttagtagcatataggcacctcttacaccagcacacacgattcaagtatatattcaatttagtctagtatatatttcaaaatatttattcacctataaacacgacaacacgctctatatggtaatcccaactgaattatttaatcgaaagcgaaacgaaattttattcaaaatatttaaaagaaatgcgcaaagtttagacttcaatgtttcgcttaggttcttctaatttcaaactatatatatacttatgcgcaactatataatggcaaaattagttataactggtatcaaggcaaaacataaattgtaattgttgtacgaacatatttccgtttaaacacttaaatgcactgtactatttcggttcaataaataaatcagctagcaaaagaaagaaggtattttgttgggagacttaaaacataattttacttgaactttaactaacatgaaaagattaaaggtgtattattgccttaaatttgaatttcgatatttttatggcagtgatatcgattagtttggtaacagtagcttaacatagaatagacatgttactgttaataagcttagctcaacatttaggtattttttgcacacgcaaactctgtttctctgtaataaaaacatttgtttaaaaacctcaggtttcttatgatttacaaatgaataaggacaaaataaagaaaaatgcatactgacggcagatatcgatgattacatcaacaatcgatattttgaaacagagaaagtgcagccctggtgccatcgatgtatatccaccttggattttcgcttgtctgcagttatttcaattaagttgtttcaaatcagcgtttttgtgagtgcacactaaggtaacaacacgccgaccgacccgcttaaccattgcataaccacgtaattgtacaatatcagctgtttttctgcgtgatcagccggcaagtgggtaaaattcacctgttgaccagcggcaataagccaaaacaaaacaacaacaatcgtggatcaagttcttggcggaaaggcgcgcaattaaaacctaacgttcagttcgcttttgaatttctcgccgagcggttgtggcgaaaataagggcccgctggaaaaaccggttttcaaacaccagcgattgatcctcttcgaaaacgtgaaagaaaacaaaaagacgaggaagcgccgccgcagcctttaattgaaaaaaagggtgtcaatattagcatagaaatcgaggcacaggtgcattttcgtctgcgtcagccaaattgaaggtaaaattgaaaagccctctgcaagggcaacaacaatagaaaaagaaagttaaccatatgcagccaaattaaaaacgaccgcggcaacaacagtaaaactgctaagcttttgcgttttgttgacggaagtcgaaactcttgacagcacgttcgtggtgtcatgcgtacacacagaaaaaatggaattactttatgtgaaaaatgaaaaattcatacaaaacctatttctaatttgtagtgaagttcttatcttttaagtgcaatctattataaaagataaagcaattaagagaatttcaaacaaccttcactcaagaaaaataattctatttccttaactttcttaaaatggaaaaccattctgcgcagtacaatttgtaaatatttttatattttacaccaatactaaagagtttttcgcagtgtactatgctaggtcgtccgtacagatatttccccgctgcccccgcaagaagagcccaaagaaaccgaccctagttgttgctgtttagcgcctcagtcattttcagctctggccccaaattcactattttggccccgtttattggctttggctcgaagctcggctcttcaactttcattccgccgctgtttgggtttttaattagcattttacgagcacacctaagccagttctctcgctgtctcccaataaacgcgctcaactatcttctgtctaattaatttaattgtttccccgcccgattaaaaattaagattccagtgcagcgctcaaagtgcaggtggcaaatatgcactgcaaatatcggtggccaaacaatcgcgttagctttataagcccggctaaccaacgctggaaattgctgggcaaataagaaaaaactgagggaaagaggcaacaactcaagctattcgacggccaatggggtcaagtcgatttcagaacacgctctctgataaatatcattaaaaagtttattaattattagacttctatccccaaaaatggggtttcctggtgaaaattctgagatttcaaacatcattcttgttactctgtcgaattaggattagtgcgttaaaacagcacttttgtaaaagcctttttaattgatagcaaagatcattctacaaaaagttcgagctttataattaaaccacatttttaagtgattagttactctctactgttacgccaacttgatagtataaaggcatgataattgtagaagctcgactattcgcagctgaatcgtgacacgaatcaatctctggcaagtatatatggccaacacacctagaattccaaacgaatatggccaacagatgtacccgctggcactcggatcgcgaaatcttgctgactcagttgaagagtttcgcaaagtgcactcgaggcgaatttacccgccaatattgataatgttgccggctaatggctaatgtctgtgacgaaccaggatcggttttcgttatcagccggcgcactttgcccgatttcttatcaaaacccgtattccctttgcagagttccggagagacggcgatccgatccgataagagcgtataatgttgggaactttgctgtggattttcttcgtcggcctgctgctgtgtgcgttcctcttttcgaagaccaccaaggagttcccgaagtcctggttcgagtggaagactgagtttcggtatcagtacctgggaatcgttgggctcgtccacgatgcccagtataaggcacgggatcgagtgggtaagtcaatttgctagccgatgcttattccacgatcactaattgttgccattatccattaagcactttataaacaaccggaccgcattgctgtcatcaccggaggcaatcgcggcatcggactgcggatcgtggagaagctgctggcctgcgacatgactgtcgtcatgggtgagttgaccaatctccgcccaacaacttgtttcaggcctattcctatccataagtcggcgatctgcttatgaattccacaaacatttaaccgtgctgcaagtgcacgtgctcggcaagctaaaatcgaacatcgaataaacgatcgtcgaaatgcagatccattcccacccttgtcaatgcgatacagaaatcatgacccattctcctgatttcattatctaaccaagtcgcgtaaaagtctcgattttcgggaaagacaagcgataagagttcattgactggtcggagaaaagaattctaaatttcaatgaaaagggtcacagttatcaataattattttgtattttctcgttaacatttttgaaaatggcattttttgttgcttttccaatttcttgctttaatacgtttacttacaatttcactgcatattttagtctctaagaaaattcatttattaagaaatcatttttttttttaaatatatttaattttattgttagtgctagttaaaataataaacattttaatcatttaacagtcaactgttattttctacattgaacttatgtaaaatgtatagatgtaaaaaccagagcttgaagtgcgctatacaggcgctaggtgtcgcttatattgcttatattttgtgtaaaatagggtagattagaaaacactcataaaaaagtgttttaaaggatatttattaattaagttctgtcctctcagcaatttttgtcagtggctcactttaatttatgcatttattgcaggcgttcgtgatcccaaaattgccgaaaccgcagttgcatcgatagtcgacttgaatgctaccaagggcaagctcatctgcgagcaactggatgttggggatctgaaatccgtaaaggcatttgctcagctcatcaaggagcggtattcaaaagtggatttgttgctgaacaatgctggcatcatgtttgcgcccttcaaactaaccgccgatggctacgagtcgcactttgccatcaacttcctgggacactttctgctcacccacctgcttctgcctcaattgagggcggcaggcaaggagggaaggaactccaggatcgtgaacgtcagctcctgcgtgaatctcattggacgcatcaactataaggacattaacggaacgtacgtttgagtaattgtcgcctaagttccttatttactaggttttactgcttgcagaaaacactattacccgggaaccgcctacagtcagtcaaagcttgctcagatcttgttcacccgccatctgcagacactgctggatgcagaaaagtcgcacgtgcaggtcaatgtggtgcatccgggcattgtggacacggatctgttcgagcactcggccaccacatcggtgcccattttcaagaagctattcttcaagactccggaaaggggatcccgcacggtggtcttcgcggccattgatccctccatcgagggtcagggtggtacttacctctccaacggcggaaagggtcctttccatccggatgccaagaagccggcaaagtgcgagcagcttttccagttctcctgcgacctgttgaaaatccagcagtacggaaatggcgaatactaaatgaactccacactcagtctatctcacattcctcctactggtgcaacgtacttttctagataccgtcagcttttttgtaaatcgatttcttttgtataaaaacatttttatatagaactgcagctggtgttttgtgttcaggatctgctgatgctaatctggtcaaattgctgtgctaggttttaattaacttgtctgcgcttgattgccatcgtggggctagggaatgcaattaaaagagctgcaagaaacatttatttgaaaatgcactcagcagttggcggcggcagcttgaaaggtgacaacaacaacaacaaccacgtcatatctgctgtatgtcaaattttcgaaaaagcaaacaatttaattttgtgcgcctcctcaaacaatgagcgattaacattcaacattttggaggaattttaatcgacttcagttaaggggacaggagtatgggggttccaggagagcggtacggagacggaggaactcaggtaggtaggtgtatcatctcgaaaaacaactgcgaagcaactacaactcgactgtcacttaagcgaactgaacgcttaaaagcgaacgacatgatggctgcaaaaaaaaaaacaatctcatatttaatgcatatccaaaaaagactctatcgctatatgaagagatagacccggcgataactcaatgtgtgaagctgccgatgcggtgggcgctgtcatcaatcaaagctccagtggacgaagacggcccagattcccaggctgtcttcgatgcggagtggagtaccgaatgaacccatcttctgcggcttctttcatcggttgcatgcctcgcgagtattagccgcttgattggattttgggagtagggataagcaaatcgcagaaatgaaaaaagtttctcaatttaagaccaacgatctcttttataaaattagatgttctctaattaaaattataattaaatttttaaatactctcacagattaaggaatctccattttaat

SEQ ID NO: 23405 - DNA, 1602 bp, DROSOPHILA
tccaccttggattttcgcttgtctgcagttatttcaattaagttgtttcaaatcagcgtttttgtgagtgcacactaaggtaacaacacgccgaccgacccgcttaaccattgcataaccacgtaattgtacaatatcagctgtttttctgcgtgatcagccggcaagtgggtaaaattcacctgttgaccagcggcaataagccaaaacaaaacaacaacaatcgtggatcaagttcttggcggaaaggcgcgcaattaaaacctaacgttcagttcgcttttgaatttctcgccgagcggttgtggcgaaaataagggcccgctggaaaaaccggttttcaaacaccagcgattgatcctcttcgaaaacgtgaaagaaaacaaaaagacgaggaagcgccgccgcagcctttaattgaaaaaaagggtgtcaatattagcatagaaatcgaggcacaggtgcattttcgtctgcgtcagccaaattgaagagttccggagagacggcgatccgatccgataagagcgtataatgttgggaactttgctgtggattttcttcgtcggcctgctgctgtgtgcgttcctcttttcgaagaccaccaaggagttcccgaagtcctggttcgagtggaagactgagtttcggtatcagtacctgggaatcgttgggctcgtccacgatgcccagtataaggcacgggatcgagtggcactttataaacaaccggaccgcattgctgtcatcaccggaggcaatcgcggcatcggactgcggatcgtggagaagctgctggcctgcgacatgactgtcgtcatgggcgttcgtgatcccaaaattgccgaaaccgcagttgcatcgatagtcgacttgaatgctaccaagggcaagctcatctgcgagcaactggatgttggggatctgaaatccgtaaaggcatttgctcagctcatcaaggagcggtattcaaaagtggatttgttgctgaacaatgctggcatcatgtttgcgcccttcaaactaaccgccgatggctacgagtcgcactttgccatcaacttcctgggacactttctgctcacccacctgcttctgcctcaattgagggcggcaggcaaggagggaaggaactccaggatcgtgaacgtcagctcctgcgtgaatctcattggacgcatcaactataaggacattaacggaacaaaacactattacccgggaaccgcctacagtcagtcaaagcttgctcagatcttgttcacccgccatctgcagacactgctggatgcagaaaagtcgcacgtgcaggtcaatgtggtgcatccgggcattgtggacacggatctgttcgagcactcggccaccacatcggtgcccattttcaagaagctattcttcaagactccggaaaggggatcccgcacggtggtcttcgcggccattgatccctccatcgagggtcagggtggtacttacctctccaacggcggaaagggtcctttccatccggatgccaagaagccggcaaagtgcgagcagcttttccagttctcctgcgacctgttgaaaatccagcagtacggaaatggcgaatactaa

SEQ ID NO: 23406 - protein, 355 aa, DROSOPHILA
MLGTLLWIFFVGLLLCAFLFSKTTKEFPKSWFEWKTEFRYQYLGIVGLVHDAQYKARDRVALYKQPDRIAVITGGNRGIGLRIVEKLLACDMTVVMGVRDPKIAETAVASIVDLNATKGKLICEQLDVGDLKSVKAFAQLIKERYSKVDLLLNNAGIMFAPFKLTADGYESHFAINFLGHFLLTHLLLPQLRAAGKEGRNSRIVNVSSCVNLIGRINYKDINGTKHYYPGTAYSQSKLAQILFTRHLQTLLDAEKSHVQVNVVHPGIVDTDLFEHSATTSVPIFKKLFFKTPERGSRTVVFAAIDPSIEGQGGTYLSNGGKGPFHPDAKKPAKCEQLFQFSCDLLKIQQYGNGEY

SEQ ID NO: 23407 - DNA, 4348 bp, DROSOPHILA
taagtccagctggagcagcaacaacaacaacagcagtaccgaatgccatcggcgaccttgacattgaaaagctaccgccgcccatgagacagagatacatggaagagaaaagagcgggacgcactgctagtgacagagaggggtagacggttgttggcaacagctgatcgccatcatcatgtcgctcttatcttttatcagccgcagaccgttaaggtataattgctgtgcaacagtggaactttcctatagtggaactcactgatgttaagctgattgcgattgccgctggaagggcatgcttttatggttagtttttatgagtttttagtttggaaactacgcaaaaaatccaatataaaacaaaatgtcattgtagttattccagaacttgttgaatcggtatatacagaaaccttattcatcactgacgacaataaagaaatgattttgttaaatatttctctggtgccactgtacccagcatttatttattcggacattgttatggcataattggttcacaaaaagatcactgaaaccgacggagcacactggtcgtcattacttgagccaccttcataaaaattgttattaatccggcaggttgccccgcttaattcgaccgcctttctgttcgaattagtggcgctccttgtacatatgtagttcttatgtagtacatagtgcacatatattcctcctggtcacttggcgctggctgagccagcaataagcaaaacaataacacaacaacaacaacaacaattggcttggcgacccgcgagacccgctggcgattaacatacgagcgcaacaacctgaacacgcacaaacacaggtccgcgcacgaaaacctggccgtagacgtagtcaaagctatagctatagttgatattgatagtggcgacgccgaagtcggcgtccgctgcgcgttcggagaagcggcgttcaggcatcgatagtgcttttcggacgagcatggcccagttgagttccaatcgtcggtcactgcagtagccatctagaaatcgtgcggaaccagtcagtctaggaagttcaaaccgatcctacacggtctactacaatccgatccgatccggtccgacctcgtcttcgaaactgccatcacaagctaaacaagggcacacgcagagtggtaaagcgagctgaaaccgtagatctaaatcctaagacgaactaaacccaaaacacaaccgtatcatatccagccaaggtcccgaaaagtgctgccctagagataatcgcacgtcgagtaagattcttttgttttcgactgttgagtaatgccagcagagttcttatcacaggatcggtggtaaataaagcacaattaaaagactccatccattgcgagggtgcgcactaacggagctacttgagtacgggaccgggccacacctgttgagtcgtttccagcgcagagtgtaacccaagtcccagttctctgcgcgatttccgagtaagcggttacataacaccccgctggttgccagagatcgattccggtgtccaatccgactttccgtgtctttcaatgcccgccgcctggctggcacacttacacacgtgcacacatgtatactgtaatgccaaaatcattgacctcttctgctggccataccacaccgatttgcatttcctcacaccaaccaaccaactgggggggttttgtttctgtcagcttaagtttcttcaattttcccttcgcgctcttcgccgttttgttttaattttaaatgcgctgcacattgaacctcatatccgaaattaattttcgtgtttttaagttttatcgccctgccaaagggtatctaaagtagattatttagtagtgaagccatctttgacccggaaacagcttgagctcctgtattttcgtatagtatattgaaaactttgatatgtacttagattgaaacttttcaagtgatatatgcaggtgtaatagtgttgattaaatcgtaattcgacacctgtcactaattacgtagttgctaaacataatattcacttgcgcctttacaacgtactttgaaatacttattgcatacttttgaagtcacccgcttgatctgtagattagtttgaatttcccgtagagtataccttattcgttgaccacatctcttatcagctgcctcattgacctggcaacgatttatttttgggtctcatatggttgttttttcggtttcttaattgtatctcgcaaactagttaatgcattgattagcattttcattttgttttgtttcgccgctttggcctacaatatcgtggcaaggtttttgaacttgaaaagtatccgaaacaagatgatgcacaggcactttcactatctacacactgtaaactaacccagctagctggccaccagatagcagattatctaatccgatttgcattcaccgatttaaagcagctttttggatttagccgatgttgatcacgatattaggcactctggctgcttttctcgcattcctcttgacattgatctttggccgcggccagaaaagatccaaacccgtccaatcgtctgcagcaacatccgccacgacagcaacaactggcgacagcgacaacggcaacaccaatcgtaagaatcccccactttgctaaaccgaaacacttgaagggcacacaaatcgcacacctagctgataacccagtttaattagttcattatgtgtatacgacttttgaccacgactcacgcgtaccttgttttccttatctctgcttacagacaactccagcgtgattgcagctacagcaacggcaacaaccaccagcagcaagcctcctattgctccagcagcacctccttcggcggtaaaagcgagtgacaagcgattccccaaggcgtgcatcaagaaggtccagttctccagcgagagcctccggtccgacgtggatgagctgtgcgaccagctgaaggatagcgcactcagcaatctgagcaacgacaacattcgcattgcctgccaccagaacaacaacaacagcagcatcaacaagaaccagaacaacaacagcatcgacatcagcatcagcatcagcaagatgagcgaaacaaatgagtccaatgacacggccgcccaatccgccgagggcgagcggcccagctttttggtacgattcatcatatttcccatctcttggcaccatcactcagccaccgtttcccttccacaggtgggtgatgagatcgacgagcgggccgccgaggcgggcgaggcatgtgacgagttccccctgaagatgcagaacgatgtccgccagaatggcgatatttccgagcggcgcaagcggttaaggtaagtcgatttgggtttagcccaaatgaaaatgggacagaaaacatcagaagtacattatggttgtggatagaaagccatttattagacagaaatttcttaaatgagattgcggtctttatacttagaattaaatacattgaagatagcataaggatatatatgaggacttttaataatctagtttgttattcatatgattatgataggctaagcaagctattgtatatcatcatgttttctttgatttaaattagaaatccaataacaaatagcgcttaatctagtttaattgattcagttcagcatttcctcccaatcttatcttcataatgcttgcagattaggactttttgaatctggcaacccatccacttcaattaaagctattctttcatttagacacttgagaattgaagcgtttatagctcaagatatgcaatccatccccaatggcgcccacatttgcgctgagtgtatcgagcaaaacaaaaacaggtggctgcgtcacagccaaacgccgccaaacatatcgcgtgagtttagggaaaagagacagcgaaaagctcgcgaccgtgtgtgcgagtgggaggcagtctctcacccagctttccgagaactttcgcggtgcgcaaacatggagagaaaagtggcggcaatagagatagagagtgccatgtgggaacgccgcattttgttttcattcatataatgttcaaaactcgtttggccagcggctggctcgctcagcggctctctccgcttctccggcccacggggcgtatgagcgatggtggccaacaccgctctgcggttcagttccctggcagtcgtcggctctgtcggtccgcaatccgctttccgcaaaccccagaagtacggcagatataccccaagacccagcccgtttcccaaataagtttctcgcgtgtgcggaccatcgttcgacattgatttttgtgtgtgaatatttcggccagcggagcgcggtgaaagtggtgcag

SEQ ID NO: 23408 - DNA, 911 bp, DROSOPHILA
atcgtcggtcactgcagtagccatctagaaatcgtgcggaaccagtcagtctaggaagttcaaaccgatcctacacggtctactacaatccgatccgatccggtccgacctcgtcttcgaaactgccatcacaagctaaacaagggcacacgcagagtgctttttggatttagccgatgttgatcacgatattaggcactctggctgcttttctcgcattcctcttgacattgatctttggccgcggccagaaaagatccaaacccgtccaatcgtctgcagcaacatccgccacgacagcaacaactggcgacagcgacaacggcaacaccaatcacaactccagcgtgattgcagctacagcaacggcaacaaccaccagcagcaagcctcctattgctccagcagcacctccttcggcggtaaaagcgagtgacaagcgattccccaaggcgtgcatcaagaaggtccagttctccagcgagagcctccggtccgacgtggatgagctgtgcgaccagctgaaggatagcgcactcagcaatctgagcaacgacaacattcgcattgcctgccaccagaacaacaacaacagcagcatcaacaagaaccagaacaacaacagcatcgacatcagcatcagcatcagcaagatgagcgaaacaaatgagtccaatgacacggccgcccaatccgccgagggcgagcggcccagctttttggtacgattcatcatatttcccatctcttggcaccatcactcagccaccgtttcccttccacaggtgggtgatgagatcgacgagcgggccgccgaggcgggcgaggcatgtgacgagttccccctgaagatgcagaacgatgtccgccagaatggcgatatttccgagcggcgcaagcggttaaggtaa

SEQ ID NO: 23409 - protein, 244 aa, DROSOPHILA
MLITILGTLAAFLAFLLTLIFGRGQKRSKPVQSSAATSATTATTGDSDNGNTNHNSSVIAATATATTTSSKPPIAPAAPPSAVKASDKRFPKACIKKVQFSSESLRSDVDELCDQLKDSALSNLSNDNIRIACHQNNNNSSINKNQNNNSIDISISISKMSETNESNDTAAQSAEGERPSFLVRFIIFPISWHHHSATVSLPQVGDEIDERAAEAGEACDEFPLKMQNDVRQNGDISERRKRLR

SEQ ID NO: 23410 - DNA, 14494 bp, DROSOPHILA
ggaacccaatccggagcccaagggtcgtccgcacacaacgcgacgtcctcgaaacgataacgacaacgatcgacgctagcaatccgagcggctggaggagatggaaaaacccacgaaatctccccgaagatgcaccgaaccacaaaggacacaggaggcacagcgactcacggtgaaggtgaaatgttttggagtcgagaaaatgcaatatgttgaggtgctgctcatctagcgagtggcatcttcccgtgcacaataaagactcattcgtttacaacagagttttgatcatgggtttattcgatagttttcttcgacataggtctacagttaaattggtcagcttaatgataccctgacgctctcggggattcttcgatactgattgattggcggataaagcaggctgactgactttctttggttgtgcgagggttttttttggggagtgcgtttgtatttaccatatatttgattctgtttcggattttaccattaccatgcgatattgaacgttgcttagggcttatcataatttacaaagtgccgcatcttgcggcttatcaaatttaattcaatagtttccgtttccatttgcttagctacgatagtttcggttacaaaataatttcaatttatctaaattgcaatcgcatctccagtgcccaaatcggcttgtaattcagtgagtatattaccgtcacgcaatctgcctctcacttttaaatcggtttagagctatctttacagttacaattacaattagaattacatatatgtgattgattagactaatgcagtttgttggagttggggtggagtttttgattcgatttgaattgattcgagttgattcgatccttacttctcttgcctgcgattggggcttagtctacacaatataattatgtcgttatttatgtttagcatatagttcgaatttctatctgatttgatcaaatgattactcgcttatcttgtattacttgacgcatatgtatctgtagctgctgaatgcttgtatcttgtaggtgggtctgacactgacttgaatataattgagtttgcttgtagattctaagctcaaatgcagctgaaagggtaaatgggttatgggggggtgaaagggattttcatgcgggagtacagctgagtatctttggtagtggtagttgtaatcctatctagctagcttttcactcttattcaggggactccgatgaggccgatatgccgcccagactgcaggcccccacgctgcccgcactcgtcgaagccccaatatcgctgatgctcttcacgcgccgtcgactctgctcgtagagcatttgtgggtcggtggacaccgcatccagtgccccaccaactggcggagcgctcacacgatgaccaggcggcggaccatgactatagatgcccccagccgagggaatcggcggtggggccgtcgtaggcggcggcaggaagtgatggtagtgctgctgctggagattggtgtgcggattcggatactggtgccctatggttgcgtatattcctccgccaccctcgctgctgctgtacgaaggcgttggggaggtggagttcccaaaggagctgcggtccccggtgcgatgtggtttgctgttaaaccgaaaggctttagacagggagctctgcaaacggaaatacaaatattgaaatgtgctccttgagtgaatgaaatgccaactcacctgagatcctttccatgccgaaatctgtttagtaaaataaatgaaaagaaataaatgttaatagttttaatttgcacaagaacacttgtttcaaatcctaaacttttgccgacaacgggaacacttcggaactgtcatgaaacttttcctgttcttaggtgccttaggaactataaatattttccaaatcagtaattatatccatgctaaggttatctaatacatgtcatatttgctatgttaaaggcatattcattatttaattgtgatgagtagatatttgagtttcaatatttaacatatccttacgaacttattcgttttaagctgaccaaaagctaacaacgatgtattttggatagccaatgaattttcgcttaaatattgtaacatccttgaatgtcctttatctcaactcagaatttatcacatacttgttggcaccttggagtgtaaattatagtcaatacagcctgcaaaggcaacctatcataaattgaattttcaatttggatgaaagcctgtgaaaacatgctcccagtgatatgagaacacttgctgaagccacctctcagggatttaaataatttatgacacaaacaccgagcgacaacaaaagcttcacgtcaattcaggctagggatatacagcaatagttgtttgtcgactggcacagacgattattgtattcaagacataattggctataactagctatgttattagtattaagtacttaccctgaggttgccgctcgagcggcgatctgttgtggcatagtgctgcagtccgccgggtcccgttagaggcactacgccgcaaccggaacggatgccctgacccagagtcgctctacacaacaaacatggcaatttcgatttgcgaatttttgcataggtcatatgcgtgtgtgtgtgtgtgggtgggtggtgagtgggtgttgtgggttcacgggggcatatatcatgttgtgaatgggtttggatgtgcatgtatttttgattttcatgggcaggcaggcaggcagcacattgaagacaggacacagacggcagataacgggagtgtggagttttcgagatttcaaattcgaatacatggagtgcgggtggtcaggcagagcggcagagatagcaatacagagccagagagagagagagaaagcaggcaaggcaggcacacatacacacacagaaagtggtttcattggcatgttgttgagttgttgttgattgtgttgttgagttgttgtcggtatggttgttgttgtgttggtaatcgtgttagacaatcaagcagagttagcaacaacaacaagccgtcaattcgattaccaaattacaaaattgaagggaaacatacggaggtgaaagcaaaagagagtggatcgagtataggaaatatgaaaaaagaaacgggacaaagacgaaagaatttgattaatcaatgttagagagatacttttattttgatttgtattcgccatggcacaattaactacacgtagcgtaaaacaacaatgaaatcaaagatctatagtgagttaaaaacccccgaaagaatagaaactagaaagtaaaggtaacttgaaaaaagaatagcattgctaacagtcacgaaaccagcagccataaaaattgtcgtttttgtttaagccttacaattccaatcacacatatgtagtatcgttaaggtatttgaatgcagtggtacttattaagttgacaacgattagactagttcaagctacttaaaaacattgataacacatacatagaactggttttcggttgtctgcgtatgttttcgagtatgtgtgtgtgtgtttgagaaatagagagagataggctacttagtaagcaagttttacttacaattgacactgtagttgcaaaattgcaaaaccaaacaaacgacttcttaaagaaattaacttagaggagctatagccctgcggtcaaatcttcagctccagaattcattacttcgcatttttgttgcccagaaatatgcaagcaaatatttgatacagccatatgcaataagcaagccatgtcaacaaaattacatttttaggagcttactctttggaaccttggccatggcagactcgataccgcagggcgaaactcaatcaaaacgcttcacagtatgcaacaccaaacatgaactatatcatctaaccacggaaatgtagatgtgtatgtgttcatggacctgtgtgcgagtgtgtggttatgtaattggtctttagggttccattgtgcgttcagtggctgtctaactgagctcagaaaacagcttcagtatcacagggaacttgtgtgtttcggcctagtgacgaaagacgctcatgtggaagggtgtgtgtttggggcatttgcaatgctctatcttaggcgtaacaattgattatatctgaaatacatacatatttcaattccctccccgattacattgccgtaaagccttaaccctagatttctactacattaaatgctcgcgattcgacttgtaaatcaacctaagtaaatgcaacgttaagcgctcctcgcggagagtatcgttataatttcgatatcggatatgcaaagcttggacactggttttgtttttgacgtgtgcgttcctagttcgatgcctaaagcactttataatattgtggtatgattacatgtacggctactactcggatgtgtgactatccttgggtggatctatcaactattcgtaatgacgaaatgactagcgctgtgctccagttattgttctctccctatagttattatcgtatcatctttatcagcttggctaaacaacaaatcagtatgaatcccgtttgacttttgattattattcattttcattatcgagttctttggttcgtgcggattgtttagtggccctgcaatttggccaattgtctggaggcttccatttgaaattcttccatttgacagtaaataaggtatctgcatttcgaatatagaagatacaaataaacatggttcgagatattttgtgggaaagaaaagagagagaaacatggccacgagggccgccattagtgcgattcgcttttgggcggttttattttgcttaacagatcgtctaagacacgttcacatgatcaacaacgaaacaaagtacagaattactatctaaatatacaggctcgaggacctttacatacttatgcacgagtagacagagttagatacagatatgacatcgcatgatatgacatctaatgagtcgagaagttggcatttctgcagtcattatttcattggtgatgtggaagaagatagatggatggtatgcacataagaagcagcttataaacgaatgatcaaagcactaaatatattaaatagccagagatgatgtgaatatgactgaataatgtttcgggtgtatgtttcgggtgtcgatgatgatgcagatgatgaaatgagatctgaagagctcccatttgcgaaatacgaaatacttcctgctagcaaacttgaaccaaaaacaaaactcttgtaaacgatatggtcttaacgaaggtgcagaaatgaacacaaactcaaactcaaacgcacaacgaagaccgttaacagaatgttatataatctcggggtggtaatggtaatacaaaacggcaataactcaatcaaaacaaagacaactctaatcaaaacgctgtgttacgctacatatttacgtttccacaattcacatgtcaaacccgaggggctacacaaaggacactcacacacagggcgcacacaaacacacacgcacacacacacacacacacactgagattctagatgggctccgtggggctggtaaaccctcaaaaaacttaccgtgcgggcaaaatgagggcatcgaattccgtgttgagatgtcgccgtattatgttcttcgaggggggaatgcccaaggcggtggccatggtgtcaccagagaaggatggttccagcaccacaaggccgccatgaacgccgctatctgcaggtgggtggaaacgggattagagtgggtcaggggagcccttctaattgctgcgctgaatggcataatcaaagggcaatcgatatgccatacgcacccttcagattgtccgcgtattcgcccaggtcgatggatcgcacccagcgaatgaagcgctggttcgtccacacaatggggtccgtgtccaccgtctcggattgcacccgccgcatggccagagtttgtcggtcgtacttgacgatgcgcaacacgtgaatgcctgcgaaaaggagccaaagggattggcatttaatatggcttggcgaaaaggatacccgattattaaaaaaaaaagcctcagttcagtcatcttaccgtgaacaatgctggcctggtggaacttccgcgtaacgcccaggaacttctcgagctccttcttggagagcgtgtccagcatgcgagcatcgaccagggactgcacaaagggttccgcgtactggggcaatccgatgtccggaagccactcggtggccacccaggtgtgacccagctgcgtgataagcggatagcgcaccatctccggacggcgctgctcctcgatggccagccgcagtttcttgcggtgcatcggatgggccaggcccagacccgcctccagctccacgtcgttcagctccagcagcactttgccgctcttcacgttctcggcgcacctggcgctgtactggggcatacccagggccacctccagccaggcgagcacctgggtggcgcgccaacggtcgatgggcagctgggatgcctcccgcagcagacgcagcttctcggcgtagccctcctccgtcaacggattccacgagtagtcggcatctggatggaatatattaaacatatattgtaaatcagtcgaatgctttctaacaataatatccacttttgtaactaatatttgatctaaaacgcctgattattgtaatgcatttaaaacatgtgcactcacattcagtcactccatcagcggaaagagccttgtttttattcctggagcgggcaaacactcgtgatatacttccccaggttccgccgcgtccatttcgagcaccgagcggaccacttttgctggcgttggcgaacttccggctgatggctccattacctggtccctcagggtccaccggggagcccaactgttccacggatctatttggatagtggaaaattatgtaatgtaatatacaatgcaaatgaatcccatcattttttctatgtttttagctagcaaatatgctaaatagaaatttatcaatgttgaaatttagaatttagaaatccctaaatgcaaatgagtgcttgagcaaaaattataataggcgtgtaatgtaattttagtgaccatttatcaatttgtttagtttttgcatttgctgcggacatgtaattaattaaagctgagaacgcggagattaaagttaacacatcatgttaaatatttgtaaacaagttgatggcaatgcaaataacatatttcattaaagcatgcattcaatgacaatatttccgtatgaataaattcataatttattatatttattgggctttaaaagttctttaacttaaagttgccgcacaatatgtgaaccataatataccttgagtaggcagccgaattgaggggagacaatgtggggcttcgttccttgggtgtgccaactgaaagaaaaacatggctagagaagatttcgaagggcaacatttgtatccttacattggtacatgttctggctggatacgagggagatgctgtccggatcgactgtgatgcagggtccattgtcgcaggttccgtcgctgaagttcagttctccgccggtgctctcccgatcgctgctgttccttagccccgagtcgttggagcaggaattgcgatcgcccgccgtagcgccggatcctccgctcaaactgccgctgaaggcagacaacgagttaccacgcccactgtcctcagtggtgccgcgcatgccagccaagccaccgcccattcccgatgcggcggccatctgactgagcattcccgaggcagccgacggaggagttagtggggcaaaggagtgcagactctcctgatccgacagacaaccggtcaactgacggcgtgcctcctgcagttgctcctgaagcctctggagctgcagatccctggccgacagctgttgggccaaggccagcgaacgctccgcttcatcgcgtgcctgcttgagcaactggaagcgctctcgatcccgatccccggagatcttggcgttcgttgtctccgtttcccgcacccgctcctgatagttgcgtatgaagtcgcgcagttcttgctccttctcctgcagcgaggcacacagttgcttcacctggcccagcagatcggacttgtctgttcgcagctttttccgctccagccgcatggtcagcagctgattcttcaccgacctcagctccgactccaggcgttcgatgcgttccttggcagctgatccttcgccggatgcgactgcctccatttcgggagcggtgtccacaccacccactgctccatctgtggacagctcgaggaggcgtctcagtcgaagcagttcggcattgagacgatcattctcctcgcgcagcttcatggtggcttctgtaaaattaggattctatttagatggctgaatgagcagacactgccataggtttttatctacagctaccaagctgcggagaagcggtgatcgtagcaggaatgcaagccaggcttacaagcttatatgtatatcctttaagcaccaaaaaaaattgcaacaattacaatcggaatgtatatactagttggagattttgcagatcaaggcattattatgataacacaccgaagctgaaagtttaaagtgctcttgtcgagctattggtgggatttcataacaagtgctttttaaaacgaaactatatgttaaaatgattttcaattgattgtttgttgaacatttttaattgtcaagtacacattttaattgtacagatacacaacctttggatagcatttgtacgcaaactactgacttgcatgcctgccaatcgatattctactcataattagcaataatgtcatcctctagccgcccactaccacttccgattcccgagaattttttacactcgtttccccccgcccagattctttagcacagaaaaaataatattaactggaactgaagaaactgaagaaaactatggacaaccagctggtgccagagtgttggcatttaatatgcaaaacgagaactgagaactgaaaacgcattcaaagttttgcaggcgaactaaaatccagtgcaattataacttaaccaggccagggcaatgaatcggcaggcactaagcggatgaatggggatcaagtgcaactactttacgggtggaacaagtggggttgctgggtatgctggggtttttggggttgcttgggatgcgggttaattgtgattgctgctgcttcaattaaaaatacagagcggaaattgagatgaaagcgaaagggggcggggcgaatagattgatcgacttacctggacggggagcggaatgcaggtggtggaaccttgactcgtcgttgcgatttccatcgcaggattcgaggaggagcaaggccgccgacgcggcggacgtgggggagtgcggggctcccagggccagcgatggattcgggctgagatttacattcagattcgggggcaggtcctgatccggctccgataggttggcatttcgcttgtcgactggatacggcattgttcagatacagatacacagatatagatggtttttgggggacttggggcttcgggtttcgggctgtttgggtgtttgggggcaggcaaacatattcgggttgacccaataagtagttccaaataaaacaaataaacagcaatggcaaacaacgacgacaacagcaacaacaagtataagaacaatgccaacaaatggggaaaatggtaatgataatggggttggtgggtatgcatgagtggctcgatattggtacggactgacggatatatgtattcaggtattatccgcctagttgaaaaggggattgggaaacagggggggcgtgcagggctcgaaattaggttttctctcatcgaaaacggacaaataggattgaaaagtaaataaacaacaattattgcagtcgaacatggaaatgaattaatattgattgtcggcacattaatctaaatgcaaacgagtcagcaagtgatggcgataacaatgggttcagaggaacgcatttgcgagatgcacattgtgattacctagttattcccccagcctcaattcgaaagccccggtcacaagttcatccatgtgaatgactgatgatgaacccaaattgattgcacacacaccgccaggataatcgttattcacatacaaattcccctgtggataggcattatgccatctttttcagcttttttgcttattgattgtcaacacggatttattttacggccaaggatttaaatgaaaatttaattagcacttaatgcgcggcatgaaatcattataaaaggcaaaaaaaatgcatacaggaattgaggtcgaatgctctgcactgtttaccaaataaaaactaccaaattgaagagttaacttttattcaagtcccaaaactaaagtggctgaatcaccacccccgctccccgttaaattttcagcgtttaagtttcgaaagcccaactcgaccgcaaccactttgggatccaccgactttttcaccttctccggaatgaccccgcctatctgcttcgttgacttttcaactgcagcactaaaagcgattggtcggagctcctggacggacagacggacagatgggggggcagatgggcaaatggtgcttgtatctccaacgaacggacgaaggccattaccatccatttgtcagatttttgaagtgtgcatcactttgccattctgatataatctgatgcgttgaccaagccaaaagaccaagagcaaaaaaaggtactctgcccgttccacatccctggaaacacctaagccgccactgcatcctcgtcctgcggacctagttgttttgtcctgctgtggctggcttgtggctcttaccctcggttgccactggtagcttgcaatctgcctggccacaggacaacatttaatttcttgccccttttgtgccgccaaatactttagcaattgcattaaaacaaaacaaatgggattcaatattttacgcagccggcagatggaattaaatcagcgtgcaggttgaaaggattcaatcaggaacgctgatttaattcctttttggccggctcccatttggcattcccacagtggccagcatttgttcattcatgccgcaaagatccttgccccatgccacaggcctctaccgtttctccaaccaacccccccttgcccaaggaaactcctttctttgcccgcagcaatctgctgattgctccctccgctcacacccgcgcgctgcgcgtttacacattacaaatgcatttgcatacgctgagcgaaaagccaaatccaaacagtaattaaaataaaattgtattaaatcaaattaagaaaaaatgctcctttgctgatcgtttaggatcattaccagcaataactatccccaaaggaattatcttttttaaggtaagtattttttcccagtgtacaagcacccttgcaacagaagccgccgctatcccccgcacacttaccggcattgagtgcactgccactggagggggcgttgtgggcggggccggctgcctgtgccaagtgaccagcggcaattaaattcgagttattcgcatggatcatggctgtgccggagttgcaagtgctgctgatgccgttgctgttgctgttgcagtggctgctgccgatgccattcggcaattgctgctgctgctgttgctgctgaggcactcctcctgcggcttctgctggcttgccaggatacgcaggactccggtgctggtggtgctgtaactgctgctggagcggctgattatcagcggtcatgggtggggtgagggtctggttgctgccattcgaactggacggcgatgagctgctctcgttgctgggcgtgaggtctcgtttggaggccaagaccaaaggtgatggcttggctggcgcacctccgccaccagatcctgttgctcccgaggatgtcgaagccgtcaccgagctgtcaagcgataagagcggtcttatgggcttgttattgttcacggaagcggctttctccttcagtcctgtcgacaccgaggtatccagggatttggctattttctgcaagggttttaaaacgtttcaacacatgcttaaacactcaaagtattcagattctagttaagagaaacgtttgctaagagaaaatagaaaatcgtgtgtttatgccaagcccactttgcaaaatcctttcaaactttatttaatcctttgagataataatttaatcttattttatcgaaaaatagagtttattattctataacagagtaagaaaatatcaattatatttcatcaaagcttttgtttaagctttagcttaagaacgtttctatgtttagtagtcaaatctgaataaatttaggaaattcgattttgcaaaatcggcaagaagagatgcttaaaatatatagcctagcaatagcagaatcagatagcaagggaagatagcaaaagagatgtctacacatacaatatagagccctaagttgtcaacaagtcaatgagggatgcagaatgggtaattattcgagatttcagtttgtttttgagcaagagcactggaacgagatgaagtggtgcgccaaaaaagtggggattgggtgggtaaaagtggaccccgtggcatgcaggctgtttccaagcaatgaatgaggcccaattcggttaaacatcaagtgaatttcttgtttggtggtgcgggtggttgggttttaaatctgttatctgggatggctagcaaggggagcaaagggatcaaggtgagcaaggagagcgggggtcggggtggtgcattcggattgtacttacggattcgcccaacttgtgcagcgaggcatttatgcggtccggattgcgcggcggcggctctggtggctcggaggctgccatcgtgggtccggcagctagaccgttgatttgcatgctaaccaccaccaacgcaagtacctatcgcacacacactcacacccaatgaggcaccactctggctatcgcacacacacacaacccaccggcaaaaggggcgtgcgagtgggcgggaagaacgttgtggggctttcttctgggcgcctcaactgccaccactctgaacgaattgacactcaaacattctgacttatccctcctacacagagaaaaagttaaacaaagttagtttaaccttgatattcaaactttaagctctgatcaagtctcactgcatttgaaagcactttaaatggtgcctaaatggtactttgttttttaatcaccatttaaaatggacacacttttgataagaaaaaaaatcacaaaaattagatcgtatcatactcaacacatttctaagcgagttaacgaataagttatctaggctaatgttgacgatattgcttgtctggtttaagccctaaaaacgcgggacaatacgtactctaagctggctgtctctgtaacttcttcgccgttcaatctgccattcaattacgagttgtcctgcaagtaaacagaaatggaaatttgcatcagtcaacgccttgtggatgtgcagcgatttccgctggcagctcaactaatttgggtttgcccacaaaatggccataaaaactgagaattccccggtcgggcttagctgtttgcatgtaggccaacaccagccataaacctccatttggactgcttttttcttccaccgccattgcatgccgacgctcagttcgcagtttgctattcacagtttgcagtttgcagttcacagtttgcagttcacagttctcctgctccagttgtcactgcaggcagctgttcctaaggaaaaagttaaattacagggctcaagctcgcaactcggagtggattctcagtggggcggagtgacagctgttaactgggcatgaagcatgtgacaccgggcgcagaacaaccccacgaggtactcgtaacttcaactggttggaaagcaaaggtgacatgacatgcacttttcggtttgaccaacaaataacgcagtacagcaaggggcatagtgtcgaaatcataccgaaataaaaggaaaagttcactgagcagacatgaaaggtggaagggaaggtaactagagacctgaaattacttattgacacgtcgaaaaatgtgtgatgtaactagaagttaaaggacattcaaactcaaatgattggttggttgccattaagcacctacgagctcaccatatatttagcttgccatatgatctttttggcctttagctgatagcccaaaaaaaggaagcctcgttccacgcaaatactttaagtttaatccgctttaagaccactacaacgaaggatgaccagcaaaatatgttgcggtcatgttttggctttgtgttttttcttgctatctccttgaaaatccatgatccgaatggatgcttggggtcgagcgataaaacccctcagctcacatgtgaatgtttacgaatatacatacatgtatatttgtgtgccgggcttaggccaacagaa

SEQ ID NO: 23411 - DNA, 3589 bp, DROSOPHILA
ttacttgcaggacaactcgtaattgaatggcagattgaacggcgaagaagttacagagacagccagcttagaaaaatagccaaatccctggatacctcggtgtcgacaggactgaaggagaaagccgcttccgtgaacaataacaagcccataagaccgctcttatcgcttgacagctcggtgacggcttcgacatcctcgggagcaacaggatctggtggcggaggtgcgccagccaagccatcacctttggtcttggcctccaaacgagacctcacgcccagcaacgagagcagctcatcgccgtccagttcgaatggcagcaaccagaccctcaccccacccatgaccgctgataatcagccgctccagcagcagttacagcaccaccagcaccggagtcctgcgcagccggccccgcccacaacgccccctccagtggcagtgcactcaatgccggagctccgaccaatcgcttttagtgctgcagttgaaaagtcaacgaagcagataggcggggtcattccggagaaggtgaaaaagtcggtggatcccaaagtggttgcggtcgagttgggctttcgaaacttaaacgctgaaaatttaacggggagcgggggtgtcgacaagcgaaatgccaacctatcggagccggatcaggacctgcccccgaatctgaatgtaaatctcagcccgaatccatcgctggccctgggagccccgcactcccccacgtccgccgcgtcggcggccttgctcctcctcgaatcctgcgatggaaatcgcaacgacgagtcaaggttccaccacctgcattccgctccccgtccagaagccaccatgaagctgcgcgaggagaatgatcgtctcaatgccgaactgcttcgactgagacgcctcctcgagctgtccacagatggagcagtgggtggtgtggacaccgctcccgaaatggaggcagtcgcatccggcgaaggatcagctgccaaggaacgcatcgaacgcctggagtcggagctgaggtcggtgaagaatcagctgctgaccatgcggctggagcggaaaaagctgcgaacagacaagtccgatctgctgggccaggtgaagcaactgtgtgcctcgctgcaggagaaggagcaagaactgcgcgacttcatacgcaactatcaggagcgggtgcgggaaacggagacaacgaacgccaagatctccggggatcgggatcgagagcgcttccagttgctcaagcaggcacgcgatgaagcggagcgttcgctggccttggcccaacagctgtcggccagggatctgcagctccagaggcttcaggagcaactgcaggaggcacgccgtcagttgaccggttgtctgtcggatcaggagagtctgcactcctttgccccactaactcctccgtcggctgcctcgggaatgctcagtcagatggccgccgcatcgggaatgggcggtggcttggctggcatgcgcggcaccactgaggacagtgggcgtggtaactcgttgtctgccttcagcggcagtttgagcggaggatccggcgctacggcgggcgatcgcaattcctgctccaacgactcggggctaaggaacagcagcgatcgggagagcaccggcggagaactgaacttcagcgacggaacctgcgacaatggaccctgcatcacagtcgatccggacagcatctccctcgtatccagccagaacatgtaccaatttggcacacccaaggaacgaagccccacattgtctcccctcaattcggctgcctactcaagatccgtggaacagttgggctccccggtggaccctgagggaccaggtaatggagccatcagccggaagttcgccaacgccagcaaaagtggtccgctcggtgctcgaaatggacgcggcggaacctggggaagtatatcacgagtgtttgcccgctccaggaataaaaacaaggctctttccgctgatggagtgactgaatatgccgactactcgtggaatccgttgacggaggagggctacgccgagaagctgcgtctgctgcgggaggcatcccagctgcccatcgaccgttggcgcgccacccaggtgctcgcctggctggaggtggccctgggtatgccccagtacagcgccaggtgcgccgagaacgtgaagagcggcaaagtgctgctggagctgaacgacgtggagctggaggcgggtctgggcctggcccatccgatgcaccgcaagaaactgcggctggccatcgaggagcagcgccgtccggagatggtgcgctatccgcttatcacgcagctgggtcacacctgggtggccaccgagtggcttccggacatcggattgccccagtacgcggaaccctttgtgcagtccctggtcgatgctcgcatgctggacacgctctccaagaaggagctcgagaagttcctgggcgttacgcggaagttccaccaggccagcattgttcacggcattcacgtgttgcgcatcgtcaagtacgaccgacaaactctggccatgcggcgggtgcaatccgagacggtggacacggaccccattgtgtggacgaaccagcgcttcattcgctgggtgcgatccatcgacctgggcgaatacgcggacaatctgaaggatagcggcgttcatggcggccttgtggtgctggaaccatccttctctggtgacaccatggccaccgccttgggcattcccccctcgaagaacataatacggcgacatctcaacacggaattcgatgccctcattttgcccgcacgagcgactctgggtcagggcatccgttccggttgcggcgtagtgcctctaacgggacccggcggactgcagcactatgccacaacagatcgccgctcgagcggcaacctcaggatttcggcatggaaaggatctcagagctccctgtctaaagcctttcggtttaacagcaaaccacatcgcaccggggaccgcagctcctttgggaactccacctccccaacgccttcgtacagcagcagcgagggtggcggaggaatatacgcaaccatagggcaccagtatccgaatccgcacaccaatctccagcagcagcactaccatcacttcctgccgccgcctacgacggccccaccgccgattccctcggctgggggcatctatagtcatggtccgccgcctggtcatcgtgtgagcgctccgccagttggtggggcactggatgcggtgtccaccgacccacaaatgctctacgagcagagtcgacggcgcgtgaagagcatcagcgatattggggcttcgacgagtgcgggcagcgtgggggcctgcagtctgggcggcatatcggcctcatcggagtcccctgaataagagtgaaaagctagctagataggattacaactaccactaccaaagatactcagctgtactcccgcatgaaaatccctttcacccccccataacccatttaccctttcagctgcatttgagcttagaatctacaagcaaactcaattatattcaagtcagtgtcagacccacctacaagatacaagcattcagcagctacaga

SEQ ID NO: 23412 - protein, 1013 aa, DROSOPHILA
MTADNQPLQQQLQHHQHRSPAQPAPPTTPPPVAVHSMPELRPIAFSAAVEKSTKQIGGVIPEKVKKSVDPKVVAVELGFRNLNAENLTGSGGVDKRNANLSEPDQDLPPNLNVNLSPNPSLALGAPHSPTSAASAALLLLESCDGNRNDESRFHHLHSAPRPEATMKLREENDRLNAELLRLRRLLELSTDGAVGGVDTAPEMEAVASGEGSAAKERIERLESELRSVKNQLLTMRLERKKLRTDKSDLLGQVKQLCASLQEKEQELRDFIRNYQERVRETETTNAKISGDRDRERFQLLKQARDEAERSLALAQQLSARDLQLQRLQEQLQEARRQLTGCLSDQESLHSFAPLTPPSAASGMLSQMAAASGMGGGLAGMRGTTEDSGRGNSLSAFSGSLSGGSGATAGDRNSCSNDSGLRNSSDRESTGGELNFSDGTCDNGPCITVDPDSISLVSSQNMYQFGTPKERSPTLSPLNSAAYSRSVEQLGSPVDPEGPGNGAISRKFANASKSGPLGARNGRGGTWGSISRVFARSRNKNKALSADGVTEYADYSWNPLTEEGYAEKLRLLREASQLPIDRWRATQVLAWLEVALGMPQYSARCAENVKSGKVLLELNDVELEAGLGLAHPMHRKKLRLAIEEQRRPEMVRYPLITQLGHTWVATEWLPDIGLPQYAEPFVQSLVDARMLDTLSKKELEKFLGVTRKFHQASIVHGIHVLRIVKYDRQTLAMRRVQSETVDTDPIVWTNQRFIRWVRSIDLGEYADNLKDSGVHGGLVVLEPSFSGDTMATALGIPPSKNIIRRHLNTEFDALILPARATLGQGIRSGCGVVPLTGPGGLQHYATTDRRSSGNLRISAWKGSQSSLSKAFRFNSKPHRTGDRSSFGNSTSPTPSYSSSEGGGGIYATIGHQYPNPHTNLQQQHYHHFLPPPTTAPPPIPSAGGIYSHGPPPGHRVSAPPVGGALDAVSTDPQMLYEQSRRRVKSISDIGASTSAGSVGACSLGGISASSESPE

SEQ ID NO: 23413 - DNA, 4615 bp, DROSOPHILA
aattcgtttacgtggttacttcagttcagtttcaagagcggccagttgaattctgaaacaatttcttcaatttatgtgtaagtccccctctaatacactaacctatttaagttttgcatgtacttactttccctttatacgttaaagcacacaaactgccacacaacaacacgtataaagcatctggaaaagttggttttacagtctttacgtacattaagtttaagtttatacttatgtgtacaaaaaaccaaaattgcaactaacgcttgtccttaagttgaaatagagaaaaatcaagaatcagtaaaaatgaataccatatgcttaaattaatttataaaactaaaatatatatatatattataaaacactaacaagaggaaaatacttaataaaattatttcaactgtattagcaaattaaaaaagaattacaaacgtgtaaggaaacttataaaagctcttaaaactgaaaacttatttatgaatgtaactgtagcattatctaagtaaaagcgagagtaaagcaaatatttatgatgtgtaaccttaattgactaactaaatccacaatatgtatgttgatttgaacaaggattggtttaattgttgacttttgttgagaattccacaaaaggaagtttataaatgagcgtaactaaactaaatgatgcataacctaaatataaaattgattaccatacacttatgtaaatatatttatacaatattgtgaacatgaaaattgaatgcaatacaagcaaattaggcaaaaattccggttaggagttttttatatgtaccatatatatttgaaagaaaaaagaaaacccagcaaaccacgaaaacaaatgatgaaaatataactacaaattaaaatttattacaaaaaaagcaaccagacgagtgtgtgttttctgtaaaattcgctttccacttttttgctatgtcttttgaaaatttgaactaaactcagttaaatctgatttgttactgtgtcagcagcagtaagctttgatttaaatgcgttaattttaatttcccattcggcttccactacttttttggtttaaaaaaaatttgcttttctatgcgaagaaatgctttttaagtcaatcgagacttttcgttagtacatgcgatactgttagaaactgtttggctcctgcttcaaaattccacgttaattgtacgaagcaaccggctgcattggtaactagaccacccatccacccaccaataaagcacccttttcgggagaaggggcaaggtcactggacacggccactcccaggacacggatactgttaggcatacgcagacgcagtaggacattcatccacggagttagcggaggagattaggagcagtagccagcagtatgaccacgcagaacaccacgccggcaggattcaccggaaatcgaaaccgctactacaaccccgtctcaaagatccagtcgctcattcacaacctggacgcggagctggtgcagctgtgcaagcagtgctccgtgcagaagccgctgactagcctcaataacagcaccagccttggcagccacttctcgaatttcggagcgcttggtggtggcagtgggtccaaaaccatgggcggcagcagcagcatgggtagcaacaacttctctcccgacagcattggcaatcttttggcccgtgtccgtgcatcaactccgttgcccaggaccgtgaccagctcgcccacggcgccggaagcacaaaagcgtcagatgcgcaatgtctaccgcacccgtgtgatcgatgcgtaccgtaatcggcggatcttcaccgtatacggcaactaccacacggttagacgggctctaatgcgaaggggctggctggagaaactgccggcctcgcggcatgccaagctgcagagcatgtccgaggatgccctgctggagcacgcccggcggggcaacgactacgaggcggtggtcatatccaagatgatcaaccatttcccagccttcttcatctggcagggcaaggggcagcgcgacctatgcgccgaggtaagacccttccggaatcgtgtgcgccgcagccagttcctggacttctccaccaaggtgggtctggtgggctgcgccgaacaggagcgctggtatcgcgaggacggtgtctgcggcatgagctatccgcgcttctatcgcctgggcggtaacaatctggaggagcgtatggccttcatagaggactaccagcagacgcaggcccgctccctgctgctctatgtaagggagcaccagccggcagagctgatcagcgagaacggcaccatattcagcaccactctggactttgcgctcggcaaggtcaagaagatggtgcgccacgcggagcactactccttggacgatgctcgcatcaagccgccgactccggcggagatcgttgagaatcagacctttatggtgcagtccaccgatgtgctcaagtccaatgctaagttcaaggtcagcgagaaggtgatggcagagtacgcccgtctagcgggcctgtatctcgaccagatcgagtcccttcgtccggactaccgttgggatggcagccgcaacctgtggattctcaagcccggataccagtcgcgcggcatcggcattgtaatccgcagctccctggacgacattctgcagtggacctccaacaatcagaacaagaaatacattgtccagaagtacataggtgagttcgattagtatctagtggagaaatcctttgatcctttgacaaattttcatcaacatttccgctcagagcgacccctgctgatttaccgcaccaagttcgacatccggcagtacatgctgctgaccatcacggacactaaggtgagcatatggacgtatcgcgactgctacctgcgcttcagctcgcaggagttcaccatggacgatctgcgggagtccatccacctgaccaataattcggtgcagaagcggtacaagaacaagaccaaccgggattcgcggctgcccaagaataacatgtggtcactggatcagttcaagaactacctacgcataatgggtgctccggacggatcgtggtcgaagacgtacaacggattcaagcagaacctggtggctgtggtgatggccagtctggacgagacggagttgttgcagaacgccttcgagctgtacggttgcgacttcatgctcgacgagcactacaatcccattctgatcgagatcaactcgacgccggatttgtcgccatccacggagatcacggccaggatatgtccgatggttctgaaggattgcatccgcgtggtggtggatctgcccaagaaccccaccgctgccaccggactcttcgagctcgccttcgaggtgaactacagcataaacaagggagcggatggcaagccgctggaactgaatggcaaacagatgaccctgttcgaaaatatgcccagaatgcggaacagccccaggacgcggctcctgcgcaagattctgaacaatgtgaagacatcaactaccaagaaggtcgaaaaggtcgtggaggctccagctaaaaatgtgaagaatcccactgccaagatcaccaagaaaaaggtatggtacaaaaatagttaacaattctggaaaaaatcaattttagagctgaatacttaacgaatttatttaaaatatttttagaaactatctgcgtcagctggaagctcgacggcagcctcggctcagccatcaacgcagaatttgacaaccaagttgatactaaatccagcaactcgggaaaatcttgcactgcaatatactgctccaaagtaaattggctaaatttaacttctttttgtgcggaatggaaaccacttttttttggacagtaggtactcctaagcatattcataaaatactatgaaatattttctttttaagatccaatgacacagaaaacaataatatgcatagattgtacagaactgtattagtaataaatatgtgtaaggaaagaaagcccagctggataggtttgcatcctacgaaaacaaaagagtaagtttaattcattattatattaaatttaagtaatattaaaataacaccgtttcagattccgaggatcaatgttcttggcgccagtggagatcaataaaaaatacatataaagtaacacataaataaaatatacagtcaggaccattaattgccaaatcgatttaaatttattaaatagatataacaattttagaatacaataacttgcgcagattttcataacaatttttgcaataaattcgtcttaaaaacaattctgtataattctggattattaatataattcgaatatttctaagatttcacatgctatagaacgtttgatttatgtatgatgttttaaattcatttattgaagtattcacaaaataattcgtcatcctaaaatgtattcaatttttaaaatatgttgtctaaaaggcagcttattcacaggttaaacgaaacccgtaccctggttgggtaatggatctccacttgtacctttaaggtactggagtggtaactacgttttattgaccaatcacggcagtttcggaggtgtcttagccgaccggaagtgctgaagcaggaacca

SEQ ID NO: 23414 - DNA, 2543 bp, DROSOPHILA
tcagcagcagtaagctttgatttaaatgcgttaattttaatttcccattcggcttccactacttttttggtttaaaaaaaatttgcttttctatgcgaagaaatgctttttaagtcaatcgagacttttcgttagtacatgcgatactgttagaaactgtttggctcctgcttcaaaattccacgttaattgtacgaagcaaccggctgcattggtaactagaccacccatccacccaccaataaagcacccttttcgggagaaggggcaaggtcactggacacggccactcccaggacacggatactgttaggcatacgcagacgcagtaggacattcatccacggagttagcggaggagattaggagcagtagccagcagtatgaccacgcagaacaccacgccggcaggattcaccggaaatcgaaaccgctactacaaccccgtctcaaagatccagtcgctcattcacaacctggacgcggagctggtgcagctgtgcaagcagtgctccgtgcagaagccgctgactagcctcaataacagcaccagccttggcagccacttctcgaatttcggagcgcttggtggtggcagtgggtccaaaaccatgggcggcagcagcagcatgggtagcaacaacttctctcccgacagcattggcaatcttttggcccgtgtccgtgcatcaactccgttgcccaggaccgtgaccagctcgcccacggcgccggaagcacaaaagcgtcagatgcgcaatgtctaccgcacccgtgtgatcgatgcgtaccgtaatcggcggatcttcaccgtatacggcaactaccacacggttagacgggctctaatgcgaaggggctggctggagaaactgccggcctcgcggcatgccaagctgcagagcatgtccgaggatgccctgctggagcacgcccggcggggcaacgactacgaggcggtggtcatatccaagatgatcaaccatttcccagccttcttcatctggcagggcaaggggcagcgcgacctatgcgccgaggtaagacccttccggaatcgtgtgcgccgcagccagttcctggacttctccaccaaggtgggtctggtgggctgcgccgaacaggagcgctggtatcgcgaggacggtgtctgcggcatgagctatccgcgcttctatcgcctgggcggtaacaatctggaggagcgtatggccttcatagaggactaccagcagacgcaggcccgctccctgctgctctatgtaagggagcaccagccggcagagctgatcagcgagaacggcaccatattcagcaccactctggactttgcgctcggcaaggtcaagaagatggtgcgccacgcggagcactactccttggacgatgctcgcatcaagccgccgactccggcggagatcgttgagaatcagacctttatggtgcagtccaccgatgtgctcaagtccaatgctaagttcaaggtcagcgagaaggtgatggcagagtacgcccgtctagcgggcctgtatctcgaccagatcgagtcccttcgtccggactaccgttgggatggcagccgcaacctgtggattctcaagcccggataccagtcgcgcggcatcggcattgtaatccgcagctccctggacgacattctgcagtggacctccaacaatcagaacaagaaatacattgtccagaagtacatagagcgacccctgctgatttaccgcaccaagttcgacatccggcagtacatgctgctgaccatcacggacactaaggtgagcatatggacgtatcgcgactgctacctgcgcttcagctcgcaggagttcaccatggacgatctgcgggagtccatccacctgaccaataattcggtgcagaagcggtacaagaacaagaccaaccgggattcgcggctgcccaagaataacatgtggtcactggatcagttcaagaactacctacgcataatgggtgctccggacggatcgtggtcgaagacgtacaacggattcaagcagaacctggtggctgtggtgatggccagtctggacgagacggagttgttgcagaacgccttcgagctgtacggttgcgacttcatgctcgacgagcactacaatcccattctgatcgagatcaactcgacgccggatttgtcgccatccacggagatcacggccaggatatgtccgatggttctgaaggattgcatccgcgtggtggtggatctgcccaagaaccccaccgctgccaccggactcttcgagctcgccttcgaggtgaactacagcataaacaagggagcggatggcaagccgctggaactgaatggcaaacagatgaccctgttcgaaaatatgcccagaatgcggaacagccccaggacgcggctcctgcgcaagattctgaacaatgtgaagacatcaactaccaagaaggtcgaaaaggtcgtggaggctccagctaaaaatgtgaagaatcccactgccaagatcaccaagaaaaaggtatggtacaaaaatagttaa

SEQ ID NO: 23415 - protein, 719 aa, DROSOPHILA
MTTQNTTPAGFTGNRNRYYNPVSKIQSLIHNLDAELVQLCKQCSVQKPLTSLNNSTSLGSHFSNFGALGGGSGSKTMGGSSSMGSNNFSPDSIGNLLARVRASTPLPRTVTSSPTAPEAQKRQMRNVYRTRVIDAYRNRRIFTVYGNYHTVRRALMRRGWLEKLPASRHAKLQSMSEDALLEHARRGNDYEAVVISKMINHFPAFFIWQGKGQRDLCAEVRPFRNRVRRSQFLDFSTKVGLVGCAEQERWYREDGVCGMSYPRFYRLGGNNLEERMAFIEDYQQTQARSLLLYVREHQPAELISENGTIFSTTLDFALGKVKKMVRHAEHYSLDDARIKPPTPAEIVENQTFMVQSTDVLKSNAKFKVSEKVMAEYARLAGLYLDQIESLRPDYRWDGSRNLWILKPGYQSRGIGIVIRSSLDDILQWTSNNQNKKYIVQKYIERPLLIYRTKFDIRQYMLLTITDTKVSIWTYRDCYLRFSSQEFTMDDLRESIHLTNNSVQKRYKNKTNRDSRLPKNNMWSLDQFKNYLRIMGAPDGSWSKTYNGFKQNLVAVVMASLDETELLQNAFELYGCDFMLDEHYNPILIEINSTPDLSPSTEITARICPMVLKDCIRVVVDLPKNPTAATGLFELAFEVNYSINKGADGKPLELNGKQMTLFENMPRMRNSPRTRLLRKILNNVKTSTTKKVEKVVEAPAKNVKNPTAKITKKKVWYKNS

SEQ ID NO: 23416 - DNA, 7647 bp, DROSOPHILA
agagtgttaaggaaaaaaaaaaaataataataataatatgtatattaaaattcccctccagtttacaccgaaatgttttatgcgttttcagtttcacacaaatcaataaaatttacgtcctaagctagaaaaaaaaaaatattttaacttttaatggtaatttttgtatgtagaaacacttgtaatacttgttgcatttatttttggttttctggctgctaatacttgaaattgattctaaaatcaagaatcaaatccctttaaaaaaagaatgaatttgaatgcttaaaaattaagcttgctaaaaaataattcctgttattatagttttggcttaagcttagttatgttattgttttgttaaaacattttttaatgggcgaaaattaaaggcttcctttctaaactttggaaatagattcttgattttagaacgaatctttggcatgagatttacacatatatatgtatagctttggctatggatgatagactacgtcattgtttggattttacaataattttacagttaattgcttagagtatccgaaatccgaaatccttctcttcccagttggtgctcccttagcgcggcaccagatctatgtagctattcggtcgcatcatctggtgatgtgcagccgaaccgtaaaaacttggataggtggcgcccatgccataggcggcagctgccgcatgacgcgacaccttcagcttgtcgtaggcgctggcatatggtccgtgggcgtgggcgtgcgcatggctatgggcgtggccgtgggcatgaccatgatgatagtgagcggccgctgcggcagcagcattatgatggtagatcgcaccaaagttgctctgctcctgggcatagggttgtccaatgctcgaatagatattggccgcactcatcacttgtgtggctgacgttgctccgcctgctcctgctgctcctgctcctcccgctactgctgctgttgctgcacttgcgcccggcgcagcagttgctggcggggatgcggagctgctggagtgcggcgttaggggatgcgactgcacctgtgcctggtacgcatgatgatagctgccatattgcgtgtgattctggctctgttggagcagcgattgttgctggttagcctggtgttgctggtggagatgttgctgctgggactggtgttgctgttgctgctgctgttggtgttgctgttgcagttgctgctccatctggtagcccagcaagtcgggtgaattgccggaggtggagctgctggagggcgtggccggtagctgcagaactccctgttgctgttgctgctgctgctgttgctcaatggccagttcgctgcaactcaggccaaagttgctggttgctgccgttcgctccttgagttgctgctgctgttgctgttgctgctgcagttgctgctgctgctgctgctgctgctgctgttgctgcttcatgcgcgcctgactttcgtgactcatggaggacatgctgctgccaccgccagtggttctataatgtcaaacaatggcaatttataaaaatatatatacaatatataactaacatgaagcaacatttacagcttaaatctacagcgaatgctgctcagttggccaagtgtaaaaacgtgcaatattataaatattagtgttatgatttgtaacataaccaggccgaaagccataagccaaacactcggagaaaagaaatgaaaattatttgaagtatttcctcgtaataaacaagttgcctaagcaccacgatcgtaaacaaaattggggaatttgtttacactatgctaccaagtcgcggcctggcaagttcgacaaatatgaaaagcccttcgaataaattgtttatgccgcccggcacatctgtcagtccacccatcaccatcatcatcagtagtcccattcccattcccattcccattccctaaaccattcccatttccatttccattccagcttcacattctcggcattttgaagttcttttgtttttgagttattgttgcgttatttgaagtttttcaatattttccgggaatatctatgccgaatgtcgaccgaatgtctagctccactttggacatttgtgtatttcaagttttgaaaagtgggtcaatttgtttatcatttgttattattattacatatttacatttatactacttctagacgttcgaaaattgtgtactattattattatatatattttgaaatttattcattcagcattttgaaatgctcgtgtcaaaaatctagaactaattttaagcacatgttttttttttttttaacacaatgctagacaatcaaattactttgccacattttcgcagacaaatgaaatcgcattaaaatatagttgcaagctgatttcagctttcatagttaataggtaaaaataaaaaaaaattaaaataacaaaaagatttggaactacttacacatcgttggtgccatcatcccgaaagcctttggcgaatggattgctggagatcttcagctgtgtcacctgcaagacggccggaaaattggtggaaaatatttttattcgactggaaaagcgcttgaggcatgccgacaagctggcgggccaaacaaataaattaaatacccaacaaattagtgaaaaaaaaattaaaaaaaaaaaaaaataataaaagaaaatatgtttatgtggcatatgtggcattccgctggcggcggggtaaaaatgatttgcgataaattcgagggcgggtggaaaaagtgttaacacccccacataaataatttaaatacttgccccaacgatgtctatggttatatttttagccacccacaaaattccctcccccctccccctccccctggccatcattatgaatcacaaccaagacaaaaaaatgtggaaaaccgagggtatacaatgtacatatgtatgtcgagagttctttcaacttgcgattagatatgctgttcactgttcattactaatatcaatgcacccacctgatatcaatcccacctgataatcttatcttccccatttttcgaatgaaagccacagtgcattggaaacgtggtttctaaaatcttgtgtatttgtgtatgctacttttttatttttaatattttttttttcgggttagagtatctgcatggtctgtgctcgcatttccaattgctgttatatatacatatatatattcgctatggttgaaattgtgctagctttggccgccgtttgttataaattatgggaaaaacataaacaataaggccaaaatggcacaaaatggtcgcggcctttttggccgcttcgaatgccaagatgaacttattgataatacatataaatcattatggtaaatgtttacaaatagcaaccagcatatttcgattaacaatatatatcatatattaacaatatatatatcatatatatatcatgctcacccgctgattctggtaggcagttacggccgtaaagctcgtttccggaaagatgaaagtgcgaaagtggctggagtgctcgttctcatccaaggaggcgttcttcggtggcagataaaccagatggaaacgcggctggtagcgatgcatggagttcagaatgatctggagatgaagaggcaggatttgaatatacctatttatctatctatctaactatctatatatctatctatctatctatataagtaatgaaacgtacatgtccattttcgtccagctggttattggtgagcttcaatttgtcaaaggacacgatctgcttcatccaattggagccgacggctggcgagtcgggatgcacatgaatcctgggcggggaaatgggatccgccttgccagccaccacccagcaggagctgttgcaaattgaagtgcatcattttcatcgaattccatgtggccatggctttttaacattaacttacttgtgaaaggcgtagcgatagcgtttgtcatccatgggcacaaagtccatcatgcaaatgtaggtggcatgtggatccaaaccaccgatcctcacctgaaacgtgggaaacatgcgtcggcccgtcttggtgatgatcatttcggtgccctgggcatggaactgatcccacagcgccttcgtctccagcaccacaatggcctgggccagcgatggatgcactggctccgattccttaattatcaattggaaatcatatattttaaatgatctattatttatttcgtttcccatcgttgaatttacttacacctttgctgatattatggctattgggcttcactgtaccgttctccgcactgttgttgtcttttttgtgctgtcccttgaactttttggacgcggtggatgcactgactccgccagctgatgtcgttgtgactgccgtgccgccggctgttggtgccatcgaggcttcactgtgtacgccggcataatcggttggcagcgatacggacgacgatgacgacgacgacgactgatccgggcaactgggattcgagatgctgctggtgctgctgttgctgttcgcggtgccagtgctgcctgtactgtgcgtctcgatgtccgccaatttggcatcgatctgctccagcggcttgtacgagctgcgatccttgccagccgtttggatgcaggctgcagtgaagcacaagttggtgttacagtgcgggttaaagtggaggttaaggtgtgggttaaagttgtggttaaagtgctggttaaagtggtggttaaagtgcgggttaaagtcgcggttaaagtggcggttaagtagtaaaagtaatgtaacataaaatgctgctcattaaaagtgaagaatgatcaagtaatccatgtggctatgtaaaatatgtaaaaaatctatacaaaactcgatttactttaaagaaaactatagtttggatatccctataaactatccttatccctttataaactaattaataatgaagatatctcaattcaagcccctgtattttttcatatcccactgacaaatgggcggaaaatatgcgactataaatcaaacacgtagcgcgtataaattctatagcaagtgaatgggttttatatatataaaatatatatgcatgtatatagctgctgggatttgctaatttcatactcaatgtgatttatgcgatttaaatgagaaagtggggcagaaagcacgtagacgccacgccggcgcagatttctcacttctggagctcgcagttcacagttctgaattctgattaaaggagtcttgtaataatatcacttgatgatatatccacacaccgacttctttttttttgttttttttgttttttgtacgtttcgagttgcgagtttggggcaaatgggacaacatgtccaattataaaagaggcgtctgagtagcggcggctgctgattgagttgcatgctctaaatttaggatctccccttttcgggggatgcctgtaaaatggtatggtatggtatggtatgggattgcatgggatgagatgagattttcagcaattaattgtcactgggctcgcagttgcgggaattgccgcaatggcaatcaatgccgcgaatgacccatgacaggtcatttagccgctttagcgctaaatagttgcccattttcctcgattttttttttttagcattttttgctgcacgaatgaattctaaaatcaattaacgtttggcacaacaaatcgtttttctgtcacatgcacaacatcaaacaacaacaaacacgagagaaatgccacttgaaatctcggggatccgggaattctgagctaattgatcgggttttctggttttctgatcttttggttttccgattctctggttttcagtttctcagtttctcagtttttttttttttaaacttttggatgtcatttgtgccgccgctgccatgctcggtgtattttgctaattactctatcgcaaacggattccatttcagttttttgggtcacttgcaggcagacaaatgatatggaatatatacatttgtttgctagcaaaattccattgcctgatttttgaacaaaaaacataatatcgaatagtcaaatggaaaatatgacttttttgttgcttcgccttttgtttgctacgcgatacttctttgataaatatttaaagcatatatttgaatttaagaagttttagttgtacattcgattgaactgaaaggtaaagctaataaaatcttggaaaaatatgtttaactagtagtatgctaatataaactaaaagcctattttctagtttaagttttgaaacagatagtaaaaaaaaaatatactttacaggacttaaaagtctaaacaaaagtaaaagttcatgcaaaagttataacatattaaaaatctacttgtatgcttgtttgcgacttttaaaggtacacaacctaatatcttaatatccgatttaaaatactccgcggtagagttgcctaatcctctccagcttaagtcaactcaaacgactcaccttcgatctgcttcatgggactgagtccgccggtcatgtacggcgatgtccagtagtcgttgccatagcagttgtagtccgttaggctggtgtccaggaactgcatggatgtggtggtcatcatggcgccggcgcactcagtggggcccatcaggtgcgtcatggcgagcgtgatcgttggaatatatatatatatgatatatatatatgatggctggatatgtgatgctcacagtggaagaaaggaaatcgcagcgagttcttggcccatttattccatttattccggcacaatttgttttgatctcgaacgttattcgcgcagttgtcaaatttgattattgcacccacacacaatcactcactcattcactcactcactcactcactgtgcactgcaaaaaaaaagtatgtagtggtgcgaaaatccaacgccaacctttcgctgttgtcaatcagaatcgagatcgagttcaagaatcgaatgaaaaatcaaattaattctcttcgaattgtttttatggcccgatcgcgttgactggcgaaaatttgcccgattgtagttttttgttttttgtttttttgttttttgtttttaattccctgtgttagctgattgattgacttgaacttcttttatttgttttctttctaattcgactggcagaaagcgttgagttgtctcaattgccaccttcttccggccaagtgcgaactgattatcccgtatagtatcctatgtttatatctcgcggatatatcgatctgatctgatttcgaatgcgatctctggatgcctagatctctgatcacgcacacatccgttccgtcaagcgctggtccgccgaatgagaacaactactgctgcggctgctgctgctgctgctgctgggcagatgcatcgctgcctctcgagatcccaagatgccgcattgtacggaccatctccccaaatcgagaaatctatccgccaatcgccggccgcagcatccaaatttagactcgccagccgcaccaatcgatccaccaatggccgcacggccacctcctcctcctccatctcctcctcctcctccttctccttctcctccttctactcctccttggatcgcaccgacatgtgttggctcgcctgggatctagcctagtatcaagtggatgaa

SEQ ID NO: 23417 - DNA, 2100 bp, DROSOPHILA
atgacgcacctgatgggccccactgagtgcgccggcgccatgatgaccaccacatccatgcagttcctggacaccagcctaacggactacaactgctatggcaacgactactggacatcgccgtacatgaccggcggactcagtcccatgaagcagatcgaagcctgcatccaaacggctggcaaggatcgcagctcgtacaagccgctggagcagatcgatgccaaattggcggacatcgagacgcacagtacaggcagcactggcaccgcgaacagcaacagcagcaccagcagcatctcgaatcccagttgcccggatcagtcgtcgtcgtcgtcatcgtcgtccgtatcgctgccaaccgattatgccggcgtacacagtgaagcctcgatggcaccaacagccggcggcacggcagtcacaacgacatcagctggcggagtcagtgcatccaccgcgtccaaaaagttcaagggacagcacaaaaaagacaacaacagtgcggagaacggtacagtgaagcccaatagccataatatcagcaaaggtgaatcggagccagtgcatccatcgctggcccaggccattgtggtgctggagacgaaggcgctgtgggatcagttccatgcccagggcaccgaaatgatcatcaccaagacgggccgacgcatgtttcccacgtttcaggtgaggatcggtggtttggatccacatgccacctacatttgcatgatggactttgtgcccatggatgacaaacgctatcgctacgcctttcacaactcctgctgggtggtggctggcaaggcggatcccatttccccgcccaggattcatgtgcatcccgactcgccagccgtcggctccaattggatgaagcagatcgtgtcctttgacaaattgaagctcaccaataaccagctggacgaaaatggacatatcattctgaactccatgcatcgctaccagccgcgtttccatctggtttatctgccaccgaagaacgcctccttggatgagaacgagcactccagccactttcgcactttcatctttccggaaacgagctttacggccgtaactgcctaccagaatcagcgggtgacacagctgaagatctccagcaatccattcgccaaaggctttcgggatgatggcaccaacgatgtaaccactggcggtggcagcagcatgtcctccatgagtcacgaaagtcaggcgcgcatgaagcagcaacagcagcagcagcagcagcagcagcagcaactgcagcagcaacagcaacagcagcagcaactcaaggagcgaacggcagcaaccagcaactttggcctgagttgcagcgaactggccattgagcaacagcagcagcagcaacagcaacagggagttctgcagctaccggccacgccctccagcagctccacctccggcaattcacccgacttgctgggctaccagatggagcagcaactgcaacagcaacaccaacagcagcagcaacagcaacaccagtcccagcagcaacatctccaccagcaacaccaggctaaccagcaacaatcgctgctccaacagagccagaatcacacgcaatatggcagctatcatcatgcgtaccaggcacaggtgcagtcgcatcccctaacgccgcactccagcagctccgcatccccgccagcaactgctgcgccgggcgcaagtgcagcaacagcagcagtagcgggaggagcaggagcagcaggagcaggcggagcaacgtcagccacacaagtgatgagtgcggccaatatctattcgagcattggacaaccctatgcccaggagcagagcaactttggtgcgatctaccatcataatgctgctgccgcagcggccgctcactatcatcatggtcatgcccacggccacgcccatagccatgcgcacgcccacgcccacggaccatatgccagcgcctacgacaagctgaaggtgtcgcgtcatgcggcagctgccgcctatggcatgggcgccacctatccaagtttttacggttcggctgcacatcaccagatgatgcgaccgaatagctacatagatctggtgccgcgctaa

SEQ ID NO: 23418 - protein, 699 aa, DROSOPHILA
MTHLMGPTECAGAMMTTTSMQFLDTSLTDYNCYGNDYWTSPYMTGGLSPMKQIEACIQTAGKDRSSYKPLEQIDAKLADIETHSTGSTGTANSNSSTSSISNPSCPDQSSSSSSSSVSLPTDYAGVHSEASMAPTAGGTAVTTTSAGGVSASTASKKFKGQHKKDNNSAENGTVKPNSHNISKGESEPVHPSLAQAIVVLETKALWDQFHAQGTEMIITKTGRRMFPTFQVRIGGLDPHATYICMMDFVPMDDKRYRYAFHNSCWVVAGKADPISPPRIHVHPDSPAVGSNWMKQIVSFDKLKLTNNQLDENGHIILNSMHRYQPRFHLVYLPPKNASLDENEHSSHFRTFIFPETSFTAVTAYQNQRVTQLKISSNPFAKGFRDDGTNDVTTGGGSSMSSMSHESQARMKQQQQQQQQQQQQLQQQQQQQQQLKERTAATSNFGLSCSELAIEQQQQQQQQQGVLQLPATPSSSSTSGNSPDLLGYQMEQQLQQQHQQQQQQQHQSQQQHLHQQHQANQQQSLLQQSQNHTQYGSYHHAYQAQVQSHPLTPHSSSSASPPATAAPGASAATAAVAGGAGAAGAGGATSATQVMSAANIYSSIGQPYAQEQSNFGAIYHHNAAAAAAAHYHHGHAHGHAHSHAHAHAHGPYASAYDKLKVSRHAAAAAYGMGATYPSFYGSAAHHQMMRPNSYIDLVPR

SEQ ID NO: 23419 - DNA, 14775 bp, DROSOPHILA
tgtctactttatttgcattgcattaaaaaactgactggtattggggaattgccaacatagttgttcctgcaactgggacggtaattaatttcggtggaacggggtgatgtattcggatcgggtgggcataacctggtaatttgaggtaatgcgctagattaagtttatttactttgaaggcggagccggttaggaattacctctgatttgggtcagggagtttgacaagaagaaagtgatgcgctcgagttgattttaaattgacttaaaagcattgtgtacatacatacatatcttattcaagctctaataattatgattttgtataagtgatatgattaaaaaaaacactgaagacagaatctgttctaaaagtcataaaaaagaactggattttaaaatctttaatcaatatcacgcataggcatataaaaagttcagtttaactttagtttgttttattcacacttaaatgtttaccgattacttatatctagttagttatcaccttaatccgcccctgaaaaagtgaaagaactttcgccaggatgcgttgaacccaatgcaaaatcaactacacctgccagccacacagatgaaagctttcccgaaaagagcttttctccaacatggaatcggagaaagagaaccaaggcgaagagaggaccaatattttaagagagttttgcaccaagtaacttttttttttttaaatttaaaagctgaatgataacgtgtttttttacttttataaaaatagtgtgttctaaaataataataatatatacattgattataaaaaagggtctggaatcaaatgtttgctttagaaaatcatagtgtattttttgtgcatcaagtgaaataaatggcgaacagtcttccttaagagcttaaaagctaaagttgccgacgaacgccttcggctgtcggctttggttttccatgcaaatataaaaaccgaaccgtctgggtaatgggaaatcattcataacggaaaactcctggcgtgcggacgtgaaagtgccgtgatttctacgttgatttctgtcgcgtctttcgctgcttgtgttttgtgtattttccccacttattctttgcgcctatactgcccgctactttagtatccgttcggaaaaaacaaaaagaaaatcggggcgagcaaacaagtcaactaaaatatcccattcatcttgttctgccaacttatttctaattgtgaagcaaccttgaatttccacatcgcgctggaaattgctaaacaaaaacagcgcgcaaaatctattgtttaccgcaatactagtcaattaccagcgattttcgcctattgcaatgtgactttccaagtgcgatcgcagcttttttgacgttttgtttggccaagaggacactttcaaatatcggtaactaacggtattcaataaacgcgcctaataagtgcaagagaggattaaggatttgggattactgatcagggaaaacaagtcttcagaaatgggcactatcggtgagtaaatctatctctcactttttgctttcacctaattttagtcataaattcaaaacttaacttaaagtatccaagataaattgcaaacaaattgaaacatatatcagtgccagtgcttgaattaattatacttcgtttgctgatccaagacaatcatttaaatagttttctctggctgagctcatacattttcccggaatgtctcattttcctaccgcccccaaaaggccaagtgattctcggaatggttcttcatttgagtgctgtaattgctagtggttatccaacagttgccagccatccattccgattatccattgtttgtccaggacaactccacacgagccgagctcagtgctgacccaacactgtgtttatgtaaataatccttttcagagagctcacgcaacacgagcgagattcttttcaatcaaataggatgtggaagtccgtccccttgccaacgcctcgctcattttcattttcgtcctcatgctttgctgctctgcttgcttttcaattatcctggctaaaaataaaccgagacagcccacatggaataccccaaccacttggaccggctttcaacaccagcccaaaaggaaaaatttgatatgtatatacatatatatatagagcgaaaagaaaagcagagcaagcgacaaatgacaacgacgtcattatcataaacatggtctgcccgcgaaaatgtcatgaattttgtttatccaaaatgtataaaataaactaggcggctggggatagaccctaaactcataatcgaatgacgcacgagcctctggttttcaacgcccatattaaaatgagcatgagcagccggtcattagccaggtggctctcgtatccttggtatccttacaattcacaatactttgggggccgcccacaaatgcgctctgattgccatctcggtggggcagagtcggtcgggctcttctgcctcaatgggttcattgtgatgagccccacacgacagttgcatactcaagtgccacctgcggtccttttgaatgccatcctcgggatgtgacttgtgcctgaccgaatcgcatttaacacgcttcagctcagctcgtgaaacatcctcgaacaagtattcttgctggcgctgctgaaagttcaggggtgaataaaaccattgataacagaagtgaccctgccttcgtggccctgcaacacattatgcccatgacagtgtggcaattgaataaaggtcactttcgcaatgtctctgggccctcatgtcaatttaacttttcattttcagattagctcaaatctatctctgtttcgatcaggttctctattttacattagtagacagggttgcatttagagtggataacggtattataaaaggactctttggatgagttgctaagcggataaataacttcatcttgcacacgagcgaggtgctgcatcctcaggcggatttctcaagctgctgacccactaaagatccgatgggggacccgatctagcatcaccagaagggcttctgttcattgggagcagagccccacaaatgttaatgggacactcattattattgattagttgtttagttgatggacagctatcactagccaataaatcgaatttcattgaatagggcttctatttattgcacattttggcttgactagatgcgactgacatactttaaatttgctatgttttggtgggaacacttcagcttcaagatggggcaggttggaatcgggtagatacacttgcagtagacaaattgattgttaagatactcctcaaactcctccatggcggattcgttttggagcagatcgcggtattcctcgacactctccagattcacgggatccagctgatgcatgaagcacttgagcttcagcactgttgcatacaaatagttgaatatgtcgacggccatgatcttgtggtacttgatgcttctatgatggctatcgcccatgatgaagggcgtttcctgggccttgtccagcctttcgtaggcggcatagaactccttgcactgctgattgatttccaacagggtgtttttcattttgttgctaaaagagaagcgcaatgtaaataatttcgtaagccaagttgtatgcaactcactttgaagctcgcagcacttccaatttttcctcatattcattgataatggcctcctcggtggacaaggtgtacacttcgggatagcgacagctctgctctgaactgattagaatcagatatcgctgggttagcagccatatccgttcaaccagtatcttttgggccttcatttcgcacttgtatagattgtagtattccttataacgcatctctaacttgacaaggagacccagaacttctgcctcaatcccgtagtgcttcttgagctgcttggttagatgcggctcctcatcctccaccttgtttgatctgttatccgatctgcgctccaacttgcccgccactatgggttccaacatcaattcaactctgtgttccattttgtttatagactacgtgtgttgggtgtgtgtgtgtgtgtgtgtgctaactgcctgactgtctgagaaaatcgtataatggatcggccttcaaggcagactagatgatttagtctcggctaatactacccatccatttgggtgctcatctctttcgtcagtggcctattagatctctaaggttaaaccaatttgtttggcatcggtcgaatgggaatcctctgagtattgacgaaaaatcacttttaattaagatcagttgaaaagatgaagatttatatttcacttaggccaatttaaaaaagatttgtctgccaaaaacatgtacgtaaaaaagaaatcagcttcgcaatcgatgaatagcatgtgatagttaaatataaatatactaaatataatatttatacgattgaaatcagtcgggcggcaaaaaggagcttttgattgattcgattttcgagcactttcggcattcgaatgcattggaacggaaatcaaattagccaaatactgcagtgctgctgatttttccgagagccaaccaacttatatagcgtacacacaggaaaatccgttggcatagatttcatgttaaatgcgtaatttttccgtattcttatttcgttgggcatcataaatgaagtgcgaagccaattgccggcagtgaaacatttaatatatctgttgcgatatgaaggaaattcgaactcatgagcaatgtttgagcaatgtttccaaacgatttttcaatatcactcaaataaacaataggaacatgcgagtgcagagtgcgaaaagtgtacgcgtatgaaatgcgctctaattggaaaaatgtgtcggaaatattgacggctgtcaaatgtaaatggtaaggcgaaaggtaaatgtttaaaaatatcttcaagtgaaatgttatagccacaatgatcgttctaaaaactttccaatctggcttctgcaatactgcaattttgtctcgaaacattacatttttttgtgaaagaaaatattacaaataaatgttcaacaaaatatccacatttcgcacatcacgactgagcgttgtttacgatttcggaatttttaattgccacagcggcacacgcggcgtatgcgcgatatcttgttcggtgtaatgtgtttaggctattttggatcagacaagtgcttcttgtgcgccctcaagatgtgttttctcaacaccaaattgttaatgtgcaattaattctgggcgagaggttgcaaaatatttttgattgtgttcaattaagaggcgaaggtgcaatgaacctttcgcgataattgaaaaaagggaaacaaaataatgcagtcaactaagagggccaaatttgaaaaatgtatcgttttaggtgcgtttttgtagttatttgcactaagtgggctaattaggcttatcaagctaatcaaattaagaataaggacgattggttaatagtattaaaatgacattaagctttaatacacttaaacctaattacacttcactttgattactttaccaatttgaaaataatttcttattaaaatatgcacttaataatgcatctcagtgctctggtgtggtttatatcattcctgccatccgcatctttcgctttctacgcgttgagccgtgggacaaggtcgtgccgtcggctgtcggcgctagaaatattatggctaaccgagagataaagtatatatgtatctgtatctgtagctgtagctgtgccgcactgcacaggtctttgcggcccactgagtctgtgccccgtgcgtttgtgacgcgctttttgccattgacacgcaataaaaatatgtgctcgaaatttttaaaaactcataataatcacattaaagatttgatgatatatatatagggtatctgctgttgctgattataaaataatataatataaatatacgatattgataactttaagaaatataattaaatttgaacacaaaggaactttcgaattaggtgtaaatgcgaaagaagctcgtcacgaagttcttgcacagcggacagtaatgcaattgattcaaggcggtggtcaggcattccttgcagaagatatggccgcacgtggtggccaccggatgatcgggaagactcatgcagatggggcaaaggtaatggccattgtttctatcggataggagcctcaagactggccgttcctcatcatctgtggtcaagtcaacggtctccagcgtcttcattccgtcccctgctcgacgcagtccctccattttcagtggtttccagcgcaacagactgtgccaggatggaaacatatgttcactttttgcaaatgtccttataccttatatatgggcacacaatataagattgaattagaactcaaaggttccttgaagtctaaaactttcactttgacatcccgaattttagttactttacttagtaatggaattgtgaaaattttagagacagtttagccagatgtaaatgtagaaatataaacaatggcagagtccaaaaatactgtgcgatgattggtttttaaaaaagagaaagcaaagtgaaatgcgtgggggaaacggtgaacgcttttcttctcatcttctgttttcctgacgccgaagaaagcatttttatttaaattcatacgaatatacgtacgggcaaatacgtgtgtagtatttaataaattattaatttttgctacgctcttgccgctcaaacatcacatgaatcgtctatttggtcgggccaataaatgtctattatataaatggaaaatatttacgcagattgagctttatatgtgtgtgtgtcatcgaaaataatatttctaatatttcgatcgaacattcatattatttctctaattaatgtctttttcttgggaatattattcgatcacgccttattttggaactcgtgctacctttgcaaacatttttgacagaatttcgaaagcaatccactagggtcagtggttcaaaaatcacttgagaagaagtcggtttcaaccagttttcgaatatagtctagacgctgttttttttgttgtttatactagatacacgtgatgatgttttcgccattgagctttctcttgaaatgcttttgttattgtccccgccagtctagaaaatgttctttcacttttattttactgctctcgtattaagtaaatgtgacttttgagcgcataaaatgacaatttgtttgtttacctacggaaaaattgcaatcataagtgtggccacttattgtgatgattgcgtattgatttataaaattcgtaatattaaagccacttaatcaatctttcgcaagcggttgctttgcaatttatagctctatcctaaggataaacaaatcaaatggcaggcaattgatcactgaaattcaatggatttcctttgctaatatccgcttcctgaaagcgaaaaaaactcgactaattatttcactcaacgcaacttaaagttgacgtcaggtgccgcagccgacagaattttcctcatttagcttgcaatgcaaatattattattagcattacttacaattatttacgagcgttttcagtgttccgtgaacacatattacagacccaagaccacatgagagatattaaacagcaattgtttggccagcagtattttaccattcgcacaagtacaaagctccattattcgatcgttttttttttttgatctgaaccccgaataaatggcccacttaatatgtatatttaattcgtatatcataaccttcggcgggggcaaactattcagatattatttatggagtctgctccattgcacattattcatttcggaacattcctgccagattttgccatcgatctactagagctgtgataaatgattttacgtaggcacttgccttgaccttaccttgaaaattgtcagctacatgaattttttacacgatctgctcagtttttttttttttttttttgtttccattcattttcgtttgcgcgtaattacagatttgttcgccacacaggaggctattttaagtattttactctcgcatttaatgtgaaataaaggcgagcaaattaaataaatcgtaaaggcggaactattaaaataaattatgaaaacagtgccgtgggcggcgacttgcggcactcactgttttgccctcgccccaaaagttccctttcacctcttggacgcacataggcggcatattaaccctggcatgtggaccactcaagcgccactcagcgtgaaggagctgcctgtctctgccttgatccttgcatcctggccagcagctcgccacctgccgctgctcgtgatggtcatgtgcgcaaatctccaagagcagctgcctcggttttcttggattcgttcgtggtcctctagagtgctgtcatatatcaatgtttttcgtggtctggttgggaggggcgtgtacacgcctacttttctaaaaatattctccgtggccaagagataagggtgaaagcgaattgaatggatttaaacgtgttttaataaatacgaaaaagaaaatatacaaaattcgcattaagacgtaggatctagacataaaaaaaagatctcttaatattatttattttatttcgggtttttgttgtttcgccgttatacattaaacacctactatatgtatttaattttatttcattctgtttattttggtttttgttgcctttggtctggcttgtgggcgcagcggaaattttctttcaagtcgttaatttttattgaattgttgtataatatgttatattctgcttacgaaaacttgttcgacagggagtggagcaagtgtattggacgagcctgaaaataaatattaggaatttttccaaaacacggcagtacaaagtatttggatttgttagccaaaatgttgccgattaacggcttccctttttgctaatttataaataataaatccattccttccgtattaattattttcatttttaaaagcgggaaaaaagaaaactccaagaacaaccccattgtttttttccccttctagtacttacaaaaaatactatcttgacccaatttcaagtgctgttgtaaacagccattaggtatacaaaaaagtacgcatatatatatataaagagattggattaaatttttccattgggaaacggaagtgtggcagcagattgtcgtaggtcccccaaccctatggactttccgacttttccaagttgccgtaggtcctgaaaatcaactcaagtttttccgcccacatcaaagcgcggggcattaagcgaaccagttgcgttgattgggcaatcagattggatcaattgtttgaaatactctatatggggctggccgagcagctgggggggattgtccggtcgatggtccctagtcagtagtggtctccggtccccagtctctggtctctggtttgtggtctccagactgccgacgcctagcccgggcaattcatcatggctggctggattggcgctggtctaaaagtgtttgcgtttattttgtaataataggcaacttacaatccgatggagacccagtggcagcctcgccggcccgagagtggggctatatctgtgcctgtatgtggcacgccgaccgacaacgacttgccgattgacgtcagcaatgcccccaaagtcgcgcacggtgtcgggcgggttgccaagcaggcgggaaccgggacaccagtcgctggtggagaccgtcgaccgttgtggatgcgaggaagggggttaggtgggtaggtgggtaggtgggtaggtgggtaggtgggaatggggggctcgaggattggcgggtatcggtacggcattttgtcagtcactcatacgagagttggatgctgttcgatgccgggctcatctgctctgctcttcgcccaaggcgagcgtattgattctctggaagccctcgagttcttaagagcttcagacgctgtctttatcattaaacaaaaaattattataaaaattataccatatgaacaatttctgggaacacaaagctaattatcattggtagattataaagtatatttcatagacttgtgcttatgaatacatgcaagctgcgttttgcatatgaatacttaacacaaggatcacaaggacataaaaacttaggtaaaatctttttatttacatatgatttaatatggattatatatatgatttctaacttgttaagtgcattggcaagtcgcctataatgctgacaaatatttttcctttggcaggttgcgtctcctggcgcctttgttgcaattgcatttcacatttcagtgcggaacgagcgttcacatggatatttgtttattttgagccactgtttatacgactccccctttgccggcagatgattttcacggaaattctgacttctactatatatttagcccagcgaaatgcatctgcgggaatgcctgctgacccttctttttttggctcatttgtttgttcggctatttttgggcgtgcaaagtgtttctgccgcaatgagaatatcaagatgaaatggccatatcatttggatttagtgcggcaggaggcggtctgaaaatcggtgggaaagtgaaagtttgatttatgggcacacgcaggtcgccgagactttcgttcgtctgtttgatggtttcgtaccatttataaattagtcttaccatatcttcgggttggtcaaaaagtttagttatcgcttttgagggatctctctgcggttggacataagccaattacctctggaacggaaatagaaactgacagaaaagaaaaaaccgaaagaatagccaaaaactcagacttgttgctgccaaaaagcacttttcaatctaatgtctttactttttttttgggggttaatggggtacagaacacagcatacttgacccctcataatagattcaacatcctgttacaataattcagcaaaaaaaataaaaagataaaaagatttaagatgcgaaaccatagtcaataaaaagtcaaaagtcataacatttttttatttatattattatatttatttgcccttctgtgtaaatgtttcaggatttgtctcttatagattttgcgaaattaagcagctcatttaatagtgtaaatcaggcaaatttagcaaaatgtcccgtaactatttatacttgatcttcacagcagtactgatgcatatatttggacccaccttgaatggcgttcataaatttctcgaccaaaaatgcatttctcgcatgcctgggcccaaaatattttctaatagtaatttgtcttattttcaaatagatgtaattactaattcggggattctccgccattccagtgacaccaaatgaaatacgagcaagagtcacgattttaatcgctgagagtataaatgaaaatttagtgtcaaaaacaattcgcgcgaaaattgtgaacaaaaacaaatcaagagaatcacatcacgccctataaatgttttgattttccagctaacgcattctatatgcaaacgatgtgtgtctgtccccgtgccattcggctgcaaatcaaatgattttccgcgttttccccgactataaatgatagccagtggaggtgggagtgttgcggctggcactacgcagattgcggataccaaaaatcggagcaatcgttcgtctgcagtgactaactgctgacgtctttgccgcccggcccgtatatatctgtatctgtatctgtatctatatatctatctatttatctatataactcacatcgaagacagtccaggccagcccaacccagcccagcccgtcgatctacgcaaattgtgcactaactttgtcacagacaatttggcgacgacatcgtctatttctcagtcttggtcttggtcgtgggcgtgggcgactccttctcgttatgaaggagggctgtaaaacgcttttctatgttccgctgaccgataaattaataattcgcattgtggaacaacaaatggacacataaaagcaaccggaggagcacatcaaaagctggcagtaaatcatagaaaccaaatgaacaaaaataaatccaattaaagatgctcagagtgacacaacattgtgtttaatttgtggttagttaagttgaggtgtgaatacgtataaggtgttgccatgggcgggagactcaattatatttctattgaggcctgattatgacgtatctattatggttttctaaccttgagattcaaactattcgttattggtttggtaggtttataatgattaagaagtaatttattgttatgttcaagagatcaagttgattaaatataagatttgagatactaaggattggggtgaatatttaaacaaaatatgtataatgatcctagttttgttaaactaatttcttcgttttcttcttgatcttgcagagaaacgctcattctccttccggctgcgtcgatccttcggcgacggtggtagcaccaacagccgcaatagcaacaacaacagcagcacctgcaccaaccacaacaaccagaagcgatgcagcactccgctgacgccgacgagcaccagcacgggtcgactggaggtgcctggagcggccagcgtgagccgccggagcagcatctacaagaagccggacaagaatgacggcggacagatccatctcattccggacgtggagctgccgctgatgaccttcgccgaccagtacaacatagagaagacgctggccgagggctgtttcgccaagatactgctgtgccggcatagacccaccaatacgctggtggtgctgaaggcggtgcacgccgagctgaccacgatcaaggagttccagaaggagttccactacaactacgagctgtcgcatcaccatcacatactgagcgcatatgcggtggctttccagacaatggactactacgtgttcgccatggagcacgccccctacggcgatctggcctccaacatcggacccaacggcctgcacgagaacgcctgcaaactgatctcggagcagttgagctccgccctcggcttcatgcactccaagaatctggtgcatcgcgacctgaagatcgaaaatatcctggtcttcacgccggactttacgcgcgtgaagctgtgcgactttggggccaccacgaagaagggtctgctggtgcacaaggtgaagcacacgtggaccagctgcgtgccgccggagcagctggagctgatcaagaacgaacgcttccagtgcctgcccgtcagcgattcctggcagttcggcatcctgctgtacaacatcctcaccggcaatcctccatggcagtcggccgattgggtgaaggaccagtcctatgccaacttcatgaagtacgagcagcgcaagaccaccaaagtgccggacaatttccggcgcttctcgccgcggctgatgcgctgcttccggaagtatctgagccacgatcccgaggaccgctgcaagatcaccgaggtggccaagtatatgaaggaccgctgggtggagtgtcgcatctccacctccaagtcggccaccctcatctcgcccaccaatcacgaccaggactcctgcatctacctcaaccagcgggagggtcgtctctccggggatgagaacaagctgcgcttcaagcggatgatgtccacctacggtctggatatacccatcgaccaggcgatggtgcggcggcgggtatgggactggctctccacctgcgacgccaactttgatccggacgtggagagtctgcacgcactggatctgttgcagtagattaagataaatctctagcaaagaaatccccccgagcaaacggaaaacataaatatccttagaaacaattttggatttttccaaagatttttgaaaacaaaaaaaaaaaaaaaacaatgaaatcgctgtgtaaataagacgatatcgcccaattagaaagcggaacagggatgtatatcatcatcctgaacggaaacggtttgaatttgtggatctataagatcgtttttgcagagcagagaagtcactgctcgacggttttttctgttgttctgcgagtgcaaattgccagaactgaaattaagtataactttatatagatgaattttggtaaaactaagtagtaagaatttataggataatacaataaatcccggagatcaaaaaagaaaaaaaaaaaaaaacaaaacacgtcaacggataactttccagtagtgttacccttctagtcttccgctcgatgattttcgtaatactctctatgtgtgtatggatgtagttttttaagtgtactataaataatgtgtgatttacgcgttacttattttatgtgtccgggatacaaactactgcaattatctagaaatatacgttaaagatatgtaaggagtgcccctggcgcattcacgaccaattattagatcgttaagaattgttttatatctgtcatagactatatgtgtatttatgtagttatctctataatgatcccacactgaaacgattttgtacatacttttttttagttgcatacgactgtcaaaatgatacttatatgtctttaccagttaataccctatgtatacctataaaatgctaaaaatatatagtgccgtaaactgagtttatttaaaaaacgattctttcaatatactcgttaacaagtggaatccagtttccacattttaccacatgttcattagagattttgccaaacaaatatgctcataatctccatgcgagattggcaaaacaatgcggcttctggagaagccaccta

SEQ ID NO: 23420 - DNA, 1865 bp, DROSOPHILA
actcctggcgtgcggacgtgaaagtgccgtgatttctacgttgatttctgtcgcgtctttcgctgcttgtgttttgtgtattttccccacttattctttgcgcctatactgcccgctactttagtatccgttcggaaaaaacaaaaagaaaatcggggcgagcaaacaagtcaactaaaatatcccattcatcttgttctgccaacttatttctaattgtgaagcaaccttgaatttccacatcgcgctggaaattgctaaacaaaaacagcgcgcaaaatctattgtttaccgcaatactagtcaattaccagcgattttcgcctattgcaatgtgactttccaagtgcgatcgcagcttttttgacgttttgtttggccaagaggacactttcaaatatcggtaactaacggtattcaataaacgcgcctaataagtgcaagagaggattaaggatttgggattactgatcagggaaaacaagtcttcagaaatgggcactatcgagaaacgctcattctccttccggctgcgtcgatccttcggcgacggtggtagcaccaacagccgcaatagcaacaacaacagcagcacctgcaccaaccacaacaaccagaagcgatgcagcactccgctgacgccgacgagcaccagcacgggtcgactggaggtgcctggagcggccagcgtgagccgccggagcagcatctacaagaagccggacaagaatgacggcggacagatccatctcattccggacgtggagctgccgctgatgaccttcgccgaccagtacaacatagagaagacgctggccgagggctgtttcgccaagatactgctgtgccggcatagacccaccaatacgctggtggtgctgaaggcggtgcacgccgagctgaccacgatcaaggagttccagaaggagttccactacaactacgagctgtcgcatcaccatcacatactgagcgcatatgcggtggctttccagacaatggactactacgtgttcgccatggagcacgccccctacggcgatctggcctccaacatcggacccaacggcctgcacgagaacgcctgcaaactgatctcggagcagttgagctccgccctcggcttcatgcactccaagaatctggtgcatcgcgacctgaagatcgaaaatatcctggtcttcacgccggactttacgcgcgtgaagctgtgcgactttggggccaccacgaagaagggtctgctggtgcacaaggtgaagcacacgtggaccagctgcgtgccgccggagcagctggagctgatcaagaacgaacgcttccagtgcctgcccgtcagcgattcctggcagttcggcatcctgctgtacaacatcctcaccggcaatcctccatggcagtcggccgattgggtgaaggaccagtcctatgccaacttcatgaagtacgagcagcgcaagaccaccaaagtgccggacaatttccggcgcttctcgccgcggctgatgcgctgcttccggaagtatctgagccacgatcccgaggaccgctgcaagatcaccgaggtggccaagtatatgaaggaccgctgggtggagtgtcgcatctccacctccaagtcggccaccctcatctcgcccaccaatcacgaccaggactcctgcatctacctcaaccagcgggagggtcgtctctccggggatgagaacaagctgcgcttcaagcggatgatgtccacctacggtctggatatacccatcgaccaggcgatggtgcggcggcgggtatgggactggctctccacctgcgacgccaactttgatccggacgtggagagtctgcacgcactggatctgttgcagtag

SEQ ID NO: 23421 - protein, 456 aa, DROSOPHILA
MGTIEKRSFSFRLRRSFGDGGSTNSRNSNNNSSTCTNHNNQKRCSTPLTPTSTSTGRLEVPGAASVSRRSSIYKKPDKNDGGQIHLIPDVELPLMTFADQYNIEKTLAEGCFAKILLCRHRPTNTLVVLKAVHAELTTIKEFQKEFHYNYELSHHHHILSAYAVAFQTMDYYVFAMEHAPYGDLASNIGPNGLHENACKLISEQLSSALGFMHSKNLVHRDLKIENILVFTPDFTRVKLCDFGATTKKGLLVHKVKHTWTSCVPPEQLELIKNERFQCLPVSDSWQFGILLYNILTGNPPWQSADWVKDQSYANFMKYEQRKTTKVPDNFRRFSPRLMRCFRKYLSHDPEDRCKITEVAKYMKDRWVECRISTSKSATLISPTNHDQDSCIYLNQREGRLSGDENKLRFKRMMSTYGLDIPIDQAMVRRRVWDWLSTCDANFDPDVESLHALDLLQ

SEQ ID NO: 23422 - DNA, 7807 bp, DROSOPHILA
agtaaaaaacggtacttcttttaggtgtatgaccatttttggccaagttattctcaaaaaacccaacttaaatattcatttttttacccaaaatcattttcctaatttttgtgaaaaaatattcggtattttgatcaaaacgttggaaataatggcccaaatatggaatgtcatacctcgttgagtttgttttttgattcccaatcgatttgcattcaaattttgaaaatctaggttttttcaattttttgcaaattttgattacaaaaaatgcgaaaatttggtcaaaaattattttaacggagtccgtcaaaaagtgatatggatggttagaattggtaattaggagtaaaacgcggtactttttttagatgtgtgaccatttttggccaagttatactccaaaaacccaacataaatattcaatcaatcttaattttttcaccattttcacacaaattatgattatgcaaaaatgatatgcaaaaattagttccaaatggattttcgaaaaattgtcatctgttgtcaaagtgatgacaaaatccgttcaaagtaattgaatacccgattatacactatttgtaccatggatataccttatttgtagcaacttcactcacctgctggtactcaaggatgttttggcgctggatgtgcgccagcttgggatcgccgctgctgctggcggcgaactgggagtaggtctccgcgttgtacgggatgaggaccatggtctggtggtagttgcgcagcgggggaggcgactctggccgccgggtggggctcctggcgaagtggctgctgtagctgctgtgcttgctctgctcgatggccgtggcggtggcggtggccgttgccgtcgccgtgacactctgacaattttgcgcagctgcagcagcggcgtacagcagtgacgcatcatcggcaccgccggcggacgtggcaccctgctggatcatcgtctggcggaacatggtgccggcgggcagggtctggtagtaggtctgctgtatggcagccgcatccatggggaagcgctgctgttccccggtctcgctgtagaagctccacgttcgctgctccgttttctgcatcgcggcggccatttgttgctgcaattgctgctgatgttgctgatgcaccgcctgctgctgctgttgctgctgctgctgctgttgttgctgctgctgctgctgcaagttctgtggcacattctgcggcgagggattctgcttgagcgtattgggcatggcataacccttgaccgcatgctgcaccggctggctgttgaccaccgtgggtatcgccgcactaagctgctcctgcatctgggccaggatctcgttggtcgaactgaacttgggcttgatgccccgcaccgagggacgcttgttgaacccatagtcgttctgctcgtcatcgtcgctgctggcctgcgattgactgggctcggagcccgctcccgtgtaccgtttcttgagctgctcggtccgcttggcgtccgcctgggcaaaggcggccagttcgtcctgctcctgccgcccggcggcctcctgacccggtgttccggcaatcacatcgggtgccaccttgcgagcatcctctccggcaccaagtcctcctgctaccacaccacctccggcgccagccaatccttgggccaatccctgtgccgccattgcagccgcatgctgggcagcgggatctccagaggcggcagcggctgcagccgctcccagtagctgtcccatattgaagtcagctgccgcagcggcggcggcatagtgggcggcatgcgcatgcgtgtgggcgtggccatgggcatgcggatgagccgcagctgcagcggccaatgtgtagtaggaggatagatcgtccttatttccagccacacaggcggtcaggggggccaaagtggaggagaggaactggcgcttcggctccgtttggcggggcggcgtgcggtgaatctgcgtgtgcaccaccggcacctggatgcccatgcccaaatccggagcagcgggacaacggcactcctgcaaagaatatagcttaagaactttgtatgagctagaaaggaagagcgctcacctgtggaatgattactatgggattctcctccatctccattatcttctcctgcttcttatcgcggttgaagatgtcagcgatcttcttgtaggccgacgatccgctcgaggagctcgacacggagctgctcggcgagaagctcttctcgccattgacgaacttgtgagcttgtccagaaccaggcaccggattgggattctcctcgccggcgggactgttgcgctgggccaactcatcggcacgttcggccacagattcagcatcctcgtccacagctcgctgcagttcctcggccagatcctcgtcgatgtcacaggtcagctgcttgatgcgctcctccagcgaaatgtccgatttgacagccttttttctaaagagaaaataagttcaatgaaattacttagttaccttgtgaatatctatcacttacttaatcagcgatcgtcgcagtatattgcgctccatgctcctccgcaaggtgtcggagtcaccacagcttcccggcaggtgtgtgaccaggcagccagcccgcttggactcatcgaaagcccgcagtgcctccgaggtgagcactggtgcctgatgagccgagacgctcgggaagagttggcgcaccgccgaattgggacgcagggcgttgttgaagagcgtcgagtgtttcttgatcgggatcagctcgttgatctgattctcactgtcgtccagatcaccggccagggattgagcatcgctatcggtgccggcattcgcctgatcctcggtcacaaagcgcaccgaacgcttggtgccaccgctctcgtcctctgatgtggtattgttctggtcatccgactgctgcttgaaatggaaaacatggaatattagtagatatccctcgacaggtaagcccacttagtaactcacctgtgagatcgagtcctgcttccatagcttgccgcccttgagaatgccgctgatctgcgtgggtgaggtctccttgggcggaatgggtggcggtttctgtgcctcgaactgttgctgttccgttgcagatactgatgcggatgtggatgtggatgcgtttgacgctgctgctgctgcggcggctgctgctgctgctgttgcactcgccttggccggcaaggcgggcggtaatgcatcagctccagtggcggacgcagctccaaccgttggcgcggcagtgccaggtgcgggggcggatccagcggttgccacatcctcgtgcgcctcgcggatgatccgacgctcggtcactgtggtcatagtggtaatggtttcaacaacaaatcgcttatttttcgaggactgatggctactgatggccgtagctggaactggaacggggaccgggacttgggcgactgttccatgggcagaactggagcctgagccggagatggatccggaactggccttgctactgcccgaatcctttctagctttcatcactacacgtacaagcagatagcgccacgcaaaaccattggaaggcattgttttttttttttgttttaaaattgagaatttttattggaacattgagatcgatcgatgtcgacatggagatcgtgaataacgaatgcttgatatgtacacgataatcgaataattaaagaagcgaattatggggctgatactcaaatactatacatatcttgaatggaatcttatttttgaggtaaggcgttttatgagaaatatacacacattaatagcattttaattggggaaactggattcaaaagcttaagctgcaaatttatagcttctattggttgtcctttcacattttctcgatcaacatattttcaaaataattatagctaaataagctaatattataataaagtttagatatgtgtcaagcattttgggcatttcaaagccgttaatcgtagatttctacattgttttgggttaaaatgaaaaaaactcaatgtccaatgttcaatggccaatgctcggatgggaaatttttaatagaccttgatggcatcccaatcgaaatcgaagatcgaatatgaaatgtgcattatggccatgttgcgcttgcttgctgtgcataaatgcatgataaagccaatatgaaaacttggattcggatttggatttggatatggataggttcggggctctggctgatatcttacctccagtgggcgatggcttgtactgcgattgcagaacgtatttgggccgctcctcgccggcgatgatctccttctgggtgatccggcgctccggggagctggtgtgcaacggcagaatggccacagcgggcacacccagcggtgtcatctcctccggacactgtggggagctgcattctgtaatgtgaaatgaattaattagatacagcgagttaaagaatgataaaagtcataaagtgtttggccatatgtttatatttcaaccatgataaagttatcatagttattattggcatgagttagcagtaagtaacatgcttttattccaagttaagttagctttcaattatataattaatacacagatagggcttaaagtgtggacacctatgcatggctacctcaagttactatatcacatcaaataaatgataaattggagctcagattcggggaacttccgcctgttgcttctgtagcggaagtgcgcttgaaggatcggtatgggcatagcttttgagtggccagctctcagttttcgaagttcgaaatgttttgggcatttgtatagggggcaatctgtgggcttgtcgctgtgggcttgtcgcattcgcggttcgttaggcgcaacaattaatgagtagtgctccctacggagcgggaagaggaaaaccccggcaaatgccttgcccggcaaaaaaaaaccagaatacgaatataaaataaacaaaactctcccctatttcccccctattttctgccgcttcccgtttgtctctttgacagccaataaagcgtgaccaccgacattaatgcaaatgcctgccatacgaaacatccttttagggagttagctatccgattcgattcgattcgattcgaaccgaagtcaagttgccgtaaatcaatcaatagaaccgattcgatgaaaatgcgggcgacttgggcaaacaaaccccgaaaatgccattcgaattatttatggcgcaaacccgaaactttagcgatttcatttggttgactaaatgctttcgttgccgatacggcgtcaccatggaattataccaatagttatggtattattatatggccaaagtggcagtcgttagccattgatgggcatatcggatataccgaaaggtgttttttatttactttgattaattgccaagttggagctgagtaaaagctaagaatatttaagtaaatagtgccgtggacgctgagcaaacaattccatcatgcaaccatttcgagtccaataactttgacgatgtatacatatacatacatacatgttaaggaccttggagttgtgtatatctgttgtgtgctctttttattgacactccactgtccactgcctgtctgaacgtctgtgaacccgactgcccagccaacaagcactctcccccaacccattggccatccaactttaccgaattaaattaactagaaaattacaagagcaagtgcagcgaaccagcggcggcgtagcaggaagcattaaaaatggcgtccaatttaaaggaccccgaggccgttggtcgcaggacgagaagctgctccccgagccaagctgggcaggatgtcaacgggcaacgaatgtttgcataaataattcataattagattacacaaaggcaaacgaaagcgtttgtgaatgaaaagaacgcaacgcgtcctcgttcccgcgggattcccactaattgcattgcggcatggagttggactcggagttggagttctagttggatgtggatgtggatgtcgatggtgtcatgtacccccacaaaatacggcatctagtcatgtataacagagctcaaatacggtcgtaacccttgattttgtgctctatgtgcaaaccaaccaacagctgtcacatgacaagtttcacaatatatgtagatggaactactacccatgaggcaccgttttctctcagtgcagccactcacctgcttcctggagctgtttggccgcacattcggcgcactcggcacactcggtgcaaacgccctggaggtcctcctccgactgctgctgctgcatggctccatgatgcggctgctgatgcgactgttgctgctgttgttgctgttgttgctgctgctgctgttgctgttgctgttgctgctgctgggcagtgccaacgggcgggggtggtggcggtatctgaccgcttgtggtgttgcgggcggccagcattgcggcacgctgctgctgcagccgctggatgacctgcagctgctgcaggtgctgcgccccaaagatgtgaccgctgagggcgccgccgagcgtgttcttcagactgctgtccttgtagccatcgggcggactgagtgccgcatcgtcgacgaactcaattggcggctggtatttgggactctaagacaaaaacaaaaaaggatgataaacataaccaaattagtcggaggtggtcaggctaagtgaataatgctcgtaagccgagttgcatcaccgcaaattaagctaattgagttgtttggtcgtcagcagcatcgtgtccttgcgcacatgcacgtacgtgtatgtgcatcctatatgcaagtgcttgtgcatggacaggatctaagcactgggatgacgaagtgggcgccataaatcagcgttaagcccgtgctttctgctcctgccactgtgtaatatatccatgcccctaatggcatagttagttagccgcatagctgatggatatatttcaactgctgatatggcgaagcctacaatgcgagtggagtgcaactaaaggcgataggacacacttaacgatatgggaaattacttattttcattttcagtatatactttattttatgaaaaccggctctatacttaatatacctcatacactccacaagtaatcttttacctttccataatatatcatttaatatgacaccagcaagtaatgcacatagttccctgtaatctgtgcacttttccatctgaagaagtgtcagcggaagtaacaaaaggccaggaacttaattcccatggaacagtaggaaaagctggaaaagagttgtgctgcacatgtaaaagttgccagcgatttcgaactccattctgccggaattcccccggcaactgccaaaatcctgtttatttgcaactgcagccagctgcaatgtctagacaaggatctcactgttcttcttctatgcattttcaatttttttcgtatttttttggggtgatggggggcgtcggtagttctgtcataactctgccttgagaggcgaaaacttttgcataaatacgccgtattctttctccggccaaggatgtggctagctaactgtctgtgtgttatgcaacgtgctcggcaaacttgttacacacactaaatgcatattaaactcttcagagagcccacacactcacaccaacgcacacaccgacgcatcgaggaagggacatgctcaagaagcgccaagtcaagtgcattgggcgcccacactgaggaaaataaacacaacaaaaagtggccaaagtttacctaggcaaagcgagcaagaagtgagctacaaaacact

SEQ ID NO: 23423 - DNA, 3402 bp, DROSOPHILA
atgcacatacacagtcccaaataccagccgccaattgagttcgtcgacgatgcggcactcagtccgcccgatggctacaaggacagcagtctgaagaacacgctcggcggcgccctcagcggtcacatctttggggcgcagcacctgcagcagctgcaggtcatccagcggctgcagcagcagcgtgccgcaatgctggccgcccgcaacaccacaagcggtcagataccgccaccacccccgcccgttggcactgcccagcagcagcaacagcaacagcaacagcagcagcagcaacaacagcaacaacagcagcaacagtcgcatcagcagccgcatcatggagccatgcagcagcagcagtcggaggaggacctccagggcgtttgcaccgagtgtgccgagtgcgccgaatgtgcggccaaacagctccaggaagcagaatgcagctccccacagtgtccggaggagatgacaccgctgggtgtgcccgctgtggccattctgccgttgcacaccagctccccggagcgccggatcacccagaaggagatcatcgccggcgaggagcggcccaaatacgttctgcaatcgcagtacaagccatcgcccactggagtgatgaaagctagaaaggattcgggcagtagcaaggccagttccggatccatctccggctcaggctccagttctgcccatggaacagtcgcccaagtcccggtccccgttccagttccagctacggccatcagtagccatcagtcctcgaaaaataagcgatttgttgttgaaaccattaccactatgaccacagtgaccgagcgtcggatcatccgcgaggcgcacgaggatgtggcaaccgctggatccgcccccgcacctggcactgccgcgccaacggttggagctgcgtccgccactggagctgatgcattaccgcccgccttgccggccaaggcgagtgcaacagcagcagcagcagccgccgcagcagcagcagcgtcaaacgcatccacatccacatccgcatcagtatctgcaacggaacagcaacagttcgaggcacagaaaccgccacccattccgcccaaggagacctcacccacgcagatcagcggcattctcaagggcggcaagctatggaagcaggactcgatctcacagcagcagtcggatgaccagaacaataccacatcagaggacgagagcggtggcaccaagcgttcggtgcgctttgtgaccgaggatcaggcgaatgccggcaccgatagcgatgctcaatccctggccggtgatctggacgacagtgagaatcagatcaacgagctgatcccgatcaagaaacactcgacgctcttcaacaacgccctgcgtcccaattcggcggtgcgccaactcttcccgagcgtctcggctcatcaggcaccagtgctcacctcggaggcactgcgggctttcgatgagtccaagcgggctggctgcctggtcacacacctgccgggaagctgtggtgactccgacaccttgcggaggagcatggagcgcaatatactgcgacgatcgctgattaaaaaaaaggctgtcaaatcggacatttcgctggaggagcgcatcaagcagctgacctgtgacatcgacgaggatctggccgaggaactgcagcgagctgtggacgaggatgctgaatctgtggccgaacgtgccgatgagttggcccagcgcaacagtcccgccggcgaggagaatcccaatccggtgcctggttctggacaagctcacaagttcgtcaatggcgagaagagcttctcgccgagcagctccgtgtcgagctcctcgagcggatcgtcggcctacaagaagatcgctgacatcttcaaccgcgataagaagcaggagaagataatggagatggaggagaatcccatagtaatcattccacaggagtgccgttgtcccgctgctccggatttgggcatgggcatccaggtgccggtggtgcacacgcagattcaccgcacgccgccccgccaaacggagccgaagcgccagttcctctcctccactttggcccccctgaccgcctgtgtggctggaaataaggacgatctatcctcctactacacattggccgctgcagctgcggctcatccgcatgcccatggccacgcccacacgcatgcgcatgccgcccactatgccgccgccgctgcggcagctgacttcaatatgggacagctactgggagcggctgcagccgctgccgcctctggagatcccgctgcccagcatgcggctgcaatggcggcacagggattggcccaaggattggctggcgccggaggtggtgtggtagcaggaggacttggtgccggagaggatgctcgcaaggtggcacccgatgtgattgccggaacaccgggtcaggaggccgccgggcggcaggagcaggacgaactggccgcctttgcccaggcggacgccaagcggaccgagcagctcaagaaacggtacacgggagcgggctccgagcccagtcaatcgcaggccagcagcgacgatgacgagcagaacgactatgggttcaacaagcgtccctcggtgcggggcatcaagcccaagttcagttcgaccaacgagatcctggcccagatgcaggagcagcttagtgcggcgatacccacggtggtcaacagccagccggtgcagcatgcggtcaagggttatgccatgcccaatacgctcaagcagaatccctcgccgcagaatgtgccacagaacttgcagcagcagcagcagcaacaacagcagcagcagcagcaacagcagcagcaggcggtgcatcagcaacatcagcagcaattgcagcaacaaatggccgccgcgatgcagaaaacggagcagcgaacgtggagcttctacagcgagaccggggaacagcagcgcttccccatggatgcggctgccatacagcagacctactaccagaccctgcccgccggcaccatgttccgccagacgatgatccagcagggtgccacgtccgccggcggtgccgatgatgcgtcactgctgtacgccgctgctgcagctgcgcaaaattgtcagagtgtcacggcgacggcaacggccaccgccaccgccacggccatcgagcagagcaagcacagcagctacagcagccacttcgccaggagccccacccggcggccagagtcgcctcccccgctgcgcaactaccaccagaccatggtcctcatcccgtacaacgcggagacctactcccagttcgccgccagcagcagcggcgatcccaagctggcgcacatccagcgccaaaacatccttgagtaccagcaggtgagtgaagttgctacaaataaggtatatccatggtacaaatag

SEQ ID NO: 23424 - protein, 1133 aa, DROSOPHILA
MHIHSPKYQPPIEFVDDAALSPPDGYKDSSLKNTLGGALSGHIFGAQHLQQLQVIQRLQQQRAAMLAARNTTSGQIPPPPPPVGTAQQQQQQQQQQQQQQQQQQQQQSHQQPHHGAMQQQQSEEDLQGVCTECAECAECAAKQLQEAECSSPQCPEEMTPLGVPAVAILPLHTSSPERRITQKEIIAGEERPKYVLQSQYKPSPTGVMKARKDSGSSKASSGSISGSGSSSAHGTVAQVPVPVPVPATAISSHQSSKNKRFVVETITTMTTVTERRIIREAHEDVATAGSAPAPGTAAPTVGAASATGADALPPALPAKASATAAAAAAAAAAASNASTSTSASVSATEQQQFEAQKPPPIPPKETSPTQISGILKGGKLWKQDSISQQQSDDQNNTTSEDESGGTKRSVRFVTEDQANAGTDSDAQSLAGDLDDSENQINELIPIKKHSTLFNNALRPNSAVRQLFPSVSAHQAPVLTSEALRAFDESKRAGCLVTHLPGSCGDSDTLRRSMERNILRRSLIKKKAVKSDISLEERIKQLTCDIDEDLAEELQRAVDEDAESVAERADELAQRNSPAGEENPNPVPGSGQAHKFVNGEKSFSPSSSVSSSSSGSSAYKKIADIFNRDKKQEKIMEMEENPIVIIPQECRCPAAPDLGMGIQVPVVHTQIHRTPPRQTEPKRQFLSSTLAPLTACVAGNKDDLSSYYTLAAAAAAHPHAHGHAHTHAHAAHYAAAAAAADFNMGQLLGAAAAAAASGDPAAQHAAAMAAQGLAQGLAGAGGGVVAGGLGAGEDARKVAPDVIAGTPGQEAAGRQEQDELAAFAQADAKRTEQLKKRYTGAGSEPSQSQASSDDDEQNDYGFNKRPSVRGIKPKFSSTNEILAQMQEQLSAAIPTVVNSQPVQHAVKGYAMPNTLKQNPSPQNVPQNLQQQQQQQQQQQQQQQQQAVHQQHQQQLQQQMAAAMQKTEQRTWSFYSETGEQQRFPMDAAAIQQTYYQTLPAGTMFRQTMIQQGATSAGGADDASLLYAAAAAAQNCQSVTATATATATATAIEQSKHSSYSSHFARSPTRRPESPPPLRNYHQTMVLIPYNAETYSQFAASSSGDPKLAHIQRQNILEYQQVSEVATNKVYPWYK

SEQ ID NO: 23425 - DNA, 4622 bp, DROSOPHILA
agttcaaggagtgcaatctaaacgacaccttctgctattctgccaactatggtgggtatggtttagggcttagtggttttaaagaggggttccttaatataaaggggttacctttctatctgggtagataacttcaaaagtgtgcgctgtgatcagtgcctgcccaattgctatgatgtcacctactccacgctgtcctacaaaaccgatctcaaccagcataagtactcagtcagccgcttctagtaagtaataatatggataacttaatgggttattgactggtttttattccacagctctccggaattgcttaacaacgacagttttgtgctccgggtctatttggccaaacaagtggttccagttatccggaaagtgactgttatgtcttggataggactattatgtgagtggataagccgtctcaaagatgaaatattttaattgcactcatttcagcggatttgggtggcatctttaacctctgcctcggactaagtatgatttcagtagttgagttcttttactattgcacatatcgcttatacataaactatcaactgcagaaggttcagcaacccagaaaggcatggcaataaagcaaatacaaaaaaaaagaaattatggtatcttagaaaaaatttcgaacataggcgggaaattagaaattatcgataaaagggctgtcgcatcgataacgagctggtatgtcaatgttggtattctttcacaactgatttttacacacgtttggtatatggggttagtagagatgagagtgtttcaaatatcagcaatgttaaaaaaatcactggcattttatctttctgacgaaatgattcgagctttgcagttacctttcagaatttgctcgcataattaaaagtatgtttcctttcaatgactatcgcataagtatacactgactgtgcgcatcgatagccacaacaatcgctgtgcggggggtaggaaatcatcgataccaatgcatcgatagcggtcaccgcttctgttggactctacattttaatttgtttaacaaattcttgggccagtacgcaagaaaacgcggcggcgtaaattacatttttagtacaattctcactgaaaaccgcgcaaaatggccgaagttgaagccgtgcagataattgcagaatctttgaagcaacaggtaagaggatcacctggtcgtccagccatttgtccgacattttggcactgcacttttctgcacttgggatattgcccaactactatatatctcatttgtgaacgggggccgcggaatctgtggcgctggcaagaacaatggagtggtctcttatcttgaggcacctgtttgttgtgcaaagttcaaaaacacttggtaactgtaggtgtggttgttgttgttttgttggtgagaatgtcccccgattactccggttaataaaagacggagcggatttgataaagaccatgttccaaaggtttgggaccacgacccaaacacattggtgcttgcagctgcgataatcgccggggggcagattaaaatcaataatactttaaccggattccgggcaaatcacttaagaacgtgtttgcacattggatagtgatgtgctctataaatttccatagttattgacttgatttattgattgatggctgaatagataatctaaatatgtacactgtattcctaagggcgtggaatatgtctttggtatcatcggcatcccggtcatcgagctgtccatggccttccaggccgccggactgaagtacatcggaatgcgcaacgagcaagccgcctgctatgctgcccaggccattggctacctgactggaaagccgggagtgtgcctggttgtgtccggaccgggactgctccatgttacgggtaagaataaaataagactaagacattccagataggctaatcctcactaatccctctcactttaccatccaggtggcatggccaatgcccaggtgaactgctggccactaatcgttattggtggtgccaccaaccaggatcacgagggaatcggaggctttcaggagtgcccgcaggtcgaattgtcccggccgtactgcaagtacgctgcccgtccggccactgctgctctaattccattgcacgtggaaaaagcggtgcgctatgccacctatggacgccctggcgttgcctacctggacttccctggcaatatcttgcagtccaaggcccaggaggccagcatctacaaggcgctggcccatccggctcccccactagcctatcccccgcacgatgatgtgatcagggccgccaagttgttgcgacaggccaagcgacccttggtgatcgtgggcaagggttccgcctacgcccatgccgagaacacactgcgccacttcatcgagaacaccaacctgcccttcctccccactcccatgggcaagggcgttgtatccgatacggctccgcagtgcgtctcctcggctcgcaccctggccttgcaaaaggccgatgtggtgctgctcctgggcgctcgcctcaactggattctccatttcggaaaggctccacgctacgacaaggacgtgaagtttatccaggtggacatcaatcctgaggagctgcataactcggttgtggcttcggtggccatccaggcggacatccgtccattcgccgagcaattgtttgagcaaatgaacgctgttaacttccgcttcggctacgagcaggattggtggaagcagttggccgtcaagtgcaagcagaaccgcgacaccgtgcaaaagatgtctttgaacacggagacgccgctgaactactacgcggtgttccaccatctccgtgagctgctgcccaaggacacgatcattgttagtgagggagccaacaccatggatattggtcgctccatgctgctgaacgagcagccccgtcatcgcctggatgccggtacctttggcaccatgggcgtgggtcctggattcgccgtggccgccgcgcttttctgccgcgactttgcgcccggaaagcgagtcctgtgcgtggagggagacagcgcctttggattctcgggcatggaaattgagactatggtgcgctataagctgcccgtcaccattgtgattgtgaacaacaatggcatctatggcggcttcgacaaggacacttttgaggccattcgcagtgagggcgatcttacccaaatgtgagtgctagtagcttatcggtttatctggtacaactacttacggctaatcttatcttgcagcacaccaccatcggcattgggagttcaggtgcgctacgaggagatgatgaaaatgttcggcatgaagggctacttctgcacagagatcgaacagctgcaggcggctgtcaaggcggccaatcagctcaccgacaggccaaccatcattaatgtggccatcagcccgtcatccgatcgcaagccgcagtccttcaactggctcacagagtcaaaactgtagaataccattaaggtttaggtcttaagcacgatgttcaccattccgaaagttatattgccacgaatttttctgtatatacatgcaatttttgatacgccctcattattgttggctactcattaattgttggctcgctttagttcttcctctattccaaggtagtctaggaaccaggtgaagtccaccaggcgccctttgtgcaggaagggcaacttggggcagagctcaaaggcaatgttgagaggagcaatgtcgggcacttggtcgttgcgcatgttgaagaaggcgagaaagtcgcgcacctcgatttcgttctgtccgttgcgctgcagcaccatcagtatgtcctccaccagctccaagctgaagggcagccggcagcctcgcaaagtagacctcacttgaccttcactgatgtacggcttgcacgccggattaatgtggctcagatgatcgttcagctgatccatgccgttccacaaagctcgcttcagctccagttgggcggcagctcgcactcgattcctatcgcagctgggaggcattgcctgctcagccgagaaaaagcgacacacggtcacaatctcatggttgagcaggcaatccttggacagataggacaggagagtcgagcgcaacgtttcgaagctaacggcggtatagtcgccgaggtcaccatccggtttgcagcgcagcacaaactgcttgtaatccggacgcactgcctcgcgtatcttctgcatgattttttgaatgtccgctacggggaactgaaaatagaatgtatgcaaattattatagaattgcaactataacgatatatggatgatatttgattaaatagacattaagtaatttaattggttcagaacactgtcgataaattatacttacctcgctgggatgttgctccatgtacatcagcgtgaactcatcagcggaaacaatgtggaaaatgtgatccttaagagtcattgtgcgtcctatatagaagtcattggccctgtagtattcaggtcttgatgagctgtacatatcctgacccggcagtggcacacgtgcccttttaagaaattcgccgcccaggaagcccgagtttcgacgtgacgtctcatagatttgcaacgtgtcatcggcca

SEQ ID NO: 23426 - DNA, 1969 bp, DROSOPHILA
cggtcaccgcttctgttggactctacattttaatttgtttaacaaattcttgggccagtacgcaagaaaacgcggcggcgtaaattacatttttagtacaattctcactgaaaaccgcgcaaaatggccgaagttgaagccgtgcagataattgcagaatctttgaagcaacagggcgtggaatatgtctttggtatcatcggcatcccggtcatcgagctgtccatggccttccaggccgccggactgaagtacatcggaatgcgcaacgagcaagccgcctgctatgctgcccaggccattggctacctgactggaaagccgggagtgtgcctggttgtgtccggaccgggactgctccatgttacgggtggcatggccaatgcccaggtgaactgctggccactaatcgttattggtggtgccaccaaccaggatcacgagggaatcggaggctttcaggagtgcccgcaggtcgaattgtcccggccgtactgcaagtacgctgcccgtccggccactgctgctctaattccattgcacgtggaaaaagcggtgcgctatgccacctatggacgccctggcgttgcctacctggacttccctggcaatatcttgcagtccaaggcccaggaggccagcatctacaaggcgctggcccatccggctcccccactagcctatcccccgcacgatgatgtgatcagggccgccaagttgttgcgacaggccaagcgacccttggtgatcgtgggcaagggttccgcctacgcccatgccgagaacacactgcgccacttcatcgagaacaccaacctgcccttcctccccactcccatgggcaagggcgttgtatccgatacggctccgcagtgcgtctcctcggctcgcaccctggccttgcaaaaggccgatgtggtgctgctcctgggcgctcgcctcaactggattctccatttcggaaaggctccacgctacgacaaggacgtgaagtttatccaggtggacatcaatcctgaggagctgcataactcggttgtggcttcggtggccatccaggcggacatccgtccattcgccgagcaattgtttgagcaaatgaacgctgttaacttccgcttcggctacgagcaggattggtggaagcagttggccgtcaagtgcaagcagaaccgcgacaccgtgcaaaagatgtctttgaacacggagacgccgctgaactactacgcggtgttccaccatctccgtgagctgctgcccaaggacacgatcattgttagtgagggagccaacaccatggatattggtcgctccatgctgctgaacgagcagccccgtcatcgcctggatgccggtacctttggcaccatgggcgtgggtcctggattcgccgtggccgccgcgcttttctgccgcgactttgcgcccggaaagcgagtcctgtgcgtggagggagacagcgcctttggattctcgggcatggaaattgagactatggtgcgctataagctgcccgtcaccattgtgattgtgaacaacaatggcatctatggcggcttcgacaaggacacttttgaggccattcgcagtgagggcgatcttacccaaatcacaccaccatcggcattgggagttcaggtgcgctacgaggagatgatgaaaatgttcggcatgaagggctacttctgcacagagatcgaacagctgcaggcggctgtcaaggcggccaatcagctcaccgacaggccaaccatcattaatgtggccatcagcccgtcatccgatcgcaagccgcagtccttcaactggctcacagagtcaaaactgtagaataccattaaggtttaggtcttaagcacgatgttcaccattccgaaagttatattgccacgaatttttctgtatatacatgcaatttttgatacgccctcattattgttggctactcattaattgttggctcgcttta

SEQ ID NO: 23427 - protein, 568 aa, DROSOPHILA
MAEVEAVQIIAESLKQQGVEYVFGIIGIPVIELSMAFQAAGLKYIGMRNEQAACYAAQAIGYLTGKPGVCLVVSGPGLLHVTGGMANAQVNCWPLIVIGGATNQDHEGIGGFQECPQVELSRPYCKYAARPATAALIPLHVEKAVRYATYGRPGVAYLDFPGNILQSKAQEASIYKALAHPAPPLAYPPHDDVIRAAKLLRQAKRPLVIVGKGSAYAHAENTLRHFIENTNLPFLPTPMGKGVVSDTAPQCVSSARTLALQKADVVLLLGARLNWILHFGKAPRYDKDVKFIQVDINPEELHNSVVASVAIQADIRPFAEQLFEQMNAVNFRFGYEQDWWKQLAVKCKQNRDTVQKMSLNTETPLNYYAVFHHLRELLPKDTIIVSEGANTMDIGRSMLLNEQPRHRLDAGTFGTMGVGPGFAVAAALFCRDFAPGKRVLCVEGDSAFGFSGMEIETMVRYKLPVTIVIVNNNGIYGGFDKDTFEAIRSEGDLTQITPPSALGVQVRYEEMMKMFGMKGYFCTEIEQLQAAVKAANQLTDRPTIINVAISPSSDRKPQSFNWLTESKL

SEQ ID NO: 23428 - DNA, 3921 bp, DROSOPHILA
agaacatcaccacggtggcgctgaagagtggcgactgtgccgtggtggccacccaaaaaaaagtgaccgagaagaacatcgtgcctgaaacggtgacccacctgttccgcatcaccaaggacattggatgcgcaatgaccggacgcataggtatgaaccatagatactttaaattcttgtttatcccggcgtgattcgagtcaaattccagtcgagttagcacagagttatcccattgttgatatgtcccatgtaaccaagtagcgattcacttatgattgtgctaaaatcagaagaaatagcctgccagacattagggcaaaggcgtatagcgtggagccattttaaacgtagttttcacacggtgcttcaactagaaaagaggacatatcaacccaagagtgtcactaaatacttaaaattatttctctcccctagctgattcccgctcacaggtgcagaaggccagatacgaggccgccaacttccgctacaagtacggctacgaaatgcccgtggatgtgctgtgtcgtcgaattgcggatatcaaccaggtgtacacgcagaatgccgagatgcgtccgctcggctgcagcatggtgctgatcgcttacgacaatgaaatcggccccagcgtttacaagacggacccggctggctacttcagcgggttcaaggcctgcagcgtgggtgccaagactctggaggccaacagctatctggaaaagaagtacaagcccaacttgtcggaggagaaagcgatccagctggccatctcctgtctgtccagtgtgctcgctatagacttcaagccgaacggcattgagatcggcgtggtcagcaagtctgatcccactttccgtattttggatgagcgggagatcgaggaacacctcaccaagatcgccgagaaggactaagttctgtcccgctagctgtaattttgtcatattttataaagcctcttggatctatggttaaataaaaaatgctcttggcttgcattcaaaacaaaggcaaatccgaaaacgttttatttcttcttgtgcaccttaccgccgtatcgcatgacaaaggcatttacatcgaatttgcgacggcatccctgatagttcatgtacctaaccttaccgaagatagcccgctccttccagcccatgtcatggacgccgccaatggaccacatgcagcccacatagccgttggggtcgcgaccatccagactgtacttgtcgttcagcaggattgcgtactccaacgcatgctccggtgtcgctgtccattccagaatctttttggcccagtacatgcgcaaaaagccgtgcatctttccctcgcgtaccagctgcagttgcgccgagttccacaggtcgtcataagtgagagactaggaaaaaattataaaatcattttagtctcaaatcaaaagaaaaagaatccgtggtgaaccttttctagttcttctaagctgtagcagggatctcgcttgtccttgcgatgtgcatctagcgtttgatatgcccaagaacttagacctttaagactatcatagtgctcgttgtagaagcaaaagttatccgccagttcgcggcgcacaatggcctcctcgcaaaacgcatccgccgaggctttgtgttgtcctcgaaaccgctgcacctccagtgcacagcgctgagccgaaatatgaccaaagtgcagccacggcgagagtccggacaaggcgtctgccgtgggatcgtttcgtttgtcattgaaatggcgcaaacgacgactgcagaactcgtagagctgctggcaggctgctttataccccggcttggcccactgcacctcgtccacttccatgtcgcactgcagcgaagcataagcagctgaccagtccacggtattcacattcttgcagccagttccatgaggatgccgcacaactggtgggaatacgctgaggtactcccctagcttggagttgatcttgttgcggatggtacgcgcagcgtactcctgtttgtcggaggccacccacaaggggactacattgtgagcatcgacttgcaccaacggcacgctcttgggcagtgccttgcccacatcctcgacccattggcgtggcaaacgcagcggagcaaagtcacagactacggctccgatgtccttggatttcacaaattgtggtaacttttcaacagcggagcccatcagcaggtgaaacggtatgtcaagggcgcgacactgctgctccacctcctgcaggccgcccatcatgaatttgtagtgcctgatagtggcattcaggaatttgggaactaggcaaaataccacagttaagggtaattccagcttgagagccagacgctgggcaaagagcagggcccagttgtcctgtacgcgcccgtcgcgggacatccagtagacgacgccgcctaggctggattcctttacatcttcggttttggacagaacgcgcactcgtttctttcgaaaagagaactcctgtatgttggctgccgtgcagactcgctggtgttccaagtgggtaagaaactgctcgaagttttggtaatccggcttagaaaccaacaaagccttcgatgtggaggcctcctcatcgctgctttcctggtcacttttgggctcggagctggccttctcgttttttgctgcctttttggaaggacctgccttctgcgccttcgtacgcttcatcgcctgcagcggaagaacctgaacatgaatgaaaaatcgtgatttgatttttactaattcgatttaacccacaatcttgaatgattcgcgccaatatgaagcaagtgtaaacataactgtataacgatatggcgactctatcagctgttcaatgagagtgaaaattatgctagtagccgcactccaaatacacttcccttggaagagaaattattatgaattaacataaataaagaattaagtattatgtttaaatttatattagtagatttttttttggcataatattttaaggaaagttgtggctttcggttttgaaatacatttaactccagatgttcctatttcctaaacattccctaagatttcaatagtctcagtgccgcatacgatacacagcagttatcgattacaaaaagagtgcagatctgaaagcgcacgttgaaattaaaccgattctttactgttttataataaaatgttttatattgggaatgaaaatggacgaaactgtggacgaagcggaatttaatgccaatatcggccgtattgctcgatctacgcttttgcacgatgctgaacaatcgatccacagggagttgatcgactacgctgttgcgtcgtgccgtctgttttacatccaggatgcttcagcctggaaggagtggaacaccaggaacgaggctttcagggatctcactgccaaggaagtgtgccatttattcctaaccgaagttctgccccaactggacacctatcagctttcggagatggcccaaaaacgccttaagcttctggatctgcatccattcttcaggcgcgttgcccaaggctaccagtacactccggattgtgaccttgcagctcgatttgtagtccagcgccagaaacattttatccaacctgaagatatcaagaagattaaggtaagcatatctgtcggcgaataattttgatgccaatttactatgtacatgcataaatatgaatgtatttacttaaaattgctttcgttaataaacaataagtaccctttttttaatttaatttaatctatccttatgcagttatccgggcacttacacatcacattataatcttatatctcttactctcttaatccaatagtatgatattaatttttgctcgatttttatagaaaggcgattccctgaaaagatgccaaaccgtgctcatggaaagcgatgaaatggagca

SEQ ID NO: 23429 - DNA, 1805 bp, DROSOPHILA
cataataatttctcttccaagggaagtgtatttggagtgcggctactagcataattttcactctcattgaacagctgatagagtcgccatatcgttatacagttatgtttacacttgcttcatattggcgcgaatcattcaagattgttcttccgctgcaggcgatgaagcgtacgaaggcgcagaaggcaggtccttccaaaaaggcagcaaaaaacgagaaggccagctccgagcccaaaagtgaccaggaaagcagcgatgaggaggcctccacatcgaaggctttgttggtttctaagccggattaccaaaacttcgagcagtttcttacccacttggaacaccagcgagtctgcacggcagccaacatacaggagttctcttttcgaaagaaacgagtgcgcgttctgtccaaaaccgaagatgtaaaggaatccagcctaggcggcgtcgtctactggatgtcccgcgacgggcgcgtacaggacaactgggccctgctctttgcccagcgtctggctctcaagctggaattacccttaactgtggtattttgcctagttcccaaattcctgaatgccactatcaggcactacaaattcatgatgggcggcctgcaggaggtggagcagcagtgtcgcgcccttgacataccgtttcacctgctgatgggctccgctgttgaaaagttaccacaatttgtgaaatccaaggacatcggagccgtagtctgtgactttgctccgctgcgtttgccacgccaatgggtcgaggatgtgggcaaggcactgcccaagagcgtgccgttggtgcaagtcgatgctcacaatgtagtccccttgtgggtggcctccgacaaacaggagtacgctgcgcgtaccatccgcaacaagatcaactccaagctaggggagtacctcagcgtattcccaccagttgtgcggcatcctcatggaactggctgcaagaatgtgaataccgtggactggtcagctgcttatgcttcgctgcagtgcgacatggaagtggacgaggtgcagtgggccaagccggggtataaagcagcctgccagcagctctacgagttctgcagtcgtcgtttgcgccatttcaatgacaaacgaaacgatcccacggcagacgccttgtccggactctcgccgtggctgcactttggtcatatttcggctcagcgctgtgcactggaggtgcagcggtttcgaggacaacacaaagcctcggcggatgcgttttgcgaggaggccattgtgcgccgcgaactggcggataacttttgcttctacaacgagcactatgatagtcttaaaggtctaagttcttgggcatatcaaacgctagatgcacatcgcaaggacaagcgagatccctgctacagcttagaagaactagaaaagtctctcacttatgacgacctgtggaactcggcgcaactgcagctggtacgcgagggaaagatgcacggctttttgcgcatgtactgggccaaaaagattctggaatggacagcgacaccggagcatgcgttggagtacgcaatcctgctgaacgacaagtacagtctggatggtcgcgaccccaacggctatgtgggctgcatgtggtccattggcggcgtccatgacatgggctggaaggagcgggctatcttcggtaaggttaggtacatgaactatcagggatgccgtcgcaaattcgatgtaaatgcctttgtcatgcgatacggcggtaaggtgcacaagaagaaataaaacgttttcggatttgcctttgttttgaatgca

SEQ ID NO: 23430 - protein, 555 aa, DROSOPHILA
MFTLASYWRESFKIVLPLQAMKRTKAQKAGPSKKAAKNEKASSEPKSDQESSDEEASTSKALLVSKPDYQNFEQFLTHLEHQRVCTAANIQEFSFRKKRVRVLSKTEDVKESSLGGVVYWMSRDGRVQDNWALLFAQRLALKLELPLTVVFCLVPKFLNATIRHYKFMMGGLQEVEQQCRALDIPFHLLMGSAVEKLPQFVKSKDIGAVVCDFAPLRLPRQWVEDVGKALPKSVPLVQVDAHNVVPLWVASDKQEYAARTIRNKINSKLGEYLSVFPPVVRHPHGTGCKNVNTVDWSAAYASLQCDMEVDEVQWAKPGYKAACQQLYEFCSRRLRHFNDKRNDPTADALSGLSPWLHFGHISAQRCALEVQRFRGQHKASADAFCEEAIVRRELADNFCFYNEHYDSLKGLSSWAYQTLDAHRKDKRDPCYSLEELEKSLTYDDLWNSAQLQLVREGKMHGFLRMYWAKKILEWTATPEHALEYAILLNDKYSLDGRDPNGYVGCMWSIGGVHDMGWKERAIFGKVRYMNYQGCRRKFDVNAFVMRYGGKVHKKK

SEQ ID NO: 23431 - DNA, 3582 bp, DROSOPHILA
cttttcgcctctgattgtggccgcctttacaaagaacgaggtttgtggcgattctctagaaatcccgaatatccatcccattcatgaattttccatactccatagaacacaatcgatcagtggcactgggtgtttatcattggagccgctgcctacatattgcctgcgctgtttttctgggtcttcggatcgggtaaaatccagaagtggaacgaggttcagaccaccgagtcgcgagaggatattgtcaacacaaagttgtagtttgtgccctggcaatcacctgtgattatgtactttaagtattatgccataacgacgatgtgtacttctttatggagagagtcctattaaaactttagccgtgtatttattattaaccaatatggtttcatttcgcgcacgtgaattctgaatcacgagtcagttgagatcgaaaccagtttctcttagattggcataacgaccttaacctggtcggggaatatactctggcgaactggttgggggctctttgcagagtttgtttgctgattaggaactcatggttgaagaaacggaattgacacccgtaattagtcaaatgctaatcaaatttgaggacacttttagccaacaaattgccgtttttaattgcgtattaacgtcatgcccaacaagttgatagtaggttagcggcgaagtcaaaaacgcaatttataaggtgtgaaaattcattttaaaatcaaaattaaaagatttagtcatagaaattgagggaaataccagttactcaaaatatttattatatccacacatctcagagtattataattaatggttatagtgtacaagttaattaattcgaccaataaacttttagaatagttaacatacggctaatggtcacaagttagtcactccattaacctataattagcacccattattccaggcattaaggacactagcctggcctataaaagcaaggaagttgagcaccagctgcagacagtacaaaatgatagaatcgggaaagtggccaacgccaggaaaaaagaactccaaaggcgatgggagcagaaagcgtggaaaggatccaagtttgattaggacagccatattggccactttctgggagtacacggagcggaccaaggtgagcggcatgtggcttatgcgtcggaatcgtacctacggtctgtcccggttcatctggtcctcggtactgctgcagttgctcctgctgagcatctacctcaccctgctgctgtggctgaagttctactcctaccccattctaaacaccatctccaatgatctttccatcacggatgtcgcatttccgggcgttaccatctgcagtccgaaggtggtcaactcggagcgggtcgatcgatatgtcaagacgctgtaaggagctcggaagtaagcttagaataaccactaaaagttttccttcccttaaagtaaaattcccaaggagtacgacatggcagaggtgatcgctggatttgatttccttaacgccttcacggatcagagctttgagccgccgggacacgatagctatcgggccaccgatgccgttcttcggctgaacaacgtgtccatctgggaggcggccatggccgtcagtccgggttgcttcgattacgtgaagcgctgcttctggggccacacggagtttcagtgcaaccagagccacgagtacctatcgttcattcccaccactgcgtatctgggaccctgttgttccttcaactataatcccaggaacgccagcttcgtgcccttctcggccaacatttttgggatggatggcggactgaccttcgtgggtgcggagggcagcgagcggaacttaaacactggcctgatagtactggttcaccatcccatggactacgtgactgaggctgctgcctcggtgaccattaccgctcaatccgaaagctttgtggaggtatcgcccacggtgcagagctcctcggtggaggtgctggaactttcggaacgtaagagggactgcctcatctcgggcgacctgcagctgagcaactatcgccaggccgcctgccttctcgcctgccagacggaggccatcgtcaagaagtgcggctgccatccgtatctgctgcccatcgtgggcaacaagttcaaggagtgcaatctaaacgacaccttctgctattctgccaactatggtgggtatggtttagggcttagtggttttaaagaggggttccttaatataaaggggttacctttctatctgggtagataacttcaaaagtgtgcgctgtgatcagtgcctgcccaattgctatgatgtcacctactccacgctgtcctacaaaaccgatctcaaccagcataagtactcagtcagccgcttctagtaagtaataatatggataacttaatgggttattgactggtttttattccacagctctccggaattgcttaacaacgacagttttgtgctccgggtctatttggccaaacaagtggttccagttatccggaaagtgactgttatgtcttggataggactattatgtgagtggataagccgtctcaaagatgaaatattttaattgcactcatttcagcggatttgggtggcatctttaacctctgcctcggactaagtatgatttcagtagttgagttcttttactattgcacatatcgcttatacataaactatcaactgcagaaggttcagcaacccagaaaggcatggcaataaagcaaatacaaaaaaaaagaaattatggtatcttagaaaaaatttcgaacataggcgggaaattagaaattatcgataaaagggctgtcgcatcgataacgagctggtatgtcaatgttggtattctttcacaactgatttttacacacgtttggtatatggggttagtagagatgagagtgtttcaaatatcagcaatgttaaaaaaatcactggcattttatctttctgacgaaatgattcgagctttgcagttacctttcagaatttgctcgcataattaaaagtatgtttcctttcaatgactatcgcataagtatacactgactgtgcgcatcgatagccacaacaatcgctgtgcggggggtaggaaatcatcgataccaatgcatcgatagcggtcaccgcttctgttggactctacattttaatttgtttaacaaattcttgggccagtacgcaagaaaacgcggcggcgtaaattacatttttagtacaattctcactgaaaaccgcgcaaaatggccgaagttgaagccgtgcagataattgcagaatctttgaagcaacaggtaagaggatcacctggtcgtccagccatttgtccgacattttggcactgcacttttctgcacttgggatattgcccaactactatatatctcatttgtgaacgggggccgcggaatctgtggcgctggcaagaacaatggagtggtctcttatcttgaggcacctgtttgttgtgcaaagttcaaaaacacttggtaactgtaggtgtggttgttgttgttttgttggtgagaatgtcccccgattactccggttaataaaagacggagcgg

SEQ ID NO: 23432 - DNA, 1386 bp, DROSOPHILA
atgatagaatcgggaaagtggccaacgccaggaaaaaagaactccaaaggcgatgggagcagaaagcgtggaaaggatccaagtttgattaggacagccatattggccactttctgggagtacacggagcggaccaaggtgagcggcatgtggcttatgcgtcggaatcgtacctacggtctgtcccggttcatctggtcctcggtactgctgcagttgctcctgctgagcatctacctcaccctgctgctgtggctgaagttctactcctaccccattctaaacaccatctccaatgatctttccatcacggatgtcgcatttccgggcgttaccatctgcagtccgaaggtggtcaactcggagcgggtcgatcgatatgtcaagacgcttaaaattcccaaggagtacgacatggcagaggtgatcgctggatttgatttccttaacgccttcacggatcagagctttgagccgccgggacacgatagctatcgggccaccgatgccgttcttcggctgaacaacgtgtccatctgggaggcggccatggccgtcagtccgggttgcttcgattacgtgaagcgctgcttctggggccacacggagtttcagtgcaaccagagccacgagtacctatcgttcattcccaccactgcgtatctgggaccctgttgttccttcaactataatcccaggaacgccagcttcgtgcccttctcggccaacatttttgggatggatggcggactgaccttcgtgggtgcggagggcagcgagcggaacttaaacactggcctgatagtactggttcaccatcccatggactacgtgactgaggctgctgcctcggtgaccattaccgctcaatccgaaagctttgtggaggtatcgcccacggtgcagagctcctcggtggaggtgctggaactttcggaacgtaagagggactgcctcatctcgggcgacctgcagctgagcaactatcgccaggccgcctgccttctcgcctgccagacggaggccatcgtcaagaagtgcggctgccatccgtatctgctgcccatcgtgggcaacaagttcaaggagtgcaatctaaacgacaccttctgctattctgccaactatggtggtgtgcgctgtgatcagtgcctgcccaattgctatgatgtcacctactccacgctgtcctacaaaaccgatctcaaccagcataagtactcagtcagccgcttctactctccggaattgcttaacaacgacagttttgtgctccgggtctatttggccaaacaagtggttccagttatccggaaagtgactgttatgtcttggataggactattatgtgagtggataagccgtctcaaagatgaaatattttaa

SEQ ID NO: 23433 - protein, 461 aa, DROSOPHILA
MIESGKWPTPGKKNSKGDGSRKRGKDPSLIRTAILATFWEYTERTKVSGMWLMRRNRTYGLSRFIWSSVLLQLLLLSIYLTLLLWLKFYSYPILNTISNDLSITDVAFPGVTICSPKVVNSERVDRYVKTLKIPKEYDMAEVIAGFDFLNAFTDQSFEPPGHDSYRATDAVLRLNNVSIWEAAMAVSPGCFDYVKRCFWGHTEFQCNQSHEYLSFIPTTAYLGPCCSFNYNPRNASFVPFSANIFGMDGGLTFVGAEGSERNLNTGLIVLVHHPMDYVTEAAASVTITAQSESFVEVSPTVQSSSVEVLELSERKRDCLISGDLQLSNYRQAACLLACQTEAIVKKCGCHPYLLPIVGNKFKECNLNDTFCYSANYGGVRCDQCLPNCYDVTYSTLSYKTDLNQHKYSVSRFYSPELLNNDSFVLRVYLAKQVVPVIRKVTVMSWIGLLCEWISRLKDEIF

SEQ ID NO: 23434 - DNA, 7740 bp, DROSOPHILA
tatcgaaaattactttaaacaccgaatctcgtacagcttatatactatttacaccaataatatatcgcaggttgttgcttcatgaaaatgaagtgcaaaacacataaattcccttatatatattacacactttgtcatcctgctcgtttacccaagtttttatttatctttatataatgttataaacaataattgcaattaatttttcgaagacctgaattttacatcatcccaatgaagcgaattttgcgttaatggagcactataaaaatataattactagagataataatgatagcttctgcaaggctaaacttatatatcttagcagtatctcagcagagcgaatgtggacatttaatgactaaaaacaacgaaactatttaaattctttaattaacaattgatttctggacttttcgtccgatgactaaacttaagaaaacaaaattatgaaaactcttttaacttgaacaaaaattttatgcagtcaagaaccggtgctaagagatagtaacgtaaaaacggatgatcggacagacggtagtgctgactcggctcttgatactgaccatatatatatttacttcaaattcttaactctttcactgggtttcaaacttcttacaccaatcaaaataggttcgacacgggtaatagataaattttaataattataaaattattcttaaaacataaaatagtgcttaagcctagctaaaaaatttactaggaacttacataatggttctgctacaacaaatgtcaaataaaatctttataagacagtttcctatcaatatggtatggtttttactgtgaatattacttatagtagaaattcgcatatgttaaattcaaaaaaaaaaaaaaaaaccaaaccatttgacttatattataagattatacgggcctttggaaaaaaatcgctatcgattgatttgtaaaattatcgatgcccttaagtttctttatacatcgaaagttaaagtaaacatcgttttttgttccagctctaaacaagttttttttatagctctagctctacagtatttatataaataattcttgtatgtagtccaagtgtagaaaaaactaatttaaatgagctgttttcgagtatttctcttcagacaaaaacctgtttggaacaatttttaatcatgtgaaaatgtaattttgaaaaagatgtaccaaaaaaggaagacggtgttatgggcatatatgtatattttgtgtttttatatgtcaactatgttataccaacatatttgtaccggattgttaatcgtatcgaataagaatgtttccccgagagtaagatgtttgtgtatatatagagtttcttctgtctcctcggagagtgtgtcgtcactgtgtatgtatacagaaatgtcttttggtgtatacatacatatgtaattgtataatgctgttgggatgttttatcacttaaacatacaatttttaagaaatatattgattgttccgttataaattgaatgtcaagaactgcagatccgctatatattgttgatcttatgccatgttgattgtttatgactatgaatgttaaaaaatatattaatatttcgccaagccattaccaaccctgtttgtatagaaaatgtaccatacatgtattaaaatgtagtatcccacttaaattgataattggtttgccggcctgttaaataagtatttttgatcaatcagggtcgaatcaaatcaattaggcggtttccaaagttaaagcgaagtacttttaaaaatctcgtaatctgtcaggtggcggtagtcaacatataaatattgttgatcagcattaacagctgcttatttcgccgactgccgccgaacgcggcgcaaacaggatccctcagtcttaggctgtttgttttaaagatcaacttgtataaactttacataaaaatataaatacgcataatatgctactgttacattaaaatgttaacgcgtaatgatctcaaagcttagaatgagtagatataatatgtagttagattttgcaatgggtaaactaatttcagtcaggattgtcaacgaagtaaaggaggaaatgtcaatagaagaacacatattcttgatcagtttacacagccatgtcgatatattttttgtctttctttccgtttgccaaacgaccttcgaattgaaggttgaaatccttttattttgtagttcatatacatatacgggtcgaaaaagaatgccgttaaagtattgtttcttttttaactgcctagtaaactttttgacgagataaattgaaaagtataattccgctctaaaaaagtcgggttaaattttctaagaaccctaggtattatatcaatttcattttcagtatcaaaatttaatcttgaagaggtgaaaactaagtctacgttaaaaagaatactagacctaaatcacagatgaaaaagaaacaataatttaacggccttttcaatttaattttttcggattgttcctatatatgcatatatatttatatagtgatatatatgcacaaaagttgtattatttaactattgtcatcaaaaattaaattgcacctgactttataacgcactacatataatttactcatttataagaaatcttttaaagggtaaagtaaacaaccaaaccgcatagtagtctttagtctgttggtgcgcttcgtaactataccgtccaaagtgagaaaatcatgttacaagttacactgcagtttcagtgttttttttttatgcccagaattcgtacacggctacagcgttttgttgtaaaaattgttattttattgattgcagatggagcaagacactttggtgcggaatgacacagatgtagatgtagccagtcaacatattcttatttcggaggtttattgtatgcatttagcaagaaagctactaacgatctaacatcgaaaacattgctggcggtatgcaagaacgatcaaagcaactgcgtcttactgtttcctggacccagtcaaagtctcagattcatgacagttgtcaacgtcggagcatgttggcatgtaagaggcgcttaactaccagtaaagtgcttgaagactcacatccaccagtagctttccccaattgcaaatctcaccggcatcagcaacaaaaggagaaacataaagttcagctatactctggaaaacctttaagcattaagctgtacgtgccaggaagtattgagagtatcccaaaaattcgacataaggcgcttacgacaacgaataaacagcaaccagctatgcatcgaaagtctaagagcaaaagcaagtttcaaggttttaacaatctcaagccgctttattcaccgagtaaaagacaaccacccgagaagcattcatcagtactggtggaagcagggatagaatcaaaggcatcacggcattttgttggtaaaaagaggattaagaacagaaactgtttgttatcttcgcctcagccatcgccaatgagatgcaaaatgatgattccatttccaaagtttggtgccacatcctttgttacgttgctcactttaatttgtatggaaactgttttgctctccaccatgtctagttgcgccaagactttttacatgcattggaacacatcgaacagtatgtaagtactcaaatatagtggtatacttaagcagcggtattataattttattgaagttaaaaattgtagatttttatttttctctacaaatgtattatgttttattacaattattacagtttttaagtcagtagtatgaggattattattattcgtttaggggatttgttatttcaaataaaattttctttccaataataagactgctggccaataatatattgataaattaatccctaatgtcgcgtataaacacgctgggcttttataaactttcccagcaattagtaatgcacatgagtcattttcgatagaataactattgtcataatttgttgtgcaagtgagcagacgatgattaggcgatcccattgatccctaaggatcatgattagtaacttttttggtaatcgcatcagggcatatatggcctactcattttgtctggttttctctttctcgatataaacatatccatatcatctataccatccatattgcaatgggacattaagtttgttaggataatgttacttccaaaatcggacaacaaaccccaaaaacagaagacaaatgcacgttttcgtagccaaggcattaaacaataaagtctagatcagataaaaacaacccaattttccattttcaaaatgttaacttcagcattttcataaactgttgcttaaactattctgtgcgaactatttcagcattttccaaatctaaaattatatatgatatgtagttccttgaaccctacgcgttcagtgctcatcgttactatgtgtgatgttttgcacattaattggcccaaatttggtatttcgatttgcgcttatttattgaaaatcgttttctgactttctcaaaacaaaatgtaatttgattgcactcttatatccacagatttcggattgataacacagatcatattatcgatgttaataaaggcaatcttgcatttgagttcgatcaggttcatataatatgcccagtatatgagccagggacttttgagaacgaaactgaaaaatacataatttacaatgtgtctaaagtggagtatgaaacttgtcgcataacaaatgcagatccgcgagtaatagctatatgtgataaacctcagaaattaatgttttttacaataactttccggccatttacaccgcagccaggtggcttggagttcctacctggaaatgattattactttatttgtgagttcgtttgcattccttctatttaaaaaataatatttttaatatttatttagcaacttcatctaaggatgatttatatcgaagaattggaggtcgatgctctacaaataacatgaaagtcgtctttaaagtgtgttgtgccccagaggacaacaacaaaaccacggcgctaagcaattctaaatctgttacagacaccggaggagccattaatgtcaatatagcgaataatgatgaaagtcatgtgaatagccacggcaataacatagctattggaaccaacattggtataaatggaggccaaattatagggggaccgcagtcggcaggaattccaattaatccactaagcgggaataacaatataaatggcataccaactactattaattcaaacattgatcagtttaatcggattccaatccagccaaacataatcggtaatcatgtagggactaatgccgtaggaaccggaattgttggtggtggaggaataatattaactcctggccatgctcatggcaacattaatatgctgcaaccagggcgaggtggaataaacggagcatatcccggacatcaccacatccaaactgggatacggataaacaatgtgcctacgcaacacaactatccgtcccataagggtaatgctaacagtaatattaacggaaacggtacgtaatggccccatccaaatccacaaaaggagcgaacttttgaagcttacaggcaaaaatgtactccttgcgtacgctctattcaaactgtttttattttgaggcaatcggttacttatttgctaaattacatttcctacttagaaccaatattttcacgattccagtgctttttaaaacaaaaattttagctgaaaaactgtcttttaattctaaagaaagttacaaacgagattttaatgttttttgtttcctatgtctgcctttaatcgaatctgcatgccaatttccaactttctagcttttatagttcctgagattcgactttcatacggacacacaggcagacgaaatgactttagtaatacaaatgatttattttgttatttataatatcagaaaaggtatatagataaagaaacacatagagcacatgaaaaactgaaaaaactgaacactttacataaaatagcccgattcaaagtatttttatttaaattttttcaagtgtatacactataaattgttcataacgatctaaatctgaatctgaaagtcataacattcgactaaattgctgtactgtgtttgcgatataaaatatacttcatattgtttatatttttaatatttataataaatattttcagatgaccaccatcattacaacaaacatcccaacgaggttgtaaaaaatgaagagctgacctataatagtggtgctgcgacatcggatggtaacatcttcgctttatggatctggattttatcaattttcccactgctatctattcaatcttgccatttgtcttcatattggataagcgcatcatttttagtcagcactattgcaattcttggcattcactatcttattcaaatcactttgcaaaccacggtgcagcgatatagtcctggaatggttgaaatcaccgcgacctctatgaacgggatgtttgaccagaatgctggcactattgaatatgaccggtgaatttttgatgaacattcgattttgtgttccaatgttcaacgttattttaaagaataacaatatcacataaaaatatttgtcactcttctccggctattgctatataaacagtgataaaagtattaggtgtgagaggttggaatcaaatgatattaatttggatatgtaattgcaattgaacgagttactgtgactcgcaatttaaaatgatagatcagaaagaaaggagaaaggtgaaatagaattaataagtaaagaaattatatatatcaagtacattaaaacttagatttagtggtctagatctaactaatatcgtttaagaaaagtcaaaggatagaggaatgctatttcaaaacagattaatgcgaaaggccacttgacactgcctagccactgtgtcttctgtcctctcttttattgtgtccttctggttttccgaaaatgcttttatagcggtatgcgtgaaacagaaatataaaatattcccatttataaccaaaaatggtaaagcgatgtagcaaatacaaaatcattacagctatatttttacctgacttcgcgtctattagctaaaatgatcattccgacattcttttttcttaccgacatactaaaggaaatgtcaaagagtatagttaaaatatacttcaaaagaatcatagggctttggaatggattaatttaattacaatttcccattacaaatcccattactgtttcaaaactagttatcctgtacgaaggatatttcgactgaaattaattagcatcgctgactaaaaaacacgtagtaaataaaacattagtaatttaaagacatattgcatgcggattgccacgcattagtattgtaattgtataagatcaaatgaaacttatgtatgtgtttagtatgcattcgtgtatatttcaaattatggtaggtattttgaatatggtaaaggtgaaatttaaagaactcaactataagttttatgttctttttgttttgttttattttgtgttttccttacaataatacaattttattttgtaaatgaaccaagcagtatagagaagtgattcttaaccttaaataaaatatatatgtaaatacatatagcattcacatacttatatacaagaaatgtttaggtgaaacgttataaactttgtaaatttaaataactaaaaattaaaatatatcgaaaaataagaattattaaaat

SEQ ID NO: 23435 - DNA, 2479 bp, DROSOPHILA
ttttttgttccagctctaaacaagttttttttatagctctagctctacagtatttatataaataattcttgtatgtagtccaagtgtagaaaaaactaatttaaatgagctgttttcgagtatttctcttcagacaaaaacctgtttggaacaatttttaatcatgtgaaaatatggagcaagacactttggtgcggaatgacacagatgtagatgtagccagtcaacatattcttatttcggaggtttattgtatgcatttagcaagaaagctactaacgatctaacatcgaaaacattgctggcggtatgcaagaacgatcaaagcaactgcgtcttactgtttcctggacccagtcaaagtctcagattcatgacagttgtcaacgtcggagcatgttggcatgtaagaggcgcttaactaccagtaaagtgcttgaagactcacatccaccagtagctttccccaattgcaaatctcaccggcatcagcaacaaaaggagaaacataaagttcagctatactctggaaaacctttaagcattaagctgtacgtgccaggaagtattgagagtatcccaaaaattcgacataaggcgcttacgacaacgaataaacagcaaccagctatgcatcgaaagtctaagagcaaaagcaagtttcaaggttttaacaatctcaagccgctttattcaccgagtaaaagacaaccacccgagaagcattcatcagtactggtggaagcagggatagaatcaaaggcatcacggcattttgttggtaaaaagaggattaagaacagaaactgtttgttatcttcgcctcagccatcgccaatgagatgcaaaatgatgattccatttccaaagtttggtgccacatcctttgttacgttgctcactttaatttgtatggaaactgttttgctctccaccatgtctagttgcgccaagactttttacatgcattggaacacatcgaacagtatatttcggattgataacacagatcatattatcgatgttaataaaggcaatcttgcatttgagttcgatcaggttcatataatatgcccagtatatgagccagggacttttgagaacgaaactgaaaaatacataatttacaatgtgtctaaagtggagtatgaaacttgtcgcataacaaatgcagatccgcgagtaatagctatatgtgataaacctcagaaattaatgttttttacaataactttccggccatttacaccgcagccaggtggcttggagttcctacctggaaatgattattactttatttcaacttcatctaaggatgatttatatcgaagaattggaggtcgatgctctacaaataacatgaaagtcgtctttaaagtgtgttgtgccccagaggacaacaacaaaaccacggcgctaagcaattctaaatctgttacagacaccggaggagccattaatgtcaatatagcgaataatgatgaaagtcatgtgaatagccacggcaataacatagctattggaaccaacattggtataaatggaggccaaattatagggggaccgcagtcggcaggaattccaattaatccactaagcgggaataacaatataaatggcataccaactactattaattcaaacattgatcagtttaatcggattccaatccagccaaacataatcggtaatcatgtagggactaatgccgtaggaaccggaattgttggtggtggaggaataatattaactcctggccatgctcatggcaacattaatatgctgcaaccagggcgaggtggaataaacggagcatatcccggacatcaccacatccaaactgggatacggataaacaatgtgcctacgcaacacaactatccgtcccataagggtaatgctaacagtaatattaacggaaacgatgaccaccatcattacaacaaacatcccaacgaggttgtaaaaaatgaagagctgacctataatagtggtgctgcgacatcggatggtaacatcttcgctttatggatctggattttatcaattttcccactgctatctattcaatcttgccatttgtcttcatattggataagcgcatcatttttagtcagcactattgcaattcttggcattcactatcttattcaaatcactttgcaaaccacggtgcagcgatatagtcctggaatggttgaaatcaccgcgacctctatgaacgggatgtttgaccagaatgctggcactattgaatatgaccggtgaatttttgatgaacattcgattttgtgttccaatgttcaacgttattttaaagaataacaatatcacataaaaatatttgtcactcttctccggctattgctatataaacagtgataaaagtattaggtgtgagaggttggaatcaaatgatattaatttggatatgtaattgcaattgaacgagttactgtgactcgcaatttaaaatgat

SEQ ID NO: 23436 - protein, 652 aa, DROSOPHILA; identical to SEQ ID NO: 2655

SEQ ID NO: 23437 - DNA, 4426 bp, DROSOPHILA
gcggcgacggctgcggcgactgcagctggcggtgctgagagcacatcgtcgaccaccgtcattcactcgccgggtacatacaatgcgacagctgcagctccagctaataccttcgatggagccaactttacacccacggcagtgaatacgcctgctccgtttggcgcctttaactttccgccggccgttatgggtatgtagggaatagcatcatccttgtcataaccatactccatctctgtcgttttcgctacagcgcatctcatgtacaaccaaggaggaagcagccagcacagccagagcggaagcgatgcgggcaaatagctatcgatgctgaagtgcgtgattctgctactgctcctgctcctcctgggcttcacacggctccaactcatcccgaacatcaaactattccagtgtagacttaagctttcctctgtacataaacggtatccgaattgggaggagctgttgcaccgcaccgggctctggccaattgaagggttcatcactggcgcaggcaccacacgtgccgcccattttaatgtgttaatatgtatttaatagtcaaataagaactgctctactacagtgtaggcggttggaatctttttataaagcttgcatcagtgcgattgtatattagtatattaaaattaaattgcacatagctccccctccctcaaacaattgacaaattgaattgtatattagtatattaaaattgaagtccaaatagcaccccctccctctaacaattgacaaatttagttgtatattagtatattaaaattaaagtgcaaatagctccccatccctctaacaattaacaaatttagttgatgatcaaataaatcgtgaaagcatagtaaaacatcgaaatgtacagctatttctttttggtggaaaactagcaaaaaattattaacaaatgtacaaccaattcctgaaatttacacacgaattatgctgaaagaaatgtgaaatacactcgagtcttgtggtcaagcgaaaaaactcacataaattttattctgaaaacgtaaaacagaaaataaaaaattaaaatacatcaagaaactccaactgttatgaaatagtgtagtaggtacgcgttaagctagtcaatctccagtggaactagaactgtctgcgcggctgcacgatcatcaggctttcccgcggcaccggcagattggcattcatttccgcacgacgagttcgcggcacggccaattgatgacgctggcgcggcagcatcgaggagcgactggtcggctgaaattcgtcatagctgacaccctgctcgggattctcgtccgttgtgtagtcactgctgtcgggtggggcgttctgatcgttggacttggtgcgcgccttcttgctggaacgcgttccaatgctgcgcctgcccataccgccgctgcgtcgcagtgtgttgtccagtacgcgaacacgtttcagcggcgacttggtgctcttcagctggttatgctgctggctgggcgcgagcaggtgcttggctggcgacgccttcatcgagttgagtgtgttcataaggctgcgcttggcgttgggcgttttggggcccgtctgcaggccggacggattcaggcgcttgtgcagattgcccgtactcttggtgatgtttagtggacggaggtgctgctgcgacggcgtcttgcgcagcgacatggtggagctggaaagggtcgacatgttgcgcagcgtgcgcggcgtgcgtggagctgtcgagcccgttgccggcggtggcattatcttgctggccgatggcggtgccttcttgcgcgccgagctctgctgtttggcctggcgatgacgctcccaatcggcggccatccgctccaggatgttctcgccgtgcaccagaaagggtgtgttctcctgcgcctcgtatgcctgcaccagttccgtgatctgctgctcaatcttgggcagcttggaggtgatggccttgcgctccttctcctccttgagcaactggccgccacgattgttgaagcgattcggctcgctcgccttggcctccagcgcctccatgcgcgaccagagttcggcacggctttcgtacagatcgaagatctccttgttcttgttgtagaaggtcttgaggtcgtccagctcaagttcgtggagctccagcagatcttcgttgtaccagtcgttgtagtagttcgagaagcgcttgcgctcctgctggctcttaagtgtgagatcccacatctccttgatctcgatgcgtagctgctcgatgaaggttttcagattctggcgtcgcagggcctggcagcgctgcagttcctcccgcaggacatcgtaggtgcgttgagtgtaggtcgtagcctcgcgcacgcgacgcatggcatactcgtctgtctcctggagtctgtcccacagcacatggatcttttcgcgcatatcgtcgatgcgctccctcagctccttcacctggtcggcgaagttcttttgcatgttgcgcaggagctcgaaggtctccggcgttaggcagtgatccacctggttgagcagacgctcctcggtgtccgtctggggcaggcactcaagcagcttcatgtcgtgcttaatggcctggcgcagctggtccatctctttgaggcgcagcactcgctgatcgcgtagctggcccaggcgattccgaaaggcgtccatctcctcgggcagcggcagtggatccgccaacagtggcagaggcagctctcccagttcctcgcacagctgctcctgctgcagcagaagctcacagatctccgctcgccgcctggccagctgatcgcgtaagtgctcgatgcttttgtccagcttcagctcccagacgaccagcggcatggactccggccgctcgccaatgtccagcggctcgtggagtaggcgcgtcaagtcggtggcctctgcccgcaaggcggctatatcgttgaggatcgcctgctgcttttcgcgcgactcattgagcaaatccgtgaagaagctgttcgcatggtccttcaaccggaggaggaactcaccgcaggtcttgacctcgaacaactgcgaccacatcgcgtgcaactgatccacgtgctcgcccgtcatctccaggatctgggccttcaccgcaatggcgctcggcgagttcattttctccgttttcgttgtgaaatttgtgtttttttttttttgttcaaaatttcttttcttgcgtaaatgctcactggctttgttttttcgttgtgttcacttggggactatttaaccagcatatctgagttaacttgacagttgtgtcgcagacccacaacgctgggcaggattgctcgggaatgtgcggatttatttagtggtttatttagagtgcatcactgcacgaaatttcgaactgaatgaatcgatgacgctagacagaaatttcggtaaattcaaattgaaatggcggccaagagtgttgccaccgcgttgtgggacagcattgccacgcggcggtaacttctggtaaaaccagggctggagcatacgccacttttttgaatatttaaaattcgttatttggtttattagcaaattaaaatatctattttaattattttgctccttaaaaacgtattatattctcttatatgcgcttagtaaacatcccacagactttagaaaacccttcccacacatgtatattttggtaaaattgaaatcaagtaatttataatgtaaacaagcgtttttatctgactaaaaatttaaaatgtggacaattgttcatttacttcttgccgtcacaggtagtgcaaaatagttaaaagaattttaaagttgtaaatttagatagtctttgcgctaggaaaagccctaacactatacatatgtgtatacatataaatacgatgagtctgcaattgcgagccaaatacttcagtacaggtaatagatatagaacacagatcagttgccgaaatgattgccattggatgtgattagagtctagctccattatatggccacgaccgcctcctcgtcgggactctcgttctcctcgccggacggcggacgcacatggatttttggtatgggacgaattttctggggattcctgctccctgtgctcggcctgccggatcccttgccccgacgcaccgagtattccagcacgcgcaccttcctctgcggcgacttgagcagcttctgcccattcacacagaccttgcgacttgcattgttgcactccagcgatgcgattagatttcgcttggccgctgctgccggctgtggactattggtgttgtgatgctgtggatgccgtctcttgtgcagattccctgtgctcattgccgtggtgctggcatttgccttggtcggcgtcttcttcaacgaggatgtggatccatggatgccccggttgctcttctgcgtattgggc

SEQ ID NO: 23438 - DNA, 2426 bp, DROSOPHILA
aaatttctgtctagcgtcatcgattcattcagttcgaaatttcgtgcagtgatgcactctaaataaaccactaaataaatccgcacattcccgagcaatcctgcccagcgttgtgggtctgcgacacaactgtcaagttaactcagatatgctggttaaatagtccccaagtgaacacaacgaaaaaacaaagccagtgagcatttacgcaagaaaagaaattttgaacaaaaaaaaaaaaacacaaatttcacaacgaaaacggagaaaatgaactcgccgagcgccattgcggtgaaggcccagatcctggagatgacgggcgagcacgtggatcagttgcacgcgatgtggtcgcagttgttcgaggtcaagacctgcggtgagttcctcctccggttgaaggaccatgcgaacagcttcttcacggatttgctcaatgagtcgcgcgaaaagcagcaggcgatcctcaacgatatagccgccttgcgggcagaggccaccgacttgacgcgcctactccacgagccgctggacattggcgagcggccggagtccatgccgctggtcgtctgggagctgaagctggacaaaagcatcgagcacttacgcgatcagctggccaggcggcgagcggagatctgtgagcttctgctgcagcaggagcagctgtgcgaggaactgggagagctgcctctgccactgttggcggatccactgccgctgcccgaggagatggacgcctttcggaatcgcctgggccagctacgcgatcagcgagtgctgcgcctcaaagagatggaccagctgcgccaggccattaagcacgacatgaagctgcttgagtgcctgccccagacggacaccgaggagcgtctgctcaaccaggtggatcactgcctaacgccggagaccttcgagctcctgcgcaacatgcaaaagaacttcgccgaccaggtgaaggagctgagggagcgcatcgacgatatgcgcgaaaagatccatgtgctgtgggacagactccaggagacagacgagtatgccatgcgtcgcgtgcgcgaggctacgacctacactcaacgcacctacgatgtcctgcgggaggaactgcagcgctgccaggccctgcgacgccagaatctgaaaaccttcatcgagcagctacgcatcgagatcaaggagatgtgggatctcacacttaagagccagcaggagcgcaagcgcttctcgaactactacaacgactggtacaacgaagatctgctggagctccacgaacttgagctggacgacctcaagaccttctacaacaagaacaaggagatcttcgatctgtacgaaagccgtgccgaactctggtcgcgcatggaggcgctggaggccaaggcgagcgagccgaatcgcttcaacaatcgtggcggccagttgctcaaggaggagaaggagcgcaaggccatcacctccaagctgcccaagattgagcagcagatcacggaactggtgcaggcatacgaggcgcaggagaacacaccctttctggtgcacggcgagaacatcctggagcggatggccgccgattgggagcgtcatcgccaggccaaacagcagagctcggcgcgcaagaaggcaccgccatcggccagcaagataatgccaccgccggcaacgggctcgacagctccacgcacgccgcgcacgctgcgcaacatgtcgaccctttccagctccaccatgtcgctgcgcaagacgccgtcgcagcagcacctccgtccactaaacatcaccaagagtacgggcaatctgcacaagcgcctgaatccgtccggcctgcagacgggccccaaaacgcccaacgccaagcgcagccttatgaacacactcaactcgatgaaggcgtcgccagccaagcacctgctcgcgcccagccagcagcataaccagctgaagagcaccaagtcgccgctgaaacgtgttcgcgtactggacaacacactgcgacgcagcggcggtatgggcaggcgcagcattggaacgcgttccagcaagaaggcgcgcaccaagtccaacgatcagaacgccccacccgacagcagtgactacacaacggacgagaatcccgagcagggtgtcagctatgacgaatttcagccgaccagtcgctcctcgatgctgccgcgccagcgtcatcaattggccgtgccgcgaactcgtcgtgcggaaatgaatgccaatctgccggtgccgcgggaaagcctgatgatcgtgcagccgcgcagacagttctagttccactggagattgactagcttaacgcgtacctactacactatttcataacagttggagtttcttgatgtattttaattttttattttctgttttacgttttcagaataaaatttatgtgagttttttcgcttgaccac

SEQ ID NO: 23439 - protein, 671 aa, DROSOPHILA
MNSPSAIAVKAQILEMTGEHVDQLHAMWSQLFEVKTCGEFLLRLKDHANSFFTDLLNESREKQQAILNDIAALRAEATDLTRLLHEPLDIGERPESMPLVVWELKLDKSIEHLRDQLARRRAEICELLLQQEQLCEELGELPLPLLADPLPLPEEMDAFRNRLGQLRDQRVLRLKEMDQLRQAIKHDMKLLECLPQTDTEERLLNQVDHCLTPETFELLRNMQKNFADQVKELRERIDDMREKIHVLWDRLQETDEYAMRRVREATTYTQRTYDVLREELQRCQALRRQNLKTFIEQLRIEIKEMWDLTLKSQQERKRFSNYYNDWYNEDLLELHELELDDLKTFYNKNKEIFDLYESRAELWSRMEALEAKASEPNRFNNRGGQLLKEEKERKAITSKLPKIEQQITELVQAYEAQENTPFLVHGENILERMAADWERHRQAKQQSSARKKAPPSASKIMPPPATGSTAPRTPRTLRNMSTLSSSTMSLRKTPSQQHLRPLNITKSTGNLHKRLNPSGLQTGPKTPNAKRSLMNTLNSMKASPAKHLLAPSQQHNQLKSTKSPLKRVRVLDNTLRRSGGMGRRSIGTRSSKKARTKSNDQNAPPDSSDYTTDENPEQGVSYDEFQPTSRSSMLPRQRHQLAVPRTRRAEMNANLPVPRESLMIVQPRRQF

SEQ ID NO: 23440 - DNA, 5187 bp, DROSOPHILA
cgctgacctaaagaagcgaatcgagtcgctcatcgaccgcgactacatggagcgagacaaggataatcaaaaccaatacaactatgtggcataaatggccacagattctgtgaaatccgaacaccgattcgattgtaattcgctctataccatacacatacatactagcagtctaatgaagtttttggagtgccctcgtccgatcggcgatgttcagagtttttcagctgtaatttcgtttctataactaaatcgttgaacaatccgccagctaatagtgtagcgacagttctttttgtaagttaccttatcatacaataaattaagcgtttattttacaagccgagtcctttgaaataggtcatcgccctcggaacgtcgatgcctccagcaatttaaaaaagttttcgaaccgaaagcaaactaggtgttcaataaacttatttattggacttattctaatttgtttacttttaattgataattctccttcaattaacaatagaagtgacatttgcaggctaattttctaaaggaaacattaaaataattataactcgtactagtagctctgtatgcaaaaaagagatacgcataacttaatagttttttatttaccataaataaaaaattacttgaaaatataatgcacttcgtgtttcatttgtaaaatattaccagcattactgcttcaaaaaatcagcgtcgagccctttgttaagcagttagcaaaggaatatagtatatatacagttacagataaaattgggaaattaggtagattatatacagatcagaaataaatattgctatcgctttcgcgtgcaggggtcatattaaaaatgacattgaggctggtttaggtatcacaaattgccttgctgttatcctcctgtcattctttcgtatgcaaatcaaagctgccaacttgaaaagttcttagtggcttttgtagatatattacaaaaatatttgtagtgtctcccgacaataataccatttacgcctcaacactgttgacgctgtattgtgagctgtcgtactcggacacgctgtcggagccgtagcccccaaatgctgccgccgaaggtcgcacactgctggtccttatcccattatctttcagcacatcgggcacgtagatgggtgccggaccggcaatttccacaatgcttgggcggcgcgtggccgcacaccgcttaattggtgacataaaggtgaacaaagtcaatgtgatagccaggctgatgataagcagcaggaatcgagccattccgttatcgccacggaagaaacaaatcatggccatgaccagtaccaggatcacgaccgagaactttgtcatcgtaactgcagtggagtggatcttaccacccttgcgtgatatcatgtttgacggaccgtaggcaaagtagaggttgtggcgatccacgaagtgttttaggcagatgtagatcatggcgaacggcataatcagcggacaggcaacgctatacacaatggctatggtgaaaacgagcgttgtccaggcgtagtgcgttccgaaaggaaactcgattagaatagccttacgaatgtacggcgtttcggccttggatttcgcctttagcaatgaccagatatatacaatcagctccgggaagcgtagcagctccaacgctgtaccgataaacgcagccgtaatgatgtagttcacatagaaggagccgcgatccggcaggaaaatgcactgccagcgatcagtctgatttaagaatccccactctagcagcgcctgtgccgatgtcagtccgagggaaggcagaatcatgatcatcataagcagatagccaaagcacttcgtcatgattgagtagttctgcttggagcgcgtgtagtgccgcatccacttgtccgaaatggcaacaatcacaggcattagagccgaaagagtccagagcatcaatgtgggcaggaagtcggcaacgaggggcgagatcttaccctctgtttcctttacccatggtcgactgtttagaaggcttaccaccatggccggtgtggacaggaagaagagaacaagaaaaagcactgcattcacacagaagaatttcaagtaccaatgactcttattcacatttaggttctcccaaaaaagatcatcaggcgacggagcgaacaccaagtgccattggcggtaggtgcccggtgtaaagtgcgttactatgttctgggcctcctgcacagtggacacggtgataaacgcaatgtccaggggctcattcatggtggaagcacgcagacgggcaacatcgccggacaacttgcgctcctctcgctgataatattcgtaggcgttctcctttttgcaggaacacatttctggtttaacctataatagacggtgtgaaacggattctttacatcaatgttgaagtgaatgaacttaccatgagagtatccctgttcctatggtgctcgcagtacaatcgtgcttcatgaactcgctcgaactcggcgttccttacgtatagtcgtgaaatgttgtacgcaattgacacattctcgatggtgacgtccggaaagagctcctgcatatagttccgtaccacagtcttgttgcgatcgctggaggatatgtttgaaatcataatcgtgcgggtggctgcctttttgaaggcattccgtcccgaggcgcgccgcatgatgagcactacgagcggaatatacagaatcgtgatgatcgtgtgcacccacagccaaggtgaatccggagaaagattcgccatcgtggtgcgtccgaaggcattcacatcgtacggattttccttgggcccgttcaggaaattcacaggcagaataatgaccagggagactatggtaaccaatgccattacagccatcaggtgctgctgaaaggacaagtaatgcacggcatccggtccagtatgcagcagtatggtctccttacgcagcttcagcgtaacccgtatccagccgaaaagcccctcctccggctggataggggacaagggcgtggagtcgggaactccttgggaggtggtacttggtctaggcgatacctgcgttgaagtgctcggctggggatcgaccacactggcggcgcgcgagtagaaaatctccgtccagcgcttcttgctgccgttgctgttgaccagcgctagacgtccaaagtcaccggcctggtgccgcagaaccgtaaacaaaaggatcaggagtacccagaaaatggtgttgagtattagggtttccggaatgccattataggcggtggtaaagaacgaagtgcgattggccaccgcctggcagtaggaaatgttgctgttttccgacatgaccatgaatttcactaaaaaaaccaagaaaccagaagctattagtaatgtgttcaaagtcactgataaagactcgataagagcgcagctgatcggattttcttcgatgcaattccttttcgtttgtatattgatatggccgtgggaaaatacagaaatttgattctataaagaacacagtgccagctgatcggtttctagcactcctcccagacagatttatctttttgggtcacttgggcaaaccaaacaaagtccgcagaccacagatggagatgctggtctggaaggcaatgtgcccacagactaacccaattagaactagcagatactgtatctttatgggcgaagccagaaagagcaccaacaaaggcgttataaatcaagctagtcttggaaatgagataatggggaaatcaaacatgtttttgtaggcatgaggcaacctgcaaggggttggttgtttggggggaagtcactacgtcatgttagtccaccacctcacttttgtctttgttttcgcaatgaatcatcgttaatcaatctatttttggcttggcctgtcgcgtggcaaatgcaaaatgcaacaaaagaaacccattcgtcgcattcacttatttaattatttttcactggctaaatggcattgcatttgtatgtttctgattgttatccgctttcatagcactgcgattaacgaactttccacatcataccttaggtgaaatgttttatttccagtaacttattttgcgaagcttcacattaaacatcagcctttaatatcctcaatcgtgttcatcaataaaagcaacctgtgtcgtaaaaggtatatggaataattgcctttcgctactttacttcattttgctggctgttatcgatagctcaatgttaaatatcgatttttagacaccattagaggtagccgtcgaaaaaaatctgaaattatattttattgcttttaataatacaaacaaaaattataaaaggtataagagattatttaaatatgtatgtccgtatgtatatgtgttatttttcaaaatatttttactattttgataggatatatcgtggtgagaaactgtcatcactagcatgtttgaggttcgtatacgatcctgttcctgtacttgcttacattattgcttggtatgtcaaacagacatttaaatacaatttttagttatttttatcgttgccttttacagacaaagaaaattttgttcagacttttataagacttatgccggcacttacccaccaaatcttaaccatgcaacgcgcaccaccactgaatttgagcttcaagattcagctgctgtccggccaaaatgttatcctggtggagtgttctggctacgagagcgagctgttcttgccgcaaatcgttggggagcgaatcaccatgcagaacgttattcaagatcgaaggtgctgtgcagagagcatgttgttgcgggatcccccgatgggcgatttgggctccgaaaccaggactgcgaagagtcctccacggcgcttctttgccgctgccaatcccccaaccccactggccaagagcaccccgacgaatacatcttctttaagagctcgggctggtaaggaaaacgctgttccgcagctaacgccagagggtttgcgatgccgaccctttcacctacctgcaccggtggaaatggacgtagaccaattgtgctgccaggagcagacacctgagagacgggcatcctccaagtctataagttcagctaatacaaataatagtttttttgagaatgaggtatcacagccagtaatttcaagcaagaacgtctatgccaacgaatcggcccgtaacaacattacg

SEQ ID NO: 23441 - DNA, 2427 bp, DROSOPHILA
cgaaaggcaattattccatataccttttacgacacaggttgcttttattgatgaacacgattgaggatattaaaggctgatgtttaatgtgaagcttcgcaaaataagttactggaaataaaacatttcacctaagtgaaattcatggtcatgtcggaaaacagcaacatttcctactgccaggcggtggccaatcgcacttcgttctttaccaccgcctataatggcattccggaaaccctaatactcaacaccattttctgggtactcctgatccttttgtttacggttctgcggcaccaggccggtgactttggacgtctagcgctggtcaacagcaacggcagcaagaagcgctggacggagattttctactcgcgcgccgccagtgtggtcgatccccagccgagcacttcaacgcaggtatcgcctagaccaagtaccacctcccaaggagttcccgactccacgcccttgtcccctatccagccggaggaggggcttttcggctggatacgggttacgctgaagctgcgtaaggagaccatactgctgcatactggaccggatgccgtgcattacttgtcctttcagcagcacctgatggctgtaatggcattggttaccatagtctccctggtcattattctgcctgtgaatttcctgaacgggcccaaggaaaatccgtacgatgtgaatgccttcggacgcaccacgatggcgaatctttctccggattcaccttggctgtgggtgcacacgatcatcacgattctgtatattccgctcgtagtgctcatcatgcggcgcgcctcgggacggaatgccttcaaaaaggcagccacccgcacgattatgatttcaaacatatcctccagcgatcgcaacaagactgtggtacggaactatatgcaggagctctttccggacgtcaccatcgagaatgtgtcaattgcgtacaacatttcacgactatacgtaaggaacgccgagttcgagcgagttcatgaagcacgattgtactgcgagcaccataggaacagggatactctcatggttaaaccagaaatgtgttcctgcaaaaaggagaacgcctacgaatattatcagcgagaggagcgcaagttgtccggcgatgttgcccgtctgcgtgcttccaccatgaatgagcccctggacattgcgtttatcaccgtgtccactgtgcaggaggcccagaacatagtaacgcactttacaccgggcacctaccgccaatggcacttggtgttcgctccgtcgcctgatgatcttttttgggagaacctaaatgtgaataagagtcattggtacttgaaattcttctgtgtgaatgcagtgctttttcttgttctcttcttcctgtccacaccggccatggtggtaagccttctaaacagtcgaccatgggtaaaggaaacagagggtaagatctcgcccctcgttgccgacttcctgcccacattgatgctctggactctttcggctctaatgcctgtgattgttgccatttcggacaagtggatgcggcactacacgcgctccaagcagaactactcaatcatgacgaagtgctttggctatctgcttatgatgatcatgattctgccttccctcggactgacatcggcacaggcgctgctagagtggggattcttaaatcagactgatcgctggcagtgcattttcctgccggatcgcggctccttctatgtgaactacatcattacggctgcgtttatcggtacagcgttggagctgctacgcttcccggagctgattgtatatatctggtcattgctaaaggcgaaatccaaggccgaaacgccgtacattcgtaaggctattctaatcgagtttcctttcggaacgcactacgcctggacaacgctcgttttcaccatagccattgtgtatagcgttgcctgtccgctgattatgccgttcgccatgatctacatctgcctaaaacacttcgtggatcgccacaacctctactttgcctacggtccgtcaaacatgatatcacgcaagggtggtaagatccactccactgcagttacgatgacaaagttctcggtcgtgatcctggtactggtcatggccatgatttgtttcttccgtggcgataacggaatggctcgattcctgctgcttatcatcagcctggctatcacattgactttgttcacctttatgtcaccaattaagcggtgtgcggccacgcgccgcccaagcattgtggaaattgccggtccggcacccatctacgtgcccgatgtgctgaaagataatgggataaggaccagcagtgtgcgaccttcggcggcagcatttgggggctacggctccgacagcgtgtccgagtacgacagctcacaatacagcgtcaacagtgttgaggcgtaa

SEQ ID NO: 23442 - protein, 760 aa, DROSOPHILA
MVMSENSNISYCQAVANRTSFFTTAYNGIPETLILNTIFWVLLILLFTVLRHQAGDFGRLALVNSNGSKKRWTEIFYSRAASVVDPQPSTSTQVSPRPSTTSQGVPDSTPLSPIQPEEGLFGWIRVTLKLRKETILLHTGPDAVHYLSFQQHLMAVMALVTIVSLVIILPVNFLNGPKENPYDVNAFGRTTMANLSPDSPWLWVHTIITILYIPLVVLIMRRASGRNAFKKAATRTIMISNISSSDRNKTVVRNYMQELFPDVTIENVSIAYNISRLYVRNAEFERVHEARLYCEHHRNRDTLMVKPEMCSCKKENAYEYYQREERKLSGDVARLRASTMNEPLDIAFITVSTVQEAQNIVTHFTPGTYRQWHLVFAPSPDDLFWENLNVNKSHWYLKFFCVNAVLFLVLFFLSTPAMVVSLLNSRPWVKETEGKISPLVADFLPTLMLWTLSALMPVIVAISDKWMRHYTRSKQNYSIMTKCFGYLLMMIMILPSLGLTSAQALLEWGFLNQTDRWQCIFLPDRGSFYVNYIITAAFIGTALELLRFPELIVYIWSLLKAKSKAETPYIRKAILIEFPFGTHYAWTTLVFTIAIVYSVACPLIMPFAMIYICLKHFVDRHNLYFAYGPSNMISRKGGKIHSTAVTMTKFSVVILVLVMAMICFFRGDNGMARFLLLIISLAITLTLFTFMSPIKRCAATRRPSIVEIAGPAPIYVPDVLKDNGIRTSSVRPSAAAFGGYGSDSVSEYDSSQYSVNSVEA

SEQ ID NO: 23443 - DNA, 2639 bp, DROSOPHILA
ccttgaccagctacgcctaccgctcctcctcgcaccataatctttaccagccgaacgggaagtcttcgaagtatccgcccacttaccagtatggcgactactaccattgagtgaaatatgcgaaagtcctcgttgaaatgtgacaggaaaattccttatatttatagagtgttctgtgggacagcctttaaacaaattactagcaaagtaaagagcattacaaaccctttaaatgaatgatcaaaatcggtatggattctcaagctaaaagtatttcaattaccccgcttatcagtcgattttattatacgaaccaacaaggttgaagtttaaatgtcttattttgacaactcaaaaatgtgttaatatcgcctgtagaacatataaaaaagttttgattgtttagttttttgtacctattgcaattaaaatcgagttagagagggacttgacgaaacagagcaaacattcttgtcaaccatatttaagttaggccttttgaacaaatcacagctatttcagtcacttttttatacttgcccgcaatttaatgacacaacacaagcatttcatcgataagagctcagagaacttaaaataccaacaacacattaacatacctctagttacatgtatgctatttgagtcagattttgggatccccattacagttttcattaaaaataatttagatttaataacattttgtatagcaaaagaaaccataagtaaatatttaaaaactattacctgataagaatggccgccgcatcaaggacggcttggctacctagcgcttatacgcatttgggacaagtttgtacaattgtttacacatttttctatttaataaaaattttatattttcctagaaatacgtgtcatcttcaatgtttgttgggttgcgcttgtcttaatggctttttaagcttattttgatgggatattgtgtagacatggccatataaatgcatttatttctggacgagttctattcagcatggttaccatactgttcactatctttagcttacctttcttggtaatagcatccagcaacatcaacaataccgatttgactttttatcaaaagtgcaatccgcttcttcagtgcaatgcatatttttcagtggcaggttttgctgaagtaagctctggtaactacttatgaccttctgtcatagtaatgatttttctttttaaggtaaactggcttgaagctaaccatgtatgcaatagagttggagcagtcctagctactgtcagaaatgaggagcagcatcagctaatgcttcactacgtcaacaggaaaggtaagcttgataaagaaaagtgacactactccccgtttgacctttatatagaacggatatttggaaacagaaccttttggttgggcgccacaaacctggtggatcggagctatttctggacctggatgagcactggcattcccgttacctacgcacaatggagccggagagagcccaagtctgatcgaacaggtcaagacgcctgcctggtcttgggaacagacaatctctggcatagtgaaccctgccaacggaaacacaattttatttgcgaaaatgtttgtcagctaaattattcagggctggacaagagagtatatatataaaattgttatttcaatctgaaaatatataaaacaatatccaaagcaaaatgaatagaacacaattgtctttcaacgatgcaattaacaacccaaatggataggcacctttttgccacagcgtttgtatcaagaaatacttaaaagttttagctttgggttggtctaagtaattagagaattcaaataatcgcaacatccaaatttaatactttcgattacatataaatatagcgatttttcaaattcgaaatgacgaatagcagtcattaaacattaaagatttttgtcaaaaaacgtcgaaggcgtagtctggccaataacatcagtttcaagtatatgtttttgtagacaaatcatacaactttttatattacataatatagtctcacaaggaatgtatgtttacacaaggaatattttattatacacagagaaggattactcatcacttatgttgtttatagtgagctaaaggaaaagtatctcttctggggatatatagtagacgatttgggatcaactgtgagaaaaaaaagactcgagagccccgagcattaaaagattgacaaataactcagtctttaagtttgccttgcttgaaattaaaaactcattcgcatttttaattgcacatattcggctgatattttatttaacaaccggactctttttcgactcacttcgtcaaattaggttagtttacgtcgtcatcgaactggcaacgcttctcgcaaacgaagtagcgcagctctgagcagttctcgttcacccatagtccgttaattccattgatgccaaggcagtggcgattatcgctggagtagcccggtagaccgttctggaagttgcggtagttgacggcgcgccccttgctgaaccacacccagttgttgtcactggccaggtcggtgcccgaggtccagagcggatcggtcagcagatcctgctggttccgggcgtagttgaagaggaagttgcggagactgcgctgatcctgctc

SEQ ID NO: 23444 - DNA, 531 bp, DROSOPHILA
atggttaccatactgttcactatctttagcttacctttcttggtaatagcatccagcaacatcaacaataccgatttgactttttatcaaaagtgcaatccgcttcttcagtgcaatgcatatttttcagtggcaggttttgctgaagtaaactggcttgaagctaaccatgtatgcaatagagttggagcagtcctagctactgtcagaaatgaggagcagcatcagctaatgcttcactacgtcaacaggaaagaacggatatttggaaacagaaccttttggttgggcgccacaaacctggtggatcggagctatttctggacctggatgagcactggcattcccgttacctacgcacaatggagccggagagagcccaagtctgatcgaacaggtcaagacgcctgcctggtcttgggaacagacaatctctggcatagtgaaccctgccaacggaaacacaattttatttgcgaaaatgtttgtcagctaaattattcagggctggacaagagagtatatatataa

SEQ ID NO: 23445 - protein, 176 aa, DROSOPHILA
MVTILFTIFSLPFLVIASSNINNTDLTFYQKCNPLLQCNAYFSVAGFAEVNWLEANHVCNRVGAVLATVRNEEQHQLMLHYVNRKERIFGNRTFWLGATNLVDRSYFWTWMSTGIPVTYAQWSRREPKSDRTGQDACLVLGTDNLWHSEPCQRKHNFICENVCQLNYSGLDKRVYI

SEQ ID NO: 23446 - DNA, 7784 bp, DROSOPHILA
cagtgttgcaacctgctgttccccgccaactcacaaatacaaattcggcctcgctgtctcgccaatactgcttccaatatgttgtattcgttctacttggcgtcaccaatacttctccagatatatatgtaactcattcttctgcagtaataatttccaaaatacttaccattttcttaaatgataagtaagagacttagagagacttgagaaataagtcaataagtttctcagttgtttctcgaaaaaaggctcacgctctttagaaaaggaatcccataacccattcctttcttatattgttatcttgaactggcttggttcttttgcctaattttacaaattcgaattttaccaagaggctgtcggcttttaaagaaaaatgtatgaatttggtaaaaatataattacataaagattaaacaaaattggccaattgaattggcgtagatagttctttagatcgaggcgtacagacaaacatggccagatagactcagctattggtcctaccagttgaatacttctcaactactcttttactcaacgagtaacaagtataagccagttaggaagacttccaaaatgtatttgtattaattggtgttaataacacatagtaacgatttattttaaacaacttttgtgtgtgcacattcatactctaaatgtaagaacaatctagcatgtaagtgcgaattaattttagcctacgacaatacacaatacgtgacaagtacttgtttggataaggtactgtagtaaagaaacaagttaggatttaagcataagcagtagttcaaatgcttatgtctcagttgttcgtaacacgcttagaactagaacaaaaacttctgttagcatttaaaatgcaaaaatctataattcaaaagaaaatcgatctatctataataacaagcgataaaatccggattcttccagatattgcacgataacacgatcgtccaacgtttaggtgctcaaagtggagttgtttctttcacacagatgacgtcacattttggccgctatcgatcgtcaggctagatgcacgcatacttagagatgccaatgataagttgctgtggtaaatgactttgggagataggagagcgctgttttcggtatctagagctggattcttaacgtagcaaaacgcagccgaaggtaaaaggatgtcggagtttatccctaggaggccgtcgaccgacaaagaattcgtattgaaggtggaagcagctgtgacgcacctgtcggtgctttcactttcaaccggaacgctgccgcagaaatgtgtgcgtgagctgatcagcttgttgcaggcggggcatgatcgcggggcatttttctcccgccgtcgcaagatttcataggcgcatctggaagagaccacatacataggaaaaattgaaataaaaaaaaatcaatatctttttaaaatgatcttttctttatttacaatctaaaggatggacaaacgaccagctaaaaaggagcggtctgttactaataaaggctgcaataattttacaaaaatttgggttctgtgaattcgaatttcgagcggacatacggatttggctagaaatcctggtcagaaataagttaaccaagtacggtcaaacgcttcccagtatacatagctgtcacctagtttttaacgaatgttggtacgtagttcagtatcggccagctaataaaaatgatatcagaccttcacgaattgggatgcctctggacgcgagacagactttgggaatatgcgattgcacgatttaaaaaaaaaaagctgcgtatcttatctgcatctctcaagaatgatcatactttgtagggacagaaacgctcccctttacagacttgataccgaaaatagtgttcatcaaacgtttttttttaaaagcttaccttgcatgaagaatgtgtgcacagggtagagcttccaagttttctggacgaagtccaagcaactccccacacgctccgcaatttaagcctaacgcagcatccgtctgattagctagtctaaaatgagtgttgtattgatcttcgtctcctagtgcccggtagatcaatgccagtcggcaacgaattttgcgaaccagaaactaaacaaccagcacaatcacaacatttggttatcaatgaataacagagcaggcaagtatgaaacataaatttcaaataaaaatatgtcaaaatgtatagctctcggaaattgtaagtgccgagatcccaatgttctacagtaaatggggtttacagtaaaggtgtaggctaaattcgttaatgagtaagtagccgctagacagaattggttccaggctatagagtatttatattcttgatcaagcggttttgatccctatgatctttgatgtcgccaagggggatggaatctatatgtcttcaatttcaaattccaaatcgcgaaaacttcttcttctttttagttttgctttaagtgctaatgaggtgtcatattccaaaagtataattacccacaaatgttttcacaacaagaaacataattttacagtaaaactttgtccatcaaatcagataattaaacaaaacagaggaggctttttatatatatttgctgtacatataacattactcaaaactcaaaatagcggcagaaggggtctgagctccgaaaatacaaagtggactaggtgggcagagttggcccagactggaaaatatagggtaaatagactgcgtttttatgaaatgtattttcggtgtctctcatatataaggctttttacaaacggtgtatggtgtaataaaatgatcctgatcaaaaatatactgtttagggcatatcgaatattttgggtatttgcattaccttggctccaattgagctggcaacttccagaagtcttgtgttaaattctagtggtctgcagttgcagatcttgttctgtagacggagtgtttccaagcaacgagctgctccatccatagcctccatttgggccatacgatcccctaagcttgccgatgtacccatagcttgttcatattgccggaatgcacgctaaaaaaatggttttattatagttttatcattaaaaatatacataatatgtaagttataatacaaaaatggaatataatataaagtgattcggatctgcgaattaactagatattcaaactaatattcacctagcgtgggctataaaaagtttattaaatggtccgatttctgtggcagttttagtcgttttctgagcttggcaacatatggaaacaaacttgcgctgactccatgtctctggaatcttcatgtccattctcagcattctagttttaatagttcctgagatcgacgtgttcatagggacaggcgtagccggttggatggttttggcggtttgtggacgttagagtgggcgtggcaaaaagttgtttatcaaatcaacagaaatttacctctatttaaacgagtttaatgtttaatggaatgtggtaatctaaaacagtggcattatttagttaaaaggtttaatcatattgatgcaaaggaaagatttctgtaaaagtttaagaattgctttgacacagaagttgacatggagtacgacattggtagcgttaaatgcaaatcggttttcgccttgaacttgactaactcgtgaccaaccactgttcacacgaaacccttctccacttcagtcctccagttatagaattattatatgatgaagaaaaaattgtttccagtcagaagtaaaatcgtagtcatattgcttaacaaccataatgggttctaatttggtattcatgcctgtccctccgactatcctatcctatttcaagcagcagattccctgtctagctgaactagaacacttcccagcggtggataacataacataacttctcgcacaaaattcaagttacgtttttaaagcattcgttagcacaatttttgtataaggccatgtggactataaaaactttacattcaacgctgcctttactgtgcaatacttacatccatgtccattttatttcggtatatgtcgcccatgacgcgaatacttctcgtgtaagtcgcctggtctccagaaataagggaaagcttcgtggcctcctgaaacgaaataattatgcggcgtgaacacaacttgaaatcagttgatggacaggctcgacgataccttacaataatcttgtgcatctccaagctcaccctgctttcggagagaaaccgccattcgcaatagagctgctctatggtggcatgagtttaggtcaccgagttgcagggatcgtgataagtcgtaggctttagaagcgtatgttgcacttttatcgttatcctgaaggcgtccgaaaagctcagaaagcgcgacatacacttgtaactccagtgatggatctccaatagctgtagcaattttgtaggcaccctgcaaaccctccaaagccctagagaacccacccatttctaggtatacacgtgcaaccgtcaaatggacaagtccacttctgcatttagtgccgcactcattgtaaagtgagtgcctggcataactcagtgatcgctctaagcctcccaagctggcgtgtgccctgctgagatttaagtacgtctcggctctcatatttggcgaatcaagctcctctgaaattctaagaaaatcgaagtactcagctagtgggagtggatggtgaaatttcaaaaatcttatcttaaagtatataaatatttagtcatgatctcttgactaagtaataataaatcccaaaacttacccgagctgctgatgactgaattctattgcctcacgaaattttccccagtccatatgtgcctgatacaaatatcctagtagctgaaagcagtcctctctttggcacgtccctttcagtgcactacgccaagtacgtacggcctccgtttgattgttttgttcatatagccgtcgtcctcgctcgatctggaggagaatatatctgtattggtgatattgacatgtgtatatataagtttcacaccttccgtttagctatgtactgtcttaggctttgctggcaggacaaaaagcaactgataacagaacctgatcgtaatagcgcctggctagcccataccgaacgggatcctacatctggactagatccatatcccgccaaccgcgaaaaactctcatctaagtgacacaagtctgtaaaatatgtaacaattgttaaaacattgaaaacattcttttgaagctttaacagaagtccgaatcactgctttttttaattttttaaaaaagtattggtttgattatggagaaaattcatattatttacacaaagcctagttcaatatataaattaattaattaataaatataatataaataaccaattcaaaacttttgagtgatgcctcaatttgacatggtcgtaagtggttctttctaaagacactagaatagcatagttattattaagacactagaatagcatagttattatagtgtcttctttctgcccatgagttatagggcggtataattaatcaatagtgaactcatctaaagggagtgcgattgagaagttaaacatttttttgtttatcgaaattgtaaaaccatgtctgtatgataaaaaaaaaatgaaaaaacacacttcaaaagtgcggatgaggcagttttggacggcttgtggtcttgcaagccaaaatggttttgtgtaccgacataaattggccaaatatataataaaacaaaaaggaataaaaatattttttaaaagtgtggtcggggcaataacaattataggcattagagtggatactatgtcaaatgataataaaataaatatatagacccaaccacaaaggtctatcatgtatagcgcaatgagtttgagatttaaacaacattattaaatacttttagagaagtaacattcaaaccgcttgaattttccaataggtaacgagatccatcaggtgatgtaagtaaacgtgttgcagacagattctggcttggtgggatgctatgtatatatatagatataaatttataaccgttaaataatagctttaaaaggcaaaatgcactaaaatacctaaggagatccttggagttaatgctctcccatgacatggcaggctgcttttcttttcaatctttttggagcgtactgagagtaaaatatgacaatacaacactttaataataggttagattatataggagtacaaattaagtgctgtgaattggctttgaaggtccaatcagatcgagctagcttaagttgcacaagacttctcaccaccaacgcccgtgaaagttaaaattgccattttcttgtttaatcttgtgtgaacagcattttatattacagaatacttacgcattcttacatttataaagagtcagaaagaaaaatgctgttcacagttaataagataataataatgataataataatttaaaaagtagtgatggaaaacatgtaagtaaaaactgaaactatacttaaaggtaactaaagtccagcttcgacatcaacaacagtaccgtaactcagcaataaatccctattcctcttaggagttatatgtatgtgtgaccttgctccaatatttgcttctttcactgtcacaaatatttgtggaatagagtctgtaacgtcttacaaaaaacaaataacatgcacatttgtactgtatttaccctaaaatagtcgttaatgatatttactaaaattccgaatgcagtattacaactctacatctccgctgaatccgcaagaacatatatttctttaaactacgcgtccgacaatgttacaagtcctgttggagtagaggttcttgcacattttgtccgcatttgttggaggatgcgcggtgaaaaatatattagttcagtggaaccagtttcaagcagttcactctgtcacaccacctcttaagaaagaccacggtagcaactaaaatcaaaaaaggaaaataagaaacactgaactcacctgaaaacacacaacgaaattagtatttcttttataaatactcaattaataaggagaaaatttgcgattatataaagtatatacatatatatagacaagtcgacctggccatgtccgtctgtccgtgtcatagtcgagatctggtctcgcacattttagtgaaaccagagctgtctcaaaacgcacactctaacgacgacaaacctcaaaaatatgtttaaaatgatcatttatttttgttgccaatttgccattttttacggtagggggcaagattttattagccaatagaggttatgggccattagtttttggtaagttctcctaccttcgtatgcctcagctatgtaagtcgtctgtcaaggcgtacgccaaaatacgttacatcgttattctgtgccagttgcgttttattgtgtatcagcggagtttataaagagtaaacggtatatgtttacaatttttctcgttttggcggcagtatgattaccacctttccaataccacgaagtgcgttgttgccataatttaacaactgggcaaattgaacttttttggacctaaatggtttccctccattgaaaaaaatttctataaagtagaagaatcaatcagtagaataatcgtttgtatctattagaccgtcaggccagcacaaaaaaatcgccaaaaatcttttttaaattttaaagctggaattgcttaataaaatttcgaaaagttgaaaatcaaaaagtttacttgtttaaaatcaattttttaaagcgcaataccatcgtttgcccacc

SEQ ID NO: 23447 - DNA, 1740 bp, DROSOPHILA
tatatgttcttgcggattcagcggagatgtagagttgtaatactgcattcggaattttagtaaatatcattaacgactattttaggtacgctccaaaaagattgaaaagaaaagcagcctgccatgtcatgggagagcattaactccaaggatctccttagcatcccaccaagccagaatctgtctgcaacacgtttacttacatcacctgatggatctcgttacctattggaaaattcaagcgacttgtgtcacttagatgagagtttttcgcggttggcgggatatggatctagtccagatgtaggatcccgttcggtatgggctagccaggcgctattacgatcaggttctgttatcagttgctttttgtcctgccagcaaagcctaagacagtacatagctaaacggaagatcgagcgaggacgacggctatatgaacaaaacaatcaaacggaggccgtacgtacttggcgtagtgcactgaaagggacgtgccaaagagaggactgctttcagctactaggatatttgtatcaggcacatatggactggggaaaatttcgtgaggcaatagaattcagtcatcagcagctcggggctttggagggtttgcagggtgcctacaaaattgctacagctattggagatccatcactggagttacaagtgtatgtcgcgctttctgagcttttcggacgccttcaggataacgataaaagtgcaacatacgcttctaaagcctacgacttatcacgatccctgcaactcggtgacctaaactcatgccaccatagagcagctctattgcgaatggcggtttctctccgaaagcagggtgagcttggagatgcacaagattattgtaaggaggccacgaagctttcccttatttctggagaccaggcgacttacacgagaagtattcgcgtcatgggcgacatataccgaaataaaatggacatggatcgtgcattccggcaatatgaacaagctatgggtacatcggcaagcttaggggatcgtatggcccaaatggaggctatggatggagcagctcgttgcttggaaacactccgtctacagaacaagatctgcaactgcagaccactagaatttaacacaagacttctggaagttgccagctcaattggagccaagtttctggttcgcaaaattcgttgccgactggcattgatctaccgggcactaggagacgaagatcaatacaacactcattttagactagctaatcagacggatgctgcgttaggcttaaattgcggagcgtgtggggagttgcttggacttcgtccagaaaacttggaagctctaccctgtgcacacattcttcatgcaagatgcgcctatgaaatcttgcgacggcgggagaaaaatgccccgcgatcatgccccgcctgcaacaagctgatcagctcacgcacacatttctgcggcagcgttccggttgaaagtgaaagcaccgacaggtgcgtcacagctgcttccaccttcaatacgaattctttgtcggtcgacggcctcctagggataaactccgacatccttttaccttcggctgcgttttgctacgttaagaatccagctctagataccgaaaacagcgctctcctatctcccaaagtcatttaccacagcaacttatcattggcatctctaagtatgcgtgcatctagcctgacgatcgatagcggccaaaatgtgacgtcatctgtgtga

SEQ ID NO: 23448 - protein, 538 aa, DROSOPHILA; identical to SEQ ID NO: 2724

SEQ ID NO: 23449 - DNA, 6687 bp, DROSOPHILA
tttgttacacttttttgggggatccagttgccggaagaaaaagacttccgtatgtgtatttccagtataacaatcaatcacctcttaacgattgtattcttgatcaggatctgacactgtttgtccgtccgcctttctgtatgtactgtcttctaaacattcttttcatcgtttggtatgcaatcctgtaagttttcgcggtaatcatttcaatgacgtagatcctttcgaactttttacacatttgtttcctcaattattttcctaaattataaaagctcctcttttatctgggctgcaatgggggttgccattgtgttattttttaagtcattcgtaacaaagaatcactgtacaacgtgattggctttctgatggcatataatattttaacagcttcaagttcattcacaaattgttttaagaccaggaatcaactttttgataccctttatatacgttcgacttcattttaaattaattaaaatttaaagataattattttatttgactgtaagaaagttgctataacttgacattttaatttaatttaaatatgaattgaatactacatgtattcgtgaagaccggcaattctttaaagtagttagttttatgtaccttatatgcattttctaacaatattgtgacgcaagtacacggggctgcctttgttgtggcgcattaaatacaaatatcgattgggataatcgggcaatatcaagtggaagtgagatcaacgggcaaacagaaacacgattgaaatacgcaaaataatccaaagatattcaatcaaaattattgtcacgtagtggcgtgtgggtaacagaagcaaacacattagccttcaagcctctgtccaaaaagtatggtttgccaatggtttgccagctgttgtctggagatttagccatggtcaccgtagctaatgtaagatctatgtgcctttttaggtcgcttcgggcgagtcattgtgataacgaaggatggcgacgaaaatatgatccgccgcgaggttttccaggagctgcggcagctggacaacatcatccaaaatgctacaaccacttatgatggtgatacctatacgtacaaggacaattgtgcccgctgggagaacgagtgctttgagaacgatattctcaatttggatgcgctgatggatgacgtaagtaccaccaccagacacatttttcacaaattttaagcggtaaactacaatttaagcttaatgtttgatatttattgcatttcgatttagaaaaacattttacaacttcatatgttttggattctctggttttagattgaagcgggtcaactgaatttgacatttcctttcatgtttaatccagtcacgtgggatgcccacttgtttcctgtcttttttggcggcaccaagctgactgaggacaattatgtgatcagtgttccggccattcagttggtgtatttcgtcaccgcagacaccaaaaggcaggatgccaagtgagtaccaaaaaaaagaaaaagatctcaacattttatcgggacaaatactaaagcggcctttttaggggtgccgagtgggaggagactttcctgcgggtggttggcaacgcagagaattctggacagttcaagcacatctcggtctcatatttcgcctcccgtacgttggaccacgagctcgagaagaacacaaagactgtggtgccctatttcagctcaacgtttctgctgatgggtctgtttaggtacgtgcctgcaaatgtggcttgaaggttttatagcattataacatctgaatttccagcattatcacctgcatgatgggtgatgcagttcgctcgaaacccttcctggggctcatgggcaacgtttcggccattatggccaccctggccgctttcggcctggctatgtactgcggcattgagttcattggcatcaatctcgctgctcccttcctgatgatcggttcgttaaataaaatatacagtttgtgaactactttattgactacttgttaaatcatttcacaggcattggcatcgacgacactttcgtaatgctggcaggttggcggcgcaccaaggccaaaatgccggtcgcggaacgaatgggtcttatgatgtccgaggcggcggtgtcgatcaccatcacctcggtcaccgacttcatttcgttcctgatcggcattattagcccttttcgatcggtcaggatcttctgcacgtactcggtgttcgccgtttgctttacgttcctgtggcacatcaccttcttcgccgcctgcatggccatttcgggatacagggagcggaagaatttgcattccattttcggctgccgtgtccagccaatgtctgttgcaatcaaaggtgagtaaactgctggtagtcgtgggtttgtcattgtacctattgttgttttgcaagcacgttgctgtggtgactgagcttagttatcatgcattttaaattttcttcataaaaagtattgttaattattaagatcattctatttgattgtgtagggcaggtttcataatttggtcccagactcaaattttttctcagcccatcattgtaaaaaaatgttcaagaaataggtttgtaattgctaaattacataagtggggcggaaactggtcactaatgacattataaagataaaattgtttgtcccactctaagctgtttttgaagtgtatgtgctgcaaggtctagttaagtcagctaaaatgtggacaataccacaaccggatcgaagtaatattattttagatgtcttagcaccaacagctgcaacatgaacttgatcatgagacagaaacaactagaaaagccactgtctgagcaagtgctggcgacaattgaggccaatgggaactagtctcacaactcttcattctatcattttgtgtttggctccgcagaaaagcgaaacttcctctacaaagcgatcatggctggtggcatagacgctaacgatcctgacaatcccatcgacaacaaggaccacatgctgatggcgttcttcaaggacaagatggctgcagtaatcaacaacaagtggtgcaaggcgatcatcatcctggcctttgcaagctatttagttggcgcctgctacggaatcacccaaataaaggagggtctcgaacgacgaaagctctcccgggaagactcctactcggtggagttctttgatcgcgaggacgactactaccgcgagttcccatacagaatgcaggtgagtgttgtagcatggcaaataagaaatggatttttattaatattccaaatatggcaggtaattattgctggcccgttaaactactcggatcctctagtccaggagcaagtggagaaccttaccagcaccctggagcatacctcgtacgtaacctctaggcgttacacagagtcctggctacgctcgttcctctcattcttggagcgcaacaatgagctccttaatgttacggtggacgatgagcaaacatttattgacgccgtgaaggagcactggttgttccctggtaaccccttctccctggatgttcgcttcaatgaggacgaaacccaaattattgcctcacggtttctcattcaagcggttaacatcacagataccaatcacgaaaaagagatggttcgggatctacgacagatctgcaaggactctccgctgaatgcctcgatattccatccatattttgtgttctttgatcagttcgaactggtgagaccggtttcactccaggcaatggtgatcggagccatcataatgatgatcatctcctttgtttttatccctaatatactttgctccttgtgggtggccttctcggtcatctcgatagagctgggcgttgcaggatatatggccttgtgggacgttaacctggactccatttcgatgattaatttgatcatgtgtattggcttctcagtggacttcaccgctcacatctgctacacatacatgtcctcgaaaaaacgcagccccaaggcacgagtccgagaagcgcttcactccctgggtcttccaattatccagggctccagctcgactattctgggcattgttgctcttctgctggcccagagctacatcttcctggtcttcttcaagatggtgtttttggtgattttcttcggcgccatgcacggacttttcctgctgcctgtgttactctcgctcttcggacccggatcttgccttacctggacgggaaaggacgatggtagcgacgcagaggtagacgacggcctggacgaccgtcagctggaaaagcccttttcacagtcatattacatgcaataccctagcattggtatcaacggcccatatggctcgaaaggcttcctgggagccccatacaaggcctacggtgtggacgagaaggatctaggactgggtacctctggtgaggactcgtcggagagcagctcaagtcgatcgcagcaccggcagcaggctgccgccacagaggaggaggttgtggtacgtgagtctccgacgcggagatacgatgacggctggcgtcgctcctcctaccagaacatttatggtcaaggagcagcacagtttcaggcccaacccgatctgtacggcaagcaggtttcggcgaccgagtggcgccagcgtttggatacccacgagcagcagcagcgtcaaaggcagcggagaagtccgtttgaaaactaccgccaggacgtagagattgacatgcagaaggcgcgacgtaactcgcacggcgacgttatcgatctgcatggaacacccaactcctccgtggaggagcgatttagacgacggggagagcccttcagtgcggaaagtggggacgacagcagctaccgtcatcaacagataatggctatgccagccgctggatccgctccttcagctaagcggtatcaccgacgacgatcctcagaggattccaccagccgacaccagcgatggccggcaaacatcgaggagcggagggcacgacgcgcttactcgcctgcccacaaccgcccagagactgccttgaccagctacgcctaccgctcctcctcgcaccataatctttaccagccgaacgggaagtcttcgaagtatccgcccacttaccagtatggcgactactaccattgagtgaaatatgcgaaagtcctcgttgaaatgtgacaggaaaattccttatatttatagagtgttctgtgggacagcctttaaacaaattactagcaaagtaaagagcattacaaaccctttaaatgaatgatcaaaatcggtatggattctcaagctaaaagtatttcaattaccccgcttatcagtcgattttattatacgaaccaacaaggttgaagtttaaatgtcttattttgacaactcaaaaatgtgttaatatcgcctgtagaacatataaaaaagttttgattgtttagttttttgtacctattgcaattaaaatcgagttagagagggacttgacgaaacagagcaaacattcttgtcaaccatatttaagttaggccttttgaacaaatcacagctatttcagtcacttttttatacttgcccgcaatttaatgacacaacacaagcatttcatcgataagagctcagagaacttaaaataccaacaacacattaacatacctctagttacatgtatgctatttgagtcagattttgggatccccattacagttttcattaaaaataatttagatttaataacattttgtatagcaaaagaaaccataagtaaatatttaaaaactattacctgataagaatggccgccgcatcaaggacggcttggctacctagcgcttatacgcatttgggacaagtttgtacaattgtttacacatttttctatttaataaaaattttatattttcctagaaatacgtgtcatcttcaatgtttgttgggttgcgcttgtcttaatggctttttaagcttattttgatgggatattgtgtagacatggccatataaatgcatttatttctggacgagttctattcagcatggttaccatactgttcactatctttagcttacctttcttggtaatagcatccagcaacatcaacaataccgatttgactttttatcaaaagtgcaatccgcttcttcagtgcaatgcatatttttcagtggcaggttttgctgaagtaagctctggtaactacttatgaccttctgtcatagtaatgatttttctttttaaggtaaactggcttgaagctaaccatgtatgcaatagagttggagcagtcctagctactgtcagaaatgaggagcagcatcagctaatgcttcactacgtcaacaggaaaggtaagcttgataaagaaaagtgacactactccccgtttgacctttatatagaacggatatttggaaacagaaccttttggttgggcgccacaaacctggtggatcggagctatttctggacctggatgagcactggcattcccgttacctacgcacaatggagccggagagagcccaagtctgatcgaacaggtcaagacgcctgcctggtcttgggaacagacaatctctggcatagtgaaccctgccaacggaaacacaattttatttgcgaaaatgtttgtcagctaaattattcagggctggacaagagagtatatatataaaattgttatttcaatctgaaaatat

SEQ ID NO: 23450 - DNA, 3740 bp, DROSOPHILA
atgatccgccgcgaggttttccaggagctgcggcagctggacaacatcatccaaaatgctacaaccacttatgatggtgatacctatacgtacaaggacaattgtgcccgctgggagaacgagtgctttgagaacgatattctcaatttggatgcgctgatggatgacattgaagcgggtcaactgaatttgacatttcctttcatgtttaatccagtcacgtgggatgcccacttgtttcctgtcttttttggcggcaccaagctgactgaggacaattatgtgatcagtgttccggccattcagttggtgtatttcgtcaccgcagacaccaaaaggcaggatgccaagggtgccgagtgggaggagactttcctgcgggtggttggcaacgcagagaattctggacagttcaagcacatctcggtctcatatttcgcctcccgtacgttggaccacgagctcgagaagaacacaaagactgtggtgccctatttcagctcaacgtttctgctgatgggtctgtttagcattatcacctgcatgatgggtgatgcagttcgctcgaaacccttcctggggctcatgggcaacgtttcggccattatggccaccctggccgctttcggcctggctatgtactgcggcattgagttcattggcatcaatctcgctgctcccttcctgatgatcggcattggcatcgacgacactttcgtaatgctggcaggttggcggcgcaccaaggccaaaatgccggtcgcggaacgaatgggtcttatgatgtccgaggcggcggtgtcgatcaccatcacctcggtcaccgacttcatttcgttcctgatcggcattattagcccttttcgatcggtcaggatcttctgcacgtactcggtgttcgccgtttgctttacgttcctgtggcacatcaccttcttcgccgcctgcatggccatttcgggatacagggagcggaagaatttgcattccattttcggctgccgtgtccagccaatgtctgttgcaatcaaagaaaagcgaaacttcctctacaaagcgatcatggctggtggcatagacgctaacgatcctgacaatcccatcgacaacaaggaccacatgctgatggcgttcttcaaggacaagatggctgcagtaatcaacaacaagtggtgcaaggcgatcatcatcctggcctttgcaagctatttagttggcgcctgctacggaatcacccaaataaaggagggtctcgaacgacgaaagctctcccgggaagactcctactcggtggagttctttgatcgcgaggacgactactaccgcgagttcccatacagaatgcaggtaattattgctggcccgttaaactactcggatcctctagtccaggagcaagtggagaaccttaccagcaccctggagcatacctcgtacgtaacctctaggcgttacacagagtcctggctacgctcgttcctctcattcttggagcgcaacaatgagctccttaatgttacggtggacgatgagcaaacatttattgacgccgtgaaggagcactggttgttccctggtaaccccttctccctggatgttcgcttcaatgaggacgaaacccaaattattgcctcacggtttctcattcaagcggttaacatcacagataccaatcacgaaaaagagatggttcgggatctacgacagatctgcaaggactctccgctgaatgcctcgatattccatccatattttgtgttctttgatcagttcgaactggtgagaccggtttcactccaggcaatggtgatcggagccatcataatgatgatcatctcctttgtttttatccctaatatactttgctccttgtgggtggccttctcggtcatctcgatagagctgggcgttgcaggatatatggccttgtgggacgttaacctggactccatttcgatgattaatttgatcatgtgtattggcttctcagtggacttcaccgctcacatctgctacacatacatgtcctcgaaaaaacgcagccccaaggcacgagtccgagaagcgcttcactccctgggtcttccaattatccagggctccagctcgactattctgggcattgttgctcttctgctggcccagagctacatcttcctggtcttcttcaagatggtgtttttggtgattttcttcggcgccatgcacggacttttcctgctgcctgtgttactctcgctcttcggacccggatcttgccttacctggacgggaaaggacgatggtagcgacgcagaggtagacgacggcctggacgaccgtcagctggaaaagcccttttcacagtcatattacatgcaataccctagcattggtatcaacggcccatatggctcgaaaggcttcctgggagccccatacaaggcctacggtgtggacgagaaggatctaggactgggtacctctggtgaggactcgtcggagagcagctcaagtcgatcgcagcaccggcagcaggctgccgccacagaggaggaggttgtggtacgtgagtctccgacgcggagatacgatgacggctggcgtcgctcctcctaccagaacatttatggtcaaggagcagcacagtttcaggcccaacccgatctgtacggcaagcaggtttcggcgaccgagtggcgccagcgtttggatacccacgagcagcagcagcgtcaaaggcagcggagaagtccgtttgaaaactaccgccaggacgtagagattgacatgcagaaggcgcgacgtaactcgcacggcgacgttatcgatctgcatggaacacccaactcctccgtggaggagcgatttagacgacggggagagcccttcagtgcggaaagtggggacgacagcagctaccgtcatcaacagataatggctatgccagccgctggatccgctccttcagctaagcggtatcaccgacgacgatcctcagaggattccaccagccgacaccagcgatggccggcaaacatcgaggagcggagggcacgacgcgcttactcgcctgcccacaaccgcccagagactgccttgaccagctacgcctaccgctcctcctcgcaccataatctttaccagccgaacgggaagtcttcgaagtatccgcccacttaccagtatggcgactactaccattgagtgaaatatgcgaaagtcctcgttgaaatgtgacaggaaaattccttatatttatagagtgttctgtgggacagcctttaaacaaattactagcaaagtaaagagcattacaaaccctttaaatgaatgatcaaaatcggtatggattctcaagctaaaagtatttcaattaccccgcttatcagtcgattttattatacgaaccaacaaggttgaagtttaaatgtcttattttgacaactcaaaaatgtgttaatatcgcctgtagaacatataaaaaagttttgattgtttagttttttgtacctattgcaattaaaatcgagttagagagggacttgacgaaacagagcaaacattcttgtcaaccatatttaagttaggccttttgaacaaatcacagctatttcagtcacttttttatacttgcccgcaatttaatgacacaacacaagcatttcatcgataagagctcagagaacttaaaataccaacaacacattaacatacctctagttacatgtatgctatttgagtcagattttgggatcccc

SEQ ID NO: 23451 - protein, 1061 aa, DROSOPHILA
MIRREVFQELRQLDNIIQNATTTYDGDTYTYKDNCARWENECFENDILNLDALMDDIEAGQLNLTFPFMFNPVTWDAHLFPVFFGGTKLTEDNYVISVPAIQLVYFVTADTKRQDAKGAEWEETFLRVVGNAENSGQFKHISVSYFASRTLDHELEKNTKTVVPYFSSTFLLMGLFSIITCMMGDAVRSKPFLGLMGNVSAIMATLAAFGLAMYCGIEFIGINLAAPFLMIGIGIDDTFVMLAGWRRTKAKMPVAERMGLMMSEAAVSITITSVTDFISFLIGIISPFRSVRIFCTYSVFAVCFTFLWHITFFAACMAISGYRERKNLHSIFGCRVQPMSVAIKEKRNFLYKAIMAGGIDANDPDNPIDNKDHMLMAFFKDKMAAVINNKWCKAIIILAFASYLVGACYGITQIKEGLERRKLSREDSYSVEFFDREDDYYREFPYRMQVIIAGPLNYSDPLVQEQVENLTSTLEHTSYVTSRRYTESWLRSFLSFLERNNELLNVTVDDEQTFIDAVKEHWLFPGNPFSLDVRFNEDETQIIASRFLIQAVNITDTNHEKEMVRDLRQICKDSPLNASIFHPYFVFFDQFELVRPVSLQAMVIGAIIMMIISFVFIPNILCSLWVAFSVISIELGVAGYMALWDVNLDSISMINLIMCIGFSVDFTAHICYTYMSSKKRSPKARVREALHSLGLPIIQGSSSTILGIVALLLAQSYIFLVFFKMVFLVIFFGAMHGLFLLPVLLSLFGPGSCLTWTGKDDGSDAEVDDGLDDRQLEKPFSQSYYMQYPSIGINGPYGSKGFLGAPYKAYGVDEKDLGLGTSGEDSSESSSSRSQHRQQAAATEEEVVVRESPTRRYDDGWRRSSYQNIYGQGAAQFQAQPDLYGKQVSATEWRQRLDTHEQQQRQRQRRSPFENYRQDVEIDMQKARRNSHGDVIDLHGTPNSSVEERFRRRGEPFSAESGDDSSYRHQQIMAMPAAGSAPSAKRYHRRRSSEDSTSRHQRWPANIEERRARRAYSPAHNRPETALTSYAYRSSSHHNLYQPNGKSSKYPPTYQYGDYYH

SEQ ID NO: 23452 - DNA, 3701 bp, DROSOPHILA
gcacggcattgcttcatatgtatgttttgatgtataataactattcgattttcagttaactcgcgttataaactgcaaaatgtagcgtattttagaaaacgttcgaggcgttctacgttctgcgtgagaatcgttgattaatttgagttaagtggcgttagaaattggttaagatagacttaagaaacttggcaaacgtcgccttcctctggtgttatcaagttagtcaagatatataaaaatacgttacgtaggttataacattcgattagtacaagtaggtatgtataaatatataaaaagtacacaacgtgtaaataagactaagtcaatagaggagacctccttcgggcaggttgcttagctgccccgcgcatctgtcctttctcatcataagcacttcatatttcgatttgttgcatttcgattggttttgttgtttttttttttttttttttgttttgtttttggcaaaatcacaggagaattagaaatataacatcaatatgatagagcgaaagtgcattcgatagagcattcgttcaacttgggttgctttatttgcctttgcttgcacgaacttggattccgccttagttaagtttagttttgcttctggggtttttgaattctttaaatgtatatttgtataataaattatgactatatatgcatttatatataagtatatagatgaatatatttaagaagtaagtaggaggcgcattattccacttttcaacttaggataacaacattgcattcgcgatttctccctaagccttcgatcgctgtactgactgactggctggctggctgactgactgactgactaactgaactggctcgccaaaggctcataacaatatttaactatagagaatcgccgatcaaaaataataaccatatgaatagtggtgatagtgacaatcgaaggatgccgacgtgtataaaataaataaataacatcgcgtagaaaaggatctgcgttaaacctattttagacatcgactaccatcttcttgtgaatgtccgtgttgccgaccacagagcagaactcatcgaacgagatcttgccatcctcatccttatccgcgaatccgatcgtcttgtccacaatctgctgcagttgcgtgtccttcagattattgcctaccatcatctttaaaaccttttagaggggaaacacttcagtggaatgagcttaacgtaatgttcgcgggtcttgcctgaaacagttcgccattggaaatgtaaccatcgttgtccatgtcatagatgcgaaaggcgaagcgcaacttggacagcttgtcgcccttgacgctgaactgcgacacgccctggatgaactccttgaagtccacctcgccgttgccgtccgcgtcgaaaatgtcgatcacgcgctgcaccagcggattctgttgcagctccggcagcgacatgaactcgtccacgctcagcgcgcccgaattgtccaggtccagtttccggaaacgtttgcccagccgccggatctcgtcggcgtcgactgcagaaaggcgggaaatatatagaaatagagatttagattctagaacggtgtgaggattatgattacagtggagctctttgaactctatacttaaaaattcaacatcaaatttctatagcgttattaggattaataaagcttttaaatactattattttcacttgaaatattaagtaaatttatctaacatacaaatgtaaattattccttttcgcgaatataaatcacataattgaaactaaagttatttaattattactattctgctaagtaactatatagtattgagcatttaaacagccctttagtatgcagatgtaaaaccagatttcgagattctggttaagattgttggcgatttatatttagcatccggttgtctgtcgatcatcagatgtgcgacaaggtgtgacaaatacacattctagaatggcaattttgaaataggacgatggtgcggaataaagagttgggaattcaaaatgtatttctacgccacgtttcgtttgcattccacttttgttggccattcgcgtatttacatgcctacatatgtgcatacgtacatacgggcgtacaatcgtacatgcataccgtatctaaatgtacgcttctaaatgcccatgtttgcatattcataaacagctgccattccgttcaaatgacattgagtgaattatttcgtacttacaattggaacacatttccatgggcagtgatgtttcatttccctgcaggcgaaaaaatatatgttaaatgggaagttttaatattttgcaatgccaaaagagggaaagagaggtggggggttggaacgaaacgcagaacggaagttggctttataacggtataagctcccactccctatctgcgctctctacttctcactttcccgctctcagcctcttcccctctttcgtttttgcactggttcttcgcttattttggtggcattttattaccattttggttttgccttttgtggttctccttggatgctatctatagagtacaaataaagttcgctcttttcgccgttccgctcttggttttcctctagtttcctttaaagtcctacgccgcgggctatcctgcacatgctactgtggtttttgggccgctgaattacggttttgttgtggaaatattcggttttctattttctattgtgcatgagtttttccacagcagcttttggtgtgaccgcggttcgagcgacaaaaaataccttggtggccaaggaagaataccagaaagcttagcgttggcaacgcgttgacagggttgtcagcgtttgtcacattaatttaaattagcgcggttttttaaaacagaacatgtatttatttatttatacttttagtaattgaactgcatgacacttctttagtatgatccaaaatttccattcatatacttggtaattttccttcattagcaatcttaagtgtaagtgctcacaatttacagttcttatctgtttaaaatgtttaattatatcatgtaatctgggctggcttaatctaatgttttcttatcgtgaattcattgttggcttaatcttatgttttcttcttgtccatcgaagatagatgcatttgtacgagtatgtaataaagaaaaataaaaacatattctgaattttgaatttgtaatgatatattttcccattacttaagcttagttaacttagcttatttaacaagtaaacacgaggaaacgcaggtcaatatttgaaacattcgtttgaaatactactgatacaaaataatatcaaaacacttttcgaaagtgtgcgcgtaacagttttgaaaggtttgtgaattatagagtgggcgtgccaatcttacatagcgtagaatctatgtacataccctctagcttatatagttttttatttgttgatcgggatgtttatacggacaatcgcttcaaatggttacacatgcttctcaacgaatcaagtatcaggtgtaaaatcttcattttctgcagcccaacttaggaaagttaccccaagacaaatgtttgtggctacgccgctgcatttcgttggcttcccgcagcaacatcaaacaaccatagataccatttactgcccatctgacataatctcttggttaaacatttccccagccagttgcctggcttccatctcgattccatcttc

SEQ ID NO: 23453 - DNA, 718 bp, DROSOPHILA
acaatagaaaatagaaaaccgaatatttccacaacaaaaccgtaattcagcggcccaaaaaccacagtagcatgtgcaggatagcccgcggcgtaggactttaaaggaaactagaggaaaaccaagagcggaacggcgaaaagagcgaactttatttgtactctatagatagcatccaaggagaaccacaaaaggcaaaaccaaaatgggaaatgaaacatcactgcccatggaaatgtgttccaatttcgacgccgacgagatccggcggctgggcaaacgtttccggaaactggacctggacaattcgggcgcgctgagcgtggacgagttcatgtcgctgccggagctgcaacagaatccgctggtgcagcgcgtgatcgacattttcgacgcggacggcaacggcgaggtggacttcaaggagttcatccagggcgtgtcgcagttcagcgtcaagggcgacaagctgtccaagttgcgcttcgcctttcgcatctatgacatggacaacgatggttacatttccaatggcgaactgtttcaggttttaaagatgatggtaggcaataatctgaaggacacgcaactgcagcagattgtggacaagacgatcggattcgcggataaggatgaggatggcaagatctcgttcgatgagttctgctctgtggtcggcaacacggacattcacaagaagatggtagtcgatgtctaa

SEQ ID NO: 23454 - protein, 162 aa, DROSOPHILA
MEMCSNFDADEIRRLGKRFRKLDLDNSGALSVDEFMSLPELQQNPLVQRVIDIFDADGNGEVDFKEFIQGVSQFSVKGDKLSKLRFAFRIYDMDNDGYISNGELFQVLKMMVGNNLKDTQLQQIVDKTIGFADKDEDGKISFDEFCSVVGNTDIHKKMVVDV

SEQ ID NO: 23455 - DNA, 2304 bp, DROSOPHILA
tgtgtcgacgtcatagactacgaccttcggcttctcggccgcgttccgtgccacattcagtccaacttctgcgaatcttttcgatgtcatcaccttctgcagctctccaaccgaaggagtacgaatgatcgcaccaccacctcgacggagctcacgtacctcgtgtactctgactccgagggagggtgcaaccatcgttcgcaccttttcggctatggctttccccgatagcgcagggtcgtcgcacttcaccaccgctgaccacgtctcacgaaccttggtggtccgcggggcagcgatgggtgcaacctgaggcatctggggagcattggcggcagtagtgttcgccttggacggcggcggcggcggtggtggcatagcgagccgcgtctccagttctccataccggagcattaatgccatcaccagctcacatagcggctgatggcacagacagacggacacggccagatcgactcggctactgatcctgatctagaatatatgaggtcccagggtttttttatggccaaaaattcctgcgattgcgttgttttattataattgtttattatattattaatttttggcaaaacaagtctatgtgattttgaaacttaatgagtttacaaaaatgtgtgttttgatgtgttacgcttgacatctcggcacagactgctcgtcaaattgattgatctctctattctctcacgctctctagtggaccgacgactactccgcgtctctcggtcaactccctcttctggcttttttccgattcctacatttggccctcctaactgggtgttcgtcccgaactccttcttaaaatcagctacagtggatgtttttaaaggaccttcaccatctcccacttgttcaacatcatacctgccatgcttatgaacctatcttgtaagggccaaagaattttcctttccttttaacttctgacaaacttcatactgagtacgtctgattgcaacaagatcgttgaccatgaattgcttttcttcttcatttcttccgttacccagaggtacacctgtagggatcaataaatgccgaatctggtgtttttcgtaatattccttgaacaaatgtgatgtgaaagctgcaccacggtctgatacaatcctgaatggcttaccaaaatttagcgcctgtctctctatgcaattaagtacctcctctaccccagtacttcgcgtcggataaaaccaaacgtacttcgagaaggcatctacgatgactgcgatgaatgatttcagtctccatttgatattgaatgaaaaacaaaacattcaactggactgagaacgtctagatgcatcatcattgttcctgatcgatgttcgtagattcgtagttgtaaaaacattgcccacttagctattcgcaacggaactcctttcttcttcatcgtcattgcaatcgcgttacagtctgtgacgattttatacattattcccaggacagtgctgtcagtgctgcaatgactgcaacaactttcagttcgtatgagtgatatttttcctcacacatgacgggatgtaaatgactgccttttctaaccatttgtaacaagactgcgttcgtatgtgtctccgtaggcaacttcggatcatacagtttcaaaaccggttggattgattgactgattaaagcagctttcatatgttcgattgcaacctcctgcaactctctatattcaaatttcaatttcaacctgttctgttcagccaccaccagcactcttttcagatttttcaaaccttcttctacgcctttacttggaactataatatcgtccatatagactacagcgtcagcggattaaatgagttctcttagaactgccattatgaaactcgtagtgtcctttctgtgtaaaagtgaggctaactctcagcctctaccgaaataactgggcttaaaactcttttagtcaagccactcctgaacgtgcccgtcaaaaaaaatacagtttaactccaagaaatgtaaaattgaactcctgttaatgcaacagcatgtagtattcatccgttaaaaaatatcatccatgtttttttttttgcgccgcatttcgctaccaatctcacctaccgccaaatcggtaagttttctgccactcatcagtgttgcaacctgctgttccccgccaactcacaaatacaaattcggcctcgctgtctcgccaatactgcttccaatatgttgtattcgttctacttggcgtcaccaatacttctccagatatatatgtaactcattcttctgcagtaataatttccaaaatac

SEQ ID NO: 23456 - DNA, 396 bp, DROSOPHILA
atgttttgtttttcattcaatatcaaatggagactgaaatcattcatcgcagtcatcgtagatgccttctcgaagtacgtttggttttatccgacgcgaagtactggggtagaggaggtacttaattgcatagagagacaggcgctaaattttggtaagccattcaggattgtatcagaccgtggtgcagctttcacatcacatttgttcaaggaatattacgaaaaacaccagattcggcatttattgatccctacaggtgtacctctgggtaacggaagaaatgaagaagaaaagcaattcatggtcaacgatcttgttgcaatcagacgtactcagtatgaagtttgtcagaagttaaaaggaaaggaaaattctttggcccttacaagatag

SEQ ID NO: 23457 - protein, 131 aa, DROSOPHILA
MFCFSFNIKWRLKSFIAVIVDAFSKYVWFYPTRSTGVEEVLNCIERQALNFGKPFRIVSDRGAAFTSHLFKEYYEKHQIRHLLIPTGVPLGNGRNEEEKQFMVNDLVAIRRTQYEVCQKLKGKENSLALTR

SEQ ID NO: 23458 - DNA, 2644 bp, DROSOPHILA
ggctgatgtcgagcatcaatgtgctaccatctcacgcgtgttggctcctttgacaagccgccatggctgtctacttaaatgcattagctcgggggggtggaatccttcgattgggctgcctttttaatagacattagtaaacgcatcagtgattgtttgttcggttggccgggaaggccatcggccatcggccatcagctcttgtgcagacaactgcaactgaaacggatgctaaatggaagtgacattacagccagaccgaccccaggaagtgacaaaatgaattatggaccctggctgcgatccaaactccccaaaagccaaagtcaaagccaaagtcggaacaattgttccctccgatgccacctgatccatgttgaaccagtaaatgcaattgcgacacgtgctcaatgaatgtttaatgatttgttaattggatttgggcttttaaaaacacggctccccgtgtccaattcatttgctcgaaccccaacgcatcctgtatcgccgggatcccaggtctttgtgccaataagtttgccgtcgctcatcaatatttatgccaaacatgagcggccaaatgcctctgggatcgccgctctgtaccagggacttaagcccctgacgacggtctgacagtggttggtccttaatgacggcccactgttatgcaaatgggtacgcggccaaaacgcaaatgggtcatacagtggagcatccattgacaagtcgaatatgcataagtaattatgtataagaatttcaccttaatttcctttgagacacaataaaaggcgttctctgttaggggtttacgtaagttattttcctggaaggttcctttaagtttttgttggacagctaaaaagttatttgatcaaacgtttaacattaatatttaaaatattaacaaatgccaagtgagattctaggagagttatgtaaaagctttaagcatgatcttctatttggaacatagtctcgcaaaggtttcttgtcaagtttttttttaaaaacgaaatatattcttgagtttattattcaaaacatttacagatctaaaaattttgtttacgaattgatatactgaattaaaacaatataagtaacaagtcacagacagattatcacacaggagaatatcggagatttggcgcttagatgtgggcgcgattcttgtagtagcactcgaatagctgataggcagtatcgcacttatccgctcccttggtggcatcacacttggcctgaacggccttcacggcatcctcgccggccaggggtcccaacttggccagaacgacatcgggctggacctcaccattgatcaggaatccgattttctccaagaaacaattggcgaagcatttcaccttggggtcactgtcatcgaaattgccgtttcgcaaggcgatcgcctgatccttggtgattccctcctgctgggcacaaagggcgccattggcatgggccacagccttctgctcatcggatagttgcagctcctataagatatattcaaaagatacacttagcaatactacccctttaaatcagaaactatttgtaactcacagcagccgaaatggccaaaatgacggagaggacaatcaggaacttcattttcggtagagatgttgttggaaaccctttggtatcgaaactgttgaatttattctgttagcatctgccttttatacgattttgcatgcagcttcgtcagagttttgttttgattatcgctttttgttttcgctctactccgctgatcacactgtataagcaattattacacatacacacggcaatacaccggttagtttacttaaaccctctccgatcttgttgataacccgaaactgactcacttttttttaccatttcggtttaaagttcaacagatactcgaatcagtaaatgaagcaagttcactgcggctttccattgtacctataattggccctaatgccccagactcgggcttattattaggctaaaatcgcttcaaagccataatgtaagtgctaattgtagtttcagattttccaccgattaaaagtgtgttgtacttcccaagggtcagagtgcccagcgaagcgtcaacgtcaactaatttgatttaacaatacacgtaactccaaaaccttaaacttgaaatacaatctaacgttgatttttatggaggtgttaaaacaaagtgcatgcaaagcatgataggggagttttagagaatagaatataaaagcaacattttatattacttacaaaaatttttagtaacacttaaaatttaatataagttaacggaggccatgagatgctcgaattatttgtaagccttatataaggtctgcgcttaaatatatttcttcattccctatatataacccttataaccaaaatatatctattaataccaccattataaaatttgtctcatattaataaggctacctcattaccgcaacaaattatttcttggtgattctaatgccattattaataattaaataattttgttaatagaccctttttttgaaataagtctgatattacatgataaaattaatgacgaacgtctgattcgtcaaacctgttttaactttgtcagttgttctcctacctatttttattgttttgttgg

SEQ ID NO: 23459 - DNA, 574 bp, DROSOPHILA
ccaacaacatctctaccgaaaatgaagttcctgattgtcctctccgtcattttggccatttcggctgctgagctgcaactatccgatgagcagaaggctgtggcccatgccaatggcgccctttgtgcccagcaggagggaatcaccaaggatcaggcgatcgccttgcgaaacggcaatttcgatgacagtgaccccaaggtgaaatgcttcgccaattgtttcttggagaaaatcggattcctgatcaatggtgaggtccagcccgatgtcgttctggccaagttgggacccctggccggcgaggatgccgtgaaggccgttcaggccaagtgtgatgccaccaagggagcggataagtgcgatactgcctatcagctattcgagtgctactacaagaatcgcgcccacatctaagcgccaaatctccgatattctcctgtgtgataatctgtctgtgacttgttacttatattgttttaattcagtatatcaattcgtaaacaaaatttttagatctgtaaatgttttgaataataaactcaagaatatatttcgtttttaaaaaaaaact

SEQ ID NO: 23460 - protein, 131 aa, DROSOPHILA
MKFLIVLSVILAISAAELQLSDEQKAVAHANGALCAQQEGITKDQAIALRNGNFDDSDPKVKCFANCFLEKIGFLINGEVQPDVVLAKLGPLAGEDAVKAVQAKCDATKGADKCDTAYQLFECYYKNRAHI

SEQ ID NO: 23461 - DNA, 5013 bp, DROSOPHILA
caaataaagagaatctatatgtgtaaaactagacaaacgaaattcctccgccgtaatattccaggcgtgtctgaggctggacaaatgccaaccaatcggaggcgtgggtggggaggagccccatgctctggcacttgtagagggccaaagccacgtttgctaggttgcccaggaagtagacgatgcgctggccagttccctgggccccctccgccattttggaagtcacctgggtggtgaagatggccttgataggccggatcagcatcatgccgaccatcatgatgggaaaaatggaaatcgagtttcctgacatgtacatgatgaatagattcatgggaatctgagggaatccaaaggttaagcacgggtctttccaaagggctgctactcacgttcttaagaggtcccagggcaaggtcccacgacttcttgatgaccaggcgctggtcgcgcaccacttcactctggttcaccaaagcagatggattgtagcccagcggcgaaggaatatcagcatttttgctgcaggaaaaagcaaaagtggtaagaacttgagtcaccgcgcaggctagcaatccttacctcccgttaaagtccagcgcccactttaacttttttgggttttgcttggcggacatgctgtgctttcttttatttaatcttttgccaatttataaaacaaaatgacgattttttctgacaattggtcgctgagtgttgttcaacgttaaattccgaaattattgtagtgtagacaattcgataggcaactgatgtgtatggcaccagggtatcgataggcagttacgattttgcgcggactttttgaaacgcatgtgcaaaaatcgaacagcgcagtagttttcattaatatttaaattttatttcaaattaccttttaagtagtactttcctttttaatatggtcttatatatatgcgtgatttttaatggattttgcgtgaccaagcgacaacaagaaacagaagggttaaaaattaaaatggtatttgttgtatttttaaagagcaattacaattacagttttttctcattaatattactttaatattataaaattaaaaagaaatatatattttgatgaggggtagggagaggacaaaaataacttaaaaaagacatttttataccatatactatagtttcctttcttgtgtgattggttgggcttttcttttactcgatttgcttttaaacatccaataattatgtatacgaatttaaattatattatagcgttctttatatgctgcttgaaaggttatgtttttgcaattcaataaacaatttcagtttcttgtttggaaatacggacatgcggagccctttaagttatgcgaagatctgctgctcttgttgttggtgttggtgccgctgctgctgttttgtgaaaattccttctgatgtcgatttccaccgtttaccgctggatgttggatgtccttcagccgctctttctatggttctggttgctggttaactgcttcggctcgcttgaaatcagagttagttgtattcatattgttgctttaattttagtgtttaattagcgattagcgttcttcaattggttggacagccagtcgagtccctcgtacagcccatcaccgctagttgcacacgtcgcctggatgtaccagttgcggtttctgagtgagtgcaagccgagcttgtcggtgatttcggccgcgttcattgcatttggcagatcctaaaatgatcccagaaaagagcgaggtgcaatattagtatgacaatataaggaccgagcaactggctactgataacgacaacctttgcttggacctacctgtttgtttgcgaagattagtaagactgcatccctcagctcgtcctctgccagcatgcgcatcaactcctctctcgcctcaccgatacgctctcggtcattgctgtccacgacgaagataagaccctgtaacgattcaaatgaaaactttattccaattgtcctggcttgaatcgtaggagatagatctctaagataatatagtcagtcccgtcttgaaacaaaataaacttgaataatcacaatgcataatcattacaagctgttaacatcatatagaattttctggaatctgtggaaaagctgaaatcacacttacttgtgtattctggaagtagtgcctccacaggggacgaattttgtcttggccacccacatcccacactgtaaagctaatattcttgtattctacagtctccacattgaaacctagggggacaaccattagatattagatttggacaagatacattaaaggtgctaataagatacttaccaatggtaggtatcgttgtaacaatttcgcctaatttgagtttgtacagaattgtggttttaccagcggcatccaaaccgaccatcaatatcctcatttcctttttgccgaataggcctttgaataagttcgcgaatacgtttcccatggctgctgtttgtctttcggatgctcggtagtcgtaggaagttggatctctggttggcctgctcgctgtctgctggctggaattatgacaagttcaaatccgagttgctataccgatcagaatatgcaaactgcacacttgtgtgcatggagtgggagaatctgtgaagagtccaaaaatagacagttgtaggcgagaatttttcgtggtaggaagagctatcacaaaggacggatgcgccgaagctcctctggtgtttgtttcacttatgatcgcgcttacgtgttgaatggcgcttacccactctgagtcatacaaaaaccggaagagcggaaaaaccggaaaaagaaacgaaattcgtttttgtttattgtaataaggacgtcttcaatgcgtcagcatgagaaaaacagaaaatttgtttatgtaattaattccacacttaaatacaacgcgaaatggaggatgtatgaaacacgagtcgcttgcttttagtgtttgccccgctagcggctgctgataagatatcgatttttagtatagaaccatgacggctgtcggcgctcagcgcctcccttccaacgtcctccacccactttacacagagtacgcaagaaacgtgcgggctgagaagtgcgtgaatgataaggccaggtaacttgcagttttcggcgaacttgctgggcggaggggaagctcccaaactctacagtgagtcaccgctgccgccttttgagccctgcaaccgagcaggctgcaaccgatggctaagcaattcatgttaaaatggaggaacgcaatgagcaagcccgtttcgcacgaacacaaaaagaaaaaaggttgccagcgaaacatacggaaacctttcgtttgacagcaatcggatatccaaaaacctaagtttgttacagggaactaacaccccagagacttcttctccggaccggtagtgcgcaaagataggtgctccacgttactgagaagatgctgatgccagctgacgatagttggcttggaagcagccgaaatcgaaaactacacgtagcagcttttaatttagcgctgagggaagcgaggcagcccaccaccgcacactcacgcatacacccgcaggcgccagggttgccaactgcgttgagccgccctgcctttgctgcctttaatgcgtttaaatagaagctccaggcggagggcgtcactgctcgaagatgaacgcttcgccagcccacgccccatgttcagacatttcgcaactaagcccactttcggatcgggatcagacaactttgaactttatacgtggttgcctgcgtctgtgtgagtgacgtacgctgtttttcttatgggttggtgaaatgcggctgccgccgtcccttgtttttacaagaatacagagaccggtccgaagttacttggacttcttttaactgagatccttttagctcagtgacactttacacgtccatttaccgattattctgccttttttcgtggacttttctttgattgaattttctatgctgccaaacacaccacacaccgaattgcgaatagaaagataatggagagaaatgtatcgatagcatccgctaccgatagtcgatgagcacaagtcactattgtctgccgaacagagattgtaaaatgttcccaattatataatttagctatcacttttgtaattaaaggagagcttgtccttgtctcctgttacgataatgctataaacaaagcaccgacgattaattcgtgcggcttccaatactaatacttccactattcaccacagccgcgtacgttgcgcgagtgttcgtggatagcccacactaaacactcacacgaacatctacattactgcggaacttcttaaaatcaagaaaagtatctctgccttgacataccaccccctttttcgactgaaaacgcatacgcaccaactaattgaatcaaatgcacacggctaggagcggaaattttaaaaacttctgcttggaaatgtctaaaatcacagagcaaaataaaacttgaccgagaatacacttgctgttgaaaaaactgcaaactcaccaacataaacgttgccgatagagatgggcgcagcgcatgagctagagcgggatgccgatgttgtgtagtcccgtggtgaaaactcgggaaatgctgccacgtctcttctccgccacctcggctagagttgccaacgatttggattaatcgattcatcattgtcgcacaatgctcactcgataaagttcactatccaggtgatttgaactaagttaaatgttaatatgttttacccaaaaacaccatttttggtgaacccgttgctggaagccgatatccttaaagtgaatgtatgtactttcaatgtgcacaaatacgtatttacaacaaaaactggcttgcaaattttattaactgttaattcctggttttgtcaagtctgctgcacttgctccgctgttggaatggctgtgccttactcccaaagtcaccacttacagggtgaacactcttaggtgttccgttgac

SEQ ID NO: 23462 - DNA, 1345 bp, DROSOPHILA
tggtgtgtttggcagcatagaaaattcaatcaaagaaaagtccacgaaaaaaggcagaataatcgattctcccactccatgcacacaagtgtgcagtttgcatattctgatcggtatagcaactcggatttgaacttgtcataattccagccagcagacagcgagcaggccaaccagagatccaacttcctacgactaccgagcatccgaaagacaaacagcagccatgggaaacgtattcgcgaacttattcaaaggcctattcggcaaaaaggaaatgaggatattgatggtcggtttggatgccgctggtaaaaccacaattctgtacaaactcaaattaggcgaaattgttacaacgatacctaccattggtttcaatgtggagactgtagaatacaagaatattagctttacagtgtgggatgtgggtggccaagacaaaattcgtcccctgtggaggcactacttccagaatacacaaggtcttatcttcgtcgtggacagcaatgaccgagagcgtatcggtgaggcgagagaggagttgatgcgcatgctggcagaggacgagctgagggatgcagtcttactaatcttcgcaaacaaacaggatctgccaaatgcaatgaacgcggccgaaatcaccgacaagctcggcttgcactcactcagaaaccgcaactggtacatccaggcgacgtgtgcaactagcggtgatgggctgtacgagggactcgactggctgtccaaccaattgaagaacgctaatcgctaattaaacactaaaattaaagcaacaatatgaatacaactaactctgatttcaagcgagccgaagcagttaaccagcaaccagaaccatagaaagagcggctgaaggacatccaacatccagcggtaaacggtggaaatcgacatcagaaggaattttcacaaaacagcagcagcggcaccaacaccaacaacaagagcagcagatcttcgcataacttaaagggctccgcatgtccgtatttccaaacaagaaactgaaattgtttattgaattgcaaaaacataacctttcaagcagcatataaagaacgctataatataatttaaattcgtatacataattattggatgtttaaaagcaaatcgagtaaaagaaaagcccaaccaatcacacaagaaaggaaactatagtatatggtataaaaatgtcttttttaagttatttttgtcctctccctacccctcatcaaaatatatatttctttttaattttataatattaaagtaatattaatgagaaaaaactgtaattgtaattgctctttaaaaatacaacaaataccattttaat

SEQ ID NO: 23463 - protein, 182 aa, DROSOPHILA
MGNVFANLFKGLFGKKEMRILMVGLDAAGKTTILYKLKLGEIVTTIPTIGFNVETVEYKNISFTVWDVGGQDKIRPLWRHYFQNTQGLIFVVDSNDRERIGEAREELMRMLAEDELRDAVLLIFANKQDLPNAMNAAEITDKLGLHSLRNRNWYIQATCATSGDGLYEGLDWLSNQLKNANR

SEQ ID NO: 23464 - DNA, 3621 bp, DROSOPHILA
aatggggcgaaacttgagactttaaatataatcgcggtttggggaagtaccttcaaaactcaattttccaagatatgtatatgttttctcgttcgcttattattgtagtttgtttgttattagttttctgagtgaaaactgatgctgatgagacccctacatatatgatttaaacataaatttcagtaatagacaaacatttttactcaacctgcttaagaatgatattagcttgtttaaccaaaactatattactgtgttactgtgggattgaagttgtttgcttcaaacaagaacgtcttgaaaagaaccccaaaatgttgtgccaaatgccatttggttgccattgtgtttgccgcacagcttttgaatgattcgctcgccgatgttggtgtggtccccatctctggttggggcagcgtttctgtgtgtgtgcttgggtgtccaagtgattgcccacctgcaagaccagtaattggccccaataactttggtattttcgtagcacgaagtcaacgtcaacgccggcaacaactacagcgacaaggccgcccaaaaatggtcggtgtcggtgtggtatggtgtggagtggttgttgttgctgctttggttcttggcgaattctccacaggttcccccagcccccaaacgtcacaccagttacccctcccacggcccctcctcatcccacgaagctgcgacgctgacaccaatttggcttattagagtcgaagtctgagtttgggcttgggtctatgggctggaagcacttgaaatgccaaaaactgactgcaaaattcagcaacaacgcaaatagcaaccacagcttgtcatcgatttttgggcgtggtctggactaatcctattcgcactgaacccaaaatttagcccaaaaattagcaattttaaaacattttacatagattgtgggttcagttggttataatattgatactttaaagaatttattattcttttgagctaggaacttaaagaacttatgaacttccagatggccgaaacgatcagtacagcggccagcggcatggagttggccctaaaagaccccagtccaacggtgggtggcggcatcattgtggacatgacgcccaccacggcggcgctgctgcatcacaacgctatggcgctgcgcagcctcaaggatgccgcctcatccgcctccgaatcagagctacaggaaccgcgatcaccgacacccacgcccacgaatctcagcaccggcccccactcgccgccaatgaccttccgctgcgagcgttgcgacagtttcgagaccagctcgcgggcatccctgctgctccatgtcgtccagtgtctggctggtcaggcggcggcggcggcagcagcggcggcggcatcggcccgcctgaagagtgaggatctgcaggagccggagaacatgagcttgggtcacatggagggcggcaagggcgatggccagacgggcaatggttccagctcctcggctagctcctctccggccgggaatagcggaggaggaggcggtggcaacagcagttcgcgcaaggtcttcgagtgcgatgtgtgcaacatgaagttctccaacggcgccaacatgcgccgccacaagatgcgacacactggtgtcaagccctacgagtgccgggtgtgccagaagagattcttccgcaaggatcacctggcggagcacttcacgacgcacaccaagacgctgccctatcactgtccgatctgcaatcgtggcttccagcgccagatagctatgcgcgcccacttccagaacgaacatgttggccagcatgatctggtgaagacgtgtccgctttgcagctaccgagcggggtccatgaagtcgctgaggattcatttcttcaaccgtcacggcatcgatctggataacccgggaccgggtggcacctcttcgttgctcctggccctggaatcacaggcttcggcggcggcagcagcggcggcagctagttacgtgccacctggacttagtccggtgcccgtgcaatctcagtcccagcagcagcagcagcaacaggtggctcctccggctagcgatagcggcgagtccatgcgatccctggagaatgccacgccccccatgcacttcctcacgccccacgtggagatctcgacgctgggcgagagtggcaacacggagttgtttaatgtaagtcaatcgctgtatggcagcccatccctttttcaagccccctcgcttacaaatgataaactagctgatttgcgtttggcgtgaatctgcattacagggcaacaacaacaacaataataacaacaactgcgctaccaacaacaataacaatataaatggagcgagcaacaactgcaactccattagcaatggaaatgccgagtccaatggcgataaggtgaaagatcgagccctcatcatgcaatccccggtggagttgccaatggattgcaacacaaaggccacgcccatcacatccagcaccacagccagcagtctgagtggcggcctgaagagccatcaccagcatccgcatcaccatcaccaccaccatcaccaccacgagaaccacataacgccgtcgatcagtcttatacctatcaaacaggtgagttgacgagtggcaagatcgggcgatcggcattatgtattatatctatctattgggtttatcaaatggggctacggaagggtgtatgtgaatttatattaccagaataggtatttggatctcaactacgtagttcccttcgaaactgaagatcaaacatcataaattccacctactgaaaagaggaattcagatcgaactcaaatttgtaaatattcatctttatgagatggaagttcggttcatagtggatcgaatccacacttcatctgcatgcgaaggcggaaccattttttgaaaacctgttgtgcatcataaaagactgcatacctaatttggctgaactggctccaatagactgttgagatccaggggttttattttgatggttgattcagcgtttgatcttgacctgtaaaataaatgttagagtaaattttcatgatttgaaatgccatgaattatgtattaaattctgtgcatggaaatgattgaattattttttttttaatattagtattttaatcgatttaacaggttcataatatattaatttaatttttttcccaaaatcgttacgttgtagtatagaattatgttcaatgaataaatgagataccaacaaaatcataaatattatctacatttatattccgtgttaaaaaaaaataaatttttctcttattgcccaaaaggagcccatgtcggaggatatggacaagaaggacctgatgaacggtagtgatccaagcagcgatacagaacaggcttccaacaataacaacagcagcagcaacaacaacagaatcacctcactgatcaaggtgggttaataagaattatacaatatatagccaccatattaatccacctgattttggaccaggtctcgccactgaaatcgctcctacgcgaggatctcaagcgtcgcatctgcgcaaaggccaacaaccggatcacccggaatgccacgccgctggagagtaacaacaacaattccgtgctg

SEQ ID NO: 23465 - DNA, 1521 bp, DROSOPHILA
atgaacttccagatggccgaaacgatcagtacagcggccagcggcatggagttggccctaaaagaccccagtccaacggtgggtggcggcatcattgtggacatgacgcccaccacggcggcgctgctgcatcacaacgctatggcgctgcgcagcctcaaggatgccgcctcatccgcctccgaatcagagctacaggaaccgcgatcaccgacacccacgcccacgaatctcagcaccggcccccactcgccgccaatgaccttccgctgcgagcgttgcgacagtttcgagaccagctcgcgggcatccctgctgctccatgtcgtccagtgtctggctggtcaggcggcggcggcggcagcagcggcggcggcatcggcccgcctgaagagtgaggatctgcaggagccggagaacatgagcttgggtcacatggagggcggcaagggcgatggccagacgggcaatggttccagctcctcggctagctcctctccggccgggaatagcggaggaggaggcggtggcaacagcagttcgcgcaaggtcttcgagtgcgatgtgtgcaacatgaagttctccaacggcgccaacatgcgccgccacaagatgcgacacactggtgtcaagccctacgagtgccgggtgtgccagaagagattcttccgcaaggatcacctggcggagcacttcacgacgcacaccaagacgctgccctatcactgtccgatctgcaatcgtggcttccagcgccagatagctatgcgcgcccacttccagaacgaacatgttggccagcatgatctggtgaagacgtgtccgctttgcagctaccgagcggggtccatgaagtcgctgaggattcatttcttcaaccgtcacggcatcgatctggataacccgggaccgggtggcacctcttcgttgctcctggccctggaatcacaggcttcggcggcggcagcagcggcggcagctagttacgtgccacctggacttagtccggtgcccgtgcaatctcagtcccagcagcagcagcagcaacaggtggctcctccggctagcgatagcggcgagtccatgcgatccctggagaatgccacgccccccatgcacttcctcacgccccacgtggagatctcgacgctgggcgagagtggcaacacggagttgtttaatggcaacaacaacaacaataataacaacaactgcgctaccaacaacaataacaatataaatggagcgagcaacaactgcaactccattagcaatggaaatgccgagtccaatggcgataaggtgaaagatcgagccctcatcatgcaatccccggtggagttgccaatggattgcaacacaaaggccacgcccatcacatccagcaccacagccagcagtctgagtggcggcctgaagagccatcaccagcatccgcatcaccatcaccaccaccatcaccaccacgagaaccacataacgccgtcgatcagtcttatacctatcaaacaggtgagttga

SEQ ID NO: 23466 - protein, 502 aa, DROSOPHILA
MAETISTAASGMELALKDPSPTVGGGIIVDMTPTTAALLHHNAMALRSLKDAASSASESELQEPRSPTPTPTNLSTGPHSPPMTFRCERCDSFETSSRASLLLHVVQCLAGQAAAAAAAAAASARLKSEDLQEPENMSLGHMEGGKGDGQTGNGSSSSASSSPAGNSGGGGGGNSSSRKVFECDVCNMKFSNGANMRRHKMRHTGVKPYECRVCQKRFFRKDHLAEHFTTHTKTLPYHCPICNRGFQRQIAMRAHFQNEHVGQHDLVKTCPLCSYRAGSMKSLRIHFFNRHGIDLDNPGPGGTSSLLLALESQASAAAAAAAASYVPPGLSPVPVQSQSQQQQQQQVAPPASDSGESMRSLENATPPMHFLTPHVEISTLGESGNTELFNGNNNNNNNNNCATNNNNNINGASNNCNSISNGNAESNGDKVKDRALIMQSPVELPMDCNTKATPITSSTTASSLSGGLKSHHQHPHHHHHHHHHHENHITPSISLIPIKQVS

SEQ ID NO: 23467 - DNA, 2791 bp, DROSOPHILA
aaccacttcccacgactcgccagccagacagcgaattacgacggcgtttgtttgttttgctttttcagattcccaactttctgggctgcatactgtcgctgctgcagttgggtctgttcgtcctctacccgccgcgaagctactccggccacggctacaagctggtcgaacaggcagtgccgttttaggcagctaatcggaccaagccacgcatttcgctttggcctccgagcgtgccgcacacagggtttatacatacatgctgcttgcttaggcgccaggcttatttactatagacatacgtaaaagtaagcctatatttattgtaaagtatttatttaatcccgaggatttgcctcgaatatgccgctacttacgttgccttgctgttcggtggcgcccatttaattgtaccctttagagcccgtattcctaataaacgaacacacgggaaacgattgagtaaccgaagtacttgttgatttcaactaatataagcacaaggcccgaattcgattcggcacggtctgtacagattgagtgcggatttctgactgggaattctaatgagtgaacccgatgcactttgctggtctgcggtcattggtatcgataagctgatatgctgatattccgggccataaactgttgaattaagcgaccgtatactgcctgttttgcacctctgatttaatgaaaatgttcgtgggcgcgggggtggggggtctgatcaatgaaatcggcttgtcttaattcaataatagtgcttatcgacctgcgtggaattagccagtaaacatgcaaccagatatggcggtaatctttatttggcgcccagcatcgataaggtggcatttttggggggcggaaatgattaggcgagatcataaatattttctcttacagattcaaatttgaagtggagagacggttatcactcgtgcgcttaccaatactggcttgatggttttatgggtatgtgcgccgtagtgagcaacggccacactgtcaaatccctgtgaatcattgttttgtgtttaaaactagaaaatatttgagccagaaacaaattacgagatgcaggaacaaagtcccgagctgtacgaggaggtgaagctcttccgtaacgcccgcgagcgcgagaagtacgacaacatggccgatctatacgcaatcatcaacaccatccagcagctggagaaggcctacatccgcgactgcattacgccgcaggaatacacggccgcctgctccaaatacctggtgcagtacaaggtggcctttaagcaggtgcagtgcgacgaattcccctcggtggagacgttcgttaagaaattccggctggactgccctgctgcgctggagcggatccgcgaggaccgacccatcaccatacgcgacgataagggcaacacctccaaatgcatcgccgagatcgtgtcgctgttcatcacaatcatggacaagctacgcctgcagatcaacaccatggacgccctacagccggacgtcaaagacctggctgacaacatgaatcgcctgtccctcattcccgaggacttcgacgccaagctgaaggtggagaagtggctgggcagcctgaacgagatgcaggcctccgacgagttgagcgagggccaggtccgccagttcctcttcgacctggagtcggcgtacgcggacttcaacaagctgctgcacagccagtagctatcagtttctcattgtttacgtgtatccctaaatttatatagcatgttccgatattaaacaagtttgatatatcaccttacttttagcgcagactaaaaaaattagttttcaaactaagggggtatgtttttgaactaaaacaaaaaatgttttcattcgctaacatttaacaacatcccacaatagagtaactattggaagcaggacttcttcaagtgacgttagttaagatactaataaaaggtgcatcttcaatcttcatggatcagtattttgacgcatataggaaaacataggactgcttgctattaaataataggttaaaaattaaattttgagttatagcaagactgtagaaagtcttccattaagtttgcttatatgctagcaacttttgaatcatgtaaaataaaataattaacccagaaatagtttttttgcccggttggttaaacatttcaacagatttaagtaaaaacggcaaggcgcttcattttttgcattttgtttggatttaatcgtatcttcttttttgtatttagtttaaatattaaggttataattatacatataagtttaaaccgattacaataattaatttttgtttgttttgttttttctcattcacgttatgtttgtggttttgtggtttatttaatatatatacttgtatttttaatttactgttctgcatttccggtttctctcttacactcttaaatctgttaaatcgttttacgcctttaataattaataattgttactctttatctttgtaaatttatttgtatgcaatgtgaaaatggtacttggtatatttatgcggatgttgctgtatgtttcgttctactctttgttgtgtgaggaagtgtgttgtgtgtgtggttggctttaggagtcgcctccgcaagtgtggggtgtggtgtgtcttgaggctgaggggaggagggaggcgtggtggtcaggacgctgctgagcggcgcctttacagtgcgttcgtagtaaaaacgtttcttattaagtaaagtatgatcgcttatcatcgtatattagataatcattctccgacgctggcgag

SEQ ID NO: 23468 - DNA, 791 bp, DROSOPHILA
ccacactgtcaaatccctgtgaatcattgttttgtgtttaaaactagaaaatatttgagccagaaacaaattacgagatgcaggaacaaagtcccgagctgtacgaggaggtgaagctcttccgtaacgcccgcgagcgcgagaagtacgacaacatggccgatctatacgcaatcatcaacaccatccagcagctggagaaggcctacatccgcgactgcattacgccgcaggaatacacggccgcctgctccaaatacctggtgcagtacaaggtggcctttaagcaggtgcagtgcgacgaattcccctcggtggagacgttcgttaagaaattccggctggactgccctgctgcgctggagcggatccgcgaggaccgacccatcaccatacgcgacgataagggcaacacctccaaatgcatcgccgagatcgtgtcgctgttcatcacaatcatggacaagctacgcctgcagatcaacaccatggacgccctacagccggacgtcaaagacctggctgacaacatgaatcgcctgtccctcattcccgaggacttcgacgccaagctgaaggtggagaagtggctgggcagcctgaacgagatgcaggcctccgacgagttgagcgagggccaggtccgccagttcctcttcgacctggagtcggcgtacgcggacttcaacaagctgctgcacagccagtagctatcagtttctcattgtttacgtgtatccctaaatttatatagcatgttccgatattaaacaagtttgatatatcacctt

SEQ ID NO: 23469 - protein, 210 aa, DROSOPHILA
MQEQSPELYEEVKLFRNAREREKYDNMADLYAIINTIQQLEKAYIRDCITPQEYTAACSKYLVQYKVAFKQVQCDEFPSVETFVKKFRLDCPAALERIREDRPITIRDDKGNTSKCIAEIVSLFITIMDKLRLQINTMDALQPDVKDLADNMNRLSLIPEDFDAKLKVEKWLGSLNEMQASDELSEGQVRQFLFDLESAYADFNKLLHSQ

SEQ ID NO: 23470 - DNA, 1858 bp, DROSOPHILA
aaaatcgtatggcagttacgcatcttgttattctagggtctttggtagaaacaaatgaattatgagttgctggcggcggctgtgtgacctgaaatactcccccagttggaagcgtggggtagcagatacagctttttcgctgctctcttcgtcaatcctgtttgtggtgtccccagcacatcaacttcactacattttttcataatgccggctgcggttgtaacttctgatgatgtcgccatcagcatcttccgccagctgagcggactgctcctcgttttttgtttgccgaacatctcggcgagaaagtgttccatcagcaaaatcaacaggccgggcaggtataacatgccaaagaacttgaccgtagaatcatcgaataataatgcccaagtgcacttcgtcagcagaccagatcgtagggccttaaagatgcgccgtggatccaccgggcttacgttcgctttcgtaagccgttttcttcggtacagtacatgcgtggctcgagatcggcatctggtgcggatattggtgatgcggatcccgatgaggatgtgggtgttgacgtgggggaggctgctgctgcatgggcagttgctgcattgcctgccatgggatcggcggtagcttttgagacatcatgccactgagtggcccctggcccacttgttgatccacaccctgtgaatgtggcatgggctaaggtggtttaactattccaccgggtgctacttgtggcaatcctggaagtggaacgacgccttgggatgaatgttgcggcagtggttgctaaactcctacttattgcgattgcagctgctgggacggcatgccggacatcctatcctggtcccgaggagcaaataaaatggaacataaaggtcaaggtatgaataatatagatataacttactgatttagaactatgtgttccatcctgtaattgttgttgtctttgtttaggtcttagctataaccatctaaccaaagtgttcgtctattgtggagtgaaaaatgatttgtgccaacttgtgccaaaaactaaaacctgatgtgtttactcaaaactgtaattaaattgatgttagtaacgccttttgcctaaatttgcatatgctctttatattttgccgtttaagacaagtttgagattagccgatcggttatgctggatgaatggatctaaggagatcgaaatgacaaagccttagttgactgggttgttggcgaatttaaattaattgatattactattgacgagaaagctaaagtcgctaagcaaatcagaagctttcacctatatataatgaaaaatctggctaaatgaaaccgtacaattgaaaatacattccagttgccttgcacccacgatgatggttgtcgtggaccaaaacaacaaccaagtcgcaaccaagacggtctaatgggacgacctcgtctcccttacagtgatgcaggatcacggctcaaaagaaaaatagcaacggatctggctaatatggaagaaaataatacaagtcttcttgtccatgtagcatcaatttcatcaaaaagcaaaccatccatggatttatcggatcctttactttcaagcctaaatataaacaaaaaatcgtctcaaaataaaaaaaaatggctttgttgaaagatgtcatcaatcttttagatgcaccaaatgtgaaacctattaataatgaacatttttgggaagcgatgatagcgactcggattcggatcacgatgttccattttctatgcatttcgacgtagaaaattttgattaatataatagtatatgtatattaaacagatacaaaagtaaaattatctggtatctggcccagtgtgcactggcacc

SEQ ID NO: 23471 - DNA, 432 bp, DROSOPHILA
cctcgggaccaggataggatgtccggcatgccgtcccagcagctgcaatcgcaataagtaggagtttagcaaccactgccgcaacattcatcccaaggcgtcgttccacttccaggattgccacaagtagcacccggtggaatagttaaaccaccttagcccatgccacattcacagggtgtggatcaacaagtgggccaggggccactcagtggcatgatgtctcaaaagctaccgccgatcccatggcaggcaatgcagcaactgcccatgcagcagcagcctcccccacgtcaacacccacatcctcatcgggatccgcatcaccaatatccgcaccagatgccgatctcgagccacgcatgtactgtaccgaagaaaacggcttacgaaagcgaacgtaagcccggtggatccacggcgcatctttaa

SEQ ID NO: 23472 - protein, 89 aa, DROSOPHILA
MPHSQGVDQQVGQGPLSGMMSQKLPPIPWQAMQQLPMQQQPPPRQHPHPHRDPHHQYPHQMPISSHACTVPKKTAYESERKPGGSTAHL

SEQ ID NO: 23473 - DNA, 4151 bp, DROSOPHILA
tcgcggtgcgtgccgtttgggccatggccatttccggttgatgcgacgatgtgcagccacgtagtgtaaacagcgaactgccgagcgaaggaatttctgtagccaggctggcactcctggtgttggcgttgcttttgctgttgctgttgggtgtcgtgtcgtttctatggagcacgttgctaaggcctggggcggcttagtgaccgataagccagcagttggagctaaagccgcttgctcgcattcgctgcggtgctctcttccagtcgcatttgttacaataacaagccggttagccttataggcgccagttatgttgttattatcattcgactatgcactaaccaaagtccccggactgcatgtagatttcccaagcacttttattgggcatttcaggtcagcgaactcatcggaatgaaggggatctgggttttctgggggcgcaaccgcagattaacaacgacaaattggcacagctcatgtcaatcatgccaacattttattctatttgatgaacaacaacaatcgatccataaaagcaatttaattttatatacagaagtaataaatattaaaacgtattcaaagtgaaacaaattacctaaacaacttaatattataaatattatatgttaatcagaatttactaaatctttttaatcaaagtacaaagtaaatcgtcataaatctaatcaatagccatgagaaaaacatagaaatgccatcatcaagcaaagatttcaaaaaagaggtaagcatgcgtgagttgtaaatttaattttaaccttataattctgagccaataaattaagttttaaaaagcgcgccaagagaacttatcgataaatggctaattctgctatgcagcactggtgctttgtttacattctgcggtgttcggcgtttgtctggcaacgccgcacctgttctgtgcgggtggcgtgttgcaaagtgccgagggcactgagaactactagtgttggctagcgatcgagtgcgaataaagaacaaaagtgtgatatgtcgctgtgaatagccaattatctgtgttttctcgtgctaaatcagaaaatttttcgcaatgtctgagccagaggtgaccagcgttgtagatatgaaatcgcccaacatatcctcctcctgctccttcttcaagctgaagaagctgtcggaggagtcgcttctgcagccgccggaaaaggtcttcgacattatgtacaagctgggcgagggcagctatggatcagtctacaaggcagtgcacaaggaaagcagctccattgtggccatcaagctggtgccggtggagtccgacctgcacgagattattaaggagatatccattatgcaacaatgcgactcgccgtatgtggtgcgctattacggctcctacttcaagcagtatgacctgtggatctgcatggagtactgtggcgccggcagcgtctccgacattatgcgtctgcgcaaaaagacgctgacggaggacgagatagccactattctgtcggacactctgcagggcttggtctatctgcatctgcgtcgcaagatccatcgcgacatcaaggcggccaacatcctgctcaataccgaaggctatgctaagttggccgatttcggagtcgctggtcagctcacggacacaatggccaagagaaacactgtgatcggaacgcccttctggatggcccccgaggtgattgaggagattggctacgactgtgtggcagacatatggtcattgggcatcaccgccttggaaatggccgagggaaagcccccatacggtgagatccatcccatgcgagccatctttatgattccgcagaagccaccaccatcgttccgggaaccggatcgctggagcacagagttcattgacttcgtgagcaagtgcctggtaaaggagccagacgaccgggcaacggccactgaactgctggagcacgagttcatacgcaacgccaagcaccgatcgatcctaaagcctatgcttgaggagacctgtgccattcgcgagcagcaacgcgccaatcgcagttttgggggcgtgttggctgctagtcaggcgaagagcttggcaacccaggaaaacggaatgcaacaacacatcacggacaacgcgtttatggaggatccaggtactctggtgccggagaagttcggtgaataccaacagagctcagcctcagatgccaccatgatagcgcatgcagagcaaggtgtggatgagggcactttggggccgggtggactaaggaacctgtccaaggcagctgctcctgcagcggcctcttcggcagcatctcctctggacatgccggcagttgacagcggcacaatggtggagctggagtcgaacttgggtatgtaaatgattttgaaagggctggccatttgttattgtattgtctgttattcaggcactatggtaatcaactccgattcggacgactccacaacggccaaaaacaacgacgaccagaagccgcgaaaccgctacaggccgcagttcctggagcacttcgatcgcaaaaatgcgggagatggccgtggcgatgaaaaacccatagccacagagtattctccggcagcagcggagcagcaacaacaacaacaacagcagcagcaacaacaacagcaggatgaacagcatctggcaagcggggccaacgatttgaacaactgggagcacaacatggaaatgcagttccagcagatctccgccattaatcagtatggtctgcagcagcaccagcagcagcagcaagttctgatggcttatcccctgatgaacgaacaactcatcgcgctcaacaatcaaccgaatctgctgctcagcaacgctgcgccaatgggacagcagggaataccggcagcggctccagctcaaccgccgcccgcatatcagaatcagcatatgcatacgcaatcgcacgcctatgttgagggtgagtttgagttcctcaagttccttaccttcgacgatctgaaccagcggctgtgcaacatcgatcacgaaatggagctggagatcgaacagctaaacaagaaatacaatgccaagcggcagccaattgttgacgccatgaatgcaaagcgcaaacgccagcagaacatcaataataatctgattaagatataggtaaagcaactcacaatttcgcaagacaactgattatgaaatctcaactcactcaattgcctctacattgggttaagtttgcagatgaatactgaatcttacagacccatcatctgtatcctctagaaattattcgtgcattgtgcaaatttaacctggtggaagggtctaaaatcaatcacaagaaatgaaaacacaaaagctttattgtaaaatgcagtgaaaacagaaaagaggagtcatcggcagtatcttccagcacgaaagcatattttctgttagatttcatcaaatttatgcttggtttcttatatcctagctttcattgatctgtcttttaatataaataggtatgctcgaataaaatttatcttgcgtttattgtagctgcccgtattgtgaactgcccaggccttatcataatttaataagacttataatattcgttcttccttggtaactattaacctttatctctaaaacacttattttctgtcttcgtgcgataaaaacagtaacccgtcaagcaatacttataaaggagaaacatttttatacgcattggaatgcatatttttcgaacatatatttatcaaagcaaaatgcacagaaacactcacatttaaacatttatatatacctagtacttttagcaattataaataatttacataataaatatataggaatatatgaatcaaaaaattgcatacaatatataacttattcgaaagatacttaagaaaattttgtaataagtaatgatatatgtagaccaaggaaacctcctttttattttagtatgactactcttgtatatccatttcctgagttgcctgctgcatgtcgtgcaattgtgcccgcaaatcttcgggcaaagtgtgctcgttcaaggcactagggtcttcaccatccacgacaatctcctctggatctggggctcgtggcaaaaagtcggcatctgggaacattttgccaaatatgtcgcgagcattggcaa

SEQ ID NO: 23474 - DNA, 1875 bp, DROSOPHILA
cgaataaagaacaaaagtgtgatatgtcgctgtgaatagccaattatctgtgttttctcgtgctaaatcagaaaatttttcgcaatgtctgagccagaggtgaccagcgttgtagatatgaaatcgcccaacatatcctcctcctgctccttcttcaagctgaagaagctgtcggaggagtcgcttctgcagccgccggaaaaggtcttcgacattatgtacaagctgggcgagggcagctatggatcagtctacaaggcagtgcacaaggaaagcagctccattgtggccatcaagctggtgccggtggagtccgacctgcacgagattattaaggagatatccattatgcaacaatgcgactcgccgtatgtggtgcgctattacggctcctacttcaagcagtatgacctgtggatctgcatggagtactgtggcgccggcagcgtctccgacattatgcgtctgcgcaaaaagacgctgacggaggacgagatagccactattctgtcggacactctgcagggcttggtctatctgcatctgcgtcgcaagatccatcgcgacatcaaggcggccaacatcctgctcaataccgaaggctatgctaagttggccgatttcggagtcgctggtcagctcacggacacaatggccaagagaaacactgtgatcggaacgcccttctggatggcccccgaggtgattgaggagattggctacgactgtgtggcagacatatggtcattgggcatcaccgccttggaaatggccgagggaaagcccccatacggtgagatccatcccatgcgagccatctttatgattccgcagaagccaccaccatcgttccgggaaccggatcgctggagcacagagttcattgacttcgtgagcaagtgcctggtaaaggagccagacgaccgggcaacggccactgaactgctggagcacgagttcatacgcaacgccaagcaccgatcgatcctaaagcctatgcttgaggagacctgtgccattcgcgagcagcaacgcgccaatcgcagttttgggggcgtgttggctgctagtcaggcgaagagcttggcaacccaggaaaacggaatgcaacaacacatcacggacaacgcgtttatggaggatccaggtactctggtgccggagaagttcggtgaataccaacagagctcagcctcagatgccaccatgatagcgcatgcagagcaaggtgtggatgagggcactttggggccgggtggactaaggaacctgtccaaggcagctgctcctgcagcggcctcttcggcagcatctcctctggacatgccggcagttgacagcggcacaatggtggagctggagtcgaacttgggcactatggtaatcaactccgattcggacgactccacaacggccaaaaacaacgacgaccagaagccgcgaaaccgctacaggccgcagttcctggagcacttcgatcgcaaaaatgcgggagatggccttctgatggcttatcccctgatgaacgaacaactcatcgcgctcaacaatcaaccgaatctgctgctcagcaacgctgcgccaatgggacagcagggaataccggcagcggctccagctcaaccgccgcccgcatatcagaatcagcatatgcatacgcaatcgcacgcctatgttgagggtgagtttgagttcctcaagttccttaccttcgacgatctgaaccagcggctgtgcaacatcgatcacgaaatggagctggagatcgaacagctaaacaagaaatacaatgccaagcggcagccaattgttgacgccatgaatgcaaagcgcaaacgccagcagaacatcaataataatctgattaagatatag

SEQ ID NO: 23475 - protein, 596 aa, DROSOPHILA
MSEPEVTSVVDMKSPNISSSCSFFKLKKLSEESLLQPPEKVFDIMYKLGEGSYGSVYKAVHKESSSIVAIKLVPVESDLHEIIKEISIMQQCDSPYVVRYYGSYFKQYDLWICMEYCGAGSVSDIMRLRKKTLTEDEIATILSDTLQGLVYLHLRRKIHRDIKAANILLNTEGYAKLADFGVAGQLTDTMAKRNTVIGTPFWMAPEVIEEIGYDCVADIWSLGITALEMAEGKPPYGEIHPMRAIFMIPQKPPPSFREPDRWSTEFIDFVSKCLVKEPDDRATATELLEHEFIRNAKHRSILKPMLEETCAIREQQRANRSFGGVLAASQAKSLATQENGMQQHITDNAFMEDPGTLVPEKFGEYQQSSASDATMIAHAEQGVDEGTLGPGGLRNLSKAAAPAAASSAASPLDMPAVDSGTMVELESNLGTMVINSDSDDSTTAKNNDDQKPRNRYRPQFLEHFDRKNAGDGLLMAYPLMNEQLIALNNQPNLLLSNAAPMGQQGIPAAAPAQPPPAYQNQHMHTQSHAYVEGEFEFLKFLTFDDLNQRLCNIDHEMELEIEQLNKKYNAKRQPIVDAMNAKRKRQQNINNNLIKI

SEQ ID NO: 23476 - DNA, 4352 bp, DROSOPHILA
aagctttataataatacttaataatgaaatgattttacacttagatttgtaattggcttcccccaatattcgctgttgataagaaacttagtatctgtagctcgtggaatctttttgattctgtttttcagcgctattgccgttacctttattttactcaaacatttactatatttgctcttggcaaaggtgcacaataatccttaattcaaactttttcacgttaacacttcgctggaactgcacctgtgcagacacctgagcttgtatcttgggcttatcgtatggtgaattggccccagagcagctggctcagctcgacggcacaataaaatcgcgatcggctcttggctggaacacctgttcccttctttgttgataagttaaaagacctctcgagaccctcgactgccgtaaagtttatactgctcggcaacttcggcgcgaaggtcttaatctgcgccggatgagtgattcactgagaaataccaaccacctgaagtagccaaaaaattgttggccaagcgagtggcatacgtttggtttccgggaatcgaatgcttcgttcctggaactaaattagatttgaataatctccaatcgcatttgtaattgtaattaaacatactattttatatttgagtcttggcaagttctccacaacgtaaatttatatattcaatttcaatagatgttgatttaattgtgatcatttaggaagaggaacccagaaaatgattcgtggcatatatgtacataagtgtagagcttaaaattaaaagccttcgttggaaagtatttacagatgttagtaaatttttgggaaaattctttaaaacaattgcctatgtgtttattcgatatttattcgaagcagaaaattgtaatcgtatctcgttcgttttatcaatcagatggcaagcaatttttttgcttgatctatgtgaaagtctggtaaaatttcatgtttaggtacagtttttaaattagtctaaatgaaatggccaaaaagttctgctactcggagaaaaagaccctagcgcgtattaaaaaaaaacagaatcaccgtggagttccggattcccaatttgagaatggtcaggatgctgaggaggaggatggtgatggcggtaaggcaatgggtccagaaatggcaccgcagagtatgttctatatcttataagtctatagttcaagtcaactttgtttcaataacttagagttgggcattctgaaaaaccttgccaacggttatttgaagttggtccacgaaatcgagacccacctctgccttcccgcgcctcgtatggtcgaagctaaaccagagcgtgaggtgggtgggaaaaccgatcaaaataccgaaatcgaagaggaaatatcgcaatcttcagaggataccactcatccaggaataggctttgtgaatttgtataggcgcaatactcattttgagtgcttgggaattcctctaacttccttggagctgttctctatggaacgccaaagaaatgctgacactgaagagccggcttcattgaaatctcttgatgagcggttgagtaaagagaccgaatgggttcctgaaagaaatatatcgaatgaagctgattacgatccactcgaaaaggtaaacatcatagaaaatacttctaaatcgacattgattccaagaaaacctgatataaacaaattcattcaaaaaatcaaaggtaaaactgtcctagatcaggaaacagacgcaatgctcaacgaggaacatgaaaatcaatgttcaacgattgagccataccaggatttgcccaaattccagagtcgatccaccggttcacatttaaaaaatccaaagtccatgcaatcctataaatgcggtatatttccagctaaatatactacgaaaaaaataaaatcattatgcccaaaaattcgtgaagtcgataactgcagtgaaacgaccaaacacagatgtcatatcgattttaggaacgttggtgggccgaaatcgtctagatttaagaataagtccagaaataccatgatcaatgaatcgatgttgtttccatcatcatctatctgtccttgtagaccagaaggtgaatcgaaacgatgttatcccgataaaaccatcgcattacatggaggctcagggcccaaggcagccataccctcagcgttgaagactcatttatgtagtagtgacagtgagatgtttgggggttcacacgaccctaatccagtggagagctcttctatgaaagtatccggtaattctacgccagataaattgtgtttgaagaagtctatcagtccgattgttaaatccgatttcgagccactagagcctttgcgttccgacgatagctttacggaggcgtggatgaattcgaattttaagagggtacaaaaccaacaagacctacggatcggcgggctttatcgtcggggcgaaaaactaaagttccagcccattgatcgcctagacgcgggctgggttggtctaccgctgttcaaggactcggaggagtccctggaaaggacacagtactttgtgaccgagttcgataagctgagtcacgctgataaggtgcaggacatagagttgcgaatgagccagttgcggtggctgcacgccacgtcggatcatgaatatcgccagcacttccggaaacagagaattccctttaagaaggtcttgactaattcggtgcagtatgcgtgtcctttaaacaacgacgaatgtccggctgtgatgaacgacactctattggcacactttgtatcccggcatttggatgagccgggaaaggagttgcgtgagattttcgagggcgaacagatgctaatgatcttcagtcccagggccttccagctggccaagacagagtgcatttccgtgctgggctacgggggcgttcggaataagccctgcaccctgcccgccgtcagatttatgctcacaccgaactcaggcttaccagaagcctacgaccatttcgacggacatttgccactgctcgtgatgatttgcaggaacccgatgggcactgtggagggaaggaaggagcggttcgagggtctagaagacgaggacaccctagctctgtggatggtcagcagggatctgccatgccccatccacgtggcgatgactgtactcagccgacgactagatatcactaggagctccatcatgaaggtccgcggtctccacaaatcgcaggatcctctcgacttcatgttatccaacaaaaactatatgcgccttagcaatcacgacttgcgcgtcctcaccaacgatcatagggagccaatatatctggagattgttgtgaaggaatacgtcgatataccttaacgcgtcttttcagctcatttccaaggcgtcgactaaatctatcacataacccttagtggttgggcccagttttctagacatttcaatactggaggtctaacatagtttagaatttactttaatctattttcggccaaaattataaaatatttaatctgttaagatactctatttggatgagattaagtagatttacgacaggggagactgtggtttgcaactcagaaaaggaaatgtaactagccaaatactataaaaatcagcaaatttaagcgcctaataaaattatgaagaacatccaacaatttttcaaaaatgtggcggttttagggcgtggcacaaagttttttggaaaatctatagaacatgtctaataaaattgcgaaaaatatcgctaattggtttaaaaatgtgggcatggccatcaagaatctttatgttgaaactcaacattccagcctttaatgttcctgagatatcgaactttatacggacagagctagatcgactcggctattgatcctgatcaagaatatatatagtttatattgtcgaaaaccctacattctgcctgttacatacttttcatcgaatctagtatacccttttactctacaagtagcgggtataaaaatgttgtacatttggtctaagattgttttagttgcgttattgcaacgttgcagaagaagtgtcctgctaagccaaagcagatatgctctttgaattacgtaaaacattgagtggacaaagcgtttctccgaaaattccaaattttgcaaatatgtatagaaccaaatggaaaagcgttggctctgaagttctaactttaacacatttttatttaccaacttcttcgggcaattggcatttaaaggggttaatgtctaaaactttgatcttgaactcagtatatactttgtcagattggcctatttatatagctttttgcattctgatcatacgaaccctcctcaggtttacttccttttttcattat

SEQ ID NO: 23477 - DNA, 2262 bp, DROSOPHILA
atggccaaaaagttctgctactcggagaaaaagaccctagcgcgtattaaaaaaaaacagaatcaccgtggagttccggattcccaatttgagaatggtcaggatgctgaggaggaggatggtgatggcgagttgggcattctgaaaaaccttgccaacggttatttgaagttggtccacgaaatcgagacccacctctgccttcccgcgcctcgtatggtcgaagctaaaccagagcgtgaggtgggtgggaaaaccgatcaaaataccgaaatcgaagaggaaatatcgcaatcttcagaggataccactcatccaggaataggctttgtgaatttgtataggcgcaatactcattttgagtgcttgggaattcctctaacttccttggagctgttctctatggaacgccaaagaaatgctgacactgaagagccggcttcattgaaatctcttgatgagcggttgagtaaagagaccgaatgggttcctgaaagaaatatatcgaatgaagctgattacgatccactcgaaaaggtaaacatcatagaaaatacttctaaatcgacattgattccaagaaaacctgatataaacaaattcattcaaaaaatcaaaggtaaaactgtcctagatcaggaaacagacgcaatgctcaacgaggaacatgaaaatcaatgttcaacgattgagccataccaggatttgcccaaattccagagtcgatccaccggttcacatttaaaaaatccaaagtccatgcaatcctataaatgcggtatatttccagctaaatatactacgaaaaaaataaaatcattatgcccaaaaattcgtgaagtcgataactgcagtgaaacgaccaaacacagatgtcatatcgattttaggaacgttggtgggccgaaatcgtctagatttaagaataagtccagaaataccatgatcaatgaatcgatgttgtttccatcatcatctatctgtccttgtagaccagaaggtgaatcgaaacgatgttatcccgataaaaccatcgcattacatggaggctcagggcccaaggcagccataccctcagcgttgaagactcatttatgtagtagtgacagtgagatgtttgggggttcacacgaccctaatccagtggagagctcttctatgaaagtatccggtaattctacgccagataaattgtgtttgaagaagtctatcagtccgattgttaaatccgatttcgagccactagagcctttgcgttccgacgatagctttacggaggcgtggatgaattcgaattttaagagggtacaaaaccaacaagacctacggatcggcgggctttatcgtcggggcgaaaaactaaagttccagcccattgatcgcctagacgcgggctgggttggtctaccgctgttcaaggactcggaggagtccctggaaaggacacagtactttgtgaccgagttcgataagctgagtcacgctgataaggtgcaggacatagagttgcgaatgagccagttgcggtggctgcacgccacgtcggatcatgaatatcgccagcacttccggaaacagagaattccctttaagaaggtcttgactaattcggtgcagtatgcgtgtcctttaaacaacgacgaatgtccggctgtgatgaacgacactctattggcacactttgtatcccggcatttggatgagccgggaaaggagttgcgtgagattttcgagggcgaacagatgctaatgatcttcagtcccagggccttccagctggccaagacagagtgcatttccgtgctgggctacgggggcgttcggaataagccctgcaccctgcccgccgtcagatttatgctcacaccgaactcaggcttaccagaagcctacgaccatttcgacggacatttgccactgctcgtgatgatttgcaggaacccgatgggcactgtggagggaaggaaggagcggttcgagggtctagaagacgaggacaccctagctctgtggatggtcagcagggatctgccatgccccatccacgtggcgatgactgtactcagccgacgactagatatcactaggagctccatcatgaaggtccgcggtctccacaaatcgcaggatcctctcgacttcatgttatccaacaaaaactatatgcgccttagcaatcacgacttgcgcgtcctcaccaacgatcatagggagccaatatatctggagattgttgtgaaggaatacgtcgatataccttaa

SEQ ID NO: 23478 - protein, 753 aa, DROSOPHILA
MAKKFCYSEKKTLARIKKKQNHRGVPDSQFENGQDAEEEDGDGELGILKNLANGYLKLVHEIETHLCLPAPRMVEAKPEREVGGKTDQNTEIEEEISQSSEDTTHPGIGFVNLYRRNTHFECLGIPLTSLELFSMERQRNADTEEPASLKSLDERLSKETEWVPERNISNEADYDPLEKVNIIENTSKSTLIPRKPDINKFIQKIKGKTVLDQETDAMLNEEHENQCSTIEPYQDLPKFQSRSTGSHLKNPKSMQSYKCGIFPAKYTTKKIKSLCPKIREVDNCSETTKHRCHIDFRNVGGPKSSRFKNKSRNTMINESMLFPSSSICPCRPEGESKRCYPDKTIALHGGSGPKAAIPSALKTHLCSSDSEMFGGSHDPNPVESSSMKVSGNSTPDKLCLKKSISPIVKSDFEPLEPLRSDDSFTEAWMNSNFKRVQNQQDLRIGGLYRRGEKLKFQPIDRLDAGWVGLPLFKDSEESLERTQYFVTEFDKLSHADKVQDIELRMSQLRWLHATSDHEYRQHFRKQRIPFKKVLTNSVQYACPLNNDECPAVMNDTLLAHFVSRHLDEPGKELREIFEGEQMLMIFSPRAFQLAKTECISVLGYGGVRNKPCTLPAVRFMLTPNSGLPEAYDHFDGHLPLLVMICRNPMGTVEGRKERFEGLEDEDTLALWMVSRDLPCPIHVAMTVLSRRLDITRSSIMKVRGLHKSQDPLDFMLSNKNYMRLSNHDLRVLTNDHREPIYLEIVVKEYVDIP

SEQ ID NO: 23479 - DNA, 3340 bp, DROSOPHILA
gacttacatgggtacgtcacaggtgcgttatagtagttccagacacgcggatcgggaatgccgccttcaggcagcggagggcagcacatgcccggagcagaggagcaaggaatgggcgacggagctccgcatggaggactgtgcgggccacagcatggaagactgtgcgagccacagcatggaggactgtgcgggccacagcagggcgatacattacagcagcagggaccgcatccacagcagccgccggcaacgcgtccaccgcatccggcaccgccatttggtgctccagtggcggcacagcgcatacgcttattgttcacgcccatcatcatgttagcgtagcgcagcgggaatgccgccggaccgcaggtggggaaggggaagcacaggcaggccggtcggccctggcaggcggaccgcgggcacttgtcctgcagaccgttccgcttcacgcagtcgcaagtggtgtacatgatgccgcatcgtaactcccgactgcggcatccgcgcggctggaaaggatgcatacatagtggtcacaagtggtcagtggtgtgttgcatatggttactcacctccaacgatccacatccgtcacacatcttgagcccgtcgagcgctacaggacaaaggatttaaaaatatactatggtcttcccgggataaacttactctatttggtcaaattaatttggaagaaaaatttggaatttggaaaatttagaagctggccgaaacgaaaggtccgagagtttggtatcgaatgaggaatgatcaacacatcccaacacacatattcggttccgtttgagatgaaatgcaaggccaacttgttggaattatagcctactagattttaagaaagagttaatattagattcaaaatgcaaaaagctttttcgctctttttaaaagctctgttatcagctaattgtattatgcgatttgcttacaattctgataagcgatcctcttttcagttcattccaagttcccaagctgatcggattggagcaatgcctaacattgcagttatcggtgccggggttaatggtgttgccagtgccattaagatactggaacactatgtgaacgatggaaagacacccataaaggtgacgatcatatcggaggacttcacgcctaacacaactggagatggttcggctggtctctggggtccgtaccttctgggcggcacttcgcaggcgaaagtctagtaagttttactagtcactatattatattcttacttataactttttttccatcagcaagtggtcgaagagcatgcaccaatttttggagaagatctggctgagcgaggatgccggagaggctggcgtttgtctgctaccctgcattcggctgagcacctcaacggtggacacggtcgaagatttttggcgtgacattgtctatggagcagtggatctgtccaaggaacagctggctgcctacaataaaggtcgcagcgttaagttcacgtaagaatattcatagatatccatagatttatacttgctgaaatatgaacatatctaaaccatatctaggtctggtttatcctttgttacctacacctcggagcccattaagctactgccgtatttgatgaagcgtttcacccgaaatggaggtgttgttgtccggaaaaggattacagacctggatgcatttgtagccgattccgagtacgatgtgatagtcaattgctccggattgggctctaagaccctactaaacgacgatcaaatgtacgcagtgcgtggccaagtttcccgggtgagggccaactggattttctctgccgtgctggacgagagtgatgatggcaactatattatacccaagtgagtatttgccagttacacttatttgttcgtattccaatatctgaaatatttaagcaccgaaagtgttgtcctgggcggaacccatcaggagcgggactacaacactaaagtctgccagaacgacaggcggatgatcgtcgatggctgtcagcggtacattcctggtttggagcacacggagtgcctctttgattgggtaggtctccggccgggtcgcacccaactccgactggaagccgagcgccgcggccgcaagctcctcatccacaactatggacatggcggcagtggagtcactttgtgctggggctgtgccgacgatgtcctcaatatcctgttggccgccaagaacggttccaaattataagtcagttggaaagattattattttagttctataacaaaattggtagtgtaaaggtaacagcatttaaaagcatctctttatctacataataaacattttaatatatttcattacacttagcaatttctatatggaaaatgttataaaattgaattgaatgctgtactacgttttgattgggtcaatgcaagcatatttttgcctgtgtaggcagcactatcgccatggcatggggatcgtattgataggcttatcaccgactgcttggaaacattccactattccaccccccccgtcaaaattggcactccacgatggtgcctgcaattaagtaattgtgaaagggaagctgggggaattacgatggggtagcccaagagtaggcagacatttatgtgaagaagacagcaggaaacatatcaaatatcgtcgtcgtggcgcttttcggctgcctccttggccaacctggcatccagggcctcgtggaactcctcgaaaccgggcatttcaatgtacttcagtaccggcgagacggccagttcaaacagcagtgcgtacatctcgtctagctcgcgaaggatgtcaaagggccgggtgttgccaaccttgtagatcgagtagatagtccgcccgatctcttcgtaatcgatcagactggcggcctcctggtccacggagctgagggcgatgaagctgacccgcggcatgtgcatgtgctgggccacaaagccaaagacatcgaagatggtcgacaggaaatcccggttaaagtagagctcatccggaaaggcgatctcgtggacgaacagtgcatcgtaggtggagatgcccatgttcgctttggtcgcatcgatgagctccttcttcatcattatgatctgctggaacagattcctgggcaacgaagagggaaagaagaccctgtaataaaaacagacatgttactagtatatattaggcaaatgatagtggatttattgatcataccaggagtgccattcctcggtcatccattccagcaatcccactgcccttatttgcgtttcatcttcgctaatcatcatcacggagcactcgtttcgcaggatgtgtcgcacatacctttataacaata

SEQ ID NO: 23480 - DNA, 1159 bp, DROSOPHILA
agctgatcggattggagcaatgcctaacattgcagttatcggtgccggggttaatggtgttgccagtgccattaagatactggaacactatgtgaacgatggaaagacacccataaaggtgacgatcatatcggaggacttcacgcctaacacaactggagatggttcggctggtctctggggtccgtaccttctgggcggcacttcgcaggcgaaagtctacaagtggtcgaagagcatgcaccaatttttggagaagatctggctgagcgaggatgccggagaggctggcgtttgtctgctaccctgcattcggctgagcacctcaacggtggacacggtcgaagatttttggcgtgacattgtctatggagcagtggatctgtccaaggaacagctggctgcctacaataaaggtcgcagcgttaagttcacgtctggtttatcctttgttacctacacctcggagcccattaagctactgccgtatttgatgaagcgtttcacccgaaatggaggtgttgttgtccggaaaaggattacagacctggatgcatttgtagccgattccgagtacgatgtgatagtcaattgctccggattgggctctaagaccctactaaacgacgatcaaatgtacgcagtgcgtggccaagtttcccgggtgagggccaactggattttctctgccgtgctggacgagagtgatgatggcaactatattatacccaacaccgaaagtgttgtcctgggcggaacccatcaggagcgggactacaacactaaagtctgccagaacgacaggcggatgatcgtcgatggctgtcagcggtacattcctggtttggagcacacggagtgcctctttgattgggtaggtctccggccgggtcgcacccaactccgactggaagccgagcgccgcggccgcaagctcctcatccacaactatggacatggcggcagtggagtcactttgtgctggggctgtgccgacgatgtcctcaatatcctgttggccgccaagaacggttccaaattataagtcagttggaaagattattattttagttctataacaaaattggtagtgtaaaggtaacagcatttaaaagcatctctttatctacataataaacattttaatatatttcattac

SEQ ID NO: 23481 - protein, 341 aa, DROSOPHILA
MPNIAVIGAGVNGVASAIKILEHYVNDGKTPIKVTIISEDFTPNTTGDGSAGLWGPYLLGGTSQAKVYKWSKSMHQFLEKIWLSEDAGEAGVCLLPCIRLSTSTVDTVEDFWRDIVYGAVDLSKEQLAAYNKGRSVKFTSGLSFVTYTSEPIKLLPYLMKRFTRNGGVVVRKRITDLDAFVADSEYDVIVNCSGLGSKTLLNDDQMYAVRGQVSRVRANWIFSAVLDESDDGNYIIPNTESVVLGGTHQERDYNTKVCQNDRRMIVDGCQRYIPGLEHTECLFDWVGLRPGRTQLRLEAERRGRKLLIHNYGHGGSGVTLCWGCADDVLNILLAAKNGSKL

SEQ ID NO: 23482 - DNA, 2672 bp, DROSOPHILA
tatcgccaagtatagttatcccgttccccaaaaaggggaaactccaacgtatagtacaaacaaagctggtagaaagcgatttgggagaagaattgtaaatggaaataatggccaatgcggcgtatgcgcgatttaaatttttcatttccagtgcgccaatacaaacaaaaaaaagggtgctgagcggggctttaaattatacaaagatgttttgcaaaaggggaggaaacactggcaatagattataaacagattccatggaaactgcggggacttaaaataagttacagtggacaagagaatctataaatcgttttatgcaccaaataaattgaaaagacgaaaaggaaaaaaatacaataatttattcgtagattgcttttggaacttttgtctttggtaatcattcttaaaatctaataaaattatatgaaagcgcaacaataaaattgaagtaaacattaaatatattgattttctcttttttttttttactttacacttataaaataaatattccattttcatttaagtattattttcataggaaatatgttttccccactttttttccatttcttgttttcaatttttcaactactatccgttttgcctgtaaatctgtaattttcttcaatttcgagcccgcttgacttcttcatttatcaatcatccgcccagttgcacttggatgacttcatatgcaaatagtttgctctaagtgaatattttctaatgtgttttgcgctcgcttctggggaggagcccggtcaaaagcctttcaagtgaaatgcatttgcccctttggccaggtcattttttttttgtatttccccaaccttagccccaacactatcgcatatatacaaaatttttgagggtcatttttcttaggggcaaaacaaacttctttcgccccattttcgtcgctgcttcttaactatctcatggggtaaaaaatgaatcggggccccgcacacacacacacatgcacgtatacttatgtgcggaggggtagcctatatggcatacaatgaataatggaggccgggggtcctggaaaccaaaaagaacgagatgccgtagctgaagcgttgacaactatagaaaatattataaggatatgcgaccataaagcagaaggagaccaagaacaacgaccagcgacaacgaacgtcgccggggaagacaaataaaagagaaatcgtttattgcaaaagagcccataaattgattttttcaaataaaaataaaatatcgacacacgaatggggagcaccaccaacaccaccatcgcccgagagtcagacagataaaataagccatctaccataaggagttgggtggtgttgggcggtacgactgttgggctgttgggctgatgggctgatggggtgatgggctgttgggtggaaaggactaagtgagatgctgccaagatacacgactcaatagcctgcttgtggtccaaaaagaagccgcctccaagacgccaagtagaaaaaacccacaaccggagaggagcgatgaaatggccaaaaagagtggaagatagttggggcagaaatacgtaggagatggctgatggagaaacattgtcctcggcgtctttgtcgtcatcagagattcgcctacgtcctttttggccaaggtatattgtctcccagcccattttcctattttcccatttaagttaaaaactattaggaggcacccgcaaaccacccactctagtagtacataaattacatgaacccacacatttacccaaaaaaaaaaaaggaactacggagtttcctttggtgagggttggatgaatttttattaaaaactatggccgtctctttaataaagatgtgaacggcacacgaacacatggaaacacggaaaccatcatcagccagggaacataaataaggacacacacagacggcatttatctagcccagaaaaaaaaaatgatacaaaaaatggtaaaatggtaaaatgttaaaatggtagaggcagtggaaagttggtagaaagggcgaaatgatagttttccggaggagagaaatggtggttacataagaaggatatttgattccatttcagttcacatcattcagctgaaaaaatatgttttcctttatggatttttgcgatgctggtagtctttttggcctcaattcaatagaaaccgaaattagttgataaatttgacctagaacctttctaatgatcgtaaacctatccttggcagattacccagtaagcaccaatccaattgattatgaattatttataattgccaaatataattcaaggaacatgccgttcctaatacgattcttacttacttgctcgttttagttttcagacatggtagccgcagttctacagtctttcaatcccagtatccccgccataatcctgctctagaaaaaaaccgcactccagtgtcgttcgtttctccgcccataactcgcaacataaatcaatttggccatttatttagcagcaggcagcaggcgacatttgcatttgcttattaaaagcggggcgagagacaaggaagatggaacgagtagtcgtgacaaatatatttcacaattttaattggccaaacaaacttgaagttttgaagttggaaccgagttgaagttgaggctaaaaacttgattcctttcttc

SEQ ID NO: 23483 - DNA, 672 bp, DROSOPHILA
atgggctgggagacaatataccttggccaaaaaggacgtaggcgaatctctgatgacgacaaagacgccgaggacaatgtttctccatcagccatctcctacgtatttctgccccaactatcttccactctttttggccatttcatcgctcctctccggttgtgggttttttctacttggcgtcttggaggcggcttctttttggaccacaagcaggctattgagtcgtgtatcttggcagcatctcacttagtcctttccacccaacagcccatcaccccatcagcccatcagcccaacagcccaacagtcgtaccgcccaacaccacccaactccttatggtagatggcttattttatctgtctgactctcgggcgatggtggtgttggtggtgctccccattcgtgtgtcgatattttatttttatttgaaaaaatcaatttatgggctcttttgcaataaacgatttctcttttatttgtcttccccggcgacgttcgttgtcgctggtcgttgttcttggtctccttctgctttatggtcgcatatccttataatattttctatagttgtcaacgcttcagctacggcatctcgttctttttggtttccaggacccccggcctccattattcattgtatgccatataggctacccctccgcacataa

SEQ ID NO: 23484 - protein, 223 aa, DROSOPHILA
MGWETIYLGQKGRRRISDDDKDAEDNVSPSAISYVFLPQLSSTLFGHFIAPLRLWVFSTWRLGGGFFLDHKQAIESCILAASHLVLSTQQPITPSAHQPNSPTVVPPNTTQLLMVDGLFYLSDSRAMVVLVVLPIRVSIFYFYLKKSIYGLFCNKRFLFYLSSPATFVVAGRCSWSPSALWSHILIIFSIVVNASATASRSFWFPGPPASIIHCMPYRLPLRT

SEQ ID NO: 23485 - DNA, 7766 bp, DROSOPHILA
cagtatgttctgcaaaatgattttggagcatttaaaattttgttcttagtctctgtctttatgctagattttgttgcgcctaaatttatgattttttttgattaggagtatgcttttaattttgtgttaatgcctaaaatgtacaaaagttttacgtttaggtttgtttttaatttgcatttatcacagcgacattcagtctaaattttgcttttattggaattatagcataatttgccataattttctttgatataaacgttctcataaacattttcatttgttttttttttaactaaaactaaacataattttgatttaaagccaaagggttcatgtgtgttttcgtcgtatgttattatcgattttacattttcgattttttaaagccgaaaggattaataaaattttgtctaaaaggcctaaaggtttgctagagcttaatgataaactttgtgtttttatagcaaatcatgctgatcagatcattctgatcaagtcccttttgtctaattccaataaaagccaccatattgggtaccatatcaatttttggatgttggttgcctgtgacggagcatgcaatatttttggattattcgtcgtgatccgctctcaattttgatttagatgtgcaattttaatgtgcctaaaaagtgattttaaaattttgactaaatttaccgtaaccgtaggcgtaatttaatattttacaatgtcaaacaattcattcaaacttttaataaaacttttgcttgtagagttacatttaatttttgccaaaacattctatgtacaattttgaataaaccattgttgccgaaacttttgcagcgacactcgtatcacaaaaaccagacgcctgcccaagccgaaaattcgtagtgttgtataatgccagaattgtctgagttgccccatttggagaggggaatcataagaaacagactttggtaaggataaaatcaaaggatacttgaaaacataatgcaaaataaaatctgataaatcatataattgttttattgaaaaaatttaaataaaatatccaaacataattcataaactttaaatttaaaacagtgaaaacaaaccgtattcggagcacttactttgattgcattagaaacttaattgactaattattaaatttatgaaataatgagtagatacttgataaagtgaaacgactaactgaatataatttcttatcttccacggtgttttctacatatacataaaatatgtatactttttaggaaacatattctaaaatatcaataacagttataaatgctttgacggtacattggaaaatttgttaagaaactaaatttgtcgattatatccacacagttggcaggggaagaacttagatggtggggatcgggtggtcatcattacggtagattatactgagtataagttggaggattgatacgcgattatccataatcttttgactattgtttatgtttgtgtatggcacctgaagagtcacattcgaatttgcctgcttgataaacaagatgttccagctgatttcttttgtctgccttgtgtgtgcaaaagtgtggacatatttgggttaaacgtatgcgtgcctaataactaaataaaaactcaacataaattacacataattagttggggaagacaacaaatgaatcctaagtcaatgtacttaaggtttcataacttatacttgatttatcgtatcattaaattgcattccagtattcatttatacactttaaaaatcacatatcaattgaaatgaaaaagaaatttctaataagagtttggtggcccattggctaatccccttggctgagccaagcgtaaatcgatcaaccatgcgcattaaacaaaaactccaatacatcaacatatctgaagtatatataactcaaattttgatgctgcttcaaaaatcaaattactcagcgccaacgtctgcgttccccatcctattctttgccatcaaccttttgctctgccccttctgccttcgccacaaatagctgccctatctatcacgtcacatgttcatactcattgtatcggagctatcctagtattacgcctaagtggtatatcctcgattaattgtatccaaaattaagggttacgaaatttgcctgtactaaagtgtccgtgtgtttttgtgtgtataaatatttgatgtatttttagtcttaaaagttgttggggtgctaaaacaaatagaaatcgtataacgttgtgttttggctctcgtttctctccttcattctgctcattacttctcttacacattgaccatttgcattttatgttcatggtttatattaaagaagtttagagtccttttcaaaaagactagtactcgtcctgtttgcgttctgttcagctcctctcggttcgttcgtttgccattaccaaactgtgttttgtgattttaagattagttttaaaaactaggagaatttgttttgcgtctaatactaaagaactaatcgaacctatgaagtatggtgaatagtttgtgtttattaactttgaattcctgcctccggctcctgtctctcctactgatgacatcatagagatccgaatatcgagtgtatgtgtggatgaatgggaatcgcgtgtgatagagttggtggcggaggcgctgccccgttagccacgcccggatgacccggatgacccgggtgacccggatggaccgtatgggaggccggtggcggcggcagcgtgatcgagagcgtcacagtctgtggcgccgcaactggtgaggcgtgggcggatgagggcgtgaccgcggtgacagcggcggccgctgatgcaatgtgatgcgcggtcgacgtgggcggaggtggcggcggatggtgctgctgctgcggcgccgatggctgctgttgttgtgccccagttgctgcagtggtgggatgtcactgggctaccacagaggcagaagcattctgctgaaccaccacgccggatgccacagagttggccaccgttacggttacgggtggagtgggtcctccgtttgcgtgggccacgctgggctgttgggcctgctgctgctgtgcctgaaagggatgctggaagggtggtccgtagcactgcggaaaatagagctcgttctttactacggactgctggacaacagcggctgccgcagcgttggatgctatactgcgcaccggaaggatgttggccttgttgtccactgccgagggattgttgttgttgaggaactgttgggccgccaggctcttggcgtcgttcatcaggtgattggccacctgggcgacagcgttgttattctgctgctgttgctgctgctgctgctgctgctgttgctgttgctgttgttggtgctgctgctgttgctgtcggcgcaccttagtggtgttggggttcatgtggttgtcgatgtgcttggtaacctcattctccgtagcaaagcgccgacgacagttgggcataggacaacagaatggacgatcgccctgcttggtgaaaataaattgatagattagagctcagactagggtagatagttcaggaacgatttctcaatttcatgataagatcaatcaagagcactgtgaaatttcagtacgatctcagaagtggctagctaataaatttattaaataatttataaaataatctgcgaataagatttgacatatgtacatgtctataagcattaggactttctaacaatggttaccgaggcctactgctttgacattagaaattaaagttcacaatttaaattgattttgagaaatagagcctacgcgggctgaggccaggctacaactacctggtgggtgcgcgtgtgctggtccaggatggccttctgacggaagtccttgccgcactgaccacacttgtacggcttctcgccggtgtggatacgcaagtgctgattgaggatggtccgctggcggaagaatcgcggacagtacatgcagccaaagggcttctcgttagtgtgaatgcgcaggtgctgcgtaagatgcgactgctgccggaaacgttttccgcactccgggcaggggtacggccgcgactcgatgtggatgcagccgtgttgcaacagcgtcgtcttctgcttaaactccttgtcgcagatggggcaccgcacgtagagcggcatgtttgccggtctcacgccgatatgctgcagcacctcgggcagtatcttttggcctgtacgaggatctgattagaaggtagccgcctccaaacacgcctcacagaagtactcacccttgccgtccttgaagtaagaggggtagtgcatgccaccgctgccatccggcgttccctgggagtcctcgtcgtggtagccgccgcccgtgccggcgatatcgcccttagtgtcgttgtcctcgccagggaagggtacatccgagggccacagggtcgggtgcggcccgtttttgaaaataaggtgtggcgagacgtctgtttatgggacgtgttgatccgcagtgtcacatggaagtaatcaagcgaaagaggctactgttagcagcgcttaaacttggcgcgcagccgagatacaaattttcgaaagaactgcctagctttcaacttaataacggaattttttttggctgccgattggctgaggcgatggaaatgttgcatcctcgatcgccttacttaaattattaagcaagttgcctccgtctttccgtctttgcgctcagccagtccgcgagccaaataggtattttaatagggacaatttcgatattcgaccaaaagttcgctccatggcagagagaacagaattttgcagggaaatcggttgccaaaagggatgagataagccaagcttgtggaccagctggctaaccggggtctgatctagcactattcctatctgataaactattcgaatctgtatctgcatctgcatcggtatgtaagttatctgtatctgtcgctcgccttggtgggtgcgcacatgctgattgaggatggctttctggcgaaagtgcttgccgcactcggggcaggcgaagggcttctcacccgaatggatgcgtatgtgctggttgagaatggcgcgctgccgaaaactgcgcgagcagtatgggcaggtgaagggcttttcgttggcgtggatgcgcaaatgctgtgtaaggtgcgactgctggcgaaagcgtttgccgcactcggagcacgggaagggtcgtgcgtccgtgtggatgcggtcgtgctgcagcaacgtgctcttctgcttgaagtccttgccgcaggtgaggcacttgaagagccgcaggtcgctgtgtggcttgttcttgtgcgggcgtcctggtccgttgcccgtccttccgccgctcgtcacgcccaccgatcccactcccacgctcgctcccgtcgcaccgcctacacctccgctcccgttggctcccgcaccgccttcgttggcattggtgttcgctggaccggcgttctgctgaccgttttgctgagccggcagcatttcgggaagcgcgtaggcttctccacccccggccccgccgccaccgccagactgttccattggcaaaacgcccttgttaagatagtgaagcggtgggaagccaggcggtgccagcatccccccttgcggtgccgcgtggcgggggtcataatagtccggtgttcgaaaactgttgccggggtcattttgcggtccgccgttctgctggacatgcgggttgcctgattcgcccgcgttggagcccgaatgctgggggtcattgctgctttggttttgattgggagcggggttctgctggttggcgagctgtaagaagttgaaaggacttagtcggtgcgctcctcaaaactggaactcgaagaaaagctcacctggtggttcatggggtcctcgtcgcctgccccgtttgccctctgctgctgctggaccgaagggtacggactcgaggagggcgacacctgctgctggcggccatcaccgctgccgttgtcgcgggcctcctgtccgccccccggcggactttgcggctgtcccgctgccgctgccacagctgccgcctgggccgctgcttgcgccgcgttctgctgctgctgctgttgctgctgctgggcagttaggtgctgctgggcctgttgctggatgttggggtacatctcgctgccccactgggcgggagtggcacctatggcaccggggttccgttcagcgtcctgcgagtccttatagagcacgtatggctggcccgtgtcctgagtgatgcagtacattatctggcgcggcacctttagcccggctgctatgcaagccgcaaaggaagccgaaaagttgatggccattgctgctggttccctgttcaattggtaagtgttcaaggaagggctccttctgctctctcgggcttttatttgttatggcctttgactcttatgacgttttaagcaatttcaaagtgtccttttattgacttttgatgcacattataaatgggcttcttggctctcttagctgtgctgggcttatcgccactgtggtctctgctggttatttgtttcttttcatgttgattaaattttaaattcctttcttcttatttgtttcatttatttatttacgtttataaacttcttcgtgtagttggctctttcgctcaccgaaaaccgttacgtttgcttttttcttttaaataaaatgtcaccctctcctttgttggcttacaattggttttaaagatgctttaattgatgcgattttcctttggttcaactgaaagataagaggttattattcaaggatgtatcgagttggttggttcaatagttcaacagtccccattaaaagccaatagaaaactcaactaatcgtatctcgctatgaggacggtcggcatgcaaaacacatccatccaaatcccaactttgcttcaaacccacaaaaagtgaaaagtccgacgacattagcaaaaatgtctggcaaattaaaaacaatgaagatcatcaacggatgattgggaggagtggcgcataaatggacaccgcatgagagccaggcgagttcctcccgccattaaaattcccccagtaccgcctggcgacccacaaagcgactgtccacatgttttcttctttgttgtcgtgccttgccggtctgtcttgactcacttgtctccttggctctgctgcctttcgtttttggtttcggttcggttttatctttgtgccgcgttatttttgttgtttaacgacgatgacgacgacgtgccaactttttaatgcgggatcaaggtcttgtagagcgtgcgcctcgcacaacacaggcaattcggagacgcggttagggcacagacatacacacatacccccaaggcccggatggtgcctgttcactgatccacatccaccatgccccatttgggacattccatatgagtgtttgtttgaatgttctatagccaaataaacttatttccttaatattaggtcgctagaggaaatccagtaccaactggggactaacatgggtaaaaccaaaaacgatttatgcatcgttagggaaagacttcaaaactcaatcaatgatttcaaaaattttctactaagccagtctcctttagttttattgaaatctgcatgaaactttatttctattgcaggtagcataggtcgaaactactacttaagcttagaaaaaaagtggatatgcaaaaacatttcttatttaatgatactattaatataatatttaaatgattataaatatttaacca

SEQ ID NO: 23486 - DNA, 4826 bp, DROSOPHILA
ttgaaccaaaggaaaatcgcatcaattaaagcatctttaaaaccaattgtaagccaacaaaggagagggtgacattttatttaaaagaaaaaagcaaacgtaacggttttcggtgagcgaaagagccaactacacgaagaagtttataaacgtaaataaataaatgaaacaaataagaagaaaggaatttaaaatttaatcaacatgaaaagaaacaaataaccagcagagaccacagtggcgataagcccagcacagctaagagagccaagaagcccatttataatgtgcatcaaaagtcaataaaaggacactttgaaattgcttaaaacgtcataagagtcaaaggccataacaaataaaagcccgagagagcagaaggagcccttccttgaacacttaccaattgaacagggaaccagcagcaatggccatcaacttttcggcttcctttgcggcttgcatagcagccgggctaaaggtgccgcgccagataatgtactgcatcactcaggacacgggccagccatacgtgctctataaggactcgcaggacgctgaacggaaccccggtgccataggtgccactcccgcccagtggggcagcgagatgtaccccaacatccagcaacaggcccagcagcacctaactgcccagcagcagcaacagcagcagcagcagaacgcggcgcaagcagcggcccaggcggcagctgtggcagcggcagcgggacagccgcaaagtccgccggggggcggacaggaggcccgcgacaacggcagcggtgatggccgccagcagcaggtgtcgccctcctcgagtccgtacccttcggtccagcagcagcagagggcaaacggggcaggcgacgaggaccccatgaaccaccagctcgccaaccagcagaaccccgctcccaatcaaaaccaaagcagcaatgacccccagcattcgggctccaacgcgggcgaatcaggcaacccgcatgtccagcagaacggcggaccgcaaaatgaccccggcaacagttttcgaacaccggactattatgacccccgccacgcggcaccgcaaggggggatgctggcaccgcctggcttcccaccgcttcactatcttaacaagggcgttttgccaatggaacagtctggcggtggcggcggggccgggggtggagaagcctacgcgcttcccgaaatgctgccggctcagcaaaacggtcagcagaacgccggtccagcgaacaccaatgccaacgaaggcggtgcgggagccaacgggagcggaggtgtaggcggtgcgacgggagcgagcgtgggagtgggatcggtgggcgtgacgagcggcggaaggacgggcaacggaccaggacgcccgcacaagaacaagccacacagcgacctgcggctcttcaagtgcctcacctgcggcaaggacttcaagcagaagagcacgttgctgcagcacgaccgcatccacacggacgcacgacccttcccgtgctccgagtgcggcaaacgctttcgccagcagtcgcaccttacacagcatttgcgcatccacgccaacgaaaagcccttcacctgcccatactgctcgcgcagttttcggcagcgcgccattctcaaccagcacatacgcatccattcgggtgagaagcccttcgcctgccccgagtgcggcaagcactttcgccagaaagccatcctcaatcagcatgtgcgcacccaccaagacgtctcgccacaccttattttcaaaaacgggccgcacccgaccctgtggccctcggatgtacccttccctggcgaggacaacgacactaagggcgatatcgccggcacgggcggcggctaccacgacgaggactcccagggaacgccggatggcagcggtggcatgcactacccctcttacttcaaggacggcaagggccaaaagatactgcccgaggtgctgcagcatatcggcgtgagaccggcaaacatgccgctctacgtgcggtgccccatctgcgacaaggagtttaagcagaagacgacgctgttgcaacacggctgcatccacatcgagtcgcggccgtacccctgcccggagtgcggaaaacgtttccggcagcagtcgcatcttacgcagcacctgcgcattcacactaacgagaagccctttggctgcatgtactgtccgcgattcttccgccagcggaccatcctcaatcagcacttgcgtatccacaccggcgagaagccgtacaagtgtggtcagtgcggcaaggacttccgtcagaaggccatcctggaccagcacacgcgcacccaccagggcgatcgtccattctgttgtcctatgcccaactgtcgtcggcgctttgctacggagaatgaggttaccaagcacatcgacaaccacatgaaccccaacaccactaaggtgcgccgacagcaacagcagcagcaccaacaacagcaacagcaacagcagcagcagcagcagcagcaacagcagcagaataacaacgctgtcgcccaggtggccaatcacctgatgaacgacgccaagagcctggcggcccaacagttcctcaacaacaacaatccctcggcagtggacaacaaggccaacatccttccggtgcgcagtatagcatccaacgctgcggcagccgctgttgtccagcagtccgtagtaaagaacgagctctattttccgcagtgctacggaccacccttccagcatccctttcaggcacagcagcagcaggcccaacagcccagcgtggcccacgcaaacggaggacccactccacccgtaaccgtaacggtggccaactctgtggcatccggcgtggtggttcagcagaatgcttctgcctctgtggtagcccagtgacatcccaccactgcagcaactggggcacaacaacagcagccatcggcgccgcagcagcagcaccatccgccgccacctccgcccacgtcgaccgcgcatcacattgcatcagcggccgccgctgtcaccgcggtcacgccctcatccgcccacgcctcaccagttgcggcgccacagactgtgacgctctcgatcacgctgccgccgccaccggcctcccatacggtccatccgggtcacccgggtcatccgggtcatccgggcgtggctaacggggcagcgcctccgccaccaactctatcacacgcgattcccattcatccacacatacactcgatattcggatctctatgatgtcatcagtaggagagacaggagccggaggcaggaattcaaagttaataaacacaaactattcaccatacttcataggttcgattagttctttagtattagacgcaaaacaaattctcctagtttttaaaactaatcttaaaatcacaaaacacagtttggtaatggcaaacgaacgaaccgagaggagctgaacagaacgcaaacaggacgagtactagtctttttgaaaaggactctaaacttctttaatataaaccatgaacataaaatgcaaatggtcaatgtgtaagagaagtaatgagcagaatgaaggagagaaacgagagccaaaacacaacgttatacgatttctatttgttttagcaccccaacaacttttaagactaaaaatacatcaaatatttatacacacaaaaacacacggacactttagtacaggcaaatttcgtaacccttaattttggatacaattaatcgaggatataccacttaggcgtaatactaggatagctccgatacaatgagtatgaacatgtgacgtgatagatagggcagctatttgtggcgaaggcagaaggggcagagcaaaaggttgatggcaaagaataggatggggaacgcagacgttggcgctgagtaatttgatttttgaagcagcatcaaaatttgagttatatatacttcagatatgttgatgtattggagtttttgtttaatgcgcatggttgatcgatttacgcttggctcagccaaggggattagccaatgggccaccaaactcttattagaaatttctttttcatttcaattgatatgtgatttttaaagtgtataaatgaatactggaatgcaatttaatgatacgataaatcaagtataagttatgaaaccttaagtacattgacttaggattcatttgttgtcttccccaactaattatgtgtaatttatgttgagtttttatttagttattaggcacgcatacgtttaacccaaatatgtccacacttttgcacacacaaggcagacaaaagaaatcagctggaacatcttgtttatcaagcaggcaaattcgaatgtgactcttcaggtgccatacacaaacataaacaatagtcaaaagattatggataatcgcgtatcaatcctccaacttatactcagtataatctaccgtaatgatgaccacccgatccccaccatctaagttcttcccctgccaactgtgtggatataatcgacaaatttagtttcttaacaaattttccaatgtaccgtcaaagcatttataactgttattgatattttagaatatgtttcctaaaaagtatacatattttatgtatatgtagaaaacaccgtggaagataagaaattatattcagttagtcgtttcactttatcaagtatctactcattatttcataaatttaataattagtcaattaagtttctaatgcaatcaaagtaagtgctccgaatacggtttgttttcactgttttaaatttaaagtttatgaattatgtttggatattttatttaaattttttcaataaaacaattatatgatttatcaga

SEQ ID NO: 23487 - protein, 820 aa, DROSOPHILA
MAINFSASFAACIAAGLKVPRQIMYCITQDTGQPYVLYKDSQDAERNPGAIGATPAQWGSEMYPNIQQQAQQHLTAQQQQQQQQQNAAQAAAQAAAVAAAAGQPQSPPGGGQEARDNGSGDGRQQQVSPSSSPYPSVQQQQRANGAGDEDPMNHQLANQQNPAPNQNQSSNDPQHSGSNAGESGNPHVQQNGGPQNDPGNSFRTPDYYDPRHAAPQGGMLAPPGFPPLHYLNKGVLPMEQSGGGGGAGGGEAYALPEMLPAQQNGQQNAGPANTNANEGGAGANGSGGVGGATGASVGVGSVGVTSGGRTGNGPGRPHKNKPHSDLRLFKCLTCGKDFKQKSTLLQHDRIHTDARPFPCSECGKRFRQQSHLTQHLRIHANEKPFTCPYCSRSFRQRAILNQHIRIHSGEKPFACPECGKHFRQKAILNQHVRTHQDVSPHLIFKNGPHPTLWPSDVPFPGEDNDTKGDIAGTGGGYHDEDSQGTPDGSGGMHYPSYFKDGKGQKILPEVLQHIGVRPANMPLYVRCPICDKEFKQKTTLLQHGCIHIESRPYPCPECGKRFRQQSHLTQHLRIHTNEKPFGCMYCPRFFRQRTILNQHLRIHTGEKPYKCGQCGKDFRQKAILDQHTRTHQGDRPFCCPMPNCRRRFATENEVTKHIDNHMNPNTTKVRRQQQQQHQQQQQQQQQQQQQQQQQNNNAVAQVANHLMNDAKSLAAQQFLNNNNPSAVDNKANILPVRSIASNAAAAAVVQQSVVKNELYFPQCYGPPFQHPFQAQQQQAQQPSVAHANGGPTPPVTVTVANSVASGVVVQQNASASVVAQ

SEQ ID NO: 23488 - DNA, 2533 bp, DROSOPHILA
ttggatgactgatttctggagtttttgtttccgaaaatgtgtgttttttcattttggatacgttttgaaatatttgaaaatgagaagagccttagcagataatagatcgctttaagcgttagctttttacggaagtggcgcccaacgcgtgcgttattttattttaaacttttccaccgattttaaatatgctacctgcaaatatatcataatttggtgaatctaattcacactgattaaatttaacccacattcagtggccaccatcaagtgtatttgaaagttggagagcaactgaactttcggttggcctgtttttgtttgctgctggcaagggaaaagtttccaatccaaaaaggcaggttggctaaattaaaaagagtgcgtggtaggagcggggtggagattcattggcggcagttccaacttggccataaactttatcgccaaagcagaaacaggcgcatctgccggaggttctcgatgttcttggaaattcaagcctggagagtctggggcaatcatacatccatatcctcatgtttatttaacgatgctttttatgtgcagcgcgaaatgcaaaaaggattaaaagtcatcccactcagccctcatctcgggatctttcaagtggcgtgaaatttggcactttgagtggcgtttctcggtctttacgtaacttttaactaaactgaaagcacttttgtgtgtgcgtgctaaaatattaaaaaacatcatttactttcgagtctcataaagtggtctcaaaaatgtggttttcgttccctattccggatatgtgtaggcactcgccagaaactttttcgcttcgattagtagcctttgatttagttgccataaatttcatttgatgctaagcgaatattatatttttataaataaattgacagcagggagtaacatcaaagtgttatgtccttccatcgcgattagctatcaatttttgattttaaattttatggttaagaatcggagagacaaacttatgatgaaaagaattttaatttctactttcaggggccaaaaagtaagtcatataaatggcaatgtgactcgtacttttttgtgtggtatatccacacgtattgaaccaacactcgttggtatttccgtgtcctctaaatgttgccttttcttttacatatttctcatacattttcatacactgtacactgtcatgtgcacttttccccctttgctgacaggttttatactgtttgcattggccaattacgtcgggcaaaagcaaatggaacgaatgccaattggttgccagataaagaatgcagctgcagactcggattcagattcagatccggatcgagatcggcagagacgcagatacgaggatatggctacaaatgccagcgcgggtatattttttaatatcacaaatggaaggaattattattgaaatatttgcaaggcaggaggagtcaggctccttcgtgtccttttgctcctgtttcagtgtctgtttcagttccttcctgctccagaccgagatgacattatttatggcagctagtggagtggagacaagtgtcctccagcggtctccctcgagcaattaaaacgccaaactaattagatgaattctgtgtgatttccgtataattaaattgcccatttgagtgaagtcgagtagagaggagccttcgttcagctggaagatacttgatttctaaaaagcaggaagcaactttaattttaacggaaggtggagcgatagatttgtacatttcatagaaatatgccatcatagactaattagctgtagctgtcttttaaatattcaaataatggactgtaaattatttttccgcataaccacaaatacctctatatatattatttgtcaatccataactctagttgtgtggcaaattaaaagctaaaagaaattctgttttgaaagtctatttgaattgaagttgaacaaaatacctgccgtttaacatctcctttatgtctctcagtgtgtgaagatgttttacaacatttataacatgctaactatacacaacacacggctgggactttcagttgccacccactcgacgtttaagttttcggtacttaacgtaatttccttttgctggcaacttttccacccactttccgggtggatgggtggcttattttttgtttggtgggttggtgcgttggtcggttggttgggtggttgggtggtcgggtggtcggctcatgttgatggagcctctagttgagctaaagataaataagcaaataggcaaataaatcttcatttcaacttcttgtgaggctttcttaactttttctcagctgctcagtgatgctacaccgcctcatgccttttaagtttttgcgtttcgcttcctttccgccctgcatttccccctgagctccttgtgcttcttagccaattcaaaaatttccaacttacgctagtaaattgttcgggtaacatgcacttaagtatgccgtaccccactccgcctgccgccggaaaaacctccgattttcctgc

SEQ ID NO: 23489 - DNA, 533 bp, DROSOPHILA
aaacttatgatgaaaagaattttaatttctactttcaggggccaaaaagtaagtcatataaatggcaatgtgactcgtacttttttgtgtggtatatccacacgtattgaaccaacactcgttggtatttccgtgtcctctaaatgttgccttttcttttacatatttctcatacattttcatacactgtacactgtcatgtgcacttttccccctttgctgacaggttttatactgtttgcattggccaattacgtcgggcaaaagcaaatggaacgaatgccaattggttgccagataaagaatgcagctgcagactcggattcagattcagatccggatcgagatcggcagagacgcagatacgaggatatggctacaaatgccagcgcgggtatattttttaatatcacaaatggaaggaattattattgaaatatttgcaaggcaggaggagtcaggctccttcgtgtccttttgctcctgtttcagtgtctgtttcagttccttcctgctccagaccgagatgacat

SEQ ID NO: 23490 - protein, 142 aa, DROSOPHILA
MMKRILISTFRGQKVSHINGNVTRTFLCGISTRIEPTLVGISVSSKCCLFFYIFLIHFHTLYTVMCTFPPLLTGFILFALANYVGQKQMERMPIGCQIKNAAADSDSDSDPDRDRQRRRYEDMATNASAGIFFNITNGRNYY

SEQ ID NO: 23491 - DNA, 2717 bp, DROSOPHILA
ggcgtgaccgcggtgacagcggcggccgctgatgcaatgtgatgcgcggtcgacgtgggcggaggtggcggcggatggtgctgctgctgcggcgccgatggctgctgttgttgtgccccagttgctgcagtggtgggatgtcactgggctaccacagaggcagaagcattctgctgaaccaccacgccggatgccacagagttggccaccgttacggttacgggtggagtgggtcctccgtttgcgtgggccacgctgggctgttgggcctgctgctgctgtgcctgaaagggatgctggaagggtggtccgtagcactgcggaaaatagagctcgttctttactacggactgctggacaacagcggctgccgcagcgttggatgctatactgcgcaccggaaggatgttggccttgttgtccactgccgagggattgttgttgttgaggaactgttgggccgccaggctcttggcgtcgttcatcaggtgattggccacctgggcgacagcgttgttattctgctgctgttgctgctgctgctgctgctgctgttgctgttgctgttgttggtgctgctgctgttgctgtcggcgcaccttagtggtgttggggttcatgtggttgtcgatgtgcttggtaacctcattctccgtagcaaagcgccgacgacagttgggcataggacaacagaatggacgatcgccctgcttggtgaaaataaattgatagattagagctcagactagggtagatagttcaggaacgatttctcaatttcatgataagatcaatcaagagcactgtgaaatttcagtacgatctcagaagtggctagctaataaatttattaaataatttataaaataatctgcgaataagatttgacatatgtacatgtctataagcattaggactttctaacaatggttaccgaggcctactgctttgacattagaaattaaagttcacaatttaaattgattttgagaaatagagcctacgcgggctgaggccaggctacaactacctggtgggtgcgcgtgtgctggtccaggatggccttctgacggaagtccttgccgcactgaccacacttgtacggcttctcgccggtgtggatacgcaagtgctgattgaggatggtccgctggcggaagaatcgcggacagtacatgcagccaaagggcttctcgttagtgtgaatgcgcaggtgctgcgtaagatgcgactgctgccggaaacgttttccgcactccgggcaggggtacggccgcgactcgatgtggatgcagccgtgttgcaacagcgtcgtcttctgcttaaactccttgtcgcagatggggcaccgcacgtagagcggcatgtttgccggtctcacgccgatatgctgcagcacctcgggcagtatcttttggcctgtacgaggatctgattagaaggtagccgcctccaaacacgcctcacagaagtactcacccttgccgtccttgaagtaagaggggtagtgcatgccaccgctgccatccggcgttccctgggagtcctcgtcgtggtagccgccgcccgtgccggcgatatcgcccttagtgtcgttgtcctcgccagggaagggtacatccgagggccacagggtcgggtgcggcccgtttttgaaaataaggtgtggcgagacgtctgtttatgggacgtgttgatccgcagtgtcacatggaagtaatcaagcgaaagaggctactgttagcagcgcttaaacttggcgcgcagccgagatacaaattttcgaaagaactgcctagctttcaacttaataacggaattttttttggctgccgattggctgaggcgatggaaatgttgcatcctcgatcgccttacttaaattattaagcaagttgcctccgtctttccgtctttgcgctcagccagtccgcgagccaaataggtattttaatagggacaatttcgatattcgaccaaaagttcgctccatggcagagagaacagaattttgcagggaaatcggttgccaaaagggatgagataagccaagcttgtggaccagctggctaaccggggtctgatctagcactattcctatctgataaactattcgaatctgtatctgcatctgcatcggtatgtaagttatctgtatctgtcgctcgccttggtgggtgcgcacatgctgattgaggatggctttctggcgaaagtgcttgccgcactcggggcaggcgaagggcttctcacccgaatggatgcgtatgtgctggttgagaatggcgcgctgccgaaaactgcgcgagcagtatgggcaggtgaagggcttttcgttggcgtggatgcgcaaatgctgtgtaaggtgcgactgctggcgaaagcgtttgccgcactcggagcacgggaagggtcgtgcgtccgtgtggatgcggtcgtgctgcagcaacgtgctcttctgcttgaagtccttgccgcaggtgaggcacttgaagagccgcaggtcgctgtgtggcttgttcttgtgcgggcgtcctggtccgttgcccgtccttccgccgctcgtcacgcccaccgatcccactcccacgctcgctcccgtcgcaccgcctacacctccgctcccgttggctcccgcaccgccttcgttggcattggtgttcgctggaccggcgttctgctgaccgttttgctgagccggcagcatttcgggaagc

SEQ ID NO: 23492 - DNA, 658 bp, DROSOPHILA
cttccatgtgacactgcggatcaacacgtcccataaacagacgtctcgccacaccttattttcaaaaacgggccgcacccgaccctgtggccctcggatgtacccttccctggcgaggacaacgacactaagggcgatatcgccggcacgggcggcggctaccacgacgaggactcccagggaacgccggatggcagcggtggcatgcactacccctcttacttcaaggacggcaaggggccaaaagatactgcccgaggtgctgcagcatatcggcgtgagaccggcaaacatgccgctctacgtgcggtgccccatctgcgacaaggagtttaagcagaagacgacgctgttgcaacacggctgcatccacatcgagtcgcggccgtacccctgcccggagtgcggaaaacgtttccggcagcagtcgcatcttacgcagcacctgcgcattcacactaacgagaagccctttggctgcatgtactgtccgcgattcttccgccagcggaccatcctcaatcagcacttgcgtatccacaccggcgagaagccgtacaagtgtggtcagtgcggcaaggacttccgtcagaaggccatcctggaccagcacacgcgcacccaccaggtagttgtagcctggcctcagcccgcgtag

SEQ ID NO: 23493 - protein, 186 aa, DROSOPHILA
MYPSLARTTTLRAISPARAAATTTRTPRERRMAAVACTTPLTSRTARGQKILPEVLQHIGVRPANMPLYVRCPICDKEFKQKTTLLQHGCIHIESRPYPCPECGKRFRQQSHLTQHLRIHTNEKPFGCMYCPRFFRQRTILNQHLRIHTGEKPYKCGQCGKDFRQKAILDQHTRTHQVVVAWPQPA

SEQ ID NO: 23494 - DNA, 2495 bp, DROSOPHILA
caaatttgtatgcgtccaaatactcaaatctagtttaatagcatccacttaaataaatacatatatttaattagttgtaaattttcataactactttaaagtttattataaagattggcttgtgtgcatacttagtaaacaaattacaatgttgttataataacattatagtattcctattccggcggtaagccgctttttcataatcctggtattataatatgctggcaatctaaatgcaaatttaggaaatctaatgcacacgttgtgtatatgatgaacatgtctaagtgtacattcaaattattatttcactctaacataattaatttttaacatatacaatgcaatcgaatcaaaaagctcataaatcatatacatttttaaaatggctttccaagcaattgtatattaacagcaagaaatagaatactagaataatggcttggaaccaattaaacaagaacgcgaaatatatctttttgaaagttcaatgaatgatttctttttttccttgaaaaatatttcgacagctcatccatccctatcccgttcccgttcggaattgttagatcactacaaatcagtgttttgaaaaccgttactcgtgaagtaaaattatattatgaattagttttttgaattattttcacatttgtatcgattaaattaagttaacaacaggcatcggttattgaaattaagaattacaacaatttcaatttgagttgcagctaggcgacagtgatgtacactaaaagaccgctttcttttggagcacacttggaaaacttttggtatttttatttcagacccgaccgaaaacagtggaatcttcgtaaaccttcggccagccaaattggtcttccaccgttatgtatttatttttagcatcgggagtcttagagctgcttcaattagttttattaggtggtattataaatgtaggctttatattttgttttgtgttaatattttaaattcatttaaaatttttaattcatgtcactgtggtactcccaacttggatgcgtgctgcctccaccagcttcctgctcgagatgaggacagctaccgttttttgagaggccaactccaggccggccacagctagacatgcttcgacatccttgatagctgtgtttgcgaggcccacgatctttgtgctttccggaagagcaaggcttagaacactattgtacgtggtgttccagaacatcggtcccgtgacctctctggagcccaatgacgattcgatgacaagcacgcgagtgctgaggtagatgcctttaaaggcccttagtgactccagcgtccttgcccagtcaaccgcgttgaacgcgttacagatgtccatccttaccaccaggcgttacttcttcgtaccacccttccacttggaacctgaaatggctctggcagcagtgttggtaaccgtggagatcgcgtccagcgtcgacaatcctttccgaaatccggtttggagaaagtacccctgcagccgcttttgcttcgtcgagcctcgccgcaatcacctttttaaagatcttacccatcgtatccagcaggcatttggatacgaggaaagttcggccgggagcaagcttgcttgtgagtcggagttcttgtcccagcatcaacagcgatcttaaccattccatctgattgggggtgtagcggcgtcgtcatttttacgttgagcaggcggagacaagcttgaaatactactgactgaaagttacggccttgatccgagtagacgagctgttcggtgaggcagagctatacacatcggtcatttgacgaagtaacaaagctacatttcggttcccgagcactgtagtaggcaaaagacccaatatgtcaatcgcaagtctttcaaacggagcacatagaactgtgggctgtagttggctaacggtacattgggtaagtccttttctaacactgcatcacatcagcggtttgcctgatccgaaagtaggatctcttaagcgtagccactgtcttttcgattccgaaatgtccaccagtggtggagttatgggtgctgaataagccttcttctataagagggcgctgcaccactaaggcggcatccgccgttttggtcgtaaccacgagaagacccttgtctaagtaaagccgcttaaccagatgccaatacgctttagtttttgaactttcattctatgtctgggagcacctggctcctagaagaggtcgcaaagtgcgtagagatcggagcagctctcttgtacgcatagaataacagccaaacacagtatgtgtgcacactatcccagtcgaaagtggaagtactccggaagtcctttcggaataattctttgtcgagtggaagtgctgccacataggtaagttaccataccttcttgccggccgtgagactataattaataattccctgatatgttcccaaaatatataaaaaagacccggttcaaaaaatatttaatcttttattttatttaatt

SEQ ID NO: 23495 - DNA, 495 bp, DROSOPHILA
gggtactttctccaaaccggatttcggaaaggattgtcgacgctggacgcgatctccacggttaccaacactgctgccagagccatttcaggttccaagtggaagggtggtacgaagaagtaacgcctggtggtaaggatggacatctgtaacgcgttcaacgcggttgactgggcaaggacgctggagtcactaagggcctttaaaggcatctacctcagcactcgcgtgcttgtcatcgaatcgtcattgggctccagagaggtcacgggaccgatgttctggaacaccacgtacaatagtgttctaagccttgctcttccggaaagcacaaagatcgtgggcctcgcaaacacagctatcaaggatgtcgaagcatgtctagctgtggccggcctggagttggcctctcaaaaaacggtagctgtcctcatctcgagcaggaagctggtggaggcagcacgcatccaagttgggagtaccacagtgacatga

SEQ ID NO: 23496 - protein, 118 aa, DROSOPHILA
MDICNAFNAVDWARTLESLRAFKGIYLSTRVLVIESSLGSREVTGPMFWNTTYNSVLSLALPESTKIVGLANTAIKDVEACLAVAGLELASQKTVAVLISSRKLVEAARIQVGSTTVT

SEQ ID NO: 23497 - DNA, 3576 bp, DROSOPHILA
aagctggcacaaagttccttaaccccacagaacagcagccatcatattattttcaacatttatttgccatgcgtaaataaaaaaaataaatacgaatatatatgtatatatatatatatatacatatacatggggaaagggcggatttttgtgcaattttcaaaggccaaagtggtaaagtaaaacggaaaatgactttcccaagccgccaaccgccccacccatttctcaccctttctaccaataataaatgcaaaactgcaccgggcaaggaggattgcattttaggtaaacatagagcccgccaaaggagctgctctgggaattgggaaactgtttggtgagggaaagcctggagagtgggtggggcgaaatgctgcgggcttattgggacgggggcactgcggggttaaggcgtgtcctggcgcttgtccaattgacgtaaatcgtgcacaagttttggcagccaaaatgactgcggataaagctggagacgagacagccagaaagagaggggcaggcaagtggagagtgaggctggtgaacaggcggagaaagagaagaaataaatggcaagaggtcagcaaacttggtggctcacaagctgccacaacacctatcgaaactcgaaactcactagctgtaaattgaatatctccttaaaaagtgatatgtaaaaaggaataaatggaatagaggaataaataaataatttgtattaattctcccattgacataactttagatgaacattatgcacatacatgtattataactaaattatatatgtaagtaaacattaggtaaatccggtaactgacatgattctggtaaaaaaataaataaatgattaaacatagttatgtgaacaaaagtaaagatcacaaaggctcttctcaagctatcatcctggaaaacagatataggacatatataactcagtagtatacataacatgtaaattgtaaagtttttctttttaatacatccaaatttctaagcgtatatttctgattttgttaatatggattcgaattgcgatttatcgatggtcaatggtcaaacggagcccaaagacccaaaatgggcgtcgtcgtcaacccagataacttctcgggcatcggaaaccttttccggagttggctcggcgataagcactgaaacgtccttgcagccagtggccgcgcccacgatgtactgcctccgattggcgcagcagaggccgataaccgaacggcacgtccactttcatgccggcgttatcgataacgagcacatgaaccggcgcaaatcgaaatgctgctgcatctatcgaaagccacatcctttcggcgagagttcgtcctccacggacgacgagtgcgaacactgctttggtcatcccgaggtgagaactcgcaatcggttggaaaaacagcggatacaggaacagcaaaatgggtgcagttgctgtcatcatcaccatcgacttcatagtaatcggaataatcgaccgcctaccgaagagatcgcgcagcataaggatgatctggccaaagaggaaccaaaatcggtagtcaacaatgaaagtagtctaaaacttttaaacgaggaaaatgtaaaatcatctaaaccagaaaaaaaaaataattcaaataaccgcctcgaagtaacttttgtagagcttgattaaaattggaattttgcaagtttaagtacccgatactcgtgttgaattagtaaccaagaataaaaaaaaactgtataacttgtaaatgtatctctttatgtttttcatatttaatttgattgcttaggatagatgaggtttcgtgaaaataaatttagtttataagacaactcgattagtgcgaagacctcttacttcccaactttgtattcgagatgcattcatccggcttcatcggtttacatgtcgacgtgaatcaaagttcagaaagattaatgaaagtaaagcagaagttctgatgccgattctattctattctaactgctctattttaccgatacaaatttatgattataatttggataacttcgataacactatgaccaattcgttgcatattaacctcggcatttgtatatatgtgctctaacttaattaacttttcactgttcctctagccgttttcgcaggcaaagaaaagccgaagaaaacccgcttagaaaatgctcttctgttcttgtcactcagcgggcagaaaaccgaaaaaaaaactgacacaacgaacaacagtgacgcctacctatacagtggcgtgtggtgtcctgcggaggggcgaggttttcatcatgtttacgccccagaatttcctgcccctcgccgaggaagcgccatcgtgtgtctattgattgattatgcgaactgtctgcgcgaacttgtaactagattaatgaactttttgcagtggatgcagtgcatcacagatgctagtggaaaacccgcattgaaaggcatcctcgcacgcccgtgcgaaatccctcttgaaagcagcgctctattcgaactccgtccctgtgttgagtgggggaaaaatttaagttgccagcgaagcgaatgtggaactcgatgaagcggcgggaaatgggaaattgaagtgttgctgtgctgacggctttgtggttgtcgccctgtcatcctaatccctaattccagttgcgtttgcagctctattttaaattgaaatatcacatgcagatctattcagaagctttccagttcgtgtataatatataaatatatactaaatatatataatataatatataatataagtatatataatatatataatataaaaaatactaaatatattatgttcggcaaatttttcgccactttttgcgaacttactcttaagcttctttatttaaggtatttcattgctgtatatatataccattattatgttgagtgaaattaatttatatatattaaactcatttttatacccgttactcgtagagtaaaaggtcatgctagattcgttaagaagtatgtaacagggcagaagggtttccgactatataaagtatatatattcttcttcatgtccgtctgttcgtatggacgtcgagatctcaggaactaaaaaagctacaagggtgagatttagcatacagattctagagacatagacgcagcgcaagtttgctagcccatgttgccacgcctttcctaactcctacaaaccgcacaaaactgccacgcaaacactttttatatatgtgttgatattttttcacatttttattagactttaaaaaatttttattgataagcaaaagcactttcaaacaattttaaaattttttcttattttattcaccaatatctatagatatcccagaaaaatggtgaaatttcgcgttcgcattcacactagctgattaacgggtatctgatagccggtgagctcgactatagcaatatctcttgtttcatttgaagaactaaaatattttccttttaattaccttttcccaatttaattacatacctcaattttgtgaattagtctttttttaatttatagttacggctgctgttccggctcctcatccactttcaat

SEQ ID NO: 23498 - DNA, 1063 bp, DROSOPHILA
gcgtatatttctgattttgttaatatggattcgaattgcgatttatcgatggtcaatggtcaaacggagcccaaagacccaaaatgggcgtcgtcgtcaacccagataacttctcgggcatcggaaaccttttccggagttggctcggcgataagcactgaaacgtccttgcagccagtggccgcgcccacgatgtactgcctccgattggcgcagcagaggccgataaccgaacggcacgtccactttcatgccggcgttatcgataacgagcacatgaaccggcgcaaatcgaaatgctgctgcatctatcgaaagccacatcctttcggcgagagttcgtcctccacggacgacgagtgcgaacactgctttggtcatcccgaggtgagaactcgcaatcggttggaaaaacagcggatacaggaacagcaaaatgggtgcagttgctgtcatcatcaccatcgacttcatagtaatcggaataatcgaccgcctaccgaagagatcgcgcagcataaggatgatctggccaaagaggaaccaaaatcggtagtcaacaatgaaagtagtctaaaacttttaaacgaggaaaatgtaaaatcatctaaaccccgttttcgcaggcaaagaaaagccgaagaaaacccgcttagaaaatgctcttctgttcttgtcactcagcgggcagaaaaccgaaaaaaaaactgacacaacgaacaacagtgacgcctacctatacagtggcgtgtggtgtcctgcggaggggcgaggttttcatcatgtttacgccccagaatttcctgcccctcgccgaggaagcgccatcgtgtgtctattgattgattatgcgaactgtctgcgcgaacttgtaactagattaatgaactttttgcagtggatgcagtgcatcacagatgctagtggaaaacccgcattgaaaggcatcctcgcacgcccgtgcgaaatccctcttgaaagcagcgctctattcgaactccgtccctgtgttgagtgggggaaaaatttaagttgccagcgaagcgaatgtggaactcgatga

SEQ ID NO: 23499 - protein, 228 aa, DROSOPHILA
MDSNCDLSMVNGQTEPKDPKWASSSTQITSRASETFSGVGSAISTETSLQPVAAPTMYCLRLAQQRPITERHVHFHAGVIDNEHMNRRKSKCCCIYRKPHPFGESSSSTDDECEHCFGHPEVRTRNRLEKQRIQEQQNGCSCCHHHHRLHSNRNNRPPTEEIAQHKDDLAKEEPKSVVNNESSLKLLNEENVKSSKPRFRRQRKAEENPLRKCSSVLVTQRAENRKKN

SEQ ID NO: 23500 - DNA, 6580 bp, DROSOPHILA
agcagggcacggacacaatttcaccattgtggcgcatgcacacatggtccacggctcggaattcagcatagcggcagatgttcgacttgatgagcaactgcaccagctccccggctgcgtataaaatgcgcgggcatagatccaagctgaagcgtcgcgacttggccagcactgagtccctattccaggattgtgcatctgtttctgattctttttccatggaatgccaggtgtaccttgcgtttcgcaatgcagaatgaggctcgacttcctggtccaagcgggcacatagagcatccatagagaaggagctccaaacatccccgtagtactcattactatccaggtggagcaccgatttgcctatcctgctgcccgcagcggcgatgcaggactcggtgaagcctgaaaagggcgtccctcgaatgactcatctgtggttcttttcaaatcttcttaattacctgtgcctatgacgaccaggtcaaactgctccggcaggtcatccaacatgttctaagccttatttgcactgatatttaaactatatttacggataaataaagtattccgtgaatttattgcgaatttacttaagcagctgtttacagatgcgcagctagcgatgacgtcatcaacaaacagctgttcatagtattggctaacgaaacaaaacgttataaagttgtttgaaatttgaaatataattaaacttttgtaattattccatacggagtttagcattgcattacaactctttaagcatttaaatgtattaaaaattgtctaattcaatagttatcgcaggcgtattacaaaaatactgaatttcccaatgcccaaatcaacaggtgcaataaaaatgcacacatacaggtggggggaattgtgcttgtagttgtagtcgccgctaccatggaaacggaaaattcgtaaacaaaagccggaaaattaaaaattgcagaatgtacactaacgcagcagaaacgtaaagccaataatgtcctttgaaaagatcctttacaaatatgaggaaccgcacgggatcggagatgtgtacttcatttggcagaaggctttgctggccacaactggtaccgatggatcggtggccctgtacaatcgacagggccaactggtgcagcgcatcatactttctgggtgagctatgctcaatctctacgtaataatgaataatgaccagtaatggaatctcttctccaggctgtgctcaggattcgcctgggaccaagagggtgacctgctgggcatcattaccagtggctccccaaacataacgttgtgggactataacagccaggaaaagatcagtgtggagacgggccttcgagatcccctcacgtgcattctctggtccaagcagcaacaactactggccgtcggcacaggacgcggtaatctggccatttataatcatagcagtggaaagcgacccacaccggttctgggcaagcacagcaaacgaatcacttgcggcgcctggtccgcccagaatctgttggctctcggttcggaggacaagagcttctcgttgagcaacgaggatggcgacacagtgcgcgtagtccagctaagagatgcgcccaccgacatgtacttcgccgaaatggccaatgacgaacgtattgcgggggacaatgccatcagcatgatcatcggcaagcgtactctgtttctctactatttgcccgagcccgagaatcctacggagctgggcttccagagccgatacggatcgctgatgcagcacaagtggtttggcgatgggtatatcctgctgggcttttccaacggacatgtagtggccatctctacgcatcccaaggacgtcggacaggagctctggcaggtgaagaaccacaaggacagcttgaccggattggcatactgcccgacgttagatatagttgcctcctgcggggatgacaggtaagtacttatattcttatctataaaacctgttaggaaacattcgtatgttaatattcacattttttaagcagcattaagattcattcaataacgaatctccaggagactgaacgcattattaccgtgccagatcatgccggtgttcagatgatcgattggtcgcccgatggtcaactattggcggttacaacaaaccatggtactgtgtacatctatgtgaccaagctgcctcatctcttcgccgtctctgcacctcggattgtgctgttgagcagtctcgccgaggtgtccatctatgtttacgcaccggacaagacaaagtcgctgcctttccgcttgcctctggagggtgagcctaccttcatggccgtggggccatacaactttgctacaggaattgaaaagcacgtatggttttatgatctcgggaagagtttgggcgaggagcctcgtccactaagcgaacgcgattttccgcgcagcgtggagagcatgaaactgaatgcggactactgtgccgctttgtgtccaccacaactaatccttcaggccattgccgccgacaatccaaactgcaaggacaagctgcaggcggtttttccaacagctctgcccaatatgcccagtgatgcggtgatcacgtgctttgcacttagccaggagcttctgatttttgcaacagatgtgtgtagttggaaaagttggtttgttctttgcataataatttataatattattccagattggtcacctggtgttctattccctggaaaaatgggacagctgcacaatctacagacacagtatgggcatccggcagctcttcatggacatcgaaggcaccaaggttatttttatagatgatcattcccagggttatgttttcctacctgttgtcgaggaggccctcctcattccggacattcccaagcagtgccttggctgtctttgggatctcacgcagccgaatatcttcatcagctacgatgctagaatcgtcaatacgcacgtctttgtgcggcattctgtacaagggacacacaccctgatggtgggtgagtccaaactgaatccgggtcaatttcctctgctgctctgcggcggagaaatggctttgcatatagatggtggccagtatgccacacagtcactcagtacccacgtcgtgaatcccagcaacagtcaggcagcaaatcttcagatgctcctgaagctgagaaactacgatgaagcctacaagctgtgcaagcagatgaatcagagcagcgcctggcgggagtttggggagcaggccatttccgatctggaacccgatataggtaacactaattttctttcgtttacatttgaaattaaaactccttgtatttgcagcaattcgagcctaccgtcagcttggtgatgctgccctggttaatgctttgtctgaactgcgctacgtggaggatctggacatgcttatcggctgctgttgtacactcttggcccagtacgaccaggccaaagagcacatgttaaaaggagtttacacaagagcagctctggacctctgtcgagatcttctgcaatgggatcaggccctgcttttggcccacaaaaacgatccacaagaggtgccctatatagccagggaatacgcccaacaattggagttcaagtaaggcatcgaatcgtgtaacatcagtttttaaatatttaccttactgttttgcagtggaaactatactgatgctctataccactatgagaagggatacaaggaggacttaatcaatagcaaggagactgaaacggatgccttaatggacagttcccccgaatacgaggaacatgtccgtctctgcaaaatgggtattgcaagaacttctatcagagcgggagacttcagacgtggggtaaaccaatatctgatcctcaactgaagatacttacataaacctttcctcatgttaaagattcaatatgctgtggagctggaggaccagcagcttttgtttgactgcgcggaacttttggccaccgtgggacatctaaccgaggcagcgggattgtatgagcgtggtggtttctatgatgaggcctgtggccactacattgcacttaaaatgtggaacaaggccaataatatcctacccaaggtaaaaagtaccaaacttcatgccgcgtatgccaaggcaaaagagaacgatggtcactatgaggaagcaatacgaagctatcgtattgcaggtgacttggatgcctgtgttaggatctacttggatcacctgtgcgatccgcatgcagcttctgaaattgttttagagtcgcgatccatggactcggccaagctgctggccaagttctaccagaagattggcgatgttgagcaggccctgcagtttctcgtcatctgcggctgcgtggaggaggctttcgcccttgcccagcgacataacaagttgaggcgacacggagagctcttggagcgatacgagaatgcgaaatcctcggattatctggcactggcacactattttgagggtgaaaagtatactctgctggcgggcaagtattactttctggcaagggaatttaccaaagctcttaggtttctgctgaaagcctccgctttcaacaacgaggagcaggtctcgctatcgctagccattgactgtgtggccacctcgaacaatgaacaattggccactcagctaatcgagtttctgttgggcgaagtggatggcgtaccgaaagacccacgctatctctttcgtttatacatggcgaggaagcactataaggatgccgccaagacggcggttattatcgcaaatcaggaacagatcgctggaaattacaaatcggcaagggatctgttgtactccatgtaccaggaactgcgacggaataatctctccgttacggctgagatgaggcatcagtttattttactacatcgctacaccttggtgcgaatccacgtcaaactgggcaatcatttgctggccgctaagctgcttgtccaagtagccgcctgtatatcccagtttcccgaacgtaagaactttcttatttttatttgaagataatcagaaccgtttatttatttagatatcattcccattctcacctccacggtaattgaatgccatcgagctggcctaaagaagtcggcgtttacctacgcctccacattgatgcgtccggattataggaatcaattggatccccggtatgcaaagaagatcgagtcgattgtccgcaaggctcccaagggtatcaagcagttgcgggatgagattgatggcgaaaccatggagtgtcccatttgcgactcgaacctggccaatatggaggtgacctgctatagctgcaagaccacactgcccatctgcattgccactgggcagcacatcatcaaacaactgatgacctcatgtccacagtgcgactttctttgctttcgcgcagagatggagaagtaagcttcgtacgaacttggcctttctaaattcgacttaattgtattcaattttcagtattctgtcggagaatggagagtgtcccatgtgtggcgagaatgtggctccggagcagctcctggatgtggaagacataaggccatacattctggccgcctcttaagattgattcatttaaggactgaagcaaacgaatagactgcacaacacaatcacaacaccaaaaatatattcttataagctgcaatgcacaaaatacactttatatatcactaatattctggtaatttttctgttttctgaagagttttagttaaatgggttaaaatggtacttgtcatactatttataaaatgttctatacatatcagtatattatttaaatatatcttgtttgattgtacaaaaattgttacaacggtagatgtggtatttttggtattttcttttaagctccagagaacgctttagtgcttttttgattactaccgatttttgttagtcacttccccaatcaatagacccgcataccacccggtttttctggaaaagtttacaaaacaatttatctatatttatcaaaactgtacacacggaaggcaagatgtcgactataattgaaaccggcaagtcagatttcatcaaggtgaatgtttccaactctcacaatgatgcagtcgccttcgaggtcaagttagccaaggatctaacagttgcccagctcaaggtctgtcttgtaaaggatcaataggatgcatactctgatgttccattttcagaccaaacttgagatactgacgggcggatgtgccggtaccatgaaggtgcaggtcttcaagggtgacacctgcgtgtccacaatggacaacaatgacgcccaactgggttactatgccaacagtgatggactccggctgcatgtcgtcgatagctttgctaccttctcgttcgacagcgctcccgttgagaaattcgaactgtccaaagatcagtacgaacagcgaacagattctgtgcgcaactacctcaagattaatcgcatgggcaagtacaacgatgaggagatgcaacaggcggaggagaagaagcgccttcaggcggaggagatccaaaaacgggcggaactttgtgtactgggtggcagatgtgaggtaaagctataa

SEQ ID NO: 23501 - DNA, 4101 bp, DROSOPHILA
atgtcctttgaaaagatcctttacaaatatgaggaaccgcacgggatcggagatgtgtacttcatttggcagaaggctttgctggccacaactggtaccgatggatcggtggccctgtacaatcgacagggccaactggtgcagcgcatcatactttctgggctgtgctcaggattcgcctgggaccaagagggtgacctgctgggcatcattaccagtggctccccaaacataacgttgtgggactataacagccaggaaaagatcagtgtggagacgggccttcgagatcccctcacgtgcattctctggtccaagcagcaacaactactggccgtcggcacaggacgcggtaatctggccatttataatcatagcagtggaaagcgacccacaccggttctgggcaagcacagcaaacgaatcacttgcggcgcctggtccgcccagaatctgttggctctcggttcggaggacaagagcttctcgttgagcaacgaggatggcgacacagtgcgcgtagtccagctaagagatgcgcccaccgacatgtacttcgccgaaatggccaatgacgaacgtattgcgggggacaatgccatcagcatgatcatcggcaagcgtactctgtttctctactatttgcccgagcccgagaatcctacggagctgggcttccagagccgatacggatcgctgatgcagcacaagtggtttggcgatgggtatatcctgctgggcttttccaacggacatgtagtggccatctctacgcatcccaaggacgtcggacaggagctctggcaggtgaagaaccacaaggacagcttgaccggattggcatactgcccgacgttagatatagttgcctcctgcggggatgacagcattaagattcattcaataacgaatctccaggagactgaacgcattattaccgtgccagatcatgccggtgttcagatgatcgattggtcgcccgatggtcaactattggcggttacaacaaaccatggtactgtgtacatctatgtgaccaagctgcctcatctcttcgccgtctctgcacctcggattgtgctgttgagcagtctcgccgaggtgtccatctatgtttacgcaccggacaagacaaagtcgctgcctttccgcttgcctctggagggtgagcctaccttcatggccgtggggccatacaactttgctacaggaattgaaaagcacgtatggttttatgatctcgggaagagtttgggcgaggagcctcgtccactaagcgaacgcgattttccgcgcagcgtggagagcatgaaactgaatgcggactactgtgccgctttgtgtccaccacaactaatccttcaggccattgccgccgacaatccaaactgcaaggacaagctgcaggcggtttttccaacagctctgcccaatatgcccagtgatgcggtgatcacgtgctttgcacttagccaggagcttctgatttttgcaacagatattggtcacctggtgttctattccctggaaaaatgggacagctgcacaatctacagacacagtatgggcatccggcagctcttcatggacatcgaaggcaccaaggttatttttatagatgatcattcccagggttatgttttcctacctgttgtcgaggaggccctcctcattccggacattcccaagcagtgccttggctgtctttgggatctcacgcagccgaatatcttcatcagctacgatgctagaatcgtcaatacgcacgtctttgtgcggcattctgtacaagggacacacaccctgatggtgggtgagtccaaactgaatccgggtcaatttcctctgctgctctgcggcggagaaatggctttgcatatagatggtggccagtatgccacacagtcactcagtacccacgtcgtgaatcccagcaacagtcaggcagcaaatcttcagatgctcctgaagctgagaaactacgatgaagcctacaagctgtgcaagcagatgaatcagagcagcgcctggcgggagtttggggagcaggccatttccgatctggaacccgatatagcaattcgagcctaccgtcagcttggtgatgctgccctggttaatgctttgtctgaactgcgctacgtggaggatctggacatgcttatcggctgctgttgtacactcttggcccagtacgaccaggccaaagagcacatgttaaaaggagtttacacaagagcagctctggacctctgtcgagatcttctgcaatgggatcaggccctgcttttggcccacaaaaacgatccacaagaggtgccctatatagccagggaatacgcccaacaattggagttcaatggaaactatactgatgctctataccactatgagaagggatacaaggaggacttaatcaatagcaaggagactgaaacggatgccttaatggacagttcccccgaatacgaggaacatgtccgtctctgcaaaatgggtattgcaagaacttctatcagagcgggagacttcagacgtgggattcaatatgctgtggagctggaggaccagcagcttttgtttgactgcgcggaacttttggccaccgtgggacatctaaccgaggcagcgggattgtatgagcgtggtggtttctatgatgaggcctgtggccactacattgcacttaaaatgtggaacaaggccaataatatcctacccaaggtaaaaagtaccaaacttcatgccgcgtatgccaaggcaaaagagaacgatggtcactatgaggaagcaatacgaagctatcgtattgcaggtgacttggatgcctgtgttaggatctacttggatcacctgtgcgatccgcatgcagcttctgaaattgttttagagtcgcgatccatggactcggccaagctgctggccaagttctaccagaagattggcgatgttgagcaggccctgcagtttctcgtcatctgcggctgcgtggaggaggctttcgcccttgcccagcgacataacaagttgaggcgacacggagagctcttggagcgatacgagaatgcgaaatcctcggattatctggcactggcacactattttgagggtgaaaagtatactctgctggcgggcaagtattactttctggcaagggaatttaccaaagctcttaggtttctgctgaaagcctccgctttcaacaacgaggagcaggtctcgctatcgctagccattgactgtgtggccacctcgaacaatgaacaattggccactcagctaatcgagtttctgttgggcgaagtggatggcgtaccgaaagacccacgctatctctttcgtttatacatggcgaggaagcactataaggatgccgccaagacggcggttattatcgcaaatcaggaacagatcgctggaaattacaaatcggcaagggatctgttgtactccatgtaccaggaactgcgacggaataatctctccgttacggctgagatgaggcatcagtttattttactacatcgctacaccttggtgcgaatccacgtcaaactgggcaatcatttgctggccgctaagctgcttgtccaagtagccgcctgtatatcccagtttcccgaacatatcattcccattctcacctccacggtaattgaatgccatcgagctggcctaaagaagtcggcgtttacctacgcctccacattgatgcgtccggattataggaatcaattggatccccggtatgcaaagaagatcgagtcgattgtccgcaaggctcccaagggtatcaagcagttgcgggatgagattgatggcgaaaccatggagtgtcccatttgcgactcgaacctggccaatatggaggtgacctgctatagctgcaagaccacactgcccatctgcattgccactgggcagcacatcatcaaacaactgatgacctcatgtccacagtgcgactttctttgctttcgcgcagagatggagaatattctgtcggagaatggagagtgtcccatgtgtggcgagaatgtggctccggagcagctcctggatgtggaagacataaggccatacattctggccgcctcttaa

SEQ ID NO: 23502 - protein, 1366 aa, DROSOPHILA
MSFEKILYKYEEPHGIGDVYFIWQKALLATTGTDGSVALYNRQGQLVQRIILSGLCSGFAWDQEGDLLGIITSGSPNITLWDYNSQEKISVETGLRDPLTCILWSKQQQLLAVGTGRGNLAIYNHSSGKRPTPVLGKHSKRITCGAWSAQNLLALGSEDKSFSLSNEDGDTVRVVQLRDAPTDMYFAEMANDERIAGDNAISMIIGKRTLFLYYLPEPENPTELGFQSRYGSLMQHKWFGDGYILLGFSNGHVVAISTHPKDVGQELWQVKNHKDSLTGLAYCPTLDIVASCGDDSIKIHSITNLQETERIITVPDHAGVQMIDWSPDGQLLAVTTNHGTVYIYVTKLPHLFAVSAPRIVLLSSLAEVSIYVYAPDKTKSLPFRLPLEGEPTFMAVGPYNFATGIEKHVWFYDLGKSLGEEPRPLSERDFPRSVESMKLNADYCAALCPPQLILQAIAADNPNCKDKLQAVFPTALPNMPSDAVITCFALSQELLIFATDIGHLVFYSLEKWDSCTIYRHSMGIRQLFMDIEGTKVIFIDDHSQGYVFLPVVEEALLIPDIPKQCLGCLWDLTQPNIFISYDARIVNTHVFVRHSVQGTHTLMVGESKLNPGQFPLLLCGGEMALHIDGGQYATQSLSTHVVNPSNSQAANLQMLLKLRNYDEAYKLCKQMNQSSAWREFGEQAISDLEPDIAIRAYRQLGDAALVNALSELRYVEDLDMLIGCCCTLLAQYDQAKEHMLKGVYTRAALDLCRDLLQWDQALLLAHKNDPQEVPYIAREYAQQLEFNGNYTDALYHYEKGYKEDLINSKETETDALMDSSPEYEEHVRLCKMGIARTSIRAGDFRRGIQYAVELEDQQLLFDCAELLATVGHLTEAAGLYERGGFYDEACGHYIALKMWNKANNILPKVKSTKLHAAYAKAKENDGHYEEAIRSYRIAGDLDACVRIYLDHLCDPHAASEIVLESRSMDSAKLLAKFYQKIGDVEQALQFLVICGCVEEAFALAQRHNKLRRHGELLERYENAKSSDYLALAHYFEGEKYTLLAGKYYFLAREFTKALRFLLKASAFNNEEQVSLSLAIDCVATSNNEQLATQLIEFLLGEVDGVPKDPRYLFRLYMARKHYKDAAKTAVIIANQEQIAGNYKSARDLLYSMYQELRRNNLSVTAEMRHQFILLHRYTLVRIHVKLGNHLLAAKLLVQVAACISQFPEHIIPILTSTVIECHRAGLKKSAFTYASTLMRPDYRNQLDPRYAKKIESIVRKAPKGIKQLRDEIDGETMECPICDSNLANMEVTCYSCKTTLPICIATGQHIIKQLMTSCPQCDFLCFRAEMENILSENGECPMCGENVAPEQLLDVEDIRPYILAAS

SEQ ID NO: 23503 - DNA, 5025 bp, DROSOPHILA
accgcacgcacatgtacatgtatttctgctgggggtgtgctattcaaacgaaattattgacatctaaattagaggaattcgggatctctggctttcttttttgctatttgggtgcttcgttttcgcttaatttcgattttattccgtttgatgttgcgccctgattggaagtgttctttaaatgcaaataaatctggatttaagaacactcagcgtgaagtggcttatgaacatttcgcggcttgtttttcgccccatatatctgtaaagcatttttaagttcgcacctaattcgcgtaatttaattgaggtttgtccttaatgttgtcttcagaacatagttctttgatttttatttttagaattcaattattttctaacttgtaatagttcgtatatgcataaagtgcactgtgttttattagtaagattttatttggatgggttatgggtataatgggttataaaccccggttgaaccgccgacaattaaaagttatgtgctcagaagttgtggtcaacgtcctgaagcatccatgctcacttagaatctggttcgtcatgccctcttagggtccatctcctcactttctggatgatcctctgggtccatcgccccttctttgacttctgccttcgactgagcagtgctgtactctccttcgatcttctttatcttgtcatagatcacctttgcatccaccgccaacatgactttaggaagagttccagctatgactcggtctgcgtcgtccgaaaaccgaagcacaccctcagggcacacatggggcagggcacatatgaaaatttttcggtagctacgtcccctatatcgtattgacgccctgcagtcatactggatgagtagcttgcgctcctgccttggacccctgctgttttatgagcgcttacgccatagcgacgctcgcagtctctctatttgtttccgccgggtgttctttgatcgacagccttgtgtgtagcatgacccacaggtgtcttatcgtggcgactccgacttgtatggtggttgactgtccctggacgcctccacgtcgtcgaaatggtccgcaaagtagaacttcttggcatcgatcgcagggctctcgaatgcctgcttctcattgcaatcgatggtggcgggctcatcctgcacatcctcaacatagccattctcaaagtcgtccgactccgggcctaaatcatcggctttggctgctctcagccgtaggtttggtttctttcgaatttccacgccattttcaccgacttctcgctcgctcgctggttggccgcagaaaacctggtggtggactcaagtatgttcactgtgctttttaacagtttttccgtttctgcggactgttgcggaataacgagaatcgagatctggcaagacgaagactataatgaatttaaattacacattttctctgctgtgcttcctctacccctgctcttcctcttcccctgctcttcctctacccctgctcacagtgcctcctgtgtgtgagtatgtgtgtgcgagaggcgcttatggctttgtttgctacgtggcctgcttttcccgccccctttgcaacacacccctgccgcatttactagccccgcccgttccgtctctgtttactccttacaatcagttacagtctcagctgtcaatagattgttgacattttttcctttatactttcgcttcggcgaaagagacggcagccagggccgcagaaagagaaggatagaagtgttgtttgggccatgttctttttttggttttttttttttttttttttgtttactgcttaaatctgccaatttactcgtttacgtttaggctttgtgcgtgcgtgtgcgagtgagcggaaagtgaggggcgaactgggcggaaaagcgggcacatgtgtgcggaaaattaatatctgtgtcattttttaggttaataaggccaaattgagtatatgtgccagacacacacttaattatcatcatatttatggccgtcacggggcgacacttttgggtcccgtgtcctgcgtatatttcccacgcttttcttcgttttttatacccgtttattatgattacgggtaattaggtctaatttctaatagtgcgatatgttatcgaagccaccagtggaaggcgaacttatttttaacattctcctcccatagactggaagtttcagcattttggggaaaacttaaaaaatggcaaccaatatgcacatttaaaggcaaatcagttttgaaaatgtacactttctcatcatccacactacattatttttcaaagtggttaatggaaattgcctctttctcattctccagcacttgcctaggctctctgtctgtttcctggtgtcgatgataaagtagattagaggcaatttagtattcgtcggaaaatgactgttgagaagccatcgacagatgtctgtcgtcgtgccggccataatatatgtatgtagctgtataagtaggtcccccattatatctttgccgatgtctcaggtcagtgcgaatgtctaatctccgggctgactgtctaatcgcatttgatgatgactcgacttgactccacttgattcgattccattcgattccattcgcttccattcgactcccttccattcaatgcgacttgacttttcccggccttcccccgcatttccctgggaaaatccggacttaatcaatcattggccgtccgtctgtgcgctctctttcgcttcctgaacttatctattcgctttcaattaattttccagcttttatgccagctgcattggccacaaaattttgtttggccaaaagttaaggcttgattggggtatccctgaactttgaactggccgaaaacccaggcaattgaaagtttgtcaagtgtttagggcaacagttcggaagtgacctgaaaagtgtgttcggggaaatttgattcgattagatgggatttttggtcttgctactcgctattgctgcttttttttatcattttgcgtattgttcaacctttgttgaacattattttgcgccgcaaagttttcccctacctttccttttgtcgggcacacaggtgcaaacagaaagtaaaacaacaggagcaccagcctcagaatttacataaaaaagtttgtcatgcccgaggaaaagcgggtaaaagccagcacatgcatgtttttgtgtatattaaaactgaaaacgctgcaaacgcctgagcatctggaaaagcctcgtctccgggttcaacgcttcggtctgggccttccaagctcccttcaggtgcgatatatgaactatacatacatatatgcatgatcatgtctggattagcttaatgaaggcaaagactctggcgaacaacagctgatgggacagacgggaaagctgggaagctgggaagctggcaaaatgttaacagtcagtgccaagaaaatgctgtcacgcaaaacgctgagacgatgacaatgtaacgttttcccttggttgtttcgcaagtggaactttgccgaaactgctctgttctaataagtaaatatttacggaccattccatgttatatacattttgtatattgaatctatagcttttctataatttccgtatagcatttcgtaacttctttacaaatgtttgtatttttatttaagtattattgattgtttaatcataagtcttaatattttcaattaaattggggcataagttcttagcttccatcttttagcatttagaatgtgctacgattataagaacgaaattttcccgctcataaagggcacttaaagggcgactctagctgcgttttctgccccaacatgtgcttacatgtgtgtaagcgcattttgcaacgtgttgggggctctgacatgctgacggcaacatgcaacacaagccaccgagcgcagcggcaacatcagcagaacatacgtgcacggcagcaacggcaagagggaacgttggagaaacggggaaggctttagctaccagccatgaaaatccttcagagtcgcgtcgaaacatccgcgtgacgacgtcatcgtcgtcgtcatcgtccttgtcttctattgttgctgttgcagccagtgttgctgttgtttctgctgctgctgccgctggcagacattgctgcaaagatttacggaaagtttacagcctcagacatttgttgtggcttttataaattgtgtctgtgcgtgggtgccaaggtgtctcctctggacgcgttgtgggtgaggggcgtggcacggctgcctttgttgcattgcagtaacagcagcggcatcatcagcagcggcagaagcaacacgaaacacgttaagcgcattgccatttgtgccacatcacggcaaacggcgagggagctccttccttggatcatgggaatccccgcatctggcacaagttgttcaattcagcaaacaaaataaggcggagaataaatagagaaaaatacatatagaagaaaaaataaaacacgaaaaattgcctgcctttgtgcaaccgaatggcttaagcgggatttatcggcatgccgaaaggtgaattcgattgattgctccgataaagatgagcgatgattcgggctattgttataagcgaaattgtatgaggcctgttgttcagttaattctacaattaatcagtggccaagcggaaattgttgtcaaaagattttgctctcctcgttcatttgcaacatttaaataactaccacaatgatttcgtgaaggattcccctctttctaaaatttattgctgtggaaaatatacatatgtaccacgagttttaatttacggactcattcgtaattcgtgcatccatcacgcatcaatttttcacgtttatcgattacggttattaatcattccttttcaggacgattcgatgcacttttgtcgactcattcgatgctgaatccttcggcttaagcgcgttcagcttgttaaatgcgctgctggcaaattgcattccccatttccctgccattttccatttcccacccacactttccgcccactt

SEQ ID NO: 23504 - DNA, 498 bp, DROSOPHILA
atgtttcgacgcgactctgaaggattttcatggctggtagctaaagccttccccgtttctccaacgttccctcttgccgttgctgccgtgcacgtatgttctgctgatgttgccgctgcgctcggtggcttgtgttgcatgttgccgtcagcatgtcagagcccccaacacgttgcaaaatgcgcttacacacatgttttctgcggccaaccagcgagcgagcgagaagtcggtgaaaatggcgtggaaattcgaaagaaaccaaacctacggctgagagcagccaaagccgatgatttaggcccggagtcggacgactttgagaatggctatgttgaggatgtgcaggatgagcccgccaccatcgattgcaatgagaagcaggcattcgagagccctgcgatcgatgccaagaagttctactttgcggaccatttcgacgacgtggaggcgtccagggacagtcaaccaccatacaagtcggagtcgccacgataa

SEQ ID NO: 23505 - protein, 165 aa, DROSOPHILA
MFRRDSEGFSWLVAKAFPVSPTFPLAVAAVHVCSADVAAALGGLCCMLPSACQSPQHVAKCAYTHVFCGQPASEREVGENGVEIRKKPNLRLRAAKADDLGPESDDFENGYVEDVQDEPATIDCNEKQAFESPAIDAKKFYFADHFDDVEASRDSQPPYKSESPR

SEQ ID NO: 23506 - DNA, 3003 bp, DROSOPHILA
catttgctggccgctaagctgcttgtccaagtagccgcctgtatatcccagtttcccgaacgtaagaactttcttatttttatttgaagataatcagaaccgtttatttatttagatatcattcccattctcacctccacggtaattgaatgccatcgagctggcctaaagaagtcggcgtttacctacgcctccacattgatgcgtccggattataggaatcaattggatccccggtatgcaaagaagatcgagtcgattgtccgcaaggctcccaagggtatcaagcagttgcgggatgagattgatggcgaaaccatggagtgtcccatttgcgactcgaacctggccaatatggaggtgacctgctatagctgcaagaccacactgcccatctgcattgccactgggcagcacatcatcaaacaactgatgacctcatgtccacagtgcgactttctttgctttcgcgcagagatggagaagtaagcttcgtacgaacttggcctttctaaattcgacttaattgtattcaattttcagtattctgtcggagaatggagagtgtcccatgtgtggcgagaatgtggctccggagcagctcctggatgtggaagacataaggccatacattctggccgcctcttaagattgattcatttaaggactgaagcaaacgaatagactgcacaacacaatcacaacaccaaaaatatattcttataagctgcaatgcacaaaatacactttatatatcactaatattctggtaatttttctgttttctgaagagttttagttaaatgggttaaaatggtacttgtcatactatttataaaatgttctatacatatcagtatattatttaaatatatcttgtttgattgtacaaaaattgttacaacggtagatgtggtatttttggtattttcttttaagctccagagaacgctttagtgcttttttgattactaccgatttttgttagtcacttccccaatcaatagacccgcataccacccggtttttctggaaaagtttacaaaacaatttatctatatttatcaaaactgtacacacggaaggcaagatgtcgactataattgaaaccggcaagtcagatttcatcaaggtgaatgtttccaactctcacaatgatgcagtcgccttcgaggtcaagttagccaaggatctaacagttgcccagctcaaggtctgtcttgtaaaggatcaataggatgcatactctgatgttccattttcagaccaaacttgagatactgacgggcggatgtgccggtaccatgaaggtgcaggtcttcaagggtgacacctgcgtgtccacaatggacaacaatgacgcccaactgggttactatgccaacagtgatggactccggctgcatgtcgtcgatagctttgctaccttctcgttcgacagcgctcccgttgagaaattcgaactgtccaaagatcagtacgaacagcgaacagattctgtgcgcaactacctcaagattaatcgcatgggcaagtacaacgatgaggagatgcaacaggcggaggagaagaagcgccttcaggcggaggagatccaaaaacgggcggaactttgtgtactgggtggcagatgtgaggtaaagctataaccttaattcatcgtttgaaaacgttttcatcaaagaatttgttttctgccaggttacggttccaggtaatccaacacgacgaggaacaatccgatacaatggtccgctcgaagggaaaagtggtcactttattggagtggaatacgacgaaccactggggaaaaataatggaaggtaacgtattacaagctaagcgattccacatttcacaaatctcatttctggttccattgcagtttcggtggaaaggcctactttacgtgtgccccaaattacggcggctttgtatcaccattatccgttacggttggtgactttccgccggaagacttcaacatggatgacgagctctgagaatactgggcactcccacacacaggtcacacaatctcgcatcgcacatgccaccttaaacagaagacttacgaaccgctaaaactatttgtacgcatgaaagaacattacaaattatagttatgccattttttatttattaattaaaacatctatgtatgtatgtatatcagatattcttacaacatgattattcgtaaattctataatcggctttatcataactgatttaatggtgttctcaatcattttgcattgttttacattaactcaaccgtttgtaaatcaaaataaatatcagaaataagtatacatctagctattgtgcaatgtggatctgggtgcgccgatttatattactgaccgcagattgctgacaacaaaaaaacaaagaaggggtgaagttatgtgaagtatatgtgtctcctttagtaaaggtagtccgccgatctactaaggatagctcttggtgtatatgtaataagctgcttgctttatatatttatgcacgtattatatacctatgtatgtgggttcatgcgcgttcttgcctagtcctagtaattattaataagtttcaattagctgtcatttaacaacaaatatataaaacgatgcatgcttttctcgaaagttaagaattacagaaatgcgtcacaatcatgatgaagacaacttgatgtgcaactttgtatatgttttggtatatatatatagactgttttttgagcctccacaacttagataaatggtcgtctttttcttttctacatctcacttgagatcgctcctccctaaggtatgttttagaaacattcaacaattgcatgtagaacggccctaaaaaccactggctcgtcttttcctcggggctaagtgaacttgctggaaactaggtaacattggccatcattgcatcgcattgttacttgtctcggagtggtgttgttagtaatcctgaagccttaataatagtatacatacatttgctgtctgtgtg

SEQ ID NO: 23507 - DNA, 825 bp, DROSOPHILA
tcaatagacccgcataccacccggtttttctggaaaagtttacaaaacaatttatctatatttatcaaaactgtacacacggaaggcaagatgtcgactataattgaaaccggcaagtcagatttcatcaaggtgaatgtttccaactctcacaatgatgcagtcgccttcgaggtcaagttagccaaggatctaacagttgcccagctcaagaccaaacttgagatactgacgggcggatgtgccggtaccatgaaggtgcaggtcttcaagggtgacacctgcgtgtccacaatggacaacaatgacgcccaactgggttactatgccaacagtgatggactccggctgcatgtcgtcgatagctttgctaccttctcgttcgacagcgctcccgttgagaaattcgaactgtccaaagatcagtacgaacagcgaacagattctgtgcgcaactacctcaagattaatcgcatgggcaagtacaacgatgaggagatgcaacaggcggaggagaagaagcgccttcaggcggaggagatccaaaaacgggcggaactttgtgtactgggtggcagatgtgaggttacggttccaggtaatccaacacgacgaggaacaatccgatacaatggtccgctcgaagggaaaagtggtcactttattggagtggaatacgacgaaccactggggaaaaataatggaagtttcggtggaaaggcctactttacgtgtgccccaaattacggcggctttgtatcaccattatccgttacggttggtgactttccgccggaagacttcaacatggatgacgagctctga

SEQ ID NO: 23508 - protein, 244 aa, DROSOPHILA
MSTIIETGKSDFIKVNVSNSHNDAVAFEVKLAKDLTVAQLKTKLEILTGGCAGTMKVQVFKGDTCVSTMDNNDAQLGYYANSDGLRLHVVDSFATFSFDSAPVEKFELSKDQYEQRTDSVRNYLKINRMGKYNDEEMQQAEEKKRLQAEEIQKRAELCVLGGRCEVTVPGNPTRRGTIRYNGPLEGKSGHFIGVEYDEPLGKNNGSFGGKAYFTCAPNYGGFVSPLSVTVGDFPPEDFNMDDEL

SEQ ID NO: 23509 - DNA, 4250 bp, DROSOPHILA
tacactgcgtatgctatgtccacagattcttaaatagtggcaagtaactatataagattctagtttccatcagagtcaggcgatttttcttttcagctgtaatgtaaatgaattacaacaaaagaggccaaaatggggaaaacttacctaacactcgcttggatatcatttttggtttcggattcttttctacgctcctatcactttctatgtaaacttttctggtttggatgcactttttgaactcgaatcaactgtgtggcacgtgtttttcgcgaggacagtcgtccactagtaacggcggaggtgaagcaactgataggcgggcacgattgcgattccagtgacggcggagaaagctcgatcaacggagagctttggtctctgttgtcagattggagagcaaagtcaaggccgcggataagcactctcgttctcccaagtgggaactgttttggtaacgcttggaggtgtttgggacagtaggtaaaccagtttgttgtctcataataatttatttcaattcttgcttgctacgtactgaagcacaaactactgaagtgcttaggtaatcctttgttcttaacaaaaaatatatcgcatttgctcttcttttcaatcgctgtgcgggacgtcctgtcccggatcagattcgccgtttttctggagtggctggcatttaacattgcagtgtaatttccactagccgtcgatagttaggtccttcaatatgctatatcgatttatcaagtatgaattatatattttgctttatcaaccaacatcacgagtttgcgctttgattctcacattgcccatccctcccttaattttcccaccaaatataacccaatgcaacagataatacggaaacataaaatgtttgcggggtcatctaaaaacaagctcaatgcgaagtcgtgggatacagtgtttacacagaaaacaataacctatcttcgtatataacgtccactttaaagcctccatcccggggagatcagttaaagtcagtgtacagatcgggacttctgggcgctgctgttggctgggccggttgctctaggctagctgccatctgtcgcagattttcgacgccagttagcaattgcctgcaaggaatgaataaaagtaagcatgttcgttactcattactcttcgttactcttacctcagattctgttcagcggtgtcggcggcgcgcagcaaatccctagacaaatgctgtgttctggacggtcgttctgcgctaatcccgctgctggtggaggcttcactgtctctaccaggtgtcgccactggaactcctcctgttgcgcaatcagaacttccagaacttcctcttagagagcgaagttccgcctaaaaagtacgaattttcaatttgacattattgcttgaatatttcccgaaatttgcgggtttaaataaaatattttaacaaaacgcagcatgatgataattcttccagaatgttacaatgccatttgccatagtaatatgagatcaaggcatttcaactttcgggcattaccctaccgatcgtgacacccacctctagttgagccagctgtcgccttaggtgttgcgtggtttgcgtattggtcgtcgtggctagggcctcccggcgccgcgacgtctctgacagttgcagaagctgctgctcaaactcgctggcccgtctggtctggagattaagttccgcacgagcttcctgcagctcccgctgtagacgttcgttctcctgtctcagtgtcgacagttgcaacgtaccttccgcctcctggggaggcgagtcaatagggttggagggcagcccgatagctacgtcagctagtcgctgagacgagtgaattatggaaccgtcggacagaaagtcgggcagcattttgacggtagagccggcggttggttcgccagttggaccggggagggcggcagcactggaacatctgggtgcgagagaggacggcagaagccctactgctccgctcgacgcttcagctccaaccagaggggagtttggcggagagctcagagcatcctgaccggcgcaccaagcatccggcaagtgatcctgcacgaagtctggcagggctgatgctgcagcagcactaccaccggctccgccgccagctacattgcatgtatccaggggcaggtcaagcttcatcttggggccggcagacagcacaagtctggtggggcgttggtcgcggtttccagtcggccgacgacggggcgatgacgaagggcctggcaaatggggaggcatatcgtagttggagtacgagcgtggcacgtagcgcgagccaacggcaggttgctggttggaagcggatggaaaaatatctgcccatgaaggcggagagtgaatgggagttaaaggcacaagttggaatcgtatttcaaacttaccgtcgtctattctttcatcgtaatgcctgtttgtgttgcgcacctgagccagagccacatggtcgtcatcatcgttatccagagcgtcctgaacagcatcgtgacccagccgatgatccggcctcaagcggtgctgagattgcgacccgccgctgctactggatgtgcctcccccacatgatgcgtactccgccagactcgcctgcgagtcaaaactactgaagcgcggggatcgcttcattctagaggatgcactgctgccgttcacatcaggcggctgcatatgggagacagaggctgactgaggtaccttaggtcgggcacccgttgacgtttgcacggcagccgaggtcaccgtgctagtcggggcagtcaccgttccggtactgcttagaaaatgtttaaaggagaacgatgacgaggaagctgctgctggtcccgctcctcccgtggacgttgtggtccgtatgctggggaagtccgctccgcggccgttcatacacacgtccgccacgagatcgtttacccccaaagcggccggcgcgcaatcttttgagcccattgtcgtctcggtaagaagcgcttgctgtgcggcttgtggaatcctctgctgcggattggccgtggccgccgcttcggtcgcacttccatttgccatttaattgtaaacgcggacagagagcggttggcccttcttgttgccggttgcctttatacgtgtcggccaagctgggcggtttgtttgtcctactgtctgtagcccgtgctgtttcactgcctcttgtggtcgcgttctctcctgactctcagttatttttgcatcccatttttcccagcgacttttcacttggggctatatctgcagtgctcgtaagtcgtgggcagctgtgcagaggcttgcaacactggctgagggatgcagcacaagttatcgattgcagcagaggaaactacatatatttaaagcgggggaagcccggaaaaaccatattataataatttatatcatttaatgccctttaatgaacagttattttgtaattaataattaataaacagtgcactaccgttttaatttagcctagcttccaatcggaactgatactgatacgaagaacagctggtgcaattctccagatctgaaatgaacgaactatcgagttattacattatcgatagagagttcggctcagtgagaaaaccattgagcacccctatcaattcgcaatggcatatccagtattgttaatagccccgcggccagtgcttgtaaacgcggtcagtccagccatagtaaacaaaacgcgacgttcggctcgctgcgcatttttaatgcaataaaagcgaaaggattgcagaaatcacgcaactggcgttgcatttccatatttaacattaaatgtgggatacactgttttctaacgaggtcaggctccacgttattcgagggtgttcttgtcccgcagttgtgaaaagaaaactctgcgtagcaaacaaaccggtcggtgctcttgtacatacattgtatacaccatacacacagacaagttcagacgcgtacatggccgagaaaaaagcgtcgcagtgcattttgtgtggcaaattaattgcgccgaggctctcgaaaaacggtgattgtctgccgagttcttaatttttggtgtccatatgcaaccgctctgccgctcctctgccgtgggggtgagggtgcgtccatgtgagcctgcatctgcgtgcgtcatagtgtgagtgtcagtgcgaaggtggtgcgctgaaacttggcgtattgtgaattgccgtgcaagcacacacacaaacaaaaccgcccgccc

SEQ ID NO: 23510 - DNA, 1932 bp, DROSOPHILA
gaaaaatgggatgcaaaaataactgagagtcaggagagaacgcgaccacaagaggcagtgaaacagcacgggctacagacagtaggacaaacaaaccgcccagcttggccgacacgtataaaggcaaccggcaacaagaagggccaaccgctctctgtccgcgtttacaattaaatggcaaatggaagtgcgaccgaagcggcggccacggccaatccgcagcagaggattccacaagccgcacagcaagcgcttcttaccgagacgacaatgggctcaaaagattgcgcgccggccgctttgggggtaaacgatctcgtggcggacgtgtgtatgaacggccgcggagcggacttccccagcatacggaccacaacgtccacgggaggagcgggaccagcagcagcttcctcgtcatcgttctcctttaaacattttctaagcagtaccggaacggtgactgccccgactagcacggtgacctcggctgccgtgcaaacgtcaacgggtgcccgacctaaggtacctcagtcagcctctgtctcccatatgcagccgcctgatgtgaacggcagcagtgcatcctctagaatgaagcgatccccgcgcttcagtagttttgactcgcaggcgagtctggcggagtacgcatcatgtgggggaggcacatccagtagcagcggcgggtcgcaatctcagcaccgcttgaggccggatcatcggctgggtcacgatgctgttcaggacgctctggataacgatgatgacgaccatgtggctctggctcaggtgcgcaacacaaacaggcattacgatgaaagaatagacgacgatatttttccatccgcttccaaccagcaacctgccgttggctcgcgctacgtgccacgctcgtactccaactacgatatgcctccccatttgccaggcccttcgtcatcgccccgtcgtcggccgactggaaaccgcgaccaacgccccaccagacttgtgctgtctgccggccccaagatgaagcttgacctgcccctggatacatgcaatgtagctggcggcggagccggtggtagtgctgctgcagcatcagccctgccagacttcgtgcaggatcacttgccggatgcttggtgcgccggtcaggatgctctgagctctccgccaaactcccctctggttggagctgaagcgtcgagcggagcagtagggcttctgccgtcctctctcgcacccagatgttccagtgctgccgccctccccggtccaactggcgaaccaaccgccggctctaccgtcaaaatgctgcccgactttctgtccgacggttccataattcactcgtctcagcgactagctgacgtagctatcgggctgccctccaaccctattgactcgcctccccaggaggcggaaggtacgttgcaactgtcgacactgagacaggagaacgaacgtctacagcgggagctgcaggaagctcgtgcggaacttaatctccagaccagacgggccagcgagtttgagcagcagcttctgcaactgtcagagacgtcgcggcgccgggaggccctagccacgacgaccaatacgcaaaccacgcaacacctaaggcgacagctggctcaactagaggcggaacttcgctctctaagaggaagttctggaagttctgattgcgcaacaggaggagttccagtggcgacacctggtagagacagtgaagcctccaccagcagcgggattagcgcagaacgaccgtccagaacacagcatttgtctagggatttgctgcgcgccgccgacaccgctgaacagaatctgaggcaattgctaactggcgtcgaaaatctgcgacagatggcagctagcctagagcaaccggcccagccaacagcagcgcccagaagtcccgatctgtacactgactttaactga

SEQ ID NO: 23511 - protein, 585 aa, DROSOPHILA
MANGSATEAAATANPQQRIPQAAQQALLTETTMGSKDCAPAALGVNDLVADVCMNGRGADFPSIRTTTSTGGAGPAAASSSSFSFKHFLSSTGTVTAPTSTVTSAAVQTSTGARPKVPQSASVSHMQPPDVNGSSASSRMKRSPRFSSFDSQASLAEYASCGGGTSSSSGGSQSQHRLRPDHRLGHDAVQDALDNDDDDHVALAQVRNTNRHYDERIDDDIFPSASNQQPAVGSRYVPRSYSNYDMPPHLPGPSSSPRRRPTGNRDQRPTRLVLSAGPKMKLDLPLDTCNVAGGGAGGSAAAASALPDFVQDHLPDAWCAGQDALSSPPNSPLVGAEASSGAVGLLPSSLAPRCSSAAALPGPTGEPTAGSTVKMLPDFLSDGSIIHSSQRLADVAIGLPSNPIDSPPQEAEGTLQLSTLRQENERLQRELQEARAELNLQTRRASEFEQQLLQLSETSRRREALATTTNTQTTQHLRRQLAQLEAELRSLRGSSGSSDCATGGVPVATPGRDSEASTSSGISAERPSRTQHLSRDLLRAADTAEQNLRQLLTGVENLRQMAASLEQPAQPTAAPRSPDLYTDFN

SEQ ID NO: 23512 - DNA, 5966 bp, DROSOPHILA
ctctaaagtacaacttttctacatcatcattgtgctgtttctccaactgcgagggctcttgctcatatgaaatttaaacgcttcctccagtgtctccagggcaaattccacgtcttcggcacaaagacacagtggcggtctcatgctcagcacctgaagagaagaggaaacttcaaataatgcgaaaattattattatattaatgaccctccgtcctacagtgtagcatcaaaaaatgtaatctggaaattttacatttcatgggatctttttactggtcaaggccaggtactaaatttaaaactgaaacaacaattgttgttctaaaagattgtgctttaggaataacttgtaaggtaattgtcaaataatgttcgtgcgcttaaacttttgaaaatctacattggtacccaatttttacacgtttaatacgtgctatatatgtagtgcatactttcagtcattttgtatttaatgcttatgttgtgtcaaaattttatatgtatatcctgctaccaataatttatccttttcgaaccgtccaagatgctagaatttgcattttcaaaaagatagagcttgggaatgtcttctgatttctatataaataaatggttataccgatttttaagataagtgggtgagtacatttagaatggtgcgtatgctgatcgtagattatagccatattccgagcttagggttgccaagtaaattacaatttggaatcgaagtgctgaggattatttttttttttcatgtgcaaatatcaacttgaatcataaaagtgtacacgtgtgcaatcgaggttttagagaatccaagagtgagttatgtgtaagtttgacaagagcgtttgagggatcaatatggaactacttcactcccacagatggtaatggcaaagatgcaaggtaatctggctagcagtagactgtggattttctggggtgatttgccccgcccatttgggaaacgcagtaacatatactagtcttgtgggatcttcaacaatttaatgtataaaaaccaattcttttaaatattgaacagttgacgatttagaggtccataagtctttgttaggagtaactacttagagatctgcttagatagcttagatagttaataaatgcagctgagaccatcctacaaacgctctcccgtgtatgtgtactcgtcttctccaatcttcattagttattctcgggtagagtctccgtgatggccagggccagcacatccacggcgaacttggcatcagccagcgtgatgcacatgggaggcttaatgcgcagaacctgtggaaatggaagggaaatgatgcacacgtagaaacaggagaagatgatcaaagagtcgttctcggtggagactcttcaacgaacacgaatttttgttagtcggacgtgcagtacgaagacaaacgagcccaaatgaggatgaacttatccctcaagaaggctcacttacgtttccatgaagaccgccgcgtccaaggagcactccttggtccttgcacttctcccagatgtccaggacgtggggcgtagccagaggggtacgcttttcacgattgcccaccagctcgacgccgatcatcaggccttttccccgcacgtcgccaataatctcgaagcgctgctgcaattcagccagacctttgaggaagtacgtgcccacttcaagggagttgcgctgcagttgctcctcctcgatcacgtccagcacggcaatgcccacggcactggccatcgggttccccccgtaagtgttaaaatgcagggcctggctcagggatgccgcgatctctggcgtggtgacaacggctgccagtgggaagccgttcccaatgcccttggccatggtgactatgtcggggacatagtcgtggctctcgaagccccagaagtgctcaccggttcgcccgaagccagtctgaacctcgtcggccacaaagagtcctccattagctctgaccagagctgctgcccgcttgaggtacccttttgggaactgaaccgttccgccgaccccctggattgactctgcaaacatagcagccaccttgccgcgcggcagggaatacttgaaggtctcctccagctcattatagtaggcgtcaccggcctggcagcctacggtgcactggcatttgcgggtggtctgcacaggggagtcccggcagtttgagccgccccaaatgccctggtacggatcggggttcatcacgtgcacaagtccgctgttcaccccgggcagtggaaagcgccaggtggagtgtgccgtgaggcccatggtgtagggggacattccgtggtagcagttgcgcaaggaaaggatatcctggttgcctgtgtaaaggcgcgccattaacatagcaagatcgttggcctccgaaccggagttcacaaagcacacgctcttgaggtctcctgggaacttggccaccaatcgctcggcatactcgtggatcttggggtgcatgtagatgtttgtcgtgtgccacagtttggcagtctgctcgctgagcgcctggttaacctttctagaaatgaacaaaatatgccattacattcttagagaaaaggagcaataaaaaaaccattacaatgtgcggtagtttaaaaaatgcttcactaaagttaacttaatttttgaagataacctaacgagacttagtccatgtatatttatttttattttacaacagagcatctatgttttaatggccccataaaaagaggtaagtaattaaataatattaaattgcacaaaagttggcattatcagttttgccctccattgtaatgtcctatttcttgaatcgaaaataaaacgacaattcggtatttgcttaaaccgaattaaatcacacttaaatctcatttttaaaacattttaaaaatcctctttttcttatcaaataataaatatgtatttatcatttaaattcatatcatttccttatttgcgtaaagcctaataattttccctcctgcttacgggtgacaatgtccaacggacacagtaacgattccaccaaacatgtccaggtagcgccggccctcatgatcgtacagccactgcatgtggccagcgtggatcacaagtggctttttgaagtgggccagcagattcggtgtcaggtggttgcgtcgggtcttgagaatctgctcgtaggtggagccctcgtaggccgccgggcggtggttgcagtcgggcatctcgccctgcatctgtgctatcatggcgggggctgcctttgagtgcaccgatgagctggagctcctacggaccgaggacctgggaaggagctgccgggtctgagctgttaggcaaaaggagaaaaatgttcaaaaatgaataccgtttttattgaaagctggctcattagccttttactggtattgtttagatcaatattaatccataccaaataccagatagtaatgttttctttcgctttaccaactgagaaaggagtatctaacattcgaggaaatcgtttgctttgcttgtacttttgactgttaattaagcacttggtgttcgatcaatgtttgatacgattcgaaagctaagatactcctaaaaaacacatttgtcgcaagcaaaagaaacaagacttttaaccgttctcatttgaatgttgtgctcagagcaacgatctatgcccttgagcttaaattttcatgcaagaaaatcatttactacctatttaatatttattacgaaggagaactcaatccaaagggaacgaattaaaaagcacacaacactttttcagcatcgacttttcaaaaaatataacattcgtgtctaatatatgaagtttccaaacttgggttagacactaaactttcagataacaacgtaaaaaaaattacttatctgagaaatgcaacccttccgaaaccaccagttccgtttttataccctttacacgtaaagtaacgttaaacaattttttctcattgtactccccaatttctatcggtatcgcagagaaacgggtatctgatagtcggggacctcgaaaatagcattctctcttgtataatactcaaatcctgaaactcctgcatctgttaccaaagttaagaaagaaacaccacatatcttaaacacataatttaatttagttaaggtaggattgaaaattttttttatctgaaacatcacaaaagtagttagtaaatttcaagattaaagatcagtcgtatgtatacaacatgtctattttcacaactgttgatattggcataaattgaactagaacgcaatttcctagtaaacttgtgtttgcccggcgtatttatttaatcagaaaagtgtgctgctcttgcccacgtgaggttcgagttctgaactatgcacaattcgtaaaaaggtcattggccgtgggaagtgttctccaattgcctgtattcaaatgcttctgatgcgcaattgggaccacaactggattgtttattaagactgagcagatctacacaattcaactgataagaactggccccctgccaacagcctaggccactttaaaacctagtgagattgggactagctttggactgccagcaacctgtcaaagtaaaaactcttatcacccttatctgaacaaacactaaatttgaccgaacgtggcgtttaaattacttttacactgcgtatgctatgtccacagattcttaaatagtggcaagtaactatataagattctagtttccatcagagtcaggcgatttttcttttcagctgtaatgtaaatgaattacaacaaaagaggccaaaatggggaaaacttacctaacactcgcttggatatcatttttggtttcggattcttttctacgctcctatcactttctatgtaaacttttctggtttggatgcactttttgaactcgaatcaactgtgtggcacgtgtttttcgcgaggacagtcgtccactagtaacggcggaggtgaagcaactgataggcgggcacgattgcgattccagtgacggcggagaaagctcgatcaacggagagctttggtctctgttgtcagattggagagcaaagtcaaggccgcggataagcactctcgttctcccaagtgggaactgttttggtaacgcttggaggtgtttgggacagtaggtaaaccagtttgttgtctcataataatttatttcaattcttgcttgctacgtactgaagcacaaactactgaagtgcttaggtaatcctttgttcttaacaaaaaatatatcgcatttgctcttcttttcaatcgctgtgcgggacgtcctgtcccggatcagattcgccgtttttctggagtggctggcatttaacattgcagtgtaatttccactagccgtcgatagttaggtccttcaatatgctatatcgatttatcaagtatgaattatatattttgctttatcaaccaacatcacgagtttgcgctttgattctcacattgcccatccctcccttaattttcccaccaaatataacccaatgcaacagataatacggaaacataaaatgtttgcggggtcatctaaaaacaagctcaatgcgaagtcgtgggatacagtgtttacacagaaaacaataacctatcttcgtatataacgtccactttaaagcctccatcccggggagatcagttaaagtcagtgtacagatcgggacttctgggcgctgctgttggctgggccggttgctctaggctagctgccatctgtcgcagattttcgacgccagttagcaattgcctgcaaggaatgaataaaagtaagcatgttcgttactcattactcttcgttactcttacctcagattctgttcagcggtgtcggcggcgcgcagcaaatccctagacaaatgctgtgttctggacggtcgttctgcgctaatcccgctgctggtggaggcttcactgtctctaccaggtgtcgccactg

SEQ ID NO: 23513 - DNA, 1855 bp, DROSOPHILA
ccgttactagtggacgactgtcctcgcgaaaaacacgtgccacacagttgattcgagttcaaaaagtgcatccaaaccagaaaagtttacatagaaagtgataggagcgtagaaaagaatccgaaaccaaaaatgatatccaagcgagtgttagctcagacccggcagctccttcccaggtcctcggtccgtaggagctccagctcatcggtgcactcaaaggcagcccccgccatgatagcacagatgcagggcgagatgcccgactgcaaccaccgcccggcggcctacgagggctccacctacgagcagattctcaagacccgacgcaaccacctgacaccgaatctgctggcccacttcaaaaagccacttgtgatccacgctggccacatgcagtggctgtacgatcatgagggccggcgctacctggacatgtttggtggaatcgttactgtgtccgttggacattgtcacccaaaggttaaccaggcgctcagcgagcagactgccaaactgtggcacacgacaaacatctacatgcaccccaagatccacgagtatgccgagcgattggtggccaagttcccaggagacctcaagagcgtgtgctttgtgaactccggttcggaggccaacgatcttgctatgttaatggcgcgcctttacacaggcaaccaggatatcctttccttgcgcaactgctaccacggaatgtccccctacaccatgggcctcacggcacactccacctggcgctttccactgcccggggtgaacagcggacttgtgcacgtgatgaaccccgatccgtaccagggcatttggggcggctcaaactgccgggactcccctgtgcagaccacccgcaaatgccagtgcaccgtaggctgccaggccggtgacgcctactataatgagctggaggagaccttcaagtattccctgccgcgcggcaaggtggctgctatgtttgcagagtcaatccagggggtcggcggaacggttcagttcccaaaagggtacctcaagcgggcagcagctctggtcagagctaatggaggactctttgtggccgacgaggttcagactggcttcgggcgaaccggtgagcacttctggggcttcgagagccacgactatgtccccgacatagtcaccatggccaagggcattgggaacggcttcccactggcagccgttgtcaccacgccagagatcgcggcatccctgagccaggccctgcattttaacacttacggggggaacccgatggccagtgccgtgggcattgccgtgctggacgtgatcgaggaggagcaactgcagcgcaactcccttgaagtgggcacgtacttcctcaaaggtctggctgaattgcagcagcgcttcgagattattggcgacgtgcggggaaaaggcctgatgatcggcgtcgagctggtgggcaatcgtgaaaagcgtacccctctggctacgccccacgtcctggacatctgggagaagtgcaaggaccaaggagtgctccttggacgcggcggtcttcatggaaacgttctgcgcattaagcctcccatgtgcatcacgctggctgatgccaagttcgccgtggatgtgctggccctggccatcacggagactctacccgagaataactaatgaagattggagaagacgagtacacatacacgggagagcgtttgtaggatggtctcagctgcatttattaactatctaagctatctaagcagatctctaagtagttactcctaacaaagacttatggacctctaaatcgtcaactgttcaatatttaaaagaattggtttttatacattaaattgttgaagatccc

SEQ ID NO: 23514 - protein, 470 aa, DROSOPHILA
MQGEMPDCNHRPAAYEGSTYEQILKTRRNHLTPNLLAHFKKPLVIHAGHMQWLYDHEGRRYLDMFGGIVTVSVGHCHPKVNQALSEQTAKLWHTTNIYMHPKIHEYAERLVAKFPGDLKSVCFVNSGSEANDLAMLMARLYTGNQDILSLRNCYHGMSPYTMGLTAHSTWRFPLPGVNSGLVHVMNPDPYQGIWGGSNCRDSPVQTTRKCQCTVGCQAGDAYYNELEETFKYSLPRGKVAAMFAESIQGVGGTVQFPKGYLKRAAALVRANGGLFVADEVQTGFGRTGEHFWGFESHDYVPDIVTMAKGIGNGFPLAAVVTTPEIAASLSQALHFNTYGGNPMASAVGIAVLDVIEEEQLQRNSLEVGTYFLKGLAELQQRFEIIGDVRGKGLMIGVELVGNREKRTPLATPHVLDIWEKCKDQGVLLGRGGLHGNVLRIKPPMCITLADAKFAVDVLALAITETLPENN

SEQ ID NO: 23515 - DNA, 8933 bp, DROSOPHILA
ttttgtcatgctccatttagccgagtgtggaccgaacagatgttctatttaaacgcacattattattatttcatttcgacaggcgatagactccgaggatgtgtattttgggctgtgcaccaggcaaaagttatgatttccatttccatagtattgactgctgaggaatcgagactataaggcaatcgttccaatatacattcttttatttagatggggatatttaaaatatagtattcgtgaaatattaactgatattaataaacatccgtaactttgaagtcgaaaatgaaattcgattattaattatatgaagtgtaggctttaagaaataacaattctaaatttcaaaaatatttaggtaaaagcccgcttgattacagttaaatataatgtttttaatagcctcacaagaacttgattgcgaaacctttgtcgggtggctgctcctgtccaggggcgtgccgagttcaaccctgagcgccggcgccgcatccgcacacacggatttgtatctgtgtccgtggccatcatcgctggccaaggatttcggggtgacgacgccgcatgatgacgcgctgatgtcaaatgcggaaagcggttcgtgagaggggaaggattcgttgattagggtgaattaatggtcatgtaaggtggattaggcgattgaatacgaaaataattacatttgaaattcgatacgctgccaactggcacacatacgagaaaactctggtctatgaggctgcacaggtggattccctttccagtttttttttttttgccagtgagtgattgatgatatggcaaacgatttgctctgatttcactaagcgatcttgtgtcaaatgaagagggctagtctatatatacatatatatatatagtgctaagaatattcgactttataacgtattataataaatttaaatgttatattacagatgcctcgctagcatttagcataagcagactggtcaagactgaacaactaacggcgatggcggcggccgttggccttaagccgccgactcctctggaggacaacaacaactcaatctcgatgctgagcaaaaatcagcagatgcaccagcagcaccaccaacagtcgcatcttgcccagcgccccaagccagcctttatcagcgccagcgaaaagctgcgccgccaatcgcgatcccgctccaggtcgagatcccgcagtccctgctcatcgcaaatcgacatggaggatgcggattcgaaccactcgcaccgttctctgcactcacgctcgagatcgcgatcacgttcccgctcccattcccgctcccgctcgcactcgagcagctcatccgtggaactggaggtggactcgccgcccggcagtccgcgcatcagctcgcccagcggcgcctcagcctccgcctccgagctcctaatcaccgccaatggtggcggtcgtagcataggatccaagaagtcggatctcttctccgtttccgcgctgctgcggcgagacgaaccgcctccacagcgacggacgccacgcagtccgccactgggtcatctgacatccagcggtctggccatgccattcaatccgctggaggcgatgcgccagggttatccgcccaactacgatgcggccatgttccagcgaccgctcttctcgcccgccctgcccttcttcgccgccgtcgccttccaccaaggacagcagcagcagcagcaacagcaacaacagcaatccggattggcagcagggtaagttaactaaataatgctattaaatatatagttctgatactaaagggctagaaataaacccatttttaaacagaaattcattcaattcattaaattagcttcatttcccaccttcatggccatgccaactcggtacccattttaattaactcgcctcaattaaatgtgtttccgcagctaccatccggattcgcaggaaaatctcttccgtctgcgcagtctgatggtgccgctccaatccgccggacagaacaattcctcggcagcagcggcggcggcagcagctgcggcggctgccgtcggcgtgggcgttggcgtcggtgtgggcgtgccacccaatggcggtcatctgggcctgccccactcgccacacctgcaccacttccatcacatggccgccaagtggccgggcctgcaccaattcagcgacctgtactcgtgcatgaagtgcgagaagatgttctccacgccacacggcctcgaggtccactcccgccggacgcaccacggcaagaagccctacgcctgcgagctctgcaacaagaccttcgggcacgaggtcagcctcagccagcacaggtatgtgtggcatgccaccgcagggggagcggggtatcgggatctgtgggggccactgcaaaacaacactcagaaaaattggttaattgaatttttgatttgtgtttatatttttgtatataataagatcagatagtttgaagtttttttaaagatcttttaaaactatttaaattgaaattacttttgcaatagcaaattcgtttatttaattaactttaaaccagtgtgtttaactatttttccgagtgtaacgagtggtcttcctgcctgggacactttgcattacttaatttagccaaaatggctggatttcagcctgaccaaatgtttgcctttgtggctgtagttaaaacacgtccacttccgcctttggggacttaccggaccttaattacggccaacgctcgtaataccccaaaaccaaaacccatcccttctcatcatttcagggcggtgcacaacgtggagaaagtgttcgagtgcaagcagtgcggcaagcgcttcaagcgctccagcaccctgtccacccacctgctcatccacagcgacacgcggccttatccctgcaactactgcggcaagcggttccaccagaagagcgacatgaagaagcacacctacatccacacaggtaagcagttcggttgtgcatatatacatataagaagggttctccatacgatttaatatagctttaaaagggaaagagataacttcttttttcttacttattttacttcatctacttaaatcgaacaataccacgaatcacagactttttccgtttatttatgcaaaattcgagccccaaacaagcgtatctttaaagatacaaaacacaagcgcagttggatgtggggtattccatggatgggtacctttggggggggggggtgaaggaagcgtcgccattaaagcgccgagcgaaccaccccaaaagccgcagtcgccagttgcaattacagttgccatcggcagaagcagatatagcgaaaatctggggggttggttttgcgaaaacaagtggtggggcgaaaggaggggttcgaaaaaaaatggagcagacaacagctgaaagagcgcccagttagctctccggaaatcgaaatcgcaggggagagagtaagcgagagagagtggtgctgataagaatctgaatccgaaagaatctatatactggaaggccagcacacagatacttcagccagcactcaaacacagacgcacacggggacagaagagcgagtgagacagcgtgtgtgagagagaggcgggctgagaaatcacagccgaccaatgaaaaatttagtcaagagattttgattttctgttttatacgcgcgcactcacacgaataacaaatacgagacgcacacatcgaaacagtgtgcagtggtgtataggtgcacacacacccccggaaagccgaaaacggaacggaactgaaacgccattgcgaaacgtggcgattggaactgtaagcgggggcagggaaaagaccgttgggtggggcagcgccgcacactagcatcgatttcaagttacccacggccacgtgaaaatttcgaatctcaaatgtgatttgttctagtttaaaagcacgcagtaaatcttgcaatcctttgaagagaatagaacgttgatataactgctgaatgtacgattgtttctgctcgacaagttataagcttaaaaactattacaaaatagtagcattaatcaaaagtaagtttgcttgttatcgatgatagataatgtaacaaataaggcaaagaagtagtaaatgtgtatatatttttccatttatttgcacagtaaatcaatgccattacgtttaaattcatttgcaagaatcaggcttttattagcgcataagattccattatatatattgcataagcacactggatcattaagcataaaaagcgagattccgattcggttggaaatcagtttacaaatggcaaggataataacctctaataagcagactttcctcgctgatgcgtctggtgaaatcagtgaaagagaaatcagcacccctacaaggccccgcagacatacaaaaagagaaagagaaatattccagacatttttatcgtttgccgtcttcgatttaggacgtgtgccacccactcgaactcccccaaaatgctccactttcagtagccaacggcacatgtggccaagttggccccaacatttcaagaagattttccatccaagcgctttggtttttcctgagttccgctccgttcgctttgctttccttacgacttatccttaattttcttccctgtgtcggggcgtgtttccatcgcagacagcagatttttccttctttcatctgatgtgatttttcggagcaattttctcgctttttcccgttccgtttctttttcgcattttcgtatttactttttggcgaaatgttttatatgcttagtccgtgcttcgaccgaatttcccttttttttttttgtgtttcgcttttatttccatgcctcagatttttgttttcgtcaatttatgcgctataaaaggactgaggggaaaaaagcttttcaggattattttatttattcacgacttttgtttttcattccaaagttcatttttagtgtgtctaaggggctaaaggtgaaaaatcgattatttaagctgaatgcttttaaagaatgttaaaattcaggtaaatttaaaatctatcatttcatagaggttagaaatgctaacgaattagatactaaagtattaaatcattacacacacgttttgaccttcttgaaccctttgttacttcgtttcaaatcatttcccaaatcaaaccaaagcaatcttccctctgtttttccgccgctccacagggcgtatgcgtgatttgattcccaccgcttaacgaaaatggccaagccaccaaatatgttgagaacgtgctgaattagacagcattcaagttcagagtacagcgacgggggttaactaaagcttaaaatattagaagactaaaaggaaagccattcggaaggcgcaggcaagacttaaaagtatttccgcaatgtgctgcaataaaaatcgttgaaaaagcaagcaaaaaaggcattgcactgatacataatttgttcgtataccggaatataacctccacacttttccttctaatttaccgacggccgacgggatttttctatttcctcagtttcctccacttttctttttttgtttttgggtctcgttagagctcgtgggtcgttttggccgtgataaataataaaagctgctctataatctctgcgactacgtgacgttatttgtgccgatagtgcacgaacgtgccccgagccacggacccccagagaagacatcctccagattctgcatccagcaccaggcatgctcggtgaggccaactgagagccggatccggactgactgctcaattttactgttgctcgtccttccatccagccaccagccaccacccacccaacttggccacccagtcgcccacttaaccatgctggtgctcaaggaaaagaaatcctcatgccccgggaactgaaagttgaatcagagcacatccctacggtcgaatgtttcacaatcacgtcgctgcaattccattatatacaacgaagctgtcttccgtttcgtttcgccggattcacagcccttctctttcgctcagcgcctcgccctctctttcactccatcgctatgtacccgtatctctgtttgttttatatacactttccccaattctcggtagggagctacagagtcaggtcctctgaagttagcatgttgtcgtcgttattttgttgccgtccccccaatctcatactatatatatatctgtttgtgtgtgtctatgtgtgggagtgtaagtgtatgagtgtagtacataaaatgtagcccaacaagtctgtgccactatctccatacaacaagagggctatagataaggggcaactatacggaaatctactcgtatatgcgattctagcattgttggcagcagaaaaacgtggaacgtgaaactaaatataatcaaagtttttgttttaactaacatagaggaaaaagatacgacattctaatgctatttctaattaaaatcgcttcgaattcgaggagagagaacatgggcaggattttatagtcttaaaaattaaattataagacttctatgtattgtacaaacatattaatcaccgacatctgcactctaaataagttcccccaactggcgacttaatgacgtctgcctgtaagctttcaaaatcaaattgatattttcttcattttcatctgccatttctgagatttcattatgttcagcgaaattttcatgacatttccggctccagaaaaagcgtttatttcgaaagcagctttccacccaaatctctaatgaaaaattcaacagcacgaaaatgagcaataaatggcgaataaagcgcgaaactgggggaagcccttaaaaggaaaaaaaaagaaccccacaaaattactttaaaaatgtgttatcaaggaaaaagtgcgactttaaatgcggcgccaaccgcagagcatcacactgatgaaccaaaaagtttaaatttaaaaactccagcactcctgttccccagtcgagaatggaaatcggtggggtgggggttgtggctccagcctgcggtctgcagagatgacttacatggtgtcttggtgtccaagttggggggagagtgcttctgtctggcgacgattcgcatttttttggggggttgacgctcgagatgcgatatgtgtgcaccaaggggaggaattggaacaggttggcttccatgagcacagaaatgtctaaaatggcgcacactggttgaaaactcaggcaaagagcagtaagaaacaactcgacttaggtgataccctttagactgaaagattgtacttagtacactactcatttcatatccaaatcagttttatttaataggggatttaataaagatttactaagcagagatacaaattcgatatgctttctattttatttttaaaggttcttctcatatgtattttaacatgttcaatactacctttttctgcttagattgattatttttcctagttattatgctatgcacctgaacgggaaccgaatgagttccaatttggccactgattaagccctactaacgtattgtatccttccactcttgcaggcgagaaaccgcacaagtgccaggtgtgcggaaaggccttcagccagagctccaacctgatcacgcattcccgcaagcacaccggctacaagcccttctcctgcaagctctgccacaaggccttccagcggaaggtggacctgcgccggcacaaggagacccagcacacggatctgcgtgtccacctgggcaaggtggacttcatgtcggcggcggcggcagcggcagcctctgcggaactgagtgcagcagcagcggcggcggcggcggcggggggttccgttccgggcggaggaccaccgggcagccagggagccaatgcggttggctccgctccaaatggggctccaccgatggggggactcaactgccagaaggtatcgctgctggcataaccaagcggagtggcaaaccaaaatccaaatccaaatcaaccgcaaccattgtgcaatagacggaagtgaaaggcttcgctgggcattttctcaaccgcttgaaaccgaactccaaagagaacagattaaaacaatttaaataattttaagccagtcagttaaagaactatttccaatgttgccaaaaactaaaaatagcaaagagttcacaaaatcgaaaccaattaaagccagcaccatagtcagtctcaagttatcattaaagcgtaatcacattgccatcttacgaacataccaaagtaatccagagcaaaggagtttccatgttttcacctatgtatgtcagtttgtattgctgtgacccgggcggaggtcagttaaaaaatcaaaatcaagttaagaatttccatcgatatgaactgtgctgcgtgtcgtccttttgtgaaatgtaataaaaccaaatccaaacggaagaaatccaatgaatgaatatgaaaataaaagaattagaacgcgcgagggcaaaactaaaatgttccaagttttcgcttctagatagttgtgaaattttaactaaatcgctgtattatgcaaactattttgatattatatcattccaatgaatttagtctaattaataaattttttaacttatttatacatattatgtgtatgtatgtaaaaaccgctaaacaaatatatatatatatatatatattttcattttaatgttcaacaaactaatgtatgtaatattaaaacaacaattatgaagacaaacattaatctacattctaagtatttttatgttttcaaaataaattgaatttattaagcaaatgtgaaagatgattttttattgattggattgcattcagtgtgtattcataccattattataatttgaaaaccaaaaggcacacatcgcataaagtgtcaataggaagttggccaacctctttgcgaattcacaacaaaattgaaaagggaatcgcttcga

SEQ ID NO: 23516 - DNA, 1725 bp, DROSOPHILA
atggcggcggccgttggccttaagccgccgactcctctggaggacaacaacaactcaatctcgatgctgagcaaaaatcagcagatgcaccagcagcaccaccaacagtcgcatcttgcccagcgccccaagccagcctttatcagcgccagcgaaaagctgcgccgccaatcgcgatcccgctccaggtcgagatcccgcagtccctgctcatcgcaaatcgacatggaggatgcggattcgaaccactcgcaccgttctctgcactcacgctcgagatcgcgatcacgttcccgctcccattcccgctcccgctcgcactcgagcagctcatccgtggaactggaggtggactcgccgcccggcagtccgcgcatcagctcgcccagcggcgcctcagcctccgcctccgagctcctaatcaccgccaatggtggcggtcgtagcataggatccaagaagtcggatctcttctccgtttccgcgctgctgcggcgagacgaaccgcctccacagcgacggacgccacgcagtccgccactgggtcatctgacatccagcggtctggccatgccattcaatccgctggaggcgatgcgccagggttatccgcccaactacgatgcggccatgttccagcgaccgctcttctcgcccgccctgcccttcttcgccgccgtcgccttccaccaaggacagcagcagcagcagcaacagcaacaacagcaatccggattggcagcaggctaccatccggattcgcaggaaaatctcttccgtctgcgcagtctgatggtgccgctccaatccgccggacagaacaattcctcggcagcagcggcggcggcagcagctgcggcggctgccgtcggcgtgggcgttggcgtcggtgtgggcgtgccacccaatggcggtcatctgggcctgccccactcgccacacctgcaccacttccatcacatggccgccaagtggccgggcctgcaccaattcagcgacctgtactcgtgcatgaagtgcgagaagatgttctccacgccacacggcctcgaggtccactcccgccggacgcaccacggcaagaagccctacgcctgcgagctctgcaacaagaccttcgggcacgaggtcagcctcagccagcacagggcggtgcacaacgtggagaaagtgttcgagtgcaagcagtgcggcaagcgcttcaagcgctccagcaccctgtccacccacctgctcatccacagcgacacgcggccttatccctgcaactactgcggcaagcggttccaccagaagagcgacatgaagaagcacacctacatccacacaggcgagaaaccgcacaagtgccaggtgtgcggaaaggccttcagccagagctccaacctgatcacgcattcccgcaagcacaccggctacaagcccttctcctgcaagctctgccacaaggccttccagcggaaggtggacctgcgccggcacaaggagacccagcacacggatctgcgtgtccacctgggcaaggtggacttcatgtcggcggcggcggcagcggcagcctctgcggaactgagtgcagcagcagcggcggcggcggcggcggggggttccgttccgggcggaggaccaccgggcagccagggagccaatgcggttggctccgctccaaatggggctccaccgatggggggactcaactgccagaaggtatcgctgctggcataa

SEQ ID NO: 23517 - protein, 574 aa, DROSOPHILA
MAAAVGLKPPTPLEDNNNSISMLSKNQQMHQQHHQQSHLAQRPKPAFISASEKLRRQSRSRSRSRSRSPCSSQIDMEDADSNHSHRSLHSRSRSRSRSRSHSRSRSHSSSSSVELEVDSPPGSPRISSPSGASASASELLITANGGGRSIGSKKSDLFSVSALLRRDEPPPQRRTPRSPPLGHLTSSGLAMPFNPLEAMRQGYPPNYDAAMFQRPLFSPALPFFAAVAFHQGQQQQQQQQQQQSGLAAGYHPDSQENLFRLRSLMVPLQSAGQNNSSAAAAAAAAAAAAVGVGVGVGVGVPPNGGHLGLPHSPHLHHFHHMAAKWPGLHQFSDLYSCMKCEKMFSTPHGLEVHSRRTHHGKKPYACELCNKTFGHEVSLSQHRAVHNVEKVFECKQCGKRFKRSSTLSTHLLIHSDTRPYPCNYCGKRFHQKSDMKKHTYIHTGEKPHKCQVCGKAFSQSSNLITHSRKHTGYKPFSCKLCHKAFQRKVDLRRHKETQHTDLRVHLGKVDFMSAAAAAAASAELSAAAAAAAAAGGSVPGGGPPGSQGANAVGSAPNGAPPMGGLNCQKVSLLA

SEQ ID NO: 23518 - DNA, 3973 bp, DROSOPHILA
taaagaattctttggcagcggcactcagccgttcttgtaaacatcctaaaacctgacataagccgatttgactgctctctttgaaccttctccttatcttaagaacccaagagcgaggctctcccgagatacaaatattgttcaaataatgagggttctctcaattcaatttgcatttgatttttactcttaaaaaaactaaaacgttaaaactatttctccgatcattttttatttcttagcgttgtccttagtcaactgacggggcatttattcgactcaaataaaaaatataacaactaattttactatatatatgtatatattttactgtatatcggaaacgcttccttctgtcttttacatatgtacatttcaacgaatctagtatacccttttactctacggttaacgggtataataagttctttctaaatgattatgcttatcattttaacaacaacattttaaccaaaaacggtgtgatgaccaaaccattttcatattcagcatgaatttaccgattcagacaaatcgttcatacatacaaacaatattattactttaccattaaacaaaccatttccaagaaagaatttttcatagacctaaagcacatcgactttgtgggtggatatacatacatatgtacaatttttcgactcaactgtttacactgtagttttacgaaagagaatttcgatttaaaaaatttttagttttcgatggtcgaccatttgatttataaataagcagtattatctttaattaggctgcttttaactgcaagtgcagtttattcatacgattacaaagcatgacgatagatgattatgctattaggtttgattaaaccatttttatgaaatataaattattatattataaatataaattaattataaatttacaaactcttattccattccagaatcgatagttctggaatgatactagtgctcagcaacgccaaaacagtcaataatagatatttgaagtgtcagcggaatcgacgtctgacaaaacaactgcttcacttcattagaattgtgtgatatattccacagaccagatcattggaagagaagtcaatcgtgcgtgagagaagccagaagagaagccacccgcgacattccgaagtaaccatttctgtagggtcagacgtacatacaaacaacattcatataaattgctcgtgctgttcattggttaccgcctttagtcgctacctcgctcgcacacgcgctcaacacctacccttacccgtcaaaaataccgaccttcttcttgccacgcccgtaaagatggctcctaagaagcatagtgggtttatgatgttcgtaaacgagtggagaaaccggaacgccgagggccgacgcatgacgctggcgcaggctgtttcccactgcggcaccatatgggaggtaagttttggtcgatgctgcggatctaccctgtaataaatgaagccttttcagaaaatgaacacccagcagcgtggtccgtacaactcaggcggcaaggacgcaaatgtggcgcaacgcgccaaaagggaaagttccaacggccacggccaggtggacaaggcccaaagggaggccaccgagagcttgatggacatgaaacgtaccatcgagcgcctcgtgctaaacgccaagatgtcccatggtaagtcacacatttcgaagacatttggattcgactaactccaatcgctgccgcagatctggagaatgccaagtttgtcttcgttgccttcaactacttcactaaagccttgaccaccgacgtctatgtgcccgccgagtttgcggcatgcgaatattcgttgaaggagggaatccgatccatctacagcaccatgattgaccccggtcagatcatttttgggcaaggtagcgatgccctgcttcactcttcaaccactcacgacctgccgctgccgcccaacgcgctgggggagaagaacatgaccaagctgtaccgcaacattgttgactacttatccaaatgccagggaaaaggcaagaccctagtagtctttacacccgccgaaaatattaccatggtgaagtcatgcttccgctatttggagtgcgatgatgacttcagggacgggggcgaaaaaatccaggtgtttgatatccagtacttgctattcatattgaagaaggaggtcatgaatgtcgctgatttgaatgacgagaaaatcaacaaattcgcgacggatgctttttttaagaaagactttttcgagtttaccgcagggattgcgtgtcaggtaagattctgttcccaattctgataacccctagttgacttccttcctgattacttttgcagtaccacgaggataatgatcgaaccaagtactgtacccagagtatggtgactagatgggcgtataccttcactgattttatgtgcggagacctggccataaccgtccaacccggaaagcacatacctgcccaaacaaaacccaactaccttatcataagctcgtacgcctcctcactcgaccacgagtcctccttcgactctttttattcgcttcccggatctggggtcaagaaggaaagccaacccgaagcttgttcgctttctagcagtcgactttccgtcgcatcaagctcctacaagcccatagaccacacttcctttgccgcaaatttaaacgaagtttctgaattccccagcctcggcatgcgtaattctagtaagcatcacggtatcgccgctagtgctcagcgggaatggaacgctaggaacttaccgacgcactcgcgtttaattcggaaggtttcagacaacgacttctccgtaaacggcgctgatgggaaacttaaaaaataagccactttggtctatcaattggactaagaaacaatgattccttatagataattttcttatcgcattaaactgtacaaatactattacttgtatttaaaaataaattcgttcaaacggacagggccagcatcaagtatttatttattttagttctgctaaataaatatttttaagacctaatatgtgggcagtaatgaaagaaagacatgatatttttgatggcgacaaattctaattagctaagtggggccaagctcaaaataatctatgtttatggtattccatggaaatgcagttgtgccattagaaactgctcctattaaaacccctgttaaatattgtgcataaaattgttcaacgggtcattataatacaaagtgcaaaggccaaaaagagtcgagttcatattcttacacttgtagctttttaagtggctcgacttggagaggagtttttagagttgcgagatacagatgcaatgctttgcggatcttgctgaagcacgagacgagtaaaggctaagctgaggagaagtgcctggcctagaagctcgcgctggtagcgctcttgttgtgagaattcgaggcgtaggtcagcgggaaagtcgatctgtttgtgcagcttcaacgggggctctgtttcggggatctgatgttccacgttgtaatgggttcgcatcatggccaatatcgtatcctcggacgacacgcgctcagtacccaccatgtgattaaatagtcgggctgagagaaaacgtcgcatgtagtagacgttgttcgtcttgttctcgtcgccatctgatcgggccatcaaggagaagctcatgattgcggaaacctgggccttctggatgttcacgttctgttgatcgatgctccctgggttgctgctggcctgggccatttgtggactctccatgacgtagcaatcggccacgggtatctggtgagatacatagaggcatcggcgggaaagttctgacaaatgcagcttcttgtcgttcagctcatggtgctgccagtgcgtgagcagacagggagcttcgttgcttccgatctttaatcgcgcccagcttacactggtcactccgatgcgcacccctacagcagatacaata

SEQ ID NO: 23519 - DNA, 1730 bp, DROSOPHILA
tcagcggaatcgacgtctgacaaaacaactgcttcacttcattagaattgtgtgatatattccacagaccagatcattggaagagaagtcaatcgtgcgtgagagaagccagaagagaagccacccgcgacattccgaagtaaccatttcttcgctacctcgctcgcacacgcgctcaacacctacccttacccgtcaaaaataccgaccttcttcttgccacgcccgtaaagatggctcctaagaagcatagtgggtttatgatgttcgtaaacgagtggagaaaccggaacgccgagggccgacgcatgacgctggcgcaggctgtttcccactgcggcaccatatgggagaaaatgaacacccagcagcgtggtccgtacaactcaggcggcaaggacgcaaatgtggcgcaacgcgccaaaagggaaagttccaacggccacggccaggtggacaaggcccaaagggaggccaccgagagcttgatggacatgaaacgtaccatcgagcgcctcgtgctaaacgccaagatgtcccatgatctggagaatgccaagtttgtcttcgttgccttcaactacttcactaaagccttgaccaccgacgtctatgtgcccgccgagtttgcggcatgcgaatattcgttgaaggagggaatccgatccatctacagcaccatgattgaccccggtcagatcatttttgggcaaggtagcgatgccctgcttcactcttcaaccactcacgacctgccgctgccgcccaacgcgctgggggagaagaacatgaccaagctgtaccgcaacattgttgactacttatccaaatgccagggaaaaggcaagaccctagtagtctttacacccgccgaaaatattaccatggtgaagtcatgcttccgctatttggagtgcgatgatgacttcagggacgggggcgaaaaaatccaggtgtttgatatccagtacttgctattcatattgaagaaggaggtcatgaatgtcgctgatttgaatgacgagaaaatcaacaaattcgcgacggatgctttttttaagaaagactttttcgagtttaccgcagggattgcgtgtcagtaccacgaggataatgatcgaaccaagtactgtacccagagtatggtgactagatgggcgtataccttcactgattttatgtgcggagacctggccataaccgtccaacccggaaagcacatacctgcccaaacaaaacccaactaccttatcataagctcgtacgcctcctcactcgaccacgagtcctccttcgactctttttattcgcttcccggatctggggtcaagaaggaaagccaacccgaagcttgttcgctttctagcagtcgactttccgtcgcatcaagctcctacaagcccatagaccacacttcctttgccgcaaatttaaacgaagtttctgaattccccagcctcggcatgcgtaattctagtaagcatcacggtatcgccgctagtgctcagcgggaatggaacgctaggaacttaccgacgcactcgcgtttaattcggaaggtttcagacaacgacttctccgtaaacggcgctgatgggaaacttaaaaaataagccactttggtctatcaattggactaagaaacaatgattccttatagataattttcttatcgcattaaactgtacaaatactattacttgtatttaaaaataaattcgttcaaacgg

SEQ ID NO: 23520 - protein, 459 aa, DROSOPHILA
MAPKKHSGFMMFVNEWRNRNAEGRRMTLAQAVSHCGTIWEKMNTQQRGPYNSGGKDANVAQRAKRESSNGHGQVDKAQREATESLMDMKRTIERLVLNAKMSHDLENAKFVFVAFNYFTKALTTDVYVPAEFAACEYSLKEGIRSIYSTMIDPGQIIFGQGSDALLHSSTTHDLPLPPNALGEKNMTKLYRNIVDYLSKCQGKGKTLVVFTPAENITMVKSCFRYLECDDDFRDGGEKIQVFDIQYLLFILKKEVMNVADLNDEKINKFATDAFFKKDFFEFTAGIACQYHEDNDRTKYCTQSMVTRWAYTFTDFMCGDLAITVQPGKHIPAQTKPNYLIISSYASSLDHESSFDSFYSLPGSGVKKESQPEACSLSSSRLSVASSSYKPIDHTSFAANLNEVSEFPSLGMRNSSKHHGIAASAQREWNARNLPTHSRLIRKVSDNDFSVNGADGKLKK

SEQ ID NO: 23521 - DNA, 6771 bp, DROSOPHILA
acatatgaatttgtaaaaatattacacaaatatgaagccacctaataaaaagtaaatttgacaaaaaattacgaacctatgacaaaagccataacaaatagaaacaacttcattatcaaagagaataccaagaaaatgccaaactaacatacaatgtatagcaatttaaacagaaattaaagcacttatagcttagaacaagtcttaagtaataataaaattattacttggtatgaacaaaataaaaaaaactattaaaatagttccgtgttccgcacattctttcatttaaaaaaaggccgtaaaagacatatctataaactcaattaacccagataaaagtgtcccagaaaaataggaaaaaattccgcatatattcaacaataactcacacttttttctccagctgcaggtcattgaaccactcgcattatacgcggaatataattttcaatacttgcacttcctagttaacagtttggtctcaattgcactactatgctagacgactagacgagcatatatatttatatagatgggggcatctattccccggatgatatactagctattgatcgttatgactttgtttatttctttgtctctcaactttttcccaaaaaatcctcatatatcttatatctatagatcggcgaaaacgaaggcattccgaaatgcctgggatagtcaaaagtaagtcgaaagctctttttttgatccggacacgtgccgcccaaacaagtgaccagcggaggaaataggggaacggggtgtgaattgatgtacactgggaaaaactgagcagtagcttttatcaattccatttcaaaacaaatgtataattgttacaatccagttttccttcgcagttgtgaaatgtagactatttataaaatattttcaagctttcttcatagattttcgatctctaaaaatgtttgtaaaaattggaaaatctaagctaattaaaaaataaaaataattgttttgttagtgctagttaaatttggaaactagccccattggtatcaaaaacttctgaattgagtagatagtagatagcctgctctgagtttttcccagtgtattgactgatttgcccgctattttttttttcgagatgaacgtgcagtgcatcgatcgagtcggccaaccggccagccagccttacctaacatcttcttgggactggagggcgcggtgccgccttcgaatccggaatcattgctgcaggtgctcatccggatgatggacggcgagctggatgtggaggcgccaccaccactgccactaccagcactgggaacactcagtgttccggcatttgagccgctggaattggatgaatccagcaccgttgtggcattggagctaccagccttggtgaccatggccaccgcatcgagatcctcggaactggcgctgctgctggtggagctgcactcctcgccgccgctctcatcgtcgctgtcctcgtccaaggagccaccgctgccctcctcgctgccgctctcatcgtccgtattctcatccgaatagacgatcttctcgcgcttccacagtggacgcggtgtggccaccagtggatacctgggcgcctcctccttcacataacacttgttcgtcgtatcgatcttgatcttcttgtgcggatcgaatcttttcgcctcggcggcggcggcggctttcgccttttgcttctttttctccttgcgcagtttctttttcatgctggcgcttaagttcgcacaaccgtcaacactggaataatcgtcggaactgctgccgctcccgtcgtcgtcgtcgtcgtcgtcttcttggctattttccgccgacgagggtatatagtcgtctagctcggcatcaacgtctcgcagacactgtgccaaattcgatactgttgcaaactttgataaattattgccgacgccttcgccgcagctgttgttgctgctgagcgaggtagtcgcatcagcagcagcatcagtagcagcagcagcagcagcagaagcaacaacagcaacagcagcaacattaacagcagcaacaccaattgttattgttgtgggcgttgtggttgcatcgccagttgccgccggcgatgacgcatttgtggcctgttgctgctgctgccgctgctgctcctcgtgttgctgttgcaattgcaatgcttgctgcttgttcggtgatgttttggccgcctttgtgggggccagcgttataaattgatcggcattgattggggtcacattgctctcagacaaagccgtaacagcttctgttgctgttgctgctgctggtgcggcggctgctgctgctgctgctgctgctgctggcgttgcagctttctttttgccaacatttgttttgccggcactttttggctttgtcgtattcggtgattgcacctttgacttgcccgttggctcagcggcttccgtcaatttcgttttggtttccgtttgtggcaccaatgttgctgccgtgtcgatcagttgttgctgctgttgctgcgcctgttgctgttgctgctgctgctgctgctgctgttgttccttgtcagttgttttatttattttcgtttcgactgcggctgccgttgcctgttgttgttcaggtgacttggccggctgcccgctatttatttttggccctgctgtttcgttcaattttgatttgcctgttgctgttgttggtgtgtttggtgttgttggtgttgccgttggcatggctacggcgttgccagattgtttcaaccccttcggtgagattgtttttcctgcctcggcaacagttgttcctgccattgttgtcatgctgatcttggccattgttgtctttggtgctgctggtgttgacttggactcatctgttgctgccttaacttgtggtgttttttgtggtgttgttagtggtgatgttgttgatgcagctgctttagcttgtggtgttgttggcgttgcaatctttcttgttggagaatcctttgtcggtgtttctactttagcttgtggtgttgtaggtgttacaatctttcttgttggagaatcctttgttggtgtttcgacctttgcctgtggtgttgttggtgttacaatctttcttgttggagaatcctttgttggtgtttctactttagcttgtggtgttgtaggtgttacaatctttcttgttggagaatcctttgttggtgtttctactttagcttgtggtgttgtaggtgctacaatctttcttgttggtgaatcctttggtggagtttctactttagcttgtggtgttgttggtgctgctactttcatttgttcttgtggttttatttgcagtgcaattggtgtatcggactttatttgtgatgtagttgcactttcagttttttgtgatgtttcttctttggcttgtggtgtttttggtgagtccatcgttggtgttgcagttgtcgctttggttgttattgttagcttagtttcttctgccgtctttagttttggcaagtcttttttggccattgtcggtttggccttattattatcagttgcggattttaattttggagattcagcagcttttgatattacactagcaggtgctttgcttgaagtatccattgattctactttcttagcttcgacttggttagtttttacaaccgttggagtaagtggtgttgatggtaccttttgagtttccgatttgccacttgtggacacaatcgaaggtgttgtcttcagctcgatgagaatttccgatttgagcttgggagttgttggtgtctttaaatctgtctttgtttcctttggcattgctggtgatttaggcggttcctcctccaggagttgctcctgttgctcttgccgcatgttaaagacctttttgcgattggtcatgtatagcgtttccctagaaccgatctgtgaccaaaagtcctcgccgctctccgatttctgtatagccttacgaatgggcttgggcgtagccacgccctcgactttggcctcggttttaggtagttccggttgctgctgctgctgctgcacttgttgctgctgttgtatggctgcctcatcaaaggtgaaaatctgtgcctcattaacatgttgctgcttatttactttcttcaaaggcgatgtcttggttgttttgggcgcagctttcatgaatccttcgggcaaagacgaatcatcctgatccttgggcactgtctttttcttgggcagcttgaatatcttgtgtatctgatgatgctcctccacagtctctacattaacggtgaatttcggtttcggactgggagttggagtggaactcgaaccggaaccggaagtcaatggttgtattaatagggactcctcattcaactccaaaacactaggcatatgctctactggctgagcttggggagcattttccacctcaacaatggcggtgatcttatggcgcatctttttactcttcttggaccgccttttcgatctctccttcagatcttcatcgttagtggtggtactatcgtgactggatctacgttccaggtggatcaactgaaagctgccggagtttgacttctgcaacttatttaagatttcctgttcttgctcctgaataatagaggccctacgtctgagttctccggcattcagatcatcatcaattttatcggatgaaatatcctcgcaaatgtcatgaaatgttggacattggaccaaactcaaacgacgaatggtctcctgcatttcctccaattcctgttcctgtttatcggactcatcctccttttcgtcatccacttcctttttggcacttatctccacttccggagtcaaagttttatgagcactttgtggttgaacaagctcttggatttgggctctattgaaattggttagttcctccttctcatcttttatatagaatctctcgcgaagcaattcgccgggtgactttttattgctggttactggaaaggctgccaattcttcggccaacttttgacgccaactcaaactgggctcggtggcaggtggcagatccctgaattgatgctcctgcacttgctccttcttgggactctcggcactgcgatccttgctgcgtcttcgtatggtggataatctaaccaccggacgatttcttctaatggttgacctacgattgggtctggtttcggcacttgcatctgaactttcgcatggtgtttccttgggagaaggcttaacctcctcctccgcctgctccttctgttccttttgcttcacctcctccttgggctgctccttttcctgcgacttggatggcactgccctgcgatatcgcgaggagctcacatcgatatccgccgtattgatggcaatgggtctggctggtatgtaccgactactggcgcccgatgaaccataactcggtgtggtcaccgagctgctgtatttcggtgagttaatcctggtcagaggcattaggctgctatgaccactgtgccgacccgtttccgtaatcgtggtcagtttgggttgatatctggagcccaggccatggagggagctactgccgccggagctgccactggaataactgctcggtgatctcggcgaggagggactcaggggtaccatatagctggccggatatgagcgattgtagctagatgtatagctcgatcctggtgaggatcccatgcccaagttgagacccaagccggaactatagtacggcgaatacagctgactgctgccgccactatagtagtagttggttgaatccgaatacagaggcattttgcagcagtcactcactcaaacaaacaaacaaaataaacaaaaaaaaaaaaaaacaaaaaatcacaatacacgaagaaaaccttcggtttgaatttttggtttgcttattttccggcgcttttccgctgcttttagcttaattgtttccttcggttcgtttaggctctcatattttaatcgtaattacgctgtattcggatgtacacataaatatctttatctaaatggcacagtcatcgctagttttgactttaatggcgaactacttcactacaagttaataaaaataatttgcaaacaaattttataacattattaaattattgaaatattttagtgtaatgtaaaagtcaaaattgattacaaaatatatgatttgacttaagtaaactacttggaagcacactgtacttcctcattcggccatttgtgtatcattaactaaataaaccgattcgattgccgatctgttcatttccaattcgatttccggctaagccaattcgatgtcaataactcaatttaatggccattgcggcctttaacaagactaatcccacattcaattgggcaagatgataaatttagattgcgaacggacagagattcgaccataaattcgttggcacttcagtttattcagtttattcttcacaggttaacgcttgcttgaaatatgtatttttggggctgtcgttcatgtatttgcatatgtatctatcccttcgacgctgccgcagtttaattatacaatttttaaagatttcaaaccggctgtcataatgtgccagcatttggcaataccgaagtcacattaattattgcctaattggcccaaaggtttaatgccgcctgatcgaagacaaaacgaaatcagccaactttcttacagatttccgtgtacttttttaggcatttaaatacgggtaatatgctaaaatattataaaacctgtttctaaagatattttttaaaattgaaaatgtttggtaattta

SEQ ID NO: 23522 - DNA, 4638 bp, DROSOPHILA
atgcctctgtattcggattcaaccaactactactatagtggcggcagcagtcagctgtattcgccgtactatagttccggcttgggtctcaacttgggcatgggatcctcaccaggatcgagctatacatctagctacaatcgctcatatccggccagctatatggtacccctgagtccctcctcgccgagatcaccgagcagttattccagtggcagctccggcggcagtagctccctccatggcctgggctccagatatcaacccaaactgaccacgattacggaaacgggtcggcacagtggtcatagcagcctaatgcctctgaccaggattaactcaccgaaatacagcagctcggtgaccacaccgagttatggttcatcgggcgccagtagtcggtacataccagccagacccattgccatcaatacggcggatatcgatgtgagctcctcgcgatatcgcagggcagtgccatccaagtcgcaggaaaaggagcagcccaaggaggaggtgaagcaaaaggaacagaaggagcaggcggaggaggaggttaagccttctcccaaggaaacaccatgcgaaagttcagatgcaagtgccgaaaccagacccaatcgtaggtcaaccattagaagaaatcgtccggtggttagattatccaccatacgaagacgcagcaaggatcgcagtgccgagagtcccaagaaggagcaagtgcaggagcatcaattcagggatctgccacctgccaccgagcccagtttgagttggcgtcaaaagttggccgaagaattggcagcctttccagtaaccagcaataaaaagtcacccggcgaattgcttcgcgagagattctatataaaagatgagaaggaggaactaaccaatttcaatagagcccaaatccaagagcttgttcaaccacaaagtgctcataaaactttgactccggaagtggagataagtgccaaaaaggaagtggatgacgaaaaggaggatgagtccgataaacaggaacaggaattggaggaaatgcaggagaccattcgtcgtttgagtttggtccaatgtccaacatttcatgacatttgcgaggatatttcatccgataaaattgatgatgatctgaatgccggagaactcagacgtagggcctctattattcaggagcaagaacaggaaatcttaaataagttgcagaagtcaaactccggcagctttcagttgatccacctggaacgtagatccagtcacgatagtaccaccactaacgatgaagatctgaaggagagatcgaaaaggcggtccaagaagagtaaaaagatgcgccataagatcaccgccattgttgaggtggaaaatgctccccaagctcagccagtagagcatatgcctagtgttttggagttgaatgaggagtccctattaatacaaccattgacttccggttccggttcgagttccactccaactcccagtccgaaaccgaaattcaccgttaatgtagagactgtggaggagcatcatcagatacacaagatattcaagctgcccaagaaaaagacagtgcccaaggatcaggatgattcgtctttgcccgaaggattcatgaaagctgcgcccaaaacaaccaagacatcgcctttgaagaaagtaaataagcagcaacatgttaatgaggcacagattttcacctttgatgaggcagccatacaacagcagcaacaagtgcagcagcagcagcagcaaccggaactacctaaaaccgaggccaaagtcgagggcgtggctacgcccaagcccattcgtaaggctatacagaaatcggagagcggcgaggacttttggtcacagatcggttctagggaaacgctatacatgaccaatcgcaaaaaggtctttaacatgcggcaagagcaacaggagcaactcctggaggaggaaccgcctaaatcaccagcaatgccaaaggaaacaaagacagatttaaagacaccaacaactcccaagctcaaatcggaaattctcatcgagctgaagacaacaccttcgattgtgtccacaagtggcaaatcggaaactcaaaaggtaccatcaacaccacttactccaacggttgtaaaaactaaccaagtcgaagctaagaaagtagaatcaatggatacttcaagcaaagcacctgctagtgtaatatcaaaagctgctgaatctccaaaattaaaatccgcaactgataataataaggccaaaccgacaatggccaaaaaagacttgccaaaactaaagacggcagaagaaactaagctaacaataacaaccaaagcgacaactgcaacaccaacgatggactcaccaaaaacaccacaagccaaagaagaaacatcacaaaaaactgaaagtgcaactacatcacaaataaagtccgatacaccaattgcactgcaaataaaaccacaagaacaaatgaaagtagcagcaccaacaacaccacaagctaaagtagaaactccaccaaaggattcaccaacaagaaagattgtagcacctacaacaccacaagctaaagtagaaacaccaacaaaggattctccaacaagaaagattgtaacacctacaacaccacaagctaaagtagaaacaccaacaaaggattctccaacaagaaagattgtaacaccaacaacaccacaggcaaaggtcgaaacaccaacaaaggattctccaacaagaaagattgtaacacctacaacaccacaagctaaagtagaaacaccgacaaaggattctccaacaagaaagattgcaacgccaacaacaccacaagctaaagcagctgcatcaacaacatcaccactaacaacaccacaaaaaacaccacaagttaaggcagcaacagatgagtccaagtcaacaccagcagcaccaaagacaacaatggccaagatcagcatgacaacaatggcaggaacaactgttgccgaggcaggaaaaacaatctcaccgaaggggttgaaacaatctggcaacgccgtagccatgccaacggcaacaccaacaacaccaaacacaccaacaacagcaacaggcaaatcaaaattgaacgaaacagcagggccaaaaataaatagcgggcagccggccaagtcacctgaacaacaacaggcaacggcagccgcagtcgaaacgaaaataaataaaacaactgacaaggaacaacagcagcagcagcagcagcagcaacagcaacaggcgcagcaacagcagcaacaactgatcgacacggcagcaacattggtgccacaaacggaaaccaaaacgaaattgacggaagccgctgagccaacgggcaagtcaaaggtgcaatcaccgaatacgacaaagccaaaaagtgccggcaaaacaaatgttggcaaaaagaaagctgcaacgccagcagcagcagcagcagcagcagcagccgccgcaccagcagcagcaacagcaacagaagctgttacggctttgtctgagagcaatgtgaccccaatcaatgccgatcaatttataacgctggcccccacaaaggcggccaaaacatcaccgaacaagcagcaagcattgcaattgcaacagcaacacgaggagcagcagcggcagcagcagcaacaggccacaaatgcgtcatcgccggcggcaactggcgatgcaaccacaacgcccacaacaataacaattggtgttgctgctgttaatgttgctgctgttgctgttgttgcttctgctgctgctgctgctgctactgatgctgctgctgatgcgactacctcgctcagcagcaacaacagctgcggcgaaggcgtcggcaataatttatcaaagtttgcaacagtatcgaatttggcacagtgtctgcgagacgttgatgccgagctagacgactatataccctcgtcggcggaaaatagccaagaagacgacgacgacgacgacgacgggagcggcagcagttccgacgattattccagtgttgacggttgtgcgaacttaagcgccagcatgaaaaagaaactgcgcaaggagaaaaagaagcaaaaggcgaaagccgccgccgccgccgaggcgaaaagattcgatccgcacaagaagatcaagatcgatacgacgaacaagtgttatgtgaaggaggaggcgcccaggtatccactggtggccacaccgcgtccactgtggaagcgcgagaagatcgtctattcggatgagaatacggacgatgagagcggcagcgaggagggcagcggtggctccttggacgaggacagcgacgatgagagcggcggcgaggagtgcagctccaccagcagcagcgccagttccgaggatctcgatgcggtggccatggtcaccaaggctggtagctccaatgccacaacggtgctggattcatccaattccagcggctcaaatgccggaacactgagtgttcccagtgctggtagtggcagtggtggtggcgcctccacatccagctcgccgtccatcatccggatgagcacctgcagcaatgattccggattcgaaggcggcaccgcgccctccagtcccaagaagatgttagaagtttttgataccaatggggctagtttccaaatttaa

SEQ ID NO: 23523 - protein, 1545 aa, DROSOPHILA
MPLYSDSTNYYYSGGSSQLYSPYYSSGLGLNLGMGSSPGSSYTSSYNRSYPASYMVPLSPSSPRSPSSYSSGSSGGSSSLHGLGSRYQPKLTTITETGRHSGHSSLMPLTRINSPKYSSSVTTPSYGSSGASSRYIPARPIAINTADIDVSSSRYRRAVPSKSQEKEQPKEEVKQKEQKEQAEEEVKPSPKETPCESSDASAETRPNRRSTIRRNRPVVRLSTIRRRSKDRSAESPKKEQVQEHQFRDLPPATEPSLSWRQKLAEELAAFPVTSNKKSPGELLRERFYIKDEKEELTNFNRAQIQELVQPQSAHKTLTPEVEISAKKEVDDEKEDESDKQEQELEEMQETIRRLSLVQCPTFHDICEDISSDKIDDDLNAGELRRRASIIQEQEQEILNKLQKSNSGSFQLIHLERRSSHDSTTTNDEDLKERSKRRSKKSKKMRHKITAIVEVENAPQAQPVEHMPSVLELNEESLLIQPLTSGSGSSSTPTPSPKPKFTVNVETVEEHHQIHKIFKLPKKKTVPKDQDDSSLPEGFMKAAPKTTKTSPLKKVNKQQHVNEAQIFTFDEAAIQQQQQVQQQQQQPELPKTEAKVEGVATPKPIRKAIQKSESGEDFWSQIGSRETLYMTNRKKVFNMRQEQQEQLLEEEPPKSPAMPKETKTDLKTPTTPKLKSEILIELKTTPSIVSTSGKSETQKVPSTPLTPTVVKTNQVEAKKVESMDTSSKAPASVISKAAESPKLKSATDNNKAKPTMAKKDLPKLKTAEETKLTITTKATTATPTMDSPKTPQAKEETSQKTESATTSQIKSDTPIALQIKPQEQMKVAAPTTPQAKVETPPKDSPTRKIVAPTTPQAKVETPTKDSPTRKIVTPTTPQAKVETPTKDSPTRKIVTPTTPQAKVETPTKDSPTRKIVTPTTPQAKVETPTKDSPTRKIATPTTPQAKAAASTTSPLTTPQKTPQVKAATDESKSTPAAPKTTMAKISMTTMAGTTVAEAGKTISPKGLKQSGNAVAMPTATPTTPNTPTTATGKSKLNETAGPKINSGQPAKSPEQQQATAAAVETKINKTTDKEQQQQQQQQQQQQAQQQQQQLIDTAATLVPQTETKTKLTEAAEPTGKSKVQSPNTTKPKSAGKTNVGKKKAATPAAAAAAAAAAAPAAATATEAVTALSESNVTPINADQFITLAPTKAAKTSPNKQQALQLQQQHEEQQRQQQQQATNASSPAATGDATTTPTTITIGVAAVNVAAVAVVASAAAAAATDAAADATTSLSSNNSCGEGVGNNLSKFATVSNLAQCLRDVDAELDDYIPSSAENSQEDDDDDDDGSGSSSDDYSSVDGCANLSASMKKKLRKEKKKQKAKAAAAAEAKRFDPHKKIKIDTTNKCYVKEEAPRYPLVATPRPLWKREKIVYSDENTDDESGSEEGSGGSLDEDSDDESGGEECSSTSSSASSEDLDAVAMVTKAGSSNATTVLDSSNSSGSNAGTLSVPSAGSGSGGGASTSSSPSIIRMSTCSNDSGFEGGTAPSSPKKMLEVFDTNGASFQI

SEQ ID NO: 23524 - DNA, 2697 bp, DROSOPHILA
gaacgacagcgaaaatcacacacaaaaagcgaaaataaagaagtgaatacataacagcagttttgtaatgctaaataggcggggttatgggggtgggtaagggttaaggcggcggcggtcgctggatgagggtaggggccgttgaagtctttcgtattcggggcacaaaactcgacgactgtgtagttttcggggtcttgcaaccgattgttagtaattaatgaaccagcaccacagcactcatatacgtaaagcaatccattatacacatatgctacacatttggcccaggggctccacattcaacaccaacaccaaagccccaccgggcgtggacttaccttcgcaaaaagcaggagtcgctaggctaagggccttcgatccacaggaaacttagcatcaccccgaatgggacacacctggacttcctatgcattccgcgtccgactatgagttcgcttcttatttgtttttaatttcgacaccacgagctgtgtgtacatactttttgcaatccgctaggtggcagtccgactggctcctcaaggtgtatccatcgtgctgcctgcggcttaacctttgtgggactttgcgggtttgccgattctaagccaatactgcgttttgtccagcaaaataaataacagttttcggtggtttttcgatgttgttcttaatgttagtgatgtgtattcaccgatagacggtcacactgggactctctgtctgcgcggccacagatgggagcgtgatgcacagtcactagttagagaaaatccaataacgtgtaggttgcggcgcaataagttataaataagttaaaaatcacattgcgcagtatcactgcaatatttattgaaatttcagtaagaacaaagtgaggcacactttgttgaacgtgacttcttttacacactgaaatcacagcctgctgaacgtgaccactttgctcactgaaatcgcagacgtgtggcaacactcaagccgccagaaagatctggcatctctcatacttaacacgcgcatgcaaaatatttaagaaataaatattagtcgctaacagtttaaatataataaaattctgctgatataaacccagttcataaaagaacacgcatttacctccgcatataagatcaaatacgtataaaatctaattagccgactcaaggtaaggcgtgcgtttttggagctccactaaactgacttcaaagcaataactcatcaaatactacatttcagttaaaatggctggagtactctttgaggacatcttcaacgtaaaggacatggatccggagggcaaaaagttcgaccgtgtatcccgcctgcactgcgagtccgagtcgtttaagatggacctcatcctggacatcaactcgtggctataccccatggagctgggcgacaagttccgcctggttttggccaccaccctgcgcgaggatggttgcccggacagcggggagtacaatccaatggagcacgagggaacgcgggcggacagctttgagtacgtgatgtacggcaagatctacaggatcgagggcgacgaagcacacaatgaggcctcccggctctccgcctacgtgtcattcggcggcttgctgatgcgacttcagggtgacgccaacaatcttcatggcttcgaggtggaccagcacatgtacctgctgatgaagcggctggccttctgaattttctacctaattattttcgatcgcaaattagacatagacaacaaactttatttacagtgtattcatgacattgcttggagtgctgaaagaagtagtctattgcctggatgggcgtctgaaaggcgcattgactatcaggcgagatggccgtgggcgaaaaggaatgtggcgatccacgaagggcaaagcctgcggagtcgatgggaacactggagtaggcctaatagcattcacaatcttgaccgcatctggccgacgacgaaccgtaagcttagccggccgtcgctgcggagtccgcagaaccggacgctgcgggcggaaggcagaaagtcggttcagaagcggcagaacatactgagcctggggtggtagcggcagacttgccaaattaattatagctgcgctttgtggcaatgtgttggagctgtcatcattggctggctggtctggaggtccgtaggtctgatcgggaggtccataaatttggtccggtgggccgtagacctcagctggcgcttccaccaaagacggtggtccgtatgtttcaggtggagggccatatgtatcctccggttgaggaaattcaaccgcctcctccgttggcaggtcgaatggcggatcggggaccaggcctgctggtggatatggggcttgttcctgtctttgcagaaaccttcccgccgcgggtcctgggaacctcagatgactgccttcaattccattcaggcaaagaatggaacaaagcgcaaaggtgaccagagaagcacttggataaccggacattgtggtgtgctgacatgaactgctgcatgggcggctaagtggcgcctataaataccccctaggaatgcccttgggaactgcccaattcaaacgcccgaagaaacctcgaggccgatgacttataagccaggtccaacgatacgtgcccatggaggtggtgactaaggcgcgtgtaagtactggctgttatgaaaatgtgtggttagatttcttt

SEQ ID NO: 23525 - DNA, 621 bp, DROSOPHILA
gcatctctcatacttaacacgcgcatgcaaaatatttaagaaataaatattagtcgctaacagtttaaatataataaaattctgctgatataaacccagttcataaaagaacacgcatttacctccgcatataagatcaaatacgtataaaatctaattagccgactcaagatggctggagtactctttgaggacatcttcaacgtaaaggacatggatccggagggcaaaaagttcgaccgtgtatcccgcctgcactgcgagtccgagtcgtttaagatggacctcatcctggacatcaactcgtggctataccccatggagctgggcgacaagttccgcctggttttggccaccaccctgcgcgaggatggttgcccggacagcggggagtacaatccaatggagcacgagggaacgcgggcggacagctttgagtacgtgatgtacggcaagatctacaggatcgagggcgacgaagcacacaatgaggcctcccggctctccgcctacgtgtcattcggcggcttgctgatgcgacttcagggtgacgccaacaatcttcatggcttcgaggtggaccagcacatgtacctgctgatgaagcggctggccttctga

SEQ ID NO: 23526 - protein, 149 aa, DROSOPHILA
MAGVLFEDIFNVKDMDPEGKKFDRVSRLHCESESFKMDLILDINSWLYPMELGDKFRLVLATTLREDGCPDSGEYNPMEHEGTRADSFEYVMYGKIYRIEGDEAHNEASRLSAYVSFGGLLMRLQGDANNLHGFEVDQHMYLLMKRLAF

SEQ ID NO: 23527 - DNA, 4000 bp, DROSOPHILA
tcccagctgcgcagcatccgtttctaataaagaattctttggcagcggcactcagccgttcttgtaaacatcctaaaacctgacataagccgatttgactgctctctttgaaccttctccttatcttaagaacccaagagcgaggctctcccgagatacaaatattgttcaaataatgagggttctctcaattcaatttgcatttgatttttactcttaaaaaaactaaaacgttaaaactatttctccgatcattttttatttcttagcgttgtccttagtcaactgacggggcatttattcgactcaaataaaaaatataacaactaattttactatatatatgtatatattttactgtatatcggaaacgcttccttctgtcttttacatatgtacatttcaacgaatctagtatacccttttactctacggttaacgggtataataagttctttctaaatgattatgcttatcattttaacaacaacattttaaccaaaaacggtgtgatgaccaaaccattttcatattcagcatgaatttaccgattcagacaaatcgttcatacatacaaacaatattattactttaccattaaacaaaccatttccaagaaagaatttttcatagacctaaagcacatcgactttgtgggtggatatacatacatatgtacaatttttcgactcaactgtttacactgtagttttacgaaagagaatttcgatttaaaaaatttttagttttcgatggtcgaccatttgatttataaataagcagtattatctttaattaggctgcttttaactgcaagtgcagtttattcatacgattacaaagcatgacgatagatgattatgctattaggtttgattaaaccatttttatgaaatataaattattatattataaatataaattaattataaatttacaaactcttattccattccagaatcgatagttctggaatgatactagtgctcagcaacgccaaaacagtcaataatagatatttgaagtgtcagcggaatcgacgtctgacaaaacaactgcttcacttcattagaattgtgtgatatattccacagaccagatcattggaagagaagtcaatcgtgcgtgagagaagccagaagagaagccacccgcgacattccgaagtaaccatttctgtagggtcagacgtacatacaaacaacattcatataaattgctcgtgctgttcattggttaccgcctttagtcgctacctcgctcgcacacgcgctcaacacctacccttacccgtcaaaaataccgaccttcttcttgccacgcccgtaaagatggctcctaagaagcatagtgggtttatgatgttcgtaaacgagtggagaaaccggaacgccgagggccgacgcatgacgctggcgcaggctgtttcccactgcggcaccatatgggaggtaagttttggtcgatgctgcggatctaccctgtaataaatgaagccttttcagaaaatgaacacccagcagcgtggtccgtacaactcaggcggcaaggacgcaaatgtggcgcaacgcgccaaaagggaaagttccaacggccacggccaggtggacaaggcccaaagggaggccaccgagagcttgatggacatgaaacgtaccatcgagcgcctcgtgctaaacgccaagatgtcccatggtaagtcacacatttcgaagacatttggattcgactaactccaatcgctgccgcagatctggagaatgccaagtttgtcttcgttgccttcaactacttcactaaagccttgaccaccgacgtctatgtgcccgccgagtttgcggcatgcgaatattcgttgaaggagggaatccgatccatctacagcaccatgattgaccccggtcagatcatttttgggcaaggtagcgatgccctgcttcactcttcaaccactcacgacctgccgctgccgcccaacgcgctgggggagaagaacatgaccaagctgtaccgcaacattgttgactacttatccaaatgccagggaaaaggcaagaccctagtagtctttacacccgccgaaaatattaccatggtgaagtcatgcttccgctatttggagtgcgatgatgacttcagggacgggggcgaaaaaatccaggtgtttgatatccagtacttgctattcatattgaagaaggaggtcatgaatgtcgctgatttgaatgacgagaaaatcaacaaattcgcgacggatgctttttttaagaaagactttttcgagtttaccgcagggattgcgtgtcaggtaagattctgttcccaattctgataacccctagttgacttccttcctgattacttttgcagtaccacgaggataatgatcgaaccaagtactgtacccagagtatggtgactagatgggcgtataccttcactgattttatgtgcggagacctggccataaccgtccaacccggaaagcacatacctgcccaaacaaaacccaactaccttatcataagctcgtacgcctcctcactcgaccacgagtcctccttcgactctttttattcgcttcccggatctggggtcaagaaggaaagccaacccgaagcttgttcgctttctagcagtcgactttccgtcgcatcaagctcctacaagcccatagaccacacttcctttgccgcaaatttaaacgaagtttctgaattccccagcctcggcatgcgtaattctagtaagcatcacggtatcgccgctagtgctcagcgggaatggaacgctaggaacttaccgacgcactcgcgtttaattcggaaggtttcagacaacgacttctccgtaaacggcgctgatgggaaacttaaaaaataagccactttggtctatcaattggactaagaaacaatgattccttatagataattttcttatcgcattaaactgtacaaatactattacttgtatttaaaaataaattcgttcaaacggacagggccagcatcaagtatttatttattttagttctgctaaataaatatttttaagacctaatatgtgggcagtaatgaaagaaagacatgatatttttgatggcgacaaattctaattagctaagtggggccaagctcaaaataatctatgtttatggtattccatggaaatgcagttgtgccattagaaactgctcctattaaaacccctgttaaatattgtgcataaaattgttcaacgggtcattataatacaaagtgcaaaggccaaaaagagtcgagttcatattcttacacttgtagctttttaagtggctcgacttggagaggagtttttagagttgcgagatacagatgcaatgctttgcggatcttgctgaagcacgagacgagtaaaggctaagctgaggagaagtgcctggcctagaagctcgcgctggtagcgctcttgttgtgagaattcgaggcgtaggtcagcgggaaagtcgatctgtttgtgcagcttcaacgggggctctgtttcggggatctgatgttccacgttgtaatgggttcgcatcatggccaatatcgtatcctcggacgacacgcgctcagtacccaccatgtgattaaatagtcgggctgagagaaaacgtcgcatgtagtagacgttgttcgtcttgttctcgtcgccatctgatcgggccatcaaggagaagctcatgattgcggaaacctgggccttctggatgttcacgttctgttgatcgatgctccctgggttgctgctggcctgggccatttgtggactctccatgacgtagcaatcggccacgggtatctggtgagatacatagaggcatcggcgggaaagttctgacaaatgcagcttcttgtcgttcagctcatggtgctgccagtgcgtgagcagacagggagcttcgttgcttccgatctttaatcgcgcccagcttacactggtcactccgatgcgcacccctacagcagatacaata

SEQ ID NO: 23528 - DNA, 1828 bp, DROSOPHILA
aacagtcaataatagatatttgaagtgtcagcggaatcgacgtctgacaaaacaactgcttcacttcattagaattgtgtgatatattccacagaccagatcattggaagagaagtcaatcgtgcgtgagagaagccagaagagaagccacccgcgacattccgaagtaaccatttctgtagggtcagacgtacatacaaacaacattcatataaattgctcgtgctgttcattggttaccgcctttagtcgctacctcgctcgcacacgcgctcaacacctacccttacccgtcaaaaataccgaccttcttcttgccacgcccgtaaagatggctcctaagaagcatagtgggtttatgatgttcgtaaacgagtggagaaaccggaacgccgagggccgacgcatgacgctggcgcaggctgtttcccactgcggcaccatatgggagaaaatgaacacccagcagcgtggtccgtacaactcaggcggcaaggacgcaaatgtggcgcaacgcgccaaaagggaaagttccaacggccacggccaggtggacaaggcccaaagggaggccaccgagagcttgatggacatgaaacgtaccatcgagcgcctcgtgctaaacgccaagatgtcccatgatctggagaatgccaagtttgtcttcgttgccttcaactacttcactaaagccttgaccaccgacgtctatgtgcccgccgagtttgcggcatgcgaatattcgttgaaggagggaatccgatccatctacagcaccatgattgaccccggtcagatcatttttgggcaaggtagcgatgccctgcttcactcttcaaccactcacgacctgccgctgccgcccaacgcgctgggggagaagaacatgaccaagctgtaccgcaacattgttgactacttatccaaatgccagggaaaaggcaagaccctagtagtctttacacccgccgaaaatattaccatggtgaagtcatgcttccgctatttggagtgcgatgatgacttcagggacgggggcgaaaaaatccaggtgtttgatatccagtacttgctattcatattgaagaaggaggtcatgaatgtcgctgatttgaatgacgagaaaatcaacaaattcgcgacggatgctttttttaagaaagactttttcgagtttaccgcagggattgcgtgtcagtaccacgaggataatgatcgaaccaagtactgtacccagagtatggtgactagatgggcgtataccttcactgattttatgtgcggagacctggccataaccgtccaacccggaaagcacatacctgcccaaacaaaacccaactaccttatcataagctcgtacgcctcctcactcgaccacgagtcctccttcgactctttttattcgcttcccggatctggggtcaagaaggaaagccaacccgaagcttgttcgctttctagcagtcgactttccgtcgcatcaagctcctacaagcccatagaccacacttcctttgccgcaaatttaaacgaagtttctgaattccccagcctcggcatgcgtaattctagtaagcatcacggtatcgccgctagtgctcagcgggaatggaacgctaggaacttaccgacgcactcgcgtttaattcggaaggtttcagacaacgacttctccgtaaacggcgctgatgggaaacttaaaaaataagccactttggtctatcaattggactaagaaacaatgattccttatagataattttcttatcgcattaaactgtacaaatactattacttgtatttaaaaataaattcgttcaaacgg

SEQ ID NO: 23529 - protein, 459 aa, DROSOPHILA; identical to SEQ ID NO: 23520

SEQ ID NO: 23530 - DNA, 5716 bp, DROSOPHILA
gcagaaaattgattgattcaagccgtgtcgcttcctaagatgctagtcgagatcctcaacttccagacaccagctacagcaagatcgaaagttgactgaaataatatgtaaggcctttgccatttgttgtagacggccaaaatccttttggaataaacatagaaactttcaataataataataaaaaccaaaattattaaattaatattaatatattcaaaagtgtgggagcagctttgtgggatagtggacgtgctcactcttagttaagggaatgtgttctttttatcattcgttctcataaactttctctaactcttacgtaagctcgcagacttacgaaatcttaaaaataagcgaaaataatacttgctgcaaattgtttcatgattaaaaagtccgaaaaactaatatccagtgttgggttgtagtcacaaataatatttattattcatttcattttttcacttgcgtattttgatttgcatttcagttgtacacttcagattttgcacttttgttggaaaagacaaatggcaactaaatgcattaagcttattaattttacaagcatggccacaatgagttgtattgtacttgagctgttatagattcactccgggacaatctgttgctctggcaagactaagcatacaaaaatatttcaggtttcaatcgtgttatgcctattattttataaattattgcatcgaaattcgttcttaaactaatttcctttaatagggaaattattatgacaacactaactcatacattcttcaaattatactttttggtagcagcaaaattgggattaagggtagtaattcattaaaatgacctgtactacaaagtatatatctttgggataaattatttggttgggtttcgttctgcaactttgggttactaaacactaaactaaatggcaagaactagttctacaaatccttcttctatggcacactcgcatttggcgttggctatcaactcctggattctacttctgtttcatatacatggtagcaattttctcaagaatcgtgtctatagacaacaattcgtcgctgaatttctgcatagtgggggctggcacaatccacttaagaaattcctccacatttagccggagtctggccaatggggtcatcgtggcgtcgtcatgggattgtcgctgagccagcttcaaggatgcaatgataacgttatcgattagacgcttctcgtagcccaactggcgcagcttttgagcggagctaattttcttcagtaccactgccatgttaaatcttaagacagagagaatttgcgcatcttcagactgattgccactgggtttgtccccgtcaactggacacttggcgcagtgctcaacatgcgactgcagctccaccttgatcttaaagaaatcgtggcagccttcgcacatgtagggcttttgctgtttgtgtatcttcttcatgtggttctttaggtgcgccagctgagaaaaggctacttcgtcttcgcacagctggcagcgaaagggtttttcccccgtatgctttcggatgtgcagttttagtacgcttgaatgggcaaaggtctggtggcagatctgatggaagtagaaacataatttacggctgcatgcaagctaacaccctttcaacttaccctacactgataggggcgctctcccgtgtgcattcgcatatggacattgtactggcttttctgggtgaaatatgtgttgcacacctcgcagacgtgggtcttaacagcggtgtgcctctgcatgtgagtggccaaatcctcgtccggctcgatcatcttatggcatatctcgcactcaaattgcgtcagcttgtggtgctcctggtttatgtgcgctcgcagggccagctcgttggcgaattggttctcacagatgctgcaccggtgctccatgccctgctcgtgtcgctccatgtgcacccgtaaattggcgttggttgagaagctggccgagcacttagtgcagttgaactgctggatactcgtcttgtggtgagaaaccatgtgctgttgcagctgcaatataaatgataatatatattaggaacaccaatggttaagacctataaaaacaaaagcctaatagaaagttcattattaaatacacttatttatatttaattattataataaatattattatttaagtttataataaatcaaattatgagaaaaatataaaattaattgttaaatctcagttaaaaatggaatgtcgtattactcacttgacctcctcgggcgaattttttgtcgcagaggtcgcaaggatagggcttctcgccagagtggaggcgcatgtggagccgcaggcgctccttgagggcgaatgattttgggcactgggaacaaacgaactgtttccgatgctcgtgggcggtggtgatatgatttttcaggttgaccgcctggcggtagctcttgccacaatccttgcacttgtgcggtcgttcgtccgagtggataagcatgtggcgctgcagatccgtcttgccaccgaactctttggagcattgactgcagacatggtgcttgcgtttcaccggttcgccctttcgggcagacttcttaagctgcggttgcacgtaatcatcatcctttgagtcctgctctccgccgtcgtcctcctcctcgtccacacaagcatcgcgcagacttgccaagctgctcttcctccttttgatcgcaagcgtagggcctggtgaggattccctcgccgccggcggcgaagacagcgatatgccgctgtctgtgagcagagagacggcatcctccttggacacactacgacggctgcgtaccatttgtttggtttttattatttggattcgtaactaaatttctggggaccgcttcctgggaaacaccggcacctgctgcgtttgtctttacttctagggttaatgttctacgtatgtaatttagggtattcgtattttttggttcgattgctacttctaggatagttcccattcacctttggtttggattagttcagatgggctgcaaaaaaagttaagagctgttttaattctccactcgccgagcgccacgttccgaagcagacggagaatcaaaaacacagacagaaatagtaaccgcaagtgaagccgaaacagaaacaagaagagaaacagcaacggaacagaaactccagctgtgtcaacagtgataagacctatgcacaggaaaaatattaccaaaattggtggatttgcatatttaggggcttcgaaaagcatggcactttttacgttaatgcaatagttcttactatttttgcagtgttgtcgaaatcacttgagatttttagacgttgtttatcataattaattaattaattgcaattcattggctatccaattagaaaatatattcgtttctttacaaatctagttaacaacggaaggttgtggactgtttttcacggtgtacagagctaggagcccaagtcttgaagtgggtcgcattatcaattgacatttccagcgaacgtaagcttccaaaaaaaattcttagtttgttgtcttaatcttttgtttgggcgggagcgagatggagaaaccgcctgataagatcccgaggaaggcaacaactgataagcaatccaccgctttcactaaaatcacggtagagctataaaaagatatcgagataaagctgtgcaacctgagcgttttcgatcccgcggcgtctgttctccgaggcggcggagtttccaatgaaaagcgagaacactgaaaatgcaactgcaagagagcgattacgatgaccctgggctgggacgaacatctggcaagcagattgggaaccctccgattccgattccagtgccaagcaaccccctccccctgcggagggttaatggttcattagagccgcacccgcagaagctgaaaactaactcactttagcagcacaacggccctcgaccaaactgttgaaaaagcgaatttaagctagaatccgcagctgggaatcgaaattgaaagagaacagggcaaaaagcacgaacgacagcgaaaatcacacacaaaaagcgaaaataaagaagtgaatacataacagcagttttgtaatgctaaataggcggggttatgggggtgggtaagggttaaggcggcggcggtcgctggatgagggtaggggccgttgaagtctttcgtattcggggcacaaaactcgacgactgtgtagttttcggggtcttgcaaccgattgttagtaattaatgaaccagcaccacagcactcatatacgtaaagcaatccattatacacatatgctacacatttggcccaggggctccacattcaacaccaacaccaaagccccaccgggcgtggacttaccttcgcaaaaagcaggagtcgctaggctaagggccttcgatccacaggaaacttagcatcaccccgaatgggacacacctggacttcctatgcattccgcgtccgactatgagttcgcttcttatttgtttttaatttcgacaccacgagctgtgtgtacatactttttgcaatccgctaggtggcagtccgactggctcctcaaggtgtatccatcgtgctgcctgcggcttaacctttgtgggactttgcgggtttgccgattctaagccaatactgcgttttgtccagcaaaataaataacagttttcggtggtttttcgatgttgttcttaatgttagtgatgtgtattcaccgatagacggtcacactgggactctctgtctgcgcggccacagatgggagcgtgatgcacagtcactagttagagaaaatccaataacgtgtaggttgcggcgcaataagttataaataagttaaaaatcacattgcgcagtatcactgcaatatttattgaaatttcagtaagaacaaagtgaggcacactttgttgaacgtgacttcttttacacactgaaatcacagcctgctgaacgtgaccactttgctcactgaaatcgcagacgtgtggcaacactcaagccgccagaaagatctggcatctctcatacttaacacgcgcatgcaaaatatttaagaaataaatattagtcgctaacagtttaaatataataaaattctgctgatataaacccagttcataaaagaacacgcatttacctccgcatataagatcaaatacgtataaaatctaattagccgactcaaggtaaggcgtgcgtttttggagctccactaaactgacttcaaagcaataactcatcaaatactacatttcagttaaaatggctggagtactctttgaggacatcttcaacgtaaaggacatggatccggagggcaaaaagttcgaccgtgtatcccgcctgcactgcgagtccgagtcgtttaagatggacctcatcctggacatcaactcgtggctataccccatggagctgggcgacaagttccgcctggttttggccaccaccctgcgcgaggatggttgcccggacagcggggagtacaatccaatggagcacgagggaacgcgggcggacagctttgagtacgtgatgtacggcaagatctacaggatcgagggcgacgaagcacacaatgaggcctcccggctctccgcctacgtgtcattcggcggcttgctgatgcgacttcagggtgacgccaacaatcttcatggcttcgaggtggaccagcacatgta

SEQ ID NO: 23531 - DNA, 2038 bp, DROSOPHILA
aacatcgaaaaaccaccgaaaactgttatttattttgctggacaaaacgcagtattggcttagaatcggcaaacccgcaaagtcccacaaaggttaagccgcaggcagcacgatggatacaccttgaggagccagtcggactgccacctagcggattgcaaaaatcggacgcggaatgcataggaagtccaggtgtgtcccattcggggtgatgctaagtttcctgtggatcgaaggcccttagcctagcgactcctgctttttgcgaagcccatctgaactaatccaaaccaaaggtgaatgggaactatcctagaagtagcaatcgaaccaaaaaatacgaataccctaaattacatacgtagaacattaaccctagaagtaaagacaaacgcagcaggtgccggtgtttcccaggaagcggtccccagaaatttagttacgaatccaaataataaaaaccaaacaaatggtacgcagccgtcgtagtgtgtccaaggaggatgccgtctctctgctcacagacagcggcatatcgctgtcttcgccgccggcggcgagggaatcctcaccaggccctacgcttgcgatcaaaaggaggaagagcagcttggcaagtctgcgcgatgcttgtgtggacgaggaggaggacgacggcggagagcaggactcaaaggatgatgattacgtgcaaccgcagcttaagaagtctgcccgaaagggcgaaccggtgaaacgcaagcaccatgtctgcagtcaatgctccaaagagttcggtggcaagacggatctgcagcgccacatgcttatccactcggacgaacgaccgcacaagtgcaaggattgtggcaagagctaccgccaggcggtcaacctgaaaaatcatatcaccaccgcccacgagcatcggaaacagttcgtttgttcccagtgcccaaaatcattcgccctcaaggagcgcctgcggctccacatgcgcctccactctggcgagaagccctatccttgcgacctctgcgacaaaaaattcgcccgaggaggtcaactgcaacagcacatggtttctcaccacaagacgagtatccagcagttcaactgcactaagtgctcggccagcttctcaaccaacgccaatttacgggtgcacatggagcgacacgagcagggcatggagcaccggtgcagcatctgtgagaaccaattcgccaacgagctggccctgcgagcgcacataaaccaggagcaccacaagctgacgcaatttgagtgcgagatatgccataagatgatcgagccggacgaggatttggccactcacatgcagaggcacaccgctgttaagacccacgtctgcgaggtgtgcaacacatatttcacccagaaaagccagtacaatgtccatatgcgaatgcacacgggagagcgcccctatcagtgtaggatctgccaccagacctttgcccattcaagcgtactaaaactgcacatccgaaagcatacgggggaaaaaccctttcgctgccagctgtgcgaagacgaagtagccttttctcagctggcgcacctaaagaaccacatgaagaagatacacaaacagcaaaagccctacatgtgcgaaggctgccacgatttctttaagatcaaggtggagctgcagtcgcatgttgagcactgcgccaagtgtccagttgacggggacaaacccagtggcaatcagtctgaagatgcgcaaattctctctgtcttaagatttaacatggcagtggtactgaagaaaattagctccgctcaaaagctgcgccagttgggctacgagaagcgtctaatcgataacgttatcattgcatccttgaagctggctcagcgacaatcccatgacgacgccacgatgaccccattggccagactccggctaaatgtggaggaatttcttaagtggattgtgccagcccccactatgcagaaattcagcgacgaattgttgtctatagacacgattcttgagaaaattgctaccatgtatatgaaacagaagtag

SEQ ID NO: 23532 - protein, 522 aa, DROSOPHILA; identical to SEQ ID NO: 15885

SEQ ID NO: 23533 - DNA, 4813 bp, DROSOPHILA
aattcgagagggtcgaaaccgagggtttgccacgcatgtggatgacccacatcccggccagatcccgtggcttggcgctgcacagagccattggtgaggactacgaatagttcctgactgccggagcagaagtccatatccacaacatcggtacgcaggagttgaagatccatgtgttcgcggttggcctgcagcttggcggagtagagggcgtggtcagtggtcagaaggagcagttccccgccggcattgctgcaaatccgggatgcgggaaaccgctgcaggggcggcaatccgcgccagtgaagctgtagctccctgccttcatgatagatggtgaaggactcccgctcctcctgacccccaagtgccgagtcatccgctgcactggccatgatgtgcaaatttttgttggggttttggacagggccaaagctttgtaacacgacgcaattgctcgatttgtctgcaggtcgttctcacatcgtgcacgtgctccggtccacgctaggcactactggcaccaacgaacatcatataacttgattcggaatgcaactctagctgccacgataaaataaattctgttttcacttgttcttaactggctaataagaattcatgtttttgtgatggttttttggattagtgtgaccagcgctatcgagtcccaatgagaatttattaagtaagggtgttcgggtaaaagtgacgttctaaaattgggcttatcactatttatttggtccatgcaaattgttgttttataaccaattttgaaaacacacataataccttatacgtaaactcaatattgtagttagctagaactcttatataaatttaaataactccttagttgcattcgccataatcatggaaccagtcaacacaaaaaagttattttggtatttttttgcgatacatcaatttgttttaatatggtcatattgtttttgccatcagctgttcgactcaaaagtttttgcatgttttgtttatttcgcttaaaatgtagttttatcgttaattaggaaaagttacccacggtaaaaaaaaacaaccgtcaacaattgttcagaaacatcaactagtacgactcagtggacacctccgtgtggtactgctggtttgcatacgcccacaaaagttgttttaagccacaaactcaccctcctaaaataaaattttttcagctcggttatggatttggactgcgagggcgctacagctttggctgacgactcagggcactttagctgcactagcgatgatggagtaggagatcctgctcagaaaccggcgccgcagcctgaaccggaccaatcgatttttctggtgcggcaagagctgcttcggacgcgcagtgaggtgcaaaggctcttaaaatcggagcagtggtacaagcaggagcttaagtcccagaagcacagcaggctacagacgctagaacgattgtacgcacaggaacggaagtatttgatggagaaccagaagctgcagcaagaatcgatccgcctgcacacacaatgcgccactctggagaagcagcaggagcagggctcaccattttcccctggctcatcgccgtttaaagcagactcggagtcacacgactcctcttttgaggccaaacagcaggaggcgcgcctacgggatcagcgtcagttgatcgacgtgctccgaaggcaaaagaagatgcttctggacgacatccagaggatcagtctggaacacgatgaaaaactttcgcagttgcagcaaactgttgtcggcatggagctggagagcaagcacgtgactggaaaatgcaagcaactacttgaccttaaaagtcaaatggagcaccagctagagctaagaagcactaccctacgcagtgtcaccgcggagcgtgatcagctgcgccaagtcattgctgagcttaacgagacgctgcaaacgcaggagcatctgttagcgctaaaggaacaggagttcctggatttgaaacagtactaccaacaaaagctgaaacgggagagtagcatggaaattatgcactcttatagcatgaaatttcacgaagagatcaacagaaaaacgagtgaaattgccagccttaagaattctcttaacgagcttcaggccgagctgatgctgatgtctcacatgaaagagcaatgcgaggaacagcagcgtcagcttgagcaactggagttcgcattgcaggcacaacttttggaggagactcaacttcggcaaagcaatgctctaaaactggagcaggtggaaaatttaacaatttctttggcttcgttacaactagataaggaaggcttaaaagaaaatttaggtgaggcgcaaaagaccttgaaaaatctacagcagaaggtggacattcttcaaaaacagtatgccgaaatgtgctccttgtgtcaaaagactaaacagcaattggaactggagaaaatcgagattgccaaaatgaagcaaaacggttccttaaaggaaagtgagctaatggagaaactcaaagattatgcagcgcagtgtgatgagctgagaaaagcgttggccgaagcagagtcccgtatcgatgtccaaatcaaaaagacagagggctggcaagtgcagttgaaacacaaccaagcgacccaaacggacctcgaagatccgattttagttcaacgcattgagactttggaacaacaactagcggatgtcaggagccaaaaattgcacacagtttcgctgctccaaatactgcttcaacagcaagaagctaaaatcaagagcactaacgaaatggaagcagactggcaacaactgttagatgctctgcaagctactcaaagcttggagcaggaaatgcgatcagaactacagcataagacggttgaattggagcacctgaatgaattgttcgctggacaaaatgatgaactgcaaaagctccagaaattgagccaagcgcaggacgaggaaaatcgactagagttacagcttttgaagaaaacattccaagagaatctgaagataaactccgctgcgtcgattaacatgcaaaggctgcaaggccaggtaaagtctttgctagatgagaaggaggaaattgcgcgagaagaacgcaaagcagtagagtgtttgcgatctcttggtcacgttcttgagatggaaacaggaaggaggctaccacatataaaaagctggcctcagttggccaaaattcttcgaaaggaactgcgaaatgggagggttaacaatcgaaaggctgaagagcttcctgggcttaaaatgaagctggcggagatcagcggaaggcatcagcaagctttgtcaaaaattaaggtatgttatgtcttactcccttaaagtaactctttgtaacacaattaattgctttttacagtgtctggagcacactttggtaatggagcgagcgcggtttgaggcctcggactcgggcaaatcgacggctagcaacacgccccaggaacccgcccatgaagtggctaatcttattgatgactacaagaaggtaagtatgttcccctccgattggcttctcttgacatttccttaattgatttacagctcgttcagcaaaccgccaatgaaacatgtcgccctcgcaacagcttcatattcgatctgattgagcggagtcagcgatgccaaccgaatttgtgccaattaggcgagggtatttccgcctgccagtctgatatgaaggagctaagcaggattattattgctggtcgggaacggaggagagtggagcccatgccctccctcatggatgaacttcgagcggtggccgagcactcttagacgagcataatttagttttcagtcaaatacttataaatttcctatttagtacctatttgtttagtctcaaattttgttttcctaaaaggggcaattagtgaattgagtttttgtgcctagtctcataggcctaattttcaatcagatccaacttagttcaatttatataaatatttattttgttgtcttttgtgttcgttatctttatttatgtgtaacgcattctgttagtttcaccaattctatatacatactaattgccaaactataccaatattttttctacaagatatataaaccattgttggttgccacaaaaatgtgtaattatttttatagtccataacatttaaagttaaaaaccttgtgtagataaaacatatttgtgtgaagtcgatcagtgcacatcatttactttcgtgggcacctagggattttagtaccatcgttctccgaaataacttcctttttgtcatatatcgtatttccgttttcatccacgtccagaacttcctgtattaccccttttcgagttcgtgttatcccacacataggcttatcgtttttatccatgcacaaaatcaggagctcagtgtgctgtagatcagagggctttaggacctttgttaccttacaagatgccgtaaactttatggggcacgtcaccccggcacattgccaaccatctggggggaaataattattaacatagatgttccaatactactcgtatccatgtaatccatacacttagtcttctttaccgtcgctcgatttaagtcctcatttaggtgccgatctccgtctgccttaaaataaatgtacgatccataatactccatatacggatttacccttaccacggtgtggtcagcaaaagataaaatggccagcactaccaatattaaggagataaagatattcatagctcaaccttgctgatgcagttttcctctatgactgattgattcaaacaagtctgctgatgtattggatcagc

SEQ ID NO: 23534 - DNA, 2620 bp, DROSOPHILA
atttcgcttaaaatgtagttttatcgttaattaggaaaagttacccacggtaaaaaaaaacaaccgtcaacaattgttcagaaacatcaactagtacgactcagtggacacctccgtgtgctcggttatggatttggactgcgagggcgctacagctttggctgacgactcagggcactttagctgcactagcgatgatggagtaggagatcctgctcagaaaccggcgccgcagcctgaaccggaccaatcgatttttctggtgcggcaagagctgcttcggacgcgcagtgaggtgcaaaggctcttaaaatcggagcagtggtacaagcaggagcttaagtcccagaagcacagcaggctacagacgctagaacgattgtacgcacaggaacggaagtatttgatggagaaccagaagctgcagcaagaatcgatccgcctgcacacacaatgcgccactctggagaagcagcaggagcagggctcaccattttcccctggctcatcgccgtttaaagcagactcggagtcacacgactcctcttttgaggccaaacagcaggaggcgcgcctacgggatcagcgtcagttgatcgacgtgctccgaaggcaaaagaagatgcttctggacgacatccagaggatcagtctggaacacgatgaaaaactttcgcagttgcagcaaactgttgtcggcatggagctggagagcaagcacgtgactggaaaatgcaagcaactacttgaccttaaaagtcaaatggagcaccagctagagctaagaagcactaccctacgcagtgtcaccgcggagcgtgatcagctgcgccaagtcattgctgagcttaacgagacgctgcaaacgcaggagcatctgttagcgctaaaggaacaggagttcctggatttgaaacagtactaccaacaaaagctgaaacgggagagtagcatggaaattatgcactcttatagcatgaaatttcacgaagagatcaacagaaaaacgagtgaaattgccagccttaagaattctcttaacgagcttcaggccgagctgatgctgatgtctcacatgaaagagcaatgcgaggaacagcagcgtcagcttgagcaactggagttcgcattgcaggcacaacttttggaggagactcaacttcggcaaagcaatgctctaaaactggagcaggtggaaaatttaacaatttctttggcttcgttacaactagataaggaaggcttaaaagaaaatttaggtgaggcgcaaaagaccttgaaaaatctacagcagaaggtggacattcttcaaaaacagtatgccgaaatgtgctccttgtgtcaaaagactaaacagcaattggaactggagaaaatcgagattgccaaaatgaagcaaaacggttccttaaaggaaagtgagctaatggagaaactcaaagattatgcagcgcagtgtgatgagctgagaaaagcgttggccgaagcagagtcccgtatcgatgtccaaatcaaaaagacagagggctggcaagtgcagttgaaacacaaccaagcgacccaaacggacctcgaagatccgattttagttcaacgcattgagactttggaacaacaactagcggatgtcaggagccaaaaattgcacacagtttcgctgctccaaatactgcttcaacagcaagaagctaaaatcaagagcactaacgaaatggaagcagactggcaacaactgttagatgctctgcaagctactcaaagcttggagcaggaaatgcgatcagaactacagcataagacggttgaattggagcacctgaatgaattgttcgctggacaaaatgatgaactgcaaaagctccagaaattgagccaagcgcaggacgaggaaaatcgactagagttacagcttttgaagaaaacattccaagagaatctgaagataaactccgctgcgtcgattaacatgcaaaggctgcaaggccaggtaaagtctttgctagatgagaaggaggaaattgcgcgagaagaacgcaaagcagtagagtgtttgcgatctcttggtcacgttcttgagatggaaacaggaaggaggctaccacatataaaaagctggcctcagttggccaaaattcttcgaaaggaactgcgaaatgggagggttaacaatcgaaaggctgaagagcttcctgggcttaaaatgaagctggcggagatcagcggaaggcatcagcaagctttgtcaaaaattaagtgtctggagcacactttggtaatggagcgagcgcggtttgaggcctcggactcgggcaaatcgacggctagcaacacgccccaggaacccgcccatgaagtggctaatcttattgatgactacaagaagctcgttcagcaaaccgccaatgaaacatgtcgccctcgcaacagcttcatattcgatctgattgagcggagtcagcgatgccaaccgaatttgtgccaattaggcgagggtatttccgcctgccagtctgatatgaaggagctaagcaggattattattgctggtcgggaacggaggagagtggagcccatgccctccctcatggatgaacttcgagcggtggccgagcactcttag

SEQ ID NO: 23535 - protein, 830 aa, DROSOPHILA
MDLDCEGATALADDSGHFSCTSDDGVGDPAQKPAPQPEPDQSIFLVRQELLRTRSEVQRLLKSEQWYKQELKSQKHSRLQTLERLYAQERKYLMENQKLQQESIRLHTQCATLEKQQEQGSPFSPGSSPFKADSESHDSSFEAKQQEARLRDQRQLIDVLRRQKKMLLDDIQRISLEHDEKLSQLQQTVVGMELESKHVTGKCKQLLDLKSQMEHQLELRSTTLRSVTAERDQLRQVIAELNETLQTQEHLLALKEQEFLDLKQYYQQKLKRESSMEIMHSYSMKFHEEINRKTSEIASLKNSLNELQAELMLMSHMKEQCEEQQRQLEQLEFALQAQLLEETQLRQSNALKLEQVENLTISLASLQLDKEGLKENLGEAQKTLKNLQQKVDILQKQYAEMCSLCQKTKQQLELEKIEIAKMKQNGSLKESELMEKLKDYAAQCDELRKALAEAESRIDVQIKKTEGWQVQLKHNQATQTDLEDPILVQRIETLEQQLADVRSQKLHTVSLLQILLQQQEAKIKSTNEMEADWQQLLDALQATQSLEQEMRSELQHKTVELEHLNELFAGQNDELQKLQKLSQAQDEENRLELQLLKKTFQENLKINSAASINMQRLQGQVKSLLDEKEEIAREERKAVECLRSLGHVLEMETGRRLPHIKSWPQLAKILRKELRNGRVNNRKAEELPGLKMKLAEISGRHQQALSKIKCLEHTLVMERARFEASDSGKSTASNTPQEPAHEVANLIDDYKKLVQQTANETCRPRNSFIFDLIERSQRCQPNLCQLGEGISACQSDMKELSRIIIAGRERRRVEPMPSLMDELRAVAEHS

SEQ ID NO: 23536 - DNA, 4199 bp, DROSOPHILA
gatccctccttagattatgtaatttcatggcttacgtttgcttttacaaaaacattaatgtaatgattaattcactcttatcttgtacagctttcgccagaaatgacttcagtgcataagtgtataaattgaaaaccttcaccccaaattatgaaaattttccgtatttaggcgattgaaaaagatataatcctttcgactcttcaacgccaaacggaattatcccaaatgcatgtcgtcatatcgctctggtcaattgaatcatgaataaattctcttgaacaaagataatgcattcaaattcaatggaactatagtcaatttcatctattttcaaacaaattaattttagtaaatgaaaagagcagttaaagtatgtagaacaatgtatagaaagcaggcttaaaaacaacgcagctttaaacaaagcacgatatagtttagtatttgtttcagactcaaaatcttaaaatagttaatagtcctgtaaacagttattgatcagcaagaaattacacttgttttacatttttgaaacaaaagggaggcagaaaaattagagcagtggattaaagatgttggagtggcagatatttaaattatacgtttaatcctatttaaacattttcatagtatactcttgtcatagttttcggcggcggcctgcgggcgtttcattgggcgtggcatattgtgcatggttaatctctggcttttaactttctggcttttgtggttccagaggaaccgtacggacgagccgacggacatgggtaaatacctgtaacaaactttgaacgaatctctttcttaactaaaaacgtgtataaattgggaacgatgcacaaaccttttattcaattttgtaattttattttgttttctccagttatatcaagattaacgaaaattctggtgctaaaaagtcccagtctccatatcaaatttgacaagcacacagtttttgattagactccaaaattttctatcttccccagcaatgagcgataatgaggatggtgaggagcggaaggcatcgaccttcgagtcgattatagacaacatgttcagccggttgcggatcatcgcagtggacgtggagaaattacagaaggccaaggagaagttaaatattatgcaacggcggaacaccttctaccatcttctaggccaagaggaagaagtcagcatgaaccgtggaagcgagatggcgattcttcgatccaagtattccttacattcgggtttcaatcagaattgcagctcggcctcggaggaggaactcgacttcgaggagttaagcgaggatccgtgcaacatatctttcgaggaggatcgctggcacggtttcttcaaagactttcagatcctgaccaccccagtcggcaccgatcccaacgagaaccgcaagtgtgtggaactgacttcgatgacgaactgcgatctcgagatcaaacaccatctatgtgcgtttacagttcgtttgcgtaaactccttatacacgccacgtaattttttagaattttaaacttccaagttagaacacatctacatttctaggaatatttcatggtcttaatgggtttaaatcatcaatccgaattatgacatttctgagaccccctatatacctctctctgcttttttttagaattattagctaaaaccctttgcctatatttggcatttttctataagatccatttgttattgcaccacaactccttactttcagtgggcggagtccgctgctttatggtcaaccttttcgagggcactcagcatgacaaccagagcctgatcgtaaagctgcgagaggcggagatcagtgtttcaaaggagttgggttttcccgtgacgtcttcagtgatggtgaagatatcgccgcgccaccagttcactggcggattcagcactcagttccgccaggagggcaagaagtgcgttgaacttgtgcagggccagaaggtaatcctgaccgtggatcggcagtactcggatcggagcaacgctgatgttatatatgtgaatgcccgctttttgatcgttgatgtacaccccttggactttattttgattggcgaggacattcaactgatggtgcggagcatccacgcggaccacctcaagggctgtgtggccaggggaggcatgctgtatgcccacatgcctgtcttattcccggcgaggtgtcgtcgtttccggatctcgtacgaggagctagaggaccttaccttcgcccgagaggttggcctgaatgtggtagtatcccatatcgtggggaccccaaagtacgtggacaacttggagcacgcgatgtccgctatgcactgcgatggcatgagactgtacgctagagtggtgctcaacgaggtccagggctgcaaaggggagctgaactgggcgatcaaacgctacgacgggttcttggtggaactggcggagccggccactgttccggacataatgcacctgtgccccgacgccgagtgctttatgcagttgacatacgctgcgaagaaacccattatctttgatccgcggcttttggatgagcaaaagcttagggtggaccccgcgcactactattacacgttctattatccggacaagtacgtgaccacgtgcccgcagccgaaaggtacaatctacttccgcttactgcaatccgccatcttcgagcagatcagcccaacggcactggccaatactccatactgcgaccgatctcacactggagcggatagcttggcgcgttccgtggtaactgcctccattgaagtccatgcggtggccatcgtcgtgatcggagtcaccacgcggatggtgcaaaagatctcccactttcggccccacgcccccattctcttcgttagccacatgcgctccgccgaggattacgtttccatttaccacaacgtgaccatgcttccattccgcaccaagtgcattattgcacataggcggaacgtcttccttaaggccatatacgcgttggcctatttggtgaagcgaaagatcgccaagcagaacgatcaggtgatcctggtgtacaattacgaggatggcacaaagtttcctgaaaagtacatcgtgtacaagctggacagaactaactttgcgtcgcacatggcggaaatcctgttccctgtggaccaggaccagatgcagaccctcaaggaaatagaaaagacttagttcccaagtgtgtgtagatagtttatttgctttggtgagtaattggaatgttaacgcgttggcctagaatatacaaaacagatacagataaatacatacataaatatatagatacacatttctacgctgtactaggggctaatcaattgcggctgtacagaatcaatacccgtaatcatatgagggaatttcgtcgttctatgtatatacagactatttacgggaaatcaacacttgtgtttcttattcaccgagacttaacaatgccaacaagaagtaactaattttctaaaacctcatgtgtcggccttttcggcaacggagcccgaaatctttgagctgagcccgctcaggggattttttgcagagctctcgacgtcacgtgctcatatgcggccttcagtgtagtgtagcagtagcccgccattccattcatctcggcttggaaattggggccaccggtcagatcgtccaataaggccagctccgcacccaagtggggaacagcagcgcgcagcatcgtgagcatggtgagcggtatcatgttgtccgcattgagctgggcggcattagctgtgagtcggaactgcttagtgaaactatttacggatatctggacctttgagactcacctgccatggcgtgttcgtaggcctcagttagtagctgcgtgctccgctgtatcacagtcaacatgtcctgtggactaaacttctcctgcagttcctttaacgtctgcacggactccacaaacttggggtccaacattacattgtgcagaaaactgaaagcaaaattgaaaattacaagaaagataaaatagcgtagacattttagaatacctttcatgacccataagttcaacaagctcttggtcctttagtttctcggcaagattcagattctgccgatacatttcgtcctttcgactgtacttatttgcatacagcacaaacaaagtggagtagatgccctctgatagcacgagtgggtataatag

SEQ ID NO: 23537 - DNA, 2034 bp, DROSOPHILA
atgagcgataatgaggatggtgaggagcggaaggcatcgaccttcgagtcgattatagacaacatgttcagccggttgcggatcatcgcagtggacgtggagaaattacagaaggccaaggagaagttaaatattatgcaacggcggaacaccttctaccatcttctaggccaagaggaagaagtcagcatgaaccgtggaagcgagatggcgattcttcgatccaagtattccttacattcgggtttcaatcagaattgcagctcggcctcggaggaggaactcgacttcgaggagttaagcgaggatccgtgcaacatatctttcgaggaggatcgctggcacggtttcttcaaagactttcagatcctgaccaccccagtcggcaccgatcccaacgagaaccgcaagtgtgtggaactgacttcgatgacgaactgcgatctcgagatcaaacaccatctatgtgcgtttacagttcgtttgcaattattagctaaaaccctttgcctatatttggcatttttctataagatccatttgttattgcaccacaactccttactttcagtgggcggagtccgctgctttatggtcaaccttttcgagggcactcagcatgacaaccagagcctgatcgtaaagctgcgagaggcggagatcagtgtttcaaaggagttgggttttcccgtgacgtcttcagtgatggtgaagatatcgccgcgccaccagttcactggcggattcagcactcagttccgccaggagggcaagaagtgcgttgaacttgtgcagggccagaaggtaatcctgaccgtggatcggcagtactcggatcggagcaacgctgatgttatatatgtgaatgcccgctttttgatcgttgatgtacaccccttggactttattttgattggcgaggacattcaactgatggtgcggagcatccacgcggaccacctcaagggctgtgtggccaggggaggcatgctgtatgcccacatgcctgtcttattcccggcgaggtgtcgtcgtttccggatctcgtacgaggagctagaggaccttaccttcgcccgagaggttggcctgaatgtggtagtatcccatatcgtggggaccccaaagtacgtggacaacttggagcacgcgatgtccgctatgcactgcgatggcatgagactgtacgctagagtggtgctcaacgaggtccagggctgcaaaggggagctgaactgggcgatcaaacgctacgacgggttcttggtggaactggcggagccggccactgttccggacataatgcacctgtgccccgacgccgagtgctttatgcagttgacatacgctgcgaagaaacccattatctttgatccgcggcttttggatgagcaaaagcttagggtggaccccgcgcactactattacacgttctattatccggacaagtacgtgaccacgtgcccgcagccgaaaggtacaatctacttccgcttactgcaatccgccatcttcgagcagatcagcccaacggcactggccaatactccatactgcgaccgatctcacactggagcggatagcttggcgcgttccgtggtaactgcctccattgaagtccatgcggtggccatcgtcgtgatcggagtcaccacgcggatggtgcaaaagatctcccactttcggccccacgcccccattctcttcgttagccacatgcgctccgccgaggattacgtttccatttaccacaacgtgaccatgcttccattccgcaccaagtgcattattgcacataggcggaacgtcttccttaaggccatatacgcgttggcctatttggtgaagcgaaagatcgccaagcagaacgatcaggtgatcctggtgtacaattacgaggatggcacaaagtttcctgaaaagtacatcgtgtacaagctggacagaactaactttgcgtcgcacatggcggaaatcctgttccctgtggaccaggaccagatgcagaccctcaaggaaatagaaaagacttag

SEQ ID NO: 23538 - protein, 677 aa, DROSOPHILA
MSDNEDGEERKASTFESIIDNMFSRLRIIAVDVEKLQKAKEKLNIMQRRNTFYHLLGQEEEVSMNRGSEMAILRSKYSLHSGFNQNCSSASEEELDFEELSEDPCNISFEEDRWHGFFKDFQILTTPVGTDPNENRKCVELTSMTNCDLEIKHHLCAFTVRLQLLAKTLCLYLAFFYKIHLLLHHNSLLSVGGVRCFMVNLFEGTQHDNQSLIVKLREAEISVSKELGFPVTSSVMVKISPRHQFTGGFSTQFRQEGKKCVELVQGQKVILTVDRQYSDRSNADVIYVNARFLIVDVHPLDFILIGEDIQLMVRSIHADHLKGCVARGGMLYAHMPVLFPARCRRFRISYEELEDLTFAREVGLNVVVSHIVGTPKYVDNLEHAMSAMHCDGMRLYARVVLNEVQGCKGELNWAIKRYDGFLVELAEPATVPDIMHLCPDAECFMQLTYAAKKPIIFDPRLLDEQKLRVDPAHYYYTFYYPDKYVTTCPQPKGTIYFRLLQSAIFEQISPTALANTPYCDRSHTGADSLARSVVTASIEVHAVAIVVIGVTTRMVQKISHFRPHAPILFVSHMRSAEDYVSIYHNVTMLPFRTKCIIAHRRNVFLKAIYALAYLVKRKIAKQNDQVILVYNYEDGTKFPEKYIVYKLDRTNFASHMAEILFPVDQDQMQTLKEIEKT

SEQ ID NO: 23539 - DNA, 9646 bp, DROSOPHILA
aatttttgaaaatcacggcagcaacaagaggcgagcgggaaaatggaaaagaaaactccctgatattgctccaagtacatctagtacatcgcgcggcgtccaaagtgagccctcaaagctgttgctgtggttgtttctgcgccgctggcggctgtggatgtcaaatgttggtgcagacccattgttttggtcacacagctgagaagcaaatggaaaaattacccaagccgatagagccgaagacccgaagaccctccatgcaaggtggcctcttccccggaacccccaaaccccgatctccgctgcccgatcccgggcccaaaaacgcgctgtgaaaatgaggaaaaacagataccgccgacaatgactaagcagcgcagtcgacttctgcgccggcgtagcggcagcagctggggctcagaccgaatccgagcttccaattcagtcgagcttcagtgccagcggagaacgaacggcttggatagtcggcgggtccagatttcgcgcacacagcttcgaaatcgaagttccgtccgcggatggatgaacacccaaaagctgcgccaatttataatttgcataattaccattattaccattgttaccagtgcgacagtgaaatgggaaacatgaagcagggacaagaagcagctaactgtgctcagagaaatttctgaaaatattaaaaaccatttaaatgtataaaacaacatagttctgtgcttaagaaaaatctgatctgcataaaagatcgcagataatacccaaaagtgaaaaagtgaacaaatttaatgtttatgccaccataaataatagtttaataatatttaataaaataaatttatgaatatcacatgcaaatacactaactagccaccaaagtgaaggacaatatttaaaaacctatcaaatccatcaaaattatgcagtaagttatcctgaaaagggtaattctctcaaaaagtatctgaaatgaaaccaaagcgaaactaaaagcagcatgtattgcaccaaagattgcacctgcagcctgtgtcgcgagttgcgaggctacaagcccagtgacaagaagagtgctccttcagcgcccactttgctcagcaggatgctgaacgacaacttcatcctgcggcgccgcggcatctccctcaagaactttcagccacaatcgctgaggaacagcgagatgctggcccagcagatgccggtgccacgccccccgcagacgccctcgcccacgcccatcgaggagctgcctgactgggcgactgaggattcgtcgcgggcaaagaagcctaaccacaaagtggtcatctactttggggactccatccaccgcggtggccagcaatcgccgctgccctcgcccaaggaactccactcgcagctgctgcaagagatgtcccagaaactcaagaccagcgtggcggaggagggcctaacgggcgtggagaaggtgaagaaggtgcaacagatggcggggcaaccggagaccagcccgccagcgaatgacgaactgccgccctacattgagagcgtgcagaacggagtaattaatatcagaattgaaggcaattaccggcgagccagtgcgctggtggaaacggtggcaaaacccactctggccgttgtggctccaacgaaatccgagtgtgattgcgatgcagccctcggtgataatgacgatggtaatgcggatgatgatagcgacgaccctggccaagatgaggcggagacggactcgtgcgattggagctacgtccaggagtggcggagggcagcgaaacggtacagcgaactcttcgaatctcgagctattacttattttctcgttcccaatcccaatgccaattccattttcaatttcaattcacattgcactactgcaattcttttgtgaaagtcggggaaaagggatttcttctgggcgtagaataggatggacttttgattggggaaaaggaaaggaacgactagatggccaaatgtatattgggaagatggctccaccccacaaagttgcaatttaatcaatggttaatcacattttatttacaatggaaagaaattgaataaattgtaagaaatggaatagtaagaagaatttaatcaaaattcgtcttcatcttagtttttggcaaacaattccaagcttcttcggctatcggctgggagtaaaacgcaataagcaataaaatgtttttctcatatcgatagaaatttactagacaaaagataaattaaaaaaaaaatcgacttggccaaatcgactcctgattaagaatatgaaaacacagtcgggaacactccttctacctgtataatacttatgaacaaatctagtataccctatagctctacgagtaaaacccatactcaattcgtaccctcatatatgccgaaaaatactcacttcagcaaaacccagtcaaagaatgatcatcagaaaaaaaacgacttcgctgtttaccttaatgggctccataagaaaagatgtttgattttatatctcataatatttagacacagatcgtaagtgttggtcgttaatttacatacaagctccataaatgagtttttggaaatggatcagttctgtgggaacttaaactactcataaacagagggggttgccacacaaaaagtcctataaattctttaaaatagcaaacgctttaaaaatattattcaattgatttacaaacaagacaaatatttaagcaaacagaaatctaaaggtcattaactcggcaactaaagatcaataaagattcaagttgagaaatagatcattataacagtactcccaagatattcaaagcactcataaatagtattatttagcacagaaccttgttcagatcgtaagtatctgtatttcatatacatatatattgttgaaaagacaatataaactcagcatttaaaatttaggtcaatctgagctcaagttacagcataagctgtcaaagggatgggcaaaatttgaatgataacgatgcccaaaaagaatgaaaaatcaaaagacttttcgcatgcaaatgaaaaatcgtaactggcttttaatatcgctgtgatttttgaggttgccaacttctaacccagttagaagatggtaataaatgcgaaggaaatgtgagaacgaatcgtggcgatgaagatcaacccacttagagagtccagtattgcggtgaaaataatttgttagcttctgcactttataatattatttaattcgaagagaatgggttgtatattcgtccatcagcttgtaatacattaattcaactagtgggtcttggtcgtttttcaatagtgtaatcaacaaaatactcgaccatgaatgactactgtctcctactgggactactacactaatcagatgtcaagttaggctcgtggctaactaaaagatggtcaagactgtgtggtcagagattagcgttagtgtgacatctattcctttgctcgttagcaaagtccattgtttattttgcctggtattctttctgtctgctgaggaattttaatgagttgcatcatttatgggactggaaatgggtcaggcttaatttagaagcttagccatggctttatttttagctttgtggataaagttattactttagttgcgaagcattcgctatttttgattcctaaagtgttaatgggtacttaaaatattgatgaaataccattagaccatcttttttttttttgatgactactcaattattttcctctttattttagcacactgattttaaagatttgaatcccttagaactcttcccctatctataagtaaccatcagactaaccatgttttccttaactctctccaggcccactggtaacctgccgcccaactttgtccagcaccaggctcccagccaggtgactggcttgccccccgtgcccccgccacagatgcagtcgcctcatcaggtgcagagccagctacccccctcgcagacgccactgtcgtcgcaaaagggattggcggtggccatggccactccggcaccgagagtgttcaaggagctggcgcagcagccgaacaaggggatgccccacaagatggtagcctcatcctcgtcctgcagtggcggccaggcgaactcgtcctgcaagatgccgtcaccagggaccgcctcaaaggcgctgattccacagagggcagtggctggtccggcgcgactcacggtgcagagtacgcctgtaaagtcacagccaccgcaactgagtgggagcctgagccagagccaggtctctcccaacagacccattttgggcatacccactacagcggcaaatcccacgccgcccaggatccaccagcatgaccagttccgggcgctgcagcgggtgcaggagtgccacagttcttcggacgagaaccgcagctctgggcatgccagcatgtcggataccggcgggcacagctcctcgcccgcagggggcatgaccttgggtccgctacccgaggatcgcctggcggcgggagtgaccaacaggagcactcgatcgcggaggcatcgtggaatcatgcctggcggaaaagctccgtggagcggcacaggactggaagacatcaagctggccatgctcacactgcgctcccaaaccagcagcagcacctacagcagcctaagcgccggatcggagagctcggagcccgcccgccgcctgggcagatactcctcgctggagaccgtggtgaccagcacgagtgcagacgaattcgtgtgggtggactcgcacaaccggctagttgagctgcagcatccgccgtggagccagcagtgcatcctgaaggtcctgaggaacggacgctgccagcagcaggctgagcatctggccgtggaggcggtttcccgcctaggctatctgctgcagcgggcgctggtgaggatcgcccgcgagatccaacgcttctcggccggcgtgggtctctgctccaagcaggaggtggtcggagccctgcgggtggtgctcagctcctcgctggcggactcttgcacgaaggcatgcctcaggtcggccgccatgttcgcggttcccggagagagtgcgctgaagcagagcaagtccgcccgagcaggcctccaattgtcagttgggcgcttctaccgctggatgacggacgccagactgggcaaatttattcacgaatacgccgccgtgtatctgtgcgccggaattgagaatctgctggaggagattgccctccagtgcaacgggaccacggcggccgccttggatcaaagtattgccagttccggggatgtgtggggactgcttcagccattcgctcatctcaacgcgggaagaattgccagtggcgccctggctctgcccagatgggccaactccttggatcaagttattgccaggtatttacttccaatctttatctattccaatctctagccatgtccctccgtcctgtgattccacgaaatataaaaccaagcgtagaaaatttaagttagacgtccggattctagagaagcaactgaagtgccttgtctaataaaaacaatttcattatttcgtgtgcaccagttccggagattttcgaggtcatctggccacctgtgtgggcagcataagggagctgaaagagaaggccctgcgcacccagcaggagttccagttggccgccgccctctctggatccgctctggctgctcttttctacttcatgcgctgctctcagctggagcacacggaacttctcgccgcctccggctgccatgctggccaggcgcaatcagctgctccaggcggaggaacctcctccgcgggccaccacgtccaggagttgtgctacgagcgggcctacgtggtgctgcctccactggccgagtggttgagggtggctgctgcccacgccgagcaccgaaatgccatgatgattgacaaggatgacgtgatgcaggccgccagattactcctgcccggagtggactgtcccataaggccagtggcgcacgacgaggagctgcccacgaaaaagactcacttcaacactgctcctactgtcagctccacgggcactggaacgggaagcagtagctgcagttcgccggtggttagtgggattggcatcggaatcggagaggacacctctgagctgggcaggagagccaccattggagtggcgttcaaggtacgcgttttatgttttatatatatggaatatacttaaagtaaacgagcttttaatggaacgtgtttgtttatggagtgtgctcctaggtgtgttactgatgataatagtcctaataatcgaacgtctacttaaatccctttcgcagcttctgctgactggtcgggcggaattgttggcccaggccgcccagcttctgccgcccaccacgcggtacgacacccagaacagtgccggactgaccgctctgatgatcgccagcattcgaaacgatgaagtggccctgcacgctctgctggacgcgggatgcgatccgaatgtggaggtgccccctgcaggaagcgccggctatccggccattcagccggacactcagcactggacggcactgagcttcgccgccagcagggcaaactacgtagccctgaggatcctcctggaaaggggcggcaaggtggagggcggggccaggagcagcgaggagaagtgcaccctgaccccccttcagttggccgccggcactggcaatctggagatcgtggcattgctgctggcccacggagccaatgcgtttttgtccacgcagcagaaggattcactgtgcttcgcaggatccgcacagaagggttgcttctgcgccatttcagtggctgctgcccacggacaccgatcgtgccttcgcaaactgctcacccaccccgtttcacctggaacgagggatgtgctctcgctggaggagatgctggccgagggcgatgtgggcggtgtgagaggatcaggtggtccaactggagccggaggaccaaacagtgccagtgccagtggaaacaacgaggacattctgccgctgctcaacaagacgcagatcaagcgactccaggaggctatgtaccacagtgccgaaaataatcatttgggtaggtttacttggaataggtttataaagtgggatacgcgtatatgtgtaagtttcctatacttgtagaagatatcagctcttttagaatgtccttattgagagataaatcttttctttcctatagtacacaaatatattttgttaaggaatttaccagaaccgaaaagttagcaggttgcgaatccatttgcaattccaattaagatgctaccaatgaccgattaagtaattcaatctggttttaatggttttctaattcatttgatcagctcatttgatctgtctcataataagccgaaatttaatgaagccagatttgtcgaaactgttttgtttacaaggtgtctgactttttgtatatctgcgagaaattatttattgttaagcagatagatatatacaatctttgcttacaattaataccgatacggttccttttgccagatataaccattgagctgcggaaactgggggttccatggaccctccactgctggatgcacgccctatcggcggcccacgacttgcgactggacgcggttatagatcagttgctccaagacttcctgcaagtgtgtcccgacgactacagtgcccagtttgtgagcgagtgcctcccgctgctgttcaacatctttcggaacaagaacgagggcaccaccctccttctggccgacatcttcgccacctgcttcggctgggagacactgcctccggtgaaggaacagccgccgatgcagcccgtccaggggtcccgcatcgatcccaagttcgttaacaacccagaactcagcgacgtgaccttcaggtgggtgtgacttaatgctgaaaatattggtagctctaaagtatccaaatttctttaaagtattcaaatgtataaatgaactgtaacatctttggtcattttacattgcagagtggagggcaagatcttctacggacacaagatcgtcctggtcaccgcatcgcctcgcttccaaagcatgctgagctccaaactgagtgagggcagctccacgcccacggtgcagatcaacgacatacgctaccacatcttccagcttgtgatgcagttcctttactgcggcggctgcagctctttggacgtggcccacggcgatgtgctagagctgatggcggcggcgagcttcttccagctagagggattgctgcgctacacggaggcccgctgctcggaaatggtcgatgtggataatgttgtagccatgtacattcacgccaaggtgggatggctaatggtaaagattgctatcagacggagattctgatcggcttgctcttccaggtctataacgccaatcgactgctggagttctgccagtgcttcctgctccaaaatatggtggccctgctcacctacgacgactccgtgaagcgtctcctcttcgctaagaagattcccaaccacgacgtgctcgccggattgctgcagacgctccagaatcgcttgaaggcccgcaagcccaactcgggtggtggtctggtcaactcctaccgatcgcccccggtcacgcctgtgaaaaaatgaagtgaagtgaagtgatggagctctgcttccacacacttctctctcgacgaaatcgaattcttatttattgcattgtttttaatttaatctctgagcttttatgtattataatagtttccctgcccgccccgacctcctttcccaccttcctagttgtatttttgtattttcaatttgttcagcgcactgttaacctctacgaaccccaagatggccgagcaggcggtcctctagctattattggtagttgaaattgtttctgcattaaatgaaggaagtaaaattgtaactaccaaatctttcatttgaatggaggcagcattcaaatattgaatcacctttccctcatcggagatttcgagttctcagccattactttgcaattatatctggatgttttgctggagaacacaactaaaacaacaccaattagattccatttcagtgcctcgtttattagaccttaggaggcttagcatagtcaagatctggttggggcacctgctcgctgacctgcttggcggccagcgaaatctggggcaggattgctccgccctctggtacaaatccgtggtcatcggccttgtaggtgacggtcacctcctgtccgttggcatcgaagtaggagtaggagccgctgatctccaggtactcgttctcggtgccttggtttctgaccacggcctcctcccttctgtgggtgccgtcctcgccgaggtaagagaagttgtacgatccatcctcgtgcttttcgtgagatgattcgagaatggccaccggtggctgggtggtggatgtgacgtggtccactggagcactcagcacgacggccgtgcaaagggacagggcgacgatgagctggaaagatggtttaggaatgggctaatccttggagtgatcgcctctcggcggcgcgatactcacaatcttaaacatgctgctgtctggaggggaagctggctttgaattgactccgagtgagggaagactgctctttata

SEQ ID NO: 23540 - DNA, 4650 bp, DROSOPHILA
atgtattgcaccaaagattgcacctgcagcctgtgtcgcgagttgcgaggctacaagcccagtgacaagaagagtgctccttcagcgcccactttgctcagcaggatgctgaacgacaacttcatcctgcggcgccgcggcatctccctcaagaactttcagccacaatcgctgaggaacagcgagatgctggcccagcagatgccggtgccacgccccccgcagacgccctcgcccacgcccatcgaggagctgcctgactgggcgactgaggattcgtcgcgggcaaagaagcctaaccacaaagtggtcatctactttggggactccatccaccgcggtggccagcaatcgccgctgccctcgcccaaggaactccactcgcagctgctgcaagagatgtcccagaaactcaagaccagcgtggcggaggagggcctaacgggcgtggagaaggtgaagaaggtgcaacagatggcggggcaaccggagaccagcccgccagcgaatgacgaactgccgccctacattgagagcgtgcagaacggagtaattaatatcagaattgaaggcaattaccggcgagccagtgcgctggtggaaacggtggcaaaacccactctggccgttgtggctccaacgaaatccgagtgtgattgcgatgcagccctcggtgataatgacgatggtaatgcggatgatgatagcgacgaccctggccaagatgaggcggagacggactcgtgcgattggagctacgtccaggagtggcggagggcagcgaaacggcccactggtaacctgccgcccaactttgtccagcaccaggctcccagccaggtgactggcttgccccccgtgcccccgccacagatgcagtcgcctcatcaggtgcagagccagctacccccctcgcagacgccactgtcgtcgcaaaagggattggcggtggccatggccactccggcaccgagagtgttcaaggagctggcgcagcagccgaacaaggggatgccccacaagatggtagcctcatcctcgtcctgcagtggcggccaggcgaactcgtcctgcaagatgccgtcaccagggaccgcctcaaaggcgctgattccacagagggcagtggctggtccggcgcgactcacggtgcagagtacgcctgtaaagtcacagccaccgcaactgagtgggagcctgagccagagccaggtctctcccaacagacccattttgggcatacccactacagcggcaaatcccacgccgcccaggatccaccagcatgaccagttccgggcgctgcagcgggtgcaggagtgccacagttcttcggacgagaaccgcagctctgggcatgccagcatgtcggataccggcgggcacagctcctcgcccgcagggggcatgaccttgggtccgctacccgaggatcgcctggcggcgggagtgaccaacaggagcactcgatcgcggaggcatcgtggaatcatgcctggcggaaaagctccgtggagcggcacaggactggaagacatcaagctggccatgctcacactgcgctcccaaaccagcagcagcacctacagcagcctaagcgccggatcggagagctcggagcccgcccgccgcctgggcagatactcctcgctggagaccgtggtgaccagcacgagtgcagacgaattcgtgtgggtggactcgcacaaccggctagttgagctgcagcatccgccgtggagccagcagtgcatcctgaaggtcctgaggaacggacgctgccagcagcaggctgagcatctggccgtggaggcggtttcccgcctaggctatctgctgcagcgggcgctggtgaggatcgcccgcgagatccaacgcttctcggccggcgtgggtctctgctccaagcaggaggtggtcggagccctgcgggtggtgctcagctcctcgctggcggactcttgcacgaaggcatgcctcaggtcggccgccatgttcgcggttcccggagagagtgcgctgaagcagagcaagtccgcccgagcaggcctccaattgtcagttgggcgcttctaccgctggatgacggacgccagactgggcaaatttattcacgaatacgccgccgtgtatctgtgcgccggaattgagaatctgctggaggagattgccctccagtgcaacgggaccacggcggccgccttggatcaaagtattgccagttccggggatgtgtggggactgcttcagccattcgctcatctcaacgcgggaagaattgccagtggcgccctggctctgcccagatgggccaactccttggatcaagttattgccagttccggagattttcgaggtcatctggccacctgtgtgggcagcataagggagctgaaagagaaggccctgcgcacccagcaggagttccagttggccgccgccctctctggatccgctctggctgctcttttctacttcatgcgctgctctcagctggagcacacggaacttctcgccgcctccggctgccatgctggccaggcgcaatcagctgctccaggcggaggaacctcctccgcgggccaccacgtccaggagttgtgctacgagcgggcctacgtggtgctgcctccactggccgagtggttgagggtggctgctgcccacgccgagcaccgaaatgccatgatgattgacaaggatgacgtgatgcaggccgccagattactcctgcccggagtggactgtcccataaggccagtggcgcacgacgaggagctgcccacgaaaaagactcacttcaacactgctcctactgtcagctccacgggcactggaacgggaagcagtagctgcagttcgccggtggttagtgggattggcatcggaatcggagaggacacctctgagctgggcaggagagccaccattggagtggcgttcaagcttctgctgactggtcgggcggaattgttggcccaggccgcccagcttctgccgcccaccacgcggtacgacacccagaacagtgccggactgaccgctctgatgatcgccagcattcgaaacgatgaagtggccctgcacgctctgctggacgcgggatgcgatccgaatgtggaggtgccccctgcaggaagcgccggctatccggccattcagccggacactcagcactggacggcactgagcttcgccgccagcagggcaaactacgtagccctgaggatcctcctggaaaggggcggcaaggtggagggcggggccaggagcagcgaggagaagtgcaccctgaccccccttcagttggccgccggcactggcaatctggagatcgtggcattgctgctggcccacggagccaatgcgtttttgtccacgcagcagaaggattcactgtgcttcgcaggatccgcacagaagggttgcttctgcgccatttcagtggctgctgcccacggacaccgatcgtgccttcgcaaactgctcacccaccccgtttcacctggaacgagggatgtgctctcgctggaggagatgctggccgagggcgatgtgggcggtgtgagaggatcaggtggtccaactggagccggaggaccaaacagtgccagtgccagtggaaacaacgaggacattctgccgctgctcaacaagacgcagatcaagcgactccaggaggctatgtaccacagtgccgaaaataatcatttggatataaccattgagctgcggaaactgggggttccatggaccctccactgctggatgcacgccctatcggcggcccacgacttgcgactggacgcggttatagatcagttgctccaagacttcctgcaagtgtgtcccgacgactacagtgcccagtttgtgagcgagtgcctcccgctgctgttcaacatctttcggaacaagaacgagggcaccaccctccttctggccgacatcttcgccacctgcttcggctgggagacactgcctccggtgaaggaacagccgccgatgcagcccgtccaggggtcccgcatcgatcccaagttcgttaacaacccagaactcagcgacgtgaccttcagagtggagggcaagatcttctacggacacaagatcgtcctggtcaccgcatcgcctcgcttccaaagcatgctgagctccaaactgagtgagggcagctccacgcccacggtgcagatcaacgacatacgctaccacatcttccagcttgtgatgcagttcctttactgcggcggctgcagctctttggacgtggcccacggcgatgtgctagagctgatggcggcggcgagcttcttccagctagagggattgctgcgctacacggaggcccgctgctcggaaatggtcgatgtggataatgttgtagccatgtacattcacgccaaggtctataacgccaatcgactgctggagttctgccagtgcttcctgctccaaaatatggtggccctgctcacctacgacgactccgtgaagcgtctcctcttcgctaagaagattcccaaccacgacgtgctcgccggattgctgcagacgctccagaatcgcttgaaggcccgcaagcccaactcgggtggtggtctggtcaactcctaccgatcgcccccggtcacgcctgtgaaaaaatga

SEQ ID NO: 23541 - protein, 1549 aa, DROSOPHILA
MYCTKDCTCSLCRELRGYKPSDKKSAPSAPTLLSRMLNDNFILRRRGISLKNFQPQSLRNSEMLAQQMPVPRPPQTPSPTPIEELPDWATEDSSRAKKPNHKVVIYFGDSIHRGGQQSPLPSPKELHSQLLQEMSQKLKTSVAEEGLTGVEKVKKVQQMAGQPETSPPANDELPPYIESVQNGVINIRIEGNYRRASALVETVAKPTLAVVAPTKSECDCDAALGDNDDGNADDDSDDPGQDEAETDSCDWSYVQEWRRAAKRPTGNLPPNFVQHQAPSQVTGLPPVPPPQMQSPHQVQSQLPPSQTPLSSQKGLAVAMATPAPRVFKELAQQPNKGMPHKMVASSSSCSGGQANSSCKMPSPGTASKALIPQRAVAGPARLTVQSTPVKSQPPQLSGSLSQSQVSPNRPILGIPTTAANPTPPRIHQHDQFRALQRVQECHSSSDENRSSGHASMSDTGGHSSSPAGGMTLGPLPEDRLAAGVTNRSTRSRRHRGIMPGGKAPWSGTGLEDIKLAMLTLRSQTSSSTYSSLSAGSESSEPARRLGRYSSLETVVTSTSADEFVWVDSHNRLVELQHPPWSQQCILKVLRNGRCQQQAEHLAVEAVSRLGYLLQRALVRIAREIQRFSAGVGLCSKQEVVGALRVVLSSSLADSCTKACLRSAAMFAVPGESALKQSKSARAGLQLSVGRFYRWMTDARLGKFIHEYAAVYLCAGIENLLEEIALQCNGTTAAALDQSIASSGDVWGLLQPFAHLNAGRIASGALALPRWANSLDQVIASSGDFRGHLATCVGSIRELKEKALRTQQEFQLAAALSGSALAALFYFMRCSQLEHTELLAASGCHAGQAQSAAPGGGTSSAGHHVQELCYERAYVVLPPLAEWLRVAAAHAEHRNAMMIDKDDVMQAARLLLPGVDCPIRPVAHDEELPTKKTHFNTAPTVSSTGTGTGSSSCSSPVVSGIGIGIGEDTSELGRRATIGVAFKLLLTGRAELLAQAAQLLPPTTRYDTQNSAGLTALMIASIRNDEVALHALLDAGCDPNVEVPPAGSAGYPAIQPDTQHWTALSFAASRANYVALRILLERGGKVEGGARSSEEKCTLTPLQLAAGTGNLEIVALLLAHGANAFLSTQQKDSLCFAGSAQKGCFCAISVAAAHGHRSCLRKLLTHPVSPGTRDVLSLEEMLAEGDVGGVRGSGGPTGAGGPNSASASGNNEDILPLLNKTQIKRLQEAMYHSAENNHLDITIELRKLGVPWTLHCWMHALSAAHDLRLDAVIDQLLQDFLQVCPDDYSAQFVSECLPLLFNIFRNKNEGTTLLLADIFATCFGWETLPPVKEQPPMQPVQGSRIDPKFVNNPELSDVTFRVEGKIFYGHKIVLVTASPRFQSMLSSKLSEGSSTPTVQINDIRYHIFQLVMQFLYCGGCSSLDVAHGDVLELMAAASFFQLEGLLRYTEARCSEMVDVDNVVAMYIHAKVYNANRLLEFCQCFLLQNMVALLTYDDSVKRLLFAKKIPNHDVLAGLLQTLQNRLKARKPNSGGGLVNSYRSPPVTPVKK

SEQ ID NO: 23542 - DNA, 3663 bp, DROSOPHILA
gaatataaaaacaagtatttttttgattccctctaacattccttgactttaaaggtcgcttatctggaactccgatctggtggagacgctggagctgcagaatctgttggccaatgcccagatgactattgtgagcgctgaggcgcgcaaggaatcgcgaggtgcccacgcccgcgaggacttcaaggttcgcgaggatgaatacgtaagttactgtcggcactcagcccctgaacttcttatcatggaacaacatgtattgcaggatttcagcaagcccctggatggtcagcagaagaagcccatggatcagcactggcgcaagcacacgctctcgtgggtgtgcaatgacaacggagacattacgctggactacagaaacgtgatcgataccacgctggacaacgaagtctctactgttccaccagcgattcgctcctattaaatcaagacttggagttgcagaacacccgcatatacaccccataccatcactcgtacggatgtctacttaaacgtctttgtgggcgccagtaaataaattttgtcaaatcgccaaatgagccgcaatatgctaccaattggtaactgggaactcggcagcggttccgggcattttgtgatgaaacgtaaatccagattttctatacacctataaatctttcaaatccttattactactccgctgattctacttagtttcactgtaagctgccctccatttggttactgtttggttgtcggttatttacattattacataagcgaaaaatgtgtgtgagtagacaacgagttaggtctgaggcgatattgactacgcagcctgtttagaagcaaatgaaaacaaatccaactacacttttctagtatttgttaaacttattaaattattaaaacgaaaacgtgtaaaaacaataaaaaaagaacaaaagtcgaaacgtttgctatacattaaataaatgtaatgaagattaagtgcgcaactaaatgacttcttcacttagccgcggaatacgtgaatttgattggccttaacatccagttgactcaaaatatctaaggcagcggtattgaatccacttggtccgcaaatgagcacataagtacatctttccggttgatttttctggaacaaaggggctagcagctccagcgctattctttgtggattatcctccgattgggagacataatttgtgcagctgaatctttcgtcgtcggtgtgtagttcatggagtttctcctttaaccagatatcctcattggttttgttaaagtacaataattgtaagctttcactgtaaatgtgggaaataagtaagtttttttcgggactgatttttaagaacttacattcggtttgtatttctcttcaagatgggctgaattaggctcagaattggcgttaatccgcttcccgccgctaggagtagaatatttctatgtgcagtgagatcagagagctggaaggatccacgtggcgcactccaatggacgcgagatccagtttcaagcttttgcaggtgactggagacgggtccgttcggataccttttgatcagaaagtgtaagcattctgatctggatgatctgatgttctccaaacgtagataggtgtgatccactggtgtgtagctgcgctgaattacccgtccctctagtgggacttctatatccacatggtaaccagccggcaggaccatcagaaccttctgcccaacactttgcagacatagttcaaaggagtcgtgattgaaatctttgctgtgaactacttcatactcgaaagtttcatcatgtaatcggctagagtctaatctgttggacacatgtgttccatacgttggccatggttccgcttcctccttgacaaaaactaactcaattttccccgtctccgaaccgattttcgctaactttggaggccattctacattgttggtcagttgaaaatcaaagctgtgccaattgtgctggactagaacccgcacactcagttgctggaggtccttccgccggacaaccaggcctggattagccaggctgcgcgtgtagaagatcagggtaagttcgctcctctgctgaatccaatcaaagcgtggcactatttccggaggctgcaatatcacattggtaatctgtggactttccttggcaggttttgtctcattatcttttagtggtcccacgtagcactttcccaacaattgtggatagttcacccacgcgtgcacctcatcgaacaatttggtggcatcgcgaccaacaccacgcattagctcatccactccgcccggatgaaagtccatgtagcgggtgacattgaagacacgaccacgaatggccatccaggcgtcgtcgatcttgttgtgccgggccaattccgttcgcgacacgggcaccagacgccctccggttcccgatagatccgctccagaattgcacagccgtatccagttcatcagggagtagcccggctttagggcgcacttgttgcgcggattaccagtggccgatccagaagcggatgatccattggagttcagcttctgtggcgcagtgacgggcaactgcaggccaccgccggatcccgcaggagccatcaattggggtggcctcagcggttggttactggcgggtggtttaagggacggatcggacatgattagtccaagaaaaaggtaatcgcgcaaaaatcaacaagctgtttagtgaggagtagtggaaggcgaaacagctgtattttgcttttggtttcgagaaccagttgcgaagtccaaatgaactagttccacggatcttggcggttctatttaaaaatgccaccatatagcttctttaaagaacactccattggagtgggtttaggttgaaaataaataaaagtttataagtaactcttacagtaaatgattattgtaatctgtttaaatattcttagatagataaatttttttttaataagatgatggatttactgaagcattagctttccacttgaacaacaagcaatattactctttaaaatttgtcgttgaattttccataaatgaaatattacctaaatatttataacaagaaattttaaatttattttaatttaatttattttaacgcttttttatgcttttaaatttaaattgaaataattgaaactaattaaaccatcgacgttggatcatagtgcattaacaaatttaattgatacctatatctgcgacagtttctcacgcctttttttttttgaaaccgataaggaatctttatgatttcagacccaccgcaaccaaattgctgttactgattatatggctaaccgcctgagtggcgttaaaggccgtttatgaggtgctataattcttgatgaactaactaaatgtttttatggcacttaaaaattgggaaccacccactttaatttcttcatgtgtgtgagcacaaagcataggtgagacttaaattaatgctgattaatatttatgtatgtatctaatatataatcagagttgagaaaaggggttttttcaacacatttttattaatatatacaagaaacgatttcatgagtttcatttaattattgaatataattaaaatatgtacttcttatacatagctggccactgaatactgacagcatagtcgggcagggaattggcaagc

SEQ ID NO: 23543 - DNA, 1608 bp, DROSOPHILA
atgtccgatccgtcccttaaaccacccgccagtaaccaaccgctgaggccaccccaattgatggctcctgcgggatccggcggtggcctgcagttgcccgtcactgcgccacagaagctgaactccaatggatcatccgcttctggatcggccactggtaatccgcgcaacaagtgcgccctaaagccgggctactccctgatgaactggatacggctgtgcaattctggagcggatctatcgggaaccggagggcgtctggtgcccgtgtcgcgaacggaattggcccggcacaacaagatcgacgacgcctggatggccattcgtggtcgtgtcttcaatgtcacccgctacatggactttcatccgggcggagtggatgagctaatgcgtggtgttggtcgcgatgccaccaaattgttcgatgaggtgcacgcgtgggtgaactatccacaattgttgggaaagtgctacgtgggaccactaaaagataatgagacaaaacctgccaaggaaagtccacagattaccaatgtgatattgcagcctccggaaatagtgccacgctttgattggattcagcagaggagcgaacttaccctgatcttctacacgcgcagcctggctaatccaggcctggttgtccggcggaaggacctccagcaactgagtgtgcgggttctagtccagcacaattggcacagctttgattttcaactgaccaacaatgtagaatggcctccaaagttagcgaaaatcggttcggagacggggaaaattgagttagtttttgtcaaggaggaagcggaaccatggccaacgtatggaacacatgtgtccaacagattagactctagccgattacatgatgaaactttcgagtatgaagtagttcacagcaaagatttcaatcacgactcctttgaactatgtctgcaaagtgttgggcagaaggttctgatggtcctgccggctggttaccatgtggatatagaagtcccactagagggacgggtaattcagcgcagctacacaccagtggatcacacctatctacgtttggagaacatcagatcatccagatcagaatgcttacactttctgatcaaaaggtatccgaacggacccgtctccagtcacctgcaaaagcttgaaactggatctcgcgtccattggagtgcgccacgtggatccttccagctctctgatctcactgcacatagaaatattctactcctagcggcgggaagcggattaacgccaattctgagcctaattcagcccatcttgaagagaaatacaaaccgaattgaaagcttacaattattgtactttaacaaaaccaatgaggatatctggttaaaggagaaactccatgaactacacaccgacgacgaaagattcagctgcacaaattatgtctcccaatcggaggataatccacaaagaatagcgctggagctgctagcccctttgttccagaaaaatcaaccggaaagatgtacttatgtgctcatttgcggaccaagtggattcaataccgctgccttagatattttgagtcaactggatgttaaggccaatcaaattcacgtattccgcggctaa

SEQ ID NO: 23544 - protein, 535 aa, DROSOPHILA
MSDPSLKPPASNQPLRPPQLMAPAGSGGGLQLPVTAPQKLNSNGSSASGSATGNPRNKCALKPGYSLMNWIRLCNSGADLSGTGGRLVPVSRTELARHNKIDDAWMAIRGRVFNVTRYMDFHPGGVDELMRGVGRDATKLFDEVHAWVNYPQLLGKCYVGPLKDNETKPAKESPQITNVILQPPEIVPRFDWIQQRSELTLIFYTRSLANPGLVVRRKDLQQLSVRVLVQHNWHSFDFQLTNNVEWPPKLAKIGSETGKIELVFVKEEAEPWPTYGTHVSNRLDSSRLHDETFEYEVVHSKDFNHDSFELCLQSVGQKVLMVLPAGYHVDIEVPLEGRVIQRSYTPVDHTYLRLENIRSSRSECLHFLIKRYPNGPVSSHLQKLETGSRVHWSAPRGSFQLSDLTAHRNILLLAAGSGLTPILSLIQPILKRNTNRIESLQLLYFNKTNEDIWLKEKLHELHTDDERFSCTNYVSQSEDNPQRIALELLAPLFQKNQPERCTYVLICGPSGFNTAALDILSQLDVKANQIHVFRG

SEQ ID NO: 23545 - DNA, 6878 bp, DROSOPHILA
gtccgtcttgttacccaccaggattttgagtaccttggagttggcatactcctggatctcgcgcagccagtccggcaggcagtcaaatgtgggctggcagctgatgtcgtacaccaggatcaaggcgtgagccgatcgatagtagctttgcgtgatggatcggaaccgctcctggccggcggtgtcccagatttgtagcttgatcttctcgccctccacctccacggtcttaatcatgaaatccacaccaatggtggcaccctggccaggtggaaatagaccctgagtaaagcggcgcactaggcatgtttttccaacaccagcattgcccaccaggacgattttgaacaggaacttgtagtcctccattggggatgttgccaaaaatgggttggttttggggtttttgagtcgctgggtgtgggcaagtgtgtgtgtgctctgcgaaagtagacgaaagttagtcggagcttagacacacctagtcagcgacgcgtaacgattatactttgctggctggtggtggttcgttggatcagcttacgccatccccagcgaagacaacgcctctcacctgtggctcacctggggctctatcactagctggccaacggctgttcgccttgttttttggcttatttggctaaaagatgatgactcaacagcagctgtagatgcttgttactcgcttatctatgcgaatcggccccaaatctattcagcaggctttcggccaggttgactatgcttgcaaatttgtaatcaactggttgcatgctgccgcattaattgccagccttaattttgcttatgtttaccaacagaattttactgtatttcgacgtgatggtatttgattagagatgtgacatcaattcccatagcaatacttaacgatgtttttctcggtatcgatagatcgacgttttgcaaagcacttaaaaactttttgaagtacggtcactagttatcgattgttcatcatcgataagttctgtgacaaccctgaagccgaaaacaagcagccacgctagagaagaaaatctggttgaaaattggcaaaaattctaattaaaaaatcgcaaaagccaaaagagaagttcgtaagtcgtcctacgaattccgctgtgcgtccccaccacattttgatttctccaaacgtgccagacaccgagcaggggacttttttcacggagcaccccgaattgcagcgaagtaattttcgaatatggccgaggactttgatgtggaggcgatgctcgaggcgccgtacatgaaaaacgtaagttcccaaaggccggataacagccaactatcgtttaaattaagtcccactggcttttgtgcccacccaaggcaattattttgctgtgcaaaaacaaaatgaaaaaaaatagaaaaacagttacttcatatgtatgtttgtatacttcttttcccacatagacacccacaggcgtacgtgcattttgtgtttgtatgtaagtcgtcttcgtctcgggcacacacacacacacacacacatgtgcagtcgatgcatactaagtggtcttaaatcgatttttagcctaattttgctgtttaataaaaaatcggcagccggaacgccaatctgcgtgctgattttcgtaatatttttttttcacactagactgcgttcatacagaaaagtgtttcgccaacggaaaatctgtctgtgtgtgggtttgtgttgtttattttcctacgcggcatttgatacagtcgtgtactgcagtgggtgtacagtggggtgcaaaatatttggcagggctgcaatagcaactgaaaacgtttaacaagtatcagggaaacttaaaggattgaattactaacaagacagtcatgattctgtaaactataaaaaacaacgtattttagtgatattttatatctcttactaaacttggactttaatctgtattattgactgaaacggattttgtagcaattggtattcctcttatcttatctgggcaaaccatctgtaataatatttattaataggttaaaactcagccatatgaaatcatacttgaaaaatctcaatatattataaaataatttgtaggttagcaaaccacatttttccgtagcatttacaaatgcaattttcggtgtgttgtggaataaatctaataaaattatcattaattaacccaaaaccaaaatcagcattattgtccgacagctcgccaaggttttagtcaatgtagtagtctatgacatccagctaaagttggaaattaattgaattgaattctttcgccccaaaccaacaactcatgagttcaacgctcctatttcttcctatctgctgtctcactaagaactaccgacaactacccacacacaatcaccattaaaaaatacaaaaaaaaaaaaaaaaaaaaaaaccaaacaaaaatgctagaataattcttaagggtgaaatgtctttgcagagaatcgaataagctcaatattgttgctagagattgttttggtcattctaaacacaaaaagctggagaccatttggtaagttttgaatgtgccagaagctgcgaaaaaaaaccaattacaaaattacaaaacaataaaaaaaaaaaaccaaaacatatctaggcattttgtataaaatatgatttgtttatgtttgcgttttttttttatgaacacaatccaattgaaatcgttaccttactgctctatgtaaaccaatgaaactgaacgtgcactaaatttcagatatactcctcctaacttgtctggggcagcaggcagcactactactactctcactcacagtcagacaagaatgaaagtatcgctcaaattacaaattacagatttacgataaacagaaatcgaaatataagaatatatgaccaacacataagcccaaaacgcaaagccaaagcctaaaacaaaccaaacctatttgaacaaacaaaaaacgtaataagcaattcttaaactatagcactacaatcttacttatattatgtctatgtcctatatatatatagacgacgtctttttgagaaccaatcaaccagtccactccactagccagcgctaaacattcccccaaaactgatctgattgagaatgagaatgagcatgggaaatttgcccatgtggagacaacatttctcgccgtcgtgaaccatctgtgtgtgtgccatatacaaattaaatatattacatatatttaccaaaactacgtataagatatctctctatatctatatccatattactacctttgctaaaaattggcaatgatccccaaatgatcattgttgacttaagcatttctactttatatacttgcagatgccaaaaatttaactaatttactttgatttgctttctcttattcaaaaaaaaaaaaaaaaaaaaatatttacgaaactgaaaaaataatatatcataacaaactcaatgatataatcgaaaatcaaccaacaacgacaacaacgtaacgaacgatcaacgaccgttatgtgttcccacccaccaaaaactgaaaccaatcgacaacaaaaaaaaaaataatccacttatctgtatctacattattgcttgcgcccaaccaaccaacccatatcctccctgtccgatcccgcacccaatccaccaaacaaacaaaacaacctatctgtgtagaatgtcagtgcgggcagcggtggaagtggtggacgcaagcgcagcggcagcagtccaggcggcggcggtggacacgatgacgactacgccgagaatggtccgcggaacggcagcggcggcggaagctcacacaaaaagcaaagcaaacgatcccggtaagattaatcaataattaatatgagttaaagtacttaacgagtcattcctcgttttttttttcactctcgcaggagtagaagcggctcgcgtgatggcaaatctcgacgagatcgcggcaatgaacgcagcagtcatcgggacaaggataaggagcgcgatcgtaaccgcgacggcggcgaccgagatcgacaccgcagggaaggtggcgatcgagatcgggagcgggaacgtgagcgcgaacgcgacagatctcgtcggagtcgttcgcgtgatgagcgcggtggaggtggtcgctacggcgatcgtgacaaggatcgccgctcgcgagatcgacgcggcggcagcaagtcgttgcaagtggatcgctcgcgggacaagcgtcgacgcagtcgttcccgcgatcagcagcgcaaacggctgagtccgatccgtgaacgcaagcgcagccattcccgctcgagggacagaaagtaagttgagatcatagattccaaaccgaaaatgtaacatatgccagagctattctatacctttacctttgtaaagccaacaagacaacttaacgttaactcttccttgttggctccatttcacataatattcttcttacttattttagtagccgccgtcggggaaccaattctccgcgacgccgctcaccaccgaatggagctgatcgcaccacgcccaccgaactcagtcccgaggagcgggacgcccgcaccgttttctgcatccagttgtcgcagcgagtgcgagcccgtgacctggaggagtttttctccagcgtcggcaaggtgcgcgacgtgcgtctaatcacatgcaacaagacgaaacgcttcaagggcattgcctacattgagttcgatgatcctgagtccgtggcactggccctgggcctctctggccagcggctgctcggtgtacccatcatggtgcagcacacgcaggctgagaagaatcgtctccagaatgcagcgccggcattccaaccgaagagtcacacgggtcccatgcgcctctacgtgggatcactgcacttcaacattaccgaggacatgctgcggggcatattcgagccctttggcaagatcgatgccattcaactgatcatggatacggagacgggccgatccaagggctacggctttatcacggtgggttttcgaattatacaaggattcagatgattatttcattaattttaatcattaatttaaactaatttccgggttctattttgcagtaccacaatgctgacgatgccaaaaaggctctggaacagctgaacggctttgaactggccggtcggctcatgaaagtgggcaatgtgacggagcgactggacatgaataccacctcgctggacaccgacgagatggatcgcacgggcatcgatctgggtgccacgggacgtctgcagctgatgttcaagctggcggaaggagccggtttggcagtgccccaggcggctgccaatgcgctgctggctacagcacctcaaccggcgccgttgcagcagcaggaggtggcaccatcgatagccacacagtgcttcatactgtccaatatgtttgatccgcgtaccgagacaaatcctacctgggacgttgagatccgcgacgatgtgctggaggagtgcgccaaacacggcggggtgctgcacatccacgtggacaccatttcgcacacgggaaccgtgtatgtcaagtgcccgagcacaacgaccgcagtgctggcagtgaatgcactgcatggacgctggtttgccggtcgagtgatcacggcggcctacgtgcccgtgatcaactatcacaccatgtttccggactccatcaacgccgtcgatctggtgacgtccacgcgcaagaacaccgacgattgagctgaatgcgtgggcaaaaatattgttaatattcgttacaagaactaatttttggtcaaaacattttcaatttttttaaagactcgacgcaagctgaaaattaggggcacatattaaaatacaattaaatacatttataaatatatatgaatttgaaaattttaacatttctcgccttcaagtaattatgtccgtgaactatattaatgtgtagattgcctgaaatgctgcaagatcatgttacaaatggttaattacgtagtttctagtgcttaatttgtaatttgctagtttgaccgccaaaaatgtaaggacaccgaccgacctatcgattgttggcttgcacggagcttgattttaaaacattggacattgtaacatttcccatacttgttaagccgtagttttactatacagatattttgtagaaaaaagaaacgctaatcaaaaataaattgtaaaattgaaagagtattgagtttcaggcggcgataacgattggcacgacagagcggttatcggtgcacagcgatagtttcgactgcagccctggttcttgcatgtgttgggcagcagccaatcgaaatctggctaaataaaattagttaaactctttgctttgccagcacaaacgcacacagtgcacggtgcacgttgcatattttagacaattaaccaatagaaaacattttccaaatactgacgagcgcgatgttaagtgcggaattgaggaaaattccatgtgacccctgaatttcgtgtgcttgtgtgtttgtgaaagcagcgcggagaaaaaaaaatggcaaacacaagccaactacaacaaatgtaggtaccacacagcaacaacaacaattagaggggctattatagggccgaaaatgaaaattcaataatttgacgccttggcgcaaaggttagtttttccaagagctgtgaaaattattatgaaatgtgagaagtgcgcgcctgtgtgtgttttataattcccacacacacacgcacaactgcgcccccgcaaatttgtgtgcgtgagtgttcatgtgtgtgtatgggcgagtgtgttcatttttttgacctcccccaaacagcatcccccgcccaccgccccaccatgccagctgattcatgctgctggtgataaatcaatgcttctaatcgaa

SEQ ID NO: 23546 - DNA, 2112 bp, DROSOPHILA
caaccctgaagccgaaaacaagcagccacgctagagaagaaaatctggttgaaaattggcaaaaattctaattaaaaaatcgcaaaagccaaaagagaagttcacaccgagcaggggacttttttcacggagcaccccgaattgcagcgaagtaattttcgaatatggccgaggactttgatgtggaggcgatgctcgaggcgccgtacatgaaaaacaatgtcagtgcgggcagcggtggaagtggtggacgcaagcgcagcggcagcagtccaggcggcggcggtggacacgatgacgactacgccgagaatggtccgcggaacggcagcggcggcggaagctcacacaaaaagcaaagcaaacgatcccggagtagaagcggctcgcgtgatggcaaatctcgacgagatcgcggcaatgaacgcagcagtcatcgggacaaggataaggagcgcgatcgtaaccgcgacggcggcgaccgagatcgacaccgcagggaaggtggcgatcgagatcgggagcgggaacgtgagcgcgaacgcgacagatctcgtcggagtcgttcgcgtgatgagcgcggtggaggtggtcgctacggcgatcgtgacaaggatcgccgctcgcgagatcgacgcggcggcagcaagtcgttgcaagtggatcgctcgcgggacaagcgtcgacgcagtcgttcccgcgatcagcagcgcaaacggctgagtccgatccgtgaacgcaagcgcagccattcccgctcgagggacagaaatagccgccgtcggggaaccaattctccgcgacgccgctcaccaccgaatggagctgatcgcaccacgcccaccgaactcagtcccgaggagcgggacgcccgcaccgttttctgcatccagttgtcgcagcgagtgcgagcccgtgacctggaggagtttttctccagcgtcggcaaggtgcgcgacgtgcgtctaatcacatgcaacaagacgaaacgcttcaagggcattgcctacattgagttcgatgatcctgagtccgtggcactggccctgggcctctctggccagcggctgctcggtgtacccatcatggtgcagcacacgcaggctgagaagaatcgtctccagaatgcagcgccggcattccaaccgaagagtcacacgggtcccatgcgcctctacgtgggatcactgcacttcaacattaccgaggacatgctgcggggcatattcgagccctttggcaagatcgatgccattcaactgatcatggatacggagacgggccgatccaagggctacggctttatcacgtaccacaatgctgacgatgccaaaaaggctctggaacagctgaacggctttgaactggccggtcggctcatgaaagtgggcaatgtgacggagcgactggacatgaataccacctcgctggacaccgacgagatggatcgcacgggcatcgatctgggtgccacgggacgtctgcagctgatgttcaagctggcggaaggagccggtttggcagtgccccaggcggctgccaatgcgctgctggctacagcacctcaaccggcgccgttgcagcagcaggaggtggcaccatcgatagccacacagtgcttcatactgtccaatatgtttgatccgcgtaccgagacaaatcctacctgggacgttgagatccgcgacgatgtgctggaggagtgcgccaaacacggcggggtgctgcacatccacgtggacaccatttcgcacacgggaaccgtgtatgtcaagtgcccgagcacaacgaccgcagtgctggcagtgaatgcactgcatggacgctggtttgccggtcgagtgatcacggcggcctacgtgcccgtgatcaactatcacaccatgtttccggactccatcaacgccgtcgatctggtgacgtccacgcgcaagaacaccgacgattgagctgaatgcgtgggcaaaaatattgttaatattcgttacaagaactaatttttggtcaaaacattttcaatttttttaaagactcgacgcaagctgaaaattaggggcacatattaaaatacaattaaatacatttataaatatatatgaatttgaaaatttt

SEQ ID NO: 23547 - protein, 594 aa, DROSOPHILA
MAEDFDVEAMLEAPYMKNNVSAGSGGSGGRKRSGSSPGGGGGHDDDYAENGPRNGSGGGSSHKKQSKRSRSRSGSRDGKSRRDRGNERSSHRDKDKERDRNRDGGDRDRHRREGGDRDRERERERERDRSRRSRSRDERGGGGRYGDRDKDRRSRDRRGGSKSLQVDRSRDKRRRSRSRDQQRKRLSPIRERKRSHSRSRDRNSRRRGTNSPRRRSPPNGADRTTPTELSPEERDARTVFCIQLSQRVRARDLEEFFSSVGKVRDVRLITCNKTKRFKGIAYIEFDDPESVALALGLSGQRLLGVPIMVQHTQAEKNRLQNAAPAFQPKSHTGPMRLYVGSLHFNITEDMLRGIFEPFGKIDAIQLIMDTETGRSKGYGFITYHNADDAKKALEQLNGFELAGRLMKVGNVTERLDMNTTSLDTDEMDRTGIDLGATGRLQLMFKLAEGAGLAVPQAAANALLATAPQPAPLQQQEVAPSIATQCFILSNMFDPRTETNPTWDVEIRDDVLEECAKHGGVLHIHVDTISHTGTVYVKCPSTTTAVLAVNALHGRWFAGRVITAAYVPVINYHTMFPDSINAVDLVTSTRKNTDD

SEQ ID NO: 23548 - DNA, 3017 bp, DROSOPHILA
atcttgggaaattgtaaagaattttctgtttcttacagagtatacacatttctagtaagccattctttgacttaaaacaggatgctttcatttgtctcgttctctgtctaccttttaactccatttcaaaaaagttttgatctggcgccacacaagacaagaagtccccccaataagcccttaagccattaataaacacatctttcccccattttctggccccaaagaataatgccttccgcccctcaactaattttatggtttgcccatcaaacggagccatgaacaccccgatctgaacaccaggccaatcaaacctcatgaccttctcctcgcataaaagccgccaaatgtttggcgtataaaaacaaataagacaaagtacacagacataaaccacgcccccgacgcccccaagatgatcagcactgggaaatttgttagcgtgttatgtaaattgcacacaagaggaaaacgaggcctggatggatacattatgtaaataaaagaaataataagctcacacgaatccagaaacaaaagcccagggtaaaatgcgaacatgtatgtttattattttcatgatgcgttgatgacatttgaagttggggtcctcgcacattaaggatgtgtcgtttgaaattgacatcgttgtgtattcgacttttattttctatataccatttagcatttaaggagacacattattctaacactcactatcataagatacaattttataatgccccttacatgtgtaaagtagtaaataatatattacttttaagatacaaattttatatatccagtaggctgccttacaattacgaaaaacttcattgtttagtaataattcatcaagccacctcgtacacttaatgttttcttttttaagttcttaaggttgcaattttatatttaatttgaggaacgtgctaaattttctgaaaacgcttctcaaaattactccaataactgaattgtcaagacagatgaaaagatgcctgcctttatgcacctccttcgcaacttcattcccaagtggtgtctcccacgtccagagaagcatctccagaaccacatattccgtcagctccagacgaatcacccatccgccgcactggtggccatcaaaacaagtgaacaggtgctgcccaagtgcagattcatgcagtaccggcgcgccaatgagcaggtgaagcgattgggcatggtctccgaggatggcagcaagatggcggagctatcgagcatgacctgcgccgcccccaatatgatggacttcatccagcagagatactgcatggttagcctgctggacagtgtgcaattcatgaagatcgaggatgtggaggccgtggatctccgcctgctgccacccatcgattcccccagtaagatcattggcgtggactgcaactatgtggataactgtgatgagcagcacatctcgattccgagggagccgagttttcacgtcaagttcgcctcctcgataaccggagctctggacaacatacgggcgcatagttcggccaaacacattgactatggctgccagttggccgtggttatgggcaaaagatgccgtgaagtttcgcccaaagaggctctgaatcacgtatttggattcatggtggtccaggacatcgtggcaagggactggaatgttccgctgggcggtcactcaatggatactttcctcccactgggacctacaattgtgcacaggtgccatgtgccagacttaaacaatctgtggattaagacaatcatcaatggcgaggagcgccagacgggcaatacccgtaatatgatattcaagatcgacttccttattcaccgcctatcccaatatttaactctctgtccgggcgacattatactaacgggaacacccgccggatcgggtgcatttcgtcatccgtcgtgctttttgaagcccggtgatcttatagagagcgaaattcaaaatttgggcaaaatgtgcaataaagtcgttaattcctattcttgatgaaatcatacgtattgtgctcagccaacggataatctgaaaactgaaggaaacctaactatgtaggttaattgcatccacattagtggtttctaacgatcttcgatgatagtattaaatcgaggtcgtactattaccaatgtttttaaccgaaagaaacaaaatcaaaaaaaatataaacgttgaatgaatcaaattgttacaagtcaaataaaaatcacgtatgtccccaaattccccatcgcaaattcttccatcgtcattattggccaataaatttgggcccatgccaagccctggatgaagccagataaccatgtcaggaggaaggcactggtgggatcctaatatgcaacgcggaagtgatgggtggcgggaaaatcattttgtaatataatttgtttggctcgatggtttgcaggaagggggcggccacaaagattgggtgatggctacacttttatgatacgcccaagcataatcaacattatcctcagagagtcacaagccgcaaacacggcgcctacaaagggaagaatggggaatccccgctgcgaaagccacggcgcattatcatctcattgcacaggacttaatcctgcggcaagttattaaagcgtaacgcgttccgtccgtgtcctttgccaatgcctttgcttctgctcctgctcctgctcctcgagtccttggatccctgaatcctgctccctttttattgttcgcgctgcgcttaacttgtttcgcattgaaacaggacaaagagggcggtggaatattaggggtgtgactgggtcggtaggcgacgccgccttaatgctaaatgatccaatatcctgtttcctgcatttgtgctctgcagcagcgttaaaaggtcctttgtggcctccgcccagcctccgttcgccattatttgccttggccaacttaaagatgttttccctctaagccaacttttcaccacccccagtctcgctctcaattatttgcttagcaaaaagga

SEQ ID NO: 23549 - DNA, 1017 bp, DROSOPHILA
atgcctgcctttatgcacctccttcgcaacttcattcccaagtggtgtctcccacgtccagagaagcatctccagaaccacatattccgtcagctccagacgaatcacccatccgccgcactggtggccatcaaaacaagtgaacaggtgctgcccaagtgcagattcatgcagtaccggcgcgccaatgagcaggtgaagcgattgggcatggtctccgaggatggcagcaagatggcggagctatcgagcatgacctgcgccgcccccaatatgatggacttcatccagcagagatactgcatggttagcctgctggacagtgtgcaattcatgaagatcgaggatgtggaggccgtggatctccgcctgctgccacccatcgattcccccagtaagatcattggcgtggactgcaactatgtggataactgtgatgagcagcacatctcgattccgagggagccgagttttcacgtcaagttcgcctcctcgataaccggagctctggacaacatacgggcgcatagttcggccaaacacattgactatggctgccagttggccgtggttatgggcaaaagatgccgtgaagtttcgcccaaagaggctctgaatcacgtatttggattcatggtggtccaggacatcgtggcaagggactggaatgttccgctgggcggtcactcaatggatactttcctcccactgggacctacaattgtgcacaggtgccatgtgccagacttaaacaatctgtggattaagacaatcatcaatggcgaggagcgccagacgggcaatacccgtaatatgatattcaagatcgacttccttattcaccgcctatcccaatatttaactctctgtccgggcgacattatactaacgggaacacccgccggatcgggtgcatttcgtcatccgtcgtgctttttgaagcccggtgatcttatagagagcgaaattcaaaatttgggcaaaatgtgcaataaagtcgttaattcctattcttga

SEQ ID NO: 23550 - protein, 338 aa, DROSOPHILA
MPAFMHLLRNFIPKWCLPRPEKHLQNHIFRQLQTNHPSAALVAIKTSEQVLPKCRFMQYRRANEQVKRLGMVSEDGSKMAELSSMTCAAPNMMDFIQQRYCMVSLLDSVQFMKIEDVEAVDLRLLPPIDSPSKIIGVDCNYVDNCDEQHISIPREPSFHVKFASSITGALDNIRAHSSAKHIDYGCQLAVVMGKRCREVSPKEALNHVFGFMVVQDIVARDWNVPLGGHSMDTFLPLGPTIVHRCHVPDLNNLWIKTIINGEERQTGNTRNMIFKIDFLIHRLSQYLTLCPGDIILTGTPAGSGAFRHPSCFLKPGDLIESEIQNLGKMCNKVVNSYS

SEQ ID NO: 23551 - DNA, 3615 bp, DROSOPHILA
tgggaaagttatcaagctatattcgtttcaattcgtttcggttattatcgaaaaatgaagaaaacgccgaaaggccacagaaactttcatagtggtcgtaactttttccccatcggccaaacgacatttgaagtcaattgtcgtcgcgtcgtgcagaaaaagcgttcgaccgtcgctacgtatataaataaaattaaattactactaacaattgaaacaaacgcactgccacaaagaaaacgaaagaaatattgtttgtcccccacgaaacatgagacccccatgatccccccacctgccccatccgcacatctccatcctcgcatcacacgctacgcatgcgcagtgtcaacgcaacttttcagcgaaagtgactgaacgagttccaattgtccacggccgacgctccaaacgcctttatcggtggccaacaatcaagtggcctgccgtaatatgtagctgccaaaataaatgaaaacgaaatgcctgcggactgactgctgccaaaaaccaggcatgttttccaaaaaggttactaactctttacgtctagactttagactgctagactgcccatattagcataggtagctttcaaattctgcagctcattcattttctatttcaccaaactatcttaactatgatataatgtcaatagtataagtaacatatggaggatacttacatttacattacattttaatagtttaacatcatcctataacacctattagttctcagttttattttctagcttattttcttttaacaccattttagaaaaggcatacaaatatgccaaattttcacttttttaaagaccttttaagcatgttcagtttgctctgataattggtataccagaagattggcattcaaatttaacgttaaaactacatatcttagatatgttttatttattaagagaatcctagcaacctgtgactgccatgacaacctaaaataataatttaactcagtccccagtctttcgttagtcgtcagtcttagcaaaacaagccggataaaacgtgttttgaaatatccgaaaaaatattaaaatcagtataaaaacaaaatggtaaactttgtgcaccccgaggaaatgtatctctttgtggagagcattcgtccatttgaggtgcgtgaggtgggcagcccgaagtggctggaggtgcacgagatgatcctcgggctgagccagcaggccgccttggagctgtcccagaatcgcgaggaggaggtgaaggagttcctcatctcgcgcgacaagctacgcgtgctgatccacgaagcctattgcgtaacgttgtggaagacgcgtgttctgccgcatctgctggagattgatcccaatccgcaggccacgttccttatctacacggtgctatatcacgaggctgctttggtagcgcttctggatgtgtgcctctaccatccgagtggctgtgagacgctgcaggagtccgtgctggatttgattgactattgcgcccaggccatttcccaggtcattggcttggttagcatgggttaccacgagaacgagacaaagctggacgtggatgaggcagtgctcacggagctggagcgccagaagcgcgactttatctataagattggactgcgctgcatctcagtgctgaactacatagcagataatgtgacattgtttcatctaagcgccgcacgccgtttgctggtgacccatgacattccgtggctcatggcagatgtgcttagcttccggtgagcagcacggataagtgagtttttttttatattttacacatttctcctcgttttagtccgtggcagagaaagaccagcaagggcattcagaagttcatcgacgagaagtggaccaatgtggacgacgtcaccaagattgtcaagccagaggcgcaggcctggttttgtgtgcgtcagctgctccttaatcctcagatcatggagaactatgctttcaacgaggcacgctgcaagcagttacacaaggttagttgccacctacatatatctatgattaatgcgctgacttaccaagctgacttccttagcttttgggtctcatgcacgagccgttgctggaccagctgccgccacttatagagctaaaggtgttcctcagccgcctgacgctcagcggcaatacggccaagacacagccgctcttgctggaggacattccgcagatccaggaggaactgctcaaggatgtcgaggaaaatggcggcttctatcagattgcccaggatcaggactcggttttccttagcaagaacaaggaaaacatctgcgctttggccactcgcctcagcaaagcctacggcacggacttgctctgtgaactggagcagaatatggatgatctcaagatgggcgaagcaaaggatgccggcgctggtggcgatggagatacggaccatacttgcgccacttgccaggcgaaggccaaaaagaagtgtgcctgctgcaagaaggtgcactactgctcccggtgggttggacgcaacttttgcggagttcgcttcttctataatattttttctttcagtgattgtcagctcaaggattggccacagcacaagctcgtctgccttaaaacttaattgtgacccagcgtctagtatacaaaataattttttcaatataatagaacattccaaaaatgtaaaaaggtcgactttcttttattttttcatctggattcaggttcaatacgttttattttcaattagcgaatagcttaaaaagaactttcacgtagtctctcattcagcaggcagtgcgcagctgtttagctgttctgcctgagatggtccttaaccacgtccaaagcgggtgtctcctcaccgaaatccttgatcacgaccacggagcagccgcacaccttgcggggcttgccctccttgtcgatcttgcacagaccggaccattcgcccagcttcttgtgcgagtccacgcggataagggggatctggtgctcgttgcacagggcggtaaccagcttcttgtagttgggctcgtcgaaggactcggctaggatgcacagaacagcctgacgcctgttggtaaaacaatatattgtaattaggaatggttttttttcatacaatgcaactcgatacgctgtcatttgctcagtaattggaaggtttttaatcaatataaattcataaacacggaccaattaatttcatcacagtcagaacagcaaaatcaagatgatttaatgtggaaacacacttgggatttatctttaatgcacttagtggattattataaatatcattacgattaataaacgattaaaaaattcaaggaggaaataagattcatttcctgaaaataggttaagttgaatgaagacccacactttttaaaacgtggtctatgtatttcaaatgatttgaactgaaatatatatttctatcaatcatatagattgctttcaactatagaatggtcgactttgaaatatattactatagcttttaccctttcgcattttgcatctaagagcccaagtgaataaccacgttgaccgccagattgtgggactacttacttgtccagggccttgcaggcctggtggatgccatggacgag

SEQ ID NO: 23552 - DNA, 1437 bp, DROSOPHILA
gtcgtcagtcttagcaaaacaagccggataaaacgtgttttgaaatatccgaaaaaatattaaaatcagtataaaaacaaaatggtaaactttgtgcaccccgaggaaatgtatctctttgtggagagcattcgtccatttgaggtgcgtgaggtgggcagcccgaagtggctggaggtgcacgagatgatcctcgggctgagccagcaggccgccttggagctgtcccagaatcgcgaggaggaggtgaaggagttcctcatctcgcgcgacaagctacgcgtgctgatccacgaagcctattgcgtaacgttgtggaagacgcgtgttctgccgcatctgctggagattgatcccaatccgcaggccacgttccttatctacacggtgctatatcacgaggctgctttggtagcgcttctggatgtgtgcctctaccatccgagtggctgtgagacgctgcaggagtccgtgctggatttgattgactattgcgcccaggccatttcccaggtcattggcttggttagcatgggttaccacgagaacgagacaaagctggacgtggatgaggcagtgctcacggagctggagcgccagaagcgcgactttatctataagattggactgcgctgcatctcagtgctgaactacatagcagataatgtgacattgtttcatctaagcgccgcacgccgtttgctggtgacccatgacattccgtggctcatggcagatgtgcttagcttccgtccgtggcagagaaagaccagcaagggcattcagaagttcatcgacgagaagtggaccaatgtggacgacgtcaccaagattgtcaagccagaggcgcaggcctggttttgtgtgcgtcagctgctccttaatcctcagatcatggagaactatgctttcaacgaggcacgctgcaagcagttacacaagcttttgggtctcatgcacgagccgttgctggaccagctgccgccacttatagagctaaaggtgttcctcagccgcctgacgctcagcggcaatacggccaagacacagccgctcttgctggaggacattccgcagatccaggaggaactgctcaaggatgtcgaggaaaatggcggcttctatcagattgcccaggatcaggactcggttttccttagcaagaacaaggaaaacatctgcgctttggccactcgcctcagcaaagcctacggcacggacttgctctgtgaactggagcagaatatggatgatctcaagatgggcgaagcaaaggatgccggcgctggtggcgatggagatacggaccatacttgcgccacttgccaggcgaaggccaaaaagaagtgtgcctgctgcaagaaggtgcactactgctcccgtgattgtcagctcaaggattggccacagcacaagctcgtctgccttaaaacttaa

SEQ ID NO: 23553 - protein, 451 aa, DROSOPHILA
MVNFVHPEEMYLFVESIRPFEVREVGSPKWLEVHEMILGLSQQAALELSQNREEEVKEFLISRDKLRVLIHEAYCVTLWKTRVLPHLLEIDPNPQATFLIYTVLYHEAALVALLDVCLYHPSGCETLQESVLDLIDYCAQAISQVIGLVSMGYHENETKLDVDEAVLTELERQKRDFIYKIGLRCISVLNYIADNVTLFHLSAARRLLVTHDIPWLMADVLSFRPWQRKTSKGIQKFIDEKWTNVDDVTKIVKPEAQAWFCVRQLLLNPQIMENYAFNEARCKQLHKLLGLMHEPLLDQLPPLIELKVFLSRLTLSGNTAKTQPLLLEDIPQIQEELLKDVEENGGFYQIAQDQDSVFLSKNKENICALATRLSKAYGTDLLCELEQNMDDLKMGEAKDAGAGGDGDTDHTCATCQAKAKKKCACCKKVHYCSRDCQLKDWPQHKLVCLKT

SEQ ID NO: 23554 - DNA, 4373 bp, DROSOPHILA
ttagccttgcttggtcagtaattggagaatttataatcaatggaaattcataaacacggaccaattaatttcatcaacaagaggtttttccgagcaaggcgtaaaatgcgtttatcgcccatgaaacaattacttacacatcaacgtcggccattgttctgcggttaaggatgcactgcactggaaaagatagttaattgttcatatttattacattttcgataagaaaacctcttcatttcggagaaataaaatccaagcatctgtaccttttgacaaccggaaagaaagagaacaaaatcggcatggcgctggagatgtgagtttttagctattggtacaaatatcgatagtttcgcagagctgcatagtgacgcgatcgatagtggtgtgcaatggaaatttatgccaatttcttacttgctatgacattatcttaacttagatttcttaaatattttaacttttctgatgaactttttctaattaaatgatttttttttatcccaataagcttgagtgggtttcccagttttctggtatatattatattatatctttaagagaaagaatgttgctacagaaatctatctatacatctataatctgtccttgccacttgttccagttattactttgtttttacatgattttgtaaaagtgttaaatttaaagatttatatttggaaagcaattatattctacagaaatctattctaattcgtgcaatttttgcgcagtgcacatgaagtacatttaatctctttgttataaacttgaacttaacaaccttctgtggaatgctaattaaaaatatttatatatttaagagtaacatcattgctatcgtacaaatatatttcaatacaattgcgatgaaaagttctttcgctcttttagcagtgcacagagttaccgttttgcgagttaccacgcattagccacagatgcgtcacctgcggcacctggtaacactgagataaacaataccgaattcccaaacgcccgcaactcgcgcttccgacgacagcagcccgtggtaaatcacctataaatataaatatacgtgactatatctcccgattcgattctacgccggatagcgacttatacgagttgagagcgcaggcggccacctgaagtgcaataccttgtttatgtttacataagaaggcagcagcagcaacaacaacaatcacacgaggagaatgacgagcacgctacagtaagttgcaagtgtagtgggttagtattattaaccaaatagaaaagtgtaagaagactataaaaaaataggcaccatgtgctcccgattctcgtgtcgcaacacacacgcacaaccacataattgccgaaaatttacagcggcatgtgaaaatcgtgtgctatgtgtatagtatatatgtgtgtctgtgtgcgcgtgtttgccttcgttatctggaactcacagaaactacgatctctgaatgttgatccgtaaaatacaataagtagtaggggtgtgccggtgagcgtgtgaatgaattaatatgtatatatatccggccaggttcatcgccgccagaatcgctcgaatccgaaatatgcaactgataagcagggcgaattcttgccaacaactacaaacattatcgtaaacaagagcacactggcgtcccaaaaagtgatgatgcctagattaggtgccataatttcatatatgtacctatacttattcgtccaacaaatagtttgctagattaatattatggcagaatattcaatgagttctaaagaaccatgaataatacctagtattgttatttttgcatcataaaaacctttatgagaattagtttatgtgcagtacacaccgggcgtatgcgcaatatttcgactgtcagtcttctttcactggaggtagggctatctctgaggttcatcgcgccagctgattgcgcttaaaagctctggttgaacgcaatgttgactggtatcgttaattgggcgcattagctagaggccctcagacgagcaacatgtgcgatcgcgtcaggtttggggctactgctatgtacttagcgaaactaataatccaaataatatattttttttttgttccacagagaaggaatcctggtcggatgcggcaacccgctgctggacatctccgccgttgttccactgaacttcctgcagaagtactctatgaacgaggatgatgcgatccttgccgaggaccgacacatgcccatctacggggagctggtcgaaggctaccaggctgagtttctggctggcggatccgtgcaaaattctctgagaattgcccaatggattcttcgacagcccagggtggctgtgttcttcggctgcgtcggcgaggatcggtacgccaatatcttgaaggaaaaggcgcaagccgccggactggatgttcactaccaggtgaagaaggacgtgcccacgggaacctgtgccgttctgatcaccggcacccaccgatcgctctgcgctaatctggcggccgccaataacttcaccatcgatcacctggaggagcccagcaacaaggctctggtggataacgcccagtactactacatttcggtgagttctgtacaatcgatgccggaagtaataaattaatggcacaaagggaagtaagtagttaagcgatttctaaagagttagagagattaatcagagatattaatcagagtttagttccttaatttcacattaattttgttcttacctacctaaaaaatctttacttaattttacttcccttgctttgttctttaaaacataaagatatcgtatgtataatacttcttattatttcatttcccagggcttcttcctcactgtgaacccgccaagcattatgcaggtggcggccaccgcccacgccaaacagcgaccgttcctaatgaacctcagcgcaccattcatatcgcaattctacatggcaccgctgctggccgccctgccttacgtggacatcatctttggcaacgaggcggaggctcaggcgttcgccgaggcccagcagtggcctagcggggacctgcgcgagattggcaagcgactggtggcgatggagaagaaaaacccgacgcggccgcgcattgccattctcacgcagggctgcgatcctgtactgcttatacagcaggattcggtgcaggaattcccggtcacgaaattggcggtgcatgaaattgtcgataccaatggcgctggggatgcattcgttggaggtttcctatcgcagtttgtgcagggcaagtcgctggatgtctgcatcaggtgcggaaactatgcagccgggcacattatcaagaatccaggttgcacatactccggcgaaccggagttcgttgagtaaaaccggatgcggaagctacagaaaccttacacacatcggacatcgaaggagccagacaaagcgcagcaagatttgcaattgttaattaagtaaatgagagtgactaaaagattttgttaacactgataattgtttgtacatacatataacccacactcagacacatacaaaagcatacacatgtgaaatgacatgaacaaatagagagagtgaggcttgtgtcttatagatagagcaatattcgaatttaaattgataataaaacaaaagtgacacgcgagcgagacacaaaagtcaacattttgtacaacttgaaatctttgtattgattttcagataagaggtgaaaggaggtttatttcctcatccttttatttattgggtttcttatccatttatggtataagataccaatcgggagaataatgcatacgactacaatgtccaaagttacaacgaggagtcatcagcagataagattatcaacaacgatagatagacgagttaaacattaaataaaacttgtgaaacacgcagctgtttcatttgcttgctaatgcggcccataaattcacaattaacccaaaaaagaagattagattatcagttcagcaacatgctttgactagtttatgaatacaaaacaacatgctaaatattagaaaacttatttggaaaaaacaatgtgcttgtaaatcttttttttttgctatacaaaagagaactgctgtataccttgtatacctaaacctaaaatagaattttgttttgtttgccatggcgacttgtgacattgaaccccagatcagaggcactaatcgaccagatagccccggatgaagggcaggcccgttggcacccgcttttgatagcgcacatagtccgactggaagaagttgagcagggagtactcctcgacgtagatgcgatcgtggaagaacagccagctgaccagtgtgtaaatgcatatgcagatgggattcaatagcacgatctgggt

SEQ ID NO: 23555 - DNA, 1246 bp, DROSOPHILA
aacgcccgcaactcgcgcttccgacgacagcagcccgtggtaaatcacctataaatataaatatacgtgactatatctcccgattcgattctacgccggatagcgacttatacgagttgagagcgcaggcggccacctgaagtgcaataccttgtttatgtttacataagaaggcagcagcagcaacaacaacaatcacacgaggagaatgacgagcacgctacaagaaggaatcctggtcggatgcggcaacccgctgctggacatctccgccgttgttccactgaacttcctgcagaagtactctatgaacgaggatgatgcgatccttgccgaggaccgacacatgcccatctacggggagctggtcgaaggctaccaggctgagtttctggctggcggatccgtgcaaaattctctgagaattgcccaatggattcttcgacagcccagggtggctgtgttcttcggctgcgtcggcgaggatcggtacgccaatatcttgaaggaaaaggcgcaagccgccggactggatgttcactaccaggtgaagaaggacgtgcccacgggaacctgtgccgttctgatcaccggcacccaccgatcgctctgcgctaatctggcggccgccaataacttcaccatcgatcacctggaggagcccagcaacaaggctctggtggataacgcccagtactactacatttcgggcttcttcctcactgtgaacccgccaagcattatgcaggtggcggccaccgcccacgccaaacagcgaccgttcctaatgaacctcagcgcaccattcatatcgcaattctacatggcaccgctgctggccgccctgccttacgtggacatcatctttggcaacgaggcggaggctcaggcgttcgccgaggcccagcagtggcctagcggggacctgcgcgagattggcaagcgactggtggcgatggagaagaaaaacccgacgcggccgcgcattgccattctcacgcagggctgcgatcctgtactgcttatacagcaggattcggtgcaggaattcccggtcacgaaattggcggtgcatgaaattgtcgataccaatggcgctggggatgcattcgttggaggtttcctatcgcagtttgtgcagggcaagtcgctggatgtctgcatcaggtgcggaaactatgcagccgggcacattatcaagaatccaggttgcacatactccggcgaaccggagttcgttgagtaa

SEQ ID NO: 23556 - protein, 345 aa, DROSOPHILA
MTSTLQEGILVGCGNPLLDISAVVPLNFLQKYSMNEDDAILAEDRHMPIYGELVEGYQAEFLAGGSVQNSLRIAQWILRQPRVAVFFGCVGEDRYANILKEKAQAAGLDVHYQVKKDVPTGTCAVLITGTHRSLCANLAAANNFTIDHLEEPSNKALVDNAQYYYISGFFLTVNPPSIMQVAATAHAKQRPFLMNLSAPFISQFYMAPLLAALPYVDIIFGNEAEAQAFAEAQQWPSGDLREIGKRLVAMEKKNPTRPRIAILTQGCDPVLLIQQDSVQEFPVTKLAVHEIVDTNGAGDAFVGGFLSQFVQGKSLDVCIRCGNYAAGHIIKNPGCTYSGEPEFVE

SEQ ID NO: 23557 - DNA, 3371 bp, DROSOPHILA
cgcccgcaactcgcgcttccgacgacagcagcccgtggtaaatcacctataaatataaatatacgtgactatatctcccgattcgattctacgccggatagcgacttatacgagttgagagcgcaggcggccacctgaagtgcaataccttgtttatgtttacataagaaggcagcagcagcaacaacaacaatcacacgaggagaatgacgagcacgctacagtaagttgcaagtgtagtgggttagtattattaaccaaatagaaaagtgtaagaagactataaaaaaataggcaccatgtgctcccgattctcgtgtcgcaacacacacgcacaaccacataattgccgaaaatttacagcggcatgtgaaaatcgtgtgctatgtgtatagtatatatgtgtgtctgtgtgcgcgtgtttgccttcgttatctggaactcacagaaactacgatctctgaatgttgatccgtaaaatacaataagtagtaggggtgtgccggtgagcgtgtgaatgaattaatatgtatatatatccggccaggttcatcgccgccagaatcgctcgaatccgaaatatgcaactgataagcagggcgaattcttgccaacaactacaaacattatcgtaaacaagagcacactggcgtcccaaaaagtgatgatgcctagattaggtgccataatttcatatatgtacctatacttattcgtccaacaaatagtttgctagattaatattatggcagaatattcaatgagttctaaagaaccatgaataatacctagtattgttatttttgcatcataaaaacctttatgagaattagtttatgtgcagtacacaccgggcgtatgcgcaatatttcgactgtcagtcttctttcactggaggtagggctatctctgaggttcatcgcgccagctgattgcgcttaaaagctctggttgaacgcaatgttgactggtatcgttaattgggcgcattagctagaggccctcagacgagcaacatgtgcgatcgcgtcaggtttggggctactgctatgtacttagcgaaactaataatccaaataatatattttttttttgttccacagagaaggaatcctggtcggatgcggcaacccgctgctggacatctccgccgttgttccactgaacttcctgcagaagtactctatgaacgaggatgatgcgatccttgccgaggaccgacacatgcccatctacggggagctggtcgaaggctaccaggctgagtttctggctggcggatccgtgcaaaattctctgagaattgcccaatggattcttcgacagcccagggtggctgtgttcttcggctgcgtcggcgaggatcggtacgccaatatcttgaaggaaaaggcgcaagccgccggactggatgttcactaccaggtgaagaaggacgtgcccacgggaacctgtgccgttctgatcaccggcacccaccgatcgctctgcgctaatctggcggccgccaataacttcaccatcgatcacctggaggagcccagcaacaaggctctggtggataacgcccagtactactacatttcggtgagttctgtacaatcgatgccggaagtaataaattaatggcacaaagggaagtaagtagttaagcgatttctaaagagttagagagattaatcagagatattaatcagagtttagttccttaatttcacattaattttgttcttacctacctaaaaaatctttacttaattttacttcccttgctttgttctttaaaacataaagatatcgtatgtataatacttcttattatttcatttcccagggcttcttcctcactgtgaacccgccaagcattatgcaggtggcggccaccgcccacgccaaacagcgaccgttcctaatgaacctcagcgcaccattcatatcgcaattctacatggcaccgctgctggccgccctgccttacgtggacatcatctttggcaacgaggcggaggctcaggcgttcgccgaggcccagcagtggcctagcggggacctgcgcgagattggcaagcgactggtggcgatggagaagaaaaacccgacgcggccgcgcattgccattctcacgcagggctgcgatcctgtactgcttatacagcaggattcggtgcaggaattcccggtcacgaaattggcggtgcatgaaattgtcgataccaatggcgctggggatgcattcgttggaggtttcctatcgcagtttgtgcagggcaagtcgctggatgtctgcatcaggtgcggaaactatgcagccgggcacattatcaagaatccaggttgcacatactccggcgaaccggagttcgttgagtaaaaccggatgcggaagctacagaaaccttacacacatcggacatcgaaggagccagacaaagcgcagcaagatttgcaattgttaattaagtaaatgagagtgactaaaagattttgttaacactgataattgtttgtacatacatataacccacactcagacacatacaaaagcatacacatgtgaaatgacatgaacaaatagagagagtgaggcttgtgtcttatagatagagcaatattcgaatttaaattgataataaaacaaaagtgacacgcgagcgagacacaaaagtcaacattttgtacaacttgaaatctttgtattgattttcagataagaggtgaaaggaggtttatttcctcatccttttatttattgggtttcttatccatttatggtataagataccaatcgggagaataatgcatacgactacaatgtccaaagttacaacgaggagtcatcagcagataagattatcaacaacgatagatagacgagttaaacattaaataaaacttgtgaaacacgcagctgtttcatttgcttgctaatgcggcccataaattcacaattaacccaaaaaagaagattagattatcagttcagcaacatgctttgactagtttatgaatacaaaacaacatgctaaatattagaaaacttatttggaaaaaacaatgtgcttgtaaatcttttttttttgctatacaaaagagaactgctgtataccttgtatacctaaacctaaaatagaattttgttttgtttgccatggcgacttgtgacattgaaccccagatcagaggcactaatcgaccagatagccccggatgaagggcaggcccgttggcacccgcttttgatagcgcacatagtccgactggaagaagttgagcagggagtactcctcgacgtagatgcgatcgtggaagaacagccagctgaccagtgtgtaaatgcatatgcagatgggattcaatagcacgatctgggt

SEQ ID NO: 23558 - DNA, 1054 bp, DROSOPHILA
ccctcagacgagcaacatgtgcgatcgcgtcagagaaggaatcctggtcggatgcggcaacccgctgctggacatctccgccgttgttccactgaacttcctgcagaagtactctatgaacgaggatgatgcgatccttgccgaggaccgacacatgcccatctacggggagctggtcgaaggctaccaggctgagtttctggctggcggatccgtgcaaaattctctgagaattgcccaatggattcttcgacagcccagggtggctgtgttcttcggctgcgtcggcgaggatcggtacgccaatatcttgaaggaaaaggcgcaagccgccggactggatgttcactaccaggtgaagaaggacgtgcccacgggaacctgtgccgttctgatcaccggcacccaccgatcgctctgcgctaatctggcggccgccaataacttcaccatcgatcacctggaggagcccagcaacaaggctctggtggataacgcccagtactactacatttcgggcttcttcctcactgtgaacccgccaagcattatgcaggtggcggccaccgcccacgccaaacagcgaccgttcctaatgaacctcagcgcaccattcatatcgcaattctacatggcaccgctgctggccgccctgccttacgtggacatcatctttggcaacgaggcggaggctcaggcgttcgccgaggcccagcagtggcctagcggggacctgcgcgagattggcaagcgactggtggcgatggagaagaaaaacccgacgcggccgcgcattgccattctcacgcagggctgcgatcctgtactgcttatacagcaggattcggtgcaggaattcccggtcacgaaattggcggtgcatgaaattgtcgataccaatggcgctggggatgcattcgttggaggtttcctatcgcagtttgtgcagggcaagtcgctggatgtctgcatcaggtgcggaaactatgcagccgggcacattatcaagaatccaggttgcacatactccggcgaaccggagttcgttgagtaa

SEQ ID NO: 23559 - protein, 345 aa, DROSOPHILA
MCDRVREGILVGCGNPLLDISAVVPLNFLQKYSMNEDDAILAEDRHMPIYGELVEGYQAEFLAGGSVQNSLRIAQWILRQPRVAVFFGCVGEDRYANILKEKAQAAGLDVHYQVKKDVPTGTCAVLITGTHRSLCANLAAANNFTIDHLEEPSNKALVDNAQYYYISGFFLTVNPPSIMQVAATAHAKQRPFLMNLSAPFISQFYMAPLLAALPYVDIIFGNEAEAQAFAEAQQWPSGDLREIGKRLVAMEKKNPTRPRIAILTQGCDPVLLIQQDSVQEFPVTKLAVHEIVDTNGAGDAFVGGFLSQFVQGKSLDVCIRCGNYAAGHIIKNPGCTYSGEPEFVE

SEQ ID NO: 23560 - DNA, 2688 bp, DROSOPHILA
aaggcgataacgaggaactccgagtagtggaaaagggacatgaagcatccgtaggcgccaaattgctgccactcggtgggagcaaagcagatgaccagcacactcacggccatggcaaagcccaggaaggatgccctaatggccacctgtggtgcaagaatagttagcgccatagcactgataaggtttatcgcgtctcatcgattgactcacctggtagtcgtggttccgcagcacaaaccgtatgatcatgttaataagggcgtagtacaaaaatggaccccagaggacggcgccccacacctgtggcaccactccataaagattctggggcaccgagggaatcaggactagagctgcagtaatcagaaagcaatataaactgatgcggccttcggaacacaggctggtgccaccggccccaggagaagccactcggctctttgcacacataactggggaatcgggattctttttgtgctgctgctgtgcgcaaaaacacggaaattgaggttttttaaaacatttgcttggtttaatgcgccaaaatgtaaataaaccggcaaagctttcgataacgataggcagcacagtgaataaccgctaaagtataggctcgtgattatcatagaaatcagtaatataattcttacagcttttaataaaataaatcataaatcataaattaaattaaataaataaatatttaacaccacgtttagcagaaaatggttttaaaaataaattatgcgggcaattctctttagcctataccccctgtaacaataagcgatagttatgcactgttacatatcgacatatcgagttctgaggatttaatttaattttatatagtcagaaaaaatttaatagtaacttaaatgaattacatttgtaggtattcacctatacctttttaaataaatttcttaactgcacgccttgcatcgatattttatcgataacatgctcattttagcgccgtgcaggttatgtaaaataacaagtagagtcgttgagatcaattaaaaatatataaaaactcgaccgatattctgttaatatcaagccatggtcttcctgaaccttcccttgctggtacggtcccgtggtccggacgaattctggcggaagagacgcatcttcaagctggcagcggtatgtttccgaatatcgtggccacaataaaaataatgagctcttagtgcttaatttctgcagcattatagaagccgcactcgcaatgtctactccttcgccatccggagtgtccatagggcactggcctatgccaccaaggggcgaaagctaaagaaactggacatggcgcaactgtggagcacacgcgtggaggcgggttgtcagcagtatggagtaggtctggaaaccttcaaagagggcctcgcgcgctccgatattctgctcaacaagtgggtaccaccggaaaattcccatatcctttaacaacctataacatctttcagaaaagtcctatccgacctcgccatttgggagccgcgatcttttgaagctctagtaaagatctctcgagagcgggcagctgtggagggaatgccagacatcaaacggagatcggcatttaaccaggtctatggactgagcaacctgaagttggattaacatagccttaagtaggagttcaaatatagatatttgtatgttttaaacgtgtaatctttaattttcactttgaagggagtaaaatcgtttgggatttgttctttagattagtttttaactccgaattcgtatttacatttagttacataattcgtaacttctgcttgctgaatgaaatttgatactaaatcattaatttatttactgcaactaccttttccgcgaatgaatccaatattttttcgagtaaaatgacaaatgtgattaatgacaaaacacctgtgctgctagttttaacaagtaactcgaaatttattcaatgacggtccatgcgcaatgcaaacaaaaatattgcatgagcttttattgtagtttttagtttcgggtttgtgggtgtgttacatactaataaaaagcatagaattcatagaattgtgagacagtgtccggaggcgagatctactccaatttggccaggatgtcggactcgcggaagaggaacagctccttctggtcaccctctaggttcaccttggtgccaccgaattcgggcagcagaacacgatcgccctccttcacgccaatgggaatgtggttgccagtggactgcggatgaagtgggatgttcagtgattagatgaccatctctgcattgataatggcgaaatactcacggcattacgggtgccagggcctacggccagaacggtgccctcaagtactttgcccaccgctttctccggcaaaacaatgcctcctttcgtcttggtcagcgcctcggcacgctggattaggatgcggtccagcatggggatgatcttcttgatagcggcggcctgaggatcattaaaaaagacccaacaattaacccatgtttcaatgtttcatgtttctctcattgattacacaacagcccggcgaatgggatgtggaccgaaagccgtggaaccttctcgaaaaaccgatatcatccttcgatttcaaactgtcttctaaacctcatatggggcaatgcacttttaacttaccattttaattcttaaatgc

SEQ ID NO: 23561 - DNA, 571 bp, DROSOPHILA
taacaagtagagtcgttgagatcaattaaaaatatataaaaactcgaccgatattctgttaatatcaagccatggtcttcctgaaccttcccttgctggtacggtcccgtggtccggacgaattctggcggaagagacgcatcttcaagctggcagcgcattatagaagccgcactcgcaatgtctactccttcgccatccggagtgtccatagggcactggcctatgccaccaaggggcgaaagctaaagaaactggacatggcgcaactgtggagcacacgcgtggaggcgggttgtcagcagtatggagtaggtctggaaaccttcaaagagggcctcgcgcgctccgatattctgctcaacaaaaaagtcctatccgacctcgccatttgggagccgcgatcttttgaagctctagtaaagatctctcgagagcgggcagctgtggagggaatgccagacatcaaacggagatcggcatttaaccaggtctatggactgagcaacctgaagttggattaacatagccttaagtaggagttcaaatatagatatttgtatgttttaaa

SEQ ID NO: 23562 - protein, 150 aa, DROSOPHILA
MVFLNLPLLVRSRGPDEFWRKRRIFKLAAHYRSRTRNVYSFAIRSVHRALAYATKGRKLKKLDMAQLWSTRVEAGCQQYGVGLETFKEGLARSDILLNKKVLSDLAIWEPRSFEALVKISRERAAVEGMPDIKRRSAFNQVYGLSNLKLD

SEQ ID NO: 23563 - DNA, 5203 bp, DROSOPHILA
catgtttctctcattgattacacaacagcccggcgaatgggatgtggaccgaaagccgtggaaccttctcgaaaaaccgatatcatccttcgatttcaaactgtcttctaaacctcatatggggcaatgcacttttaacttaccattttaattcttaaatgcaaactggagcggttgataaaagttaatgagtgaactttttactcaactacacgtgccggcgtaactattctcgctagatgcgggactgcttatcgtcggtgtgaccaggctatttcacggatataacattgagaaataattttttctgttcgaatacactgagagaagtcaatgcaaaaattaatagttgtgtataacttttaaaatggtaataaacttttcgccaagtaattgccgagttgatttcctataaaacatgaagatgaaaatgagtctggtgggtggacttccataataacttgtataccaatttcaggaattactccttttatatgcaatttaaacatattaatttaatttccattaatttataataaacatgttgtgcaattttctgttctcatctttgttgagctaaataatcgttttttaagaaattaaatcagaagcccagaaatcttctgggctttactggtgttttaattttttcaaatttactaatattaaaatataatataatataaaataaacataaaacagaattgtttgtttacttcctcgaaattaggtatgttcaaaccaaggagttgctattgatactagcgatttaaatcgattgactctggcagcggattgttcacactacaccctgttgcaaagtgcaagacaataaagacaagcaacaaaataattgaaaagtgtggcattcctgagaaaaattaaaaaatttcagaattttctaaacatcttgtttttaagaagggaaaatagcacgaaacaactatcgatagctgctgacactcccaccactaaatctgattgggagatttatttgagtcaccgttttgccttgtttacatttaatgtaatttgtaccagataaatcttatttgattttactcaagtcaagtggcacgatgtgcttttgttgttcacttagtttacagtttgtgactgctattttcgtttagttatattcgccaataagccagcaattaacccactaaaatgtctgatcgtcgtggcacaaaagttggaactggtacgaaggctttggagtattggtgccgagttgtgacccaaggatataatggggtcaaggtggagaacatgaccacttcctggcgaaatggacttgccttctgcgccataatacaccactttcggccggatcttatagatttcgaccgacttaaagcagacgatatctatgagaacaacgatttggcctttacaacggccgagaaatatttgggaattcccgcactgctcgatgcagctgacatggtttcgtatgaagtacctgatagactctccatactaacgtatttatcccagttttacaaggtgctcggcaagagcctgaagcacccgaagccagaggagccacttggcgaagagagtgagccaccgcaaaaggtgatgcacattgttgggatgcctcgacgtgataagtgccagaaatgcaaccttcctgtttttctcgccgaaagggtccttgtcggcaaacgggcttatcatcgcacatgcttaaaatgtgcaagatgttcgtcattgctcacacccgggagtttttatgaaacggaggtcaataacatatactgttgcgagacttgtcccgatgaagaaagtgaaccggaatctgacattttaaagttaaagacaaccactactgattctccgaatgataaacaaatggtggcacaaagttctgattactctgaagctgaagataaacaagaagacctggaagataatgatatacgtactactgataagcctgaaaacttccaaccgccgtccaacaaagatgaacaaaataatgaactaactattaatccggtaaaccctatattatcagaggagcgtaaaatctcttttattccactagacgaagaagatggtggccttattgaacaatataataaatcaacaactcctgtaaagcccgctataccagagaaaccaaaagtctctactcttccactagacgatgaacaacatgctggcgttgaacaaaacaatgatctggcggttagtccggaaaatgacattccaaaagagaaacttaagatttcttcggtctcaatatatcttgaagatgaccgccttgttgtagatgcaatacatccggataatttagataaacaagaagctttgaacaatacatcagacgcactcattccagaatcacaggaagcaccgattcctgaaaataacactcaagtagccattaaaccagaagaccatataagcccgcgtaaagaaaataaaattttctcaaacacagaaagctgctctaagcaggaaggtgttctcccaaaacaaatggatctcgagtctcccaaggacaaggtaattgagacaaaagcatctgaaactgactatccagaggatctaaatccctttaaagatgatgactcatctaaaggtgccaacccattcgacagctctgatgatgaagtggagcttcttaaagccattccagcccaacaaagcaaaggaaaagttgtaccgccccgtccaccgccacctaaaattggcctttcatccatctccaatccgtcagagaaaccacattccagccctacactttcgcatgggaaaaaaatgccgatgccaacaccgagaatatctatatcaaaaacccagactccagcaaaaccaatgacgcatcaaggccagaaaagtagtatttcctcttcgtcttcggagcatttgaatagcataagaacgttcgatcgcggagcagatgaccgtggctcaagcatctccttgccatctgcaaatgggcctcgcaagccacttcgcgcctcagtggggagtccgctgcgaagcgaagaatcgagtcccactaccagtcttagctctattacctctccgatgcggaagaagcgccaggcacctttgcccccaatacaaacggactttgacagtgatcctggattttcaaaattgtccgacgaacaaaaggcattgttgcacactcagcttaaggccccaaatctgggtgattcaaccagaagactaataccacttgaccagagtctgctatccgatgaggcaaccgagtcgagtaattacgacgagagcttaagtacatccaatgccgacgaggaggtaaatgtggtataccgacgcattttggtgccgccaactcaacccgaaaacactgttgaacgtagcaaggaggatcaaaaatcgcctatcgtgtataacgacttcgatagaaacgtaagcccattggggcacaataaatccactcatgggaaatggaagaggcgaaagggaccagcaccagcggttccaataccaccgcgcaaagtcttacaaaggcttccgctgcaagaaattcgccacgagttcgaaattattgcggtacagcagctgggtcttgagaaacaaggcgttattctggagaaaatgatcagggatcgctgtgagcgttccttagatgccaccgatactgatggtcccgaatccgcagaagtgctaaccaactcaaaggaagtggaagatcttatattgcaactgttcgagctggtcaacgagaaaaacgaattgttccgcagacaagcggaactgatgtaccttcgacgtcagcatcgcctggagcaggagcaggcggacatagagcatgagatacgagtattaatggggcaaccggagcacaacaaaaccgattcggataaagcccatgaggaagtattaatcaatcgccttgtgaaggtggttgaaatgcgtaacgaagtaattgatagcctagagactgaccgagttcgcgaggcgcgagaggatatgagcatcaagaatcggcttcatatatacaattctgagcgcgaggaaccaccagcacatccgagaagcgctgacaaatcatccaaaaagctgtctaaaaaggaacgaaaaaaacttaaggaggaaaataagctgggcaagggcaaaaagtcggacctcgacaaggacgtcgatgagtccgaacaggcaccagctttggaaaaggttaaaaagaagcgaaacttgttctttttgaaaatgtagttgggggctggttgagttgaagtgtttacgcatcgaacaattgaaatttattttatataaatttgtaacctattaagtttctattgccatatgtgagcatttcaataaataaagtatatattttcctttagcaacagaactttggattgagaacgacgaatgcgaatcatattactatataactctgggataataatttttaaaataaaacagaagcgaattaatcagttacaaattctaaatcttaaccttaaaaaacacaaagctcccacacattttaattattacttcggttctgtgatatattattattatgtttagttagtggagctagtatgtttttgcgtagagctatcgataagaatcgttgaatggttaatgtcaggcgctggaaattataacatccctaaaccgataagacccattaatagaatgtatcagtaataagatcgtacaacagcgcaaacaatcgcggtacgctgattgacttcccctagaaaaccaacttcaaattgcaacactatcattaacaataatgaatcgggttaaaagaatatctaattactttgactctatgctacccctgatcgataatattttgcaagtagtgaatcagatcttcgatgattacacttcctttgatggccaaaagctcatgcacttataccacctcatttacaagcagtgcgcggcggagcgcaattggaataatccagcccagaagaacgggagaagtctttacattgtgctatccgactgcctgatgaagcgactaaaaaacatagcatgggtaatggagaaccaactcgacgacaacaaaccaattcgactgatcgccaaatatttagagcactgggtaccctatcaaaggtcatgtgagaaactgaacctagcttgctaccacttcaaccgcaactgggtggaacgggagcggcttaagggagacaaagaaacttatccgatatatcgcttggccatgattagctggaaggagctggtc

SEQ ID NO: 23564 - DNA, 3161 bp, DROSOPHILA
caccgttttgccttgtttacatttaatgtaatttgtaccagataaatcttatttgattttactcaagtcaagtggcacgatgtgcttttgttgttcacttagtttacagtttgtgactgctattttcgtttagttatattcgccaataagccagcaattaacccactaaaatgtctgatcgtcgtggcacaaaagttggaactggtacgaaggctttggagtattggtgccgagttgtgacccaaggatataatggggtcaaggtggagaacatgaccacttcctggcgaaatggacttgccttctgcgccataatacaccactttcggccggatcttatagatttcgaccgacttaaagcagacgatatctatgagaacaacgatttggcctttacaacggccgagaaatatttgggaattcccgcactgctcgatgcagctgacatggtttcgtatgaagtacctgatagactctccatactaacgtatttatcccagttttacaaggtgctcggcaagagcctgaagcacccgaagccagaggagccacttggcgaagagagtgagccaccgcaaaagaaatgcaaccttcctgtttttctcgccgaaagggtccttgtcggcaaacgggcttatcatcgcacatgcttaaaatgtgcaagatgttcgtcattgctcacacccgggagtttttatgaaacggaggtcaataacatatactgttgcgagacttgtcccgatgaagaaagtgaaccggaatctgacattttaaagttaaagacaaccactactgattctccgaatgataaacaaatggtggcacaaagttctgattactctgaagctgaagataaacaagaagacctggaagataatgatatacgtactactgataagcctgaaaacttccaaccgccgtccaacaaagatgaacaaaataatgaactaactattaatccggtaaaccctatattatcagaggagcgtaaaatctcttttattccactagacgaagaagatggtggccttattgaacaatataataaatcaacaactcctgtaaagcccgctataccagagaaaccaaaagtctctactcttccactagacgatgaacaacatgctggcgttgaacaaaacaatgatctggcggttagtccggaaaatgacattccaaaagagaaacttaagatttcttcggtctcaatatatcttgaagatgaccgccttgttgtagatgcaatacatccggataatttagataaacaagaagctttgaacaatacatcagacgcactcattccagaatcacaggaagcaccgattcctgaaaataacactcaagtagccattaaaccagaagaccatataagcccgcgtaaagaaaataaaattttctcaaacacagaaagctgctctaagcaggaaggtgttctcccaaaacaaatggatctcgagtctcccaaggacaaggtaattgagacaaaagcatctgaaactgactatccagaggatctaaatccctttaaagatgatgactcatctaaaggtgccaacccattcgacagctctgatgatgaagtggagcttcttaaagccattccagcccaacaaagcaaaggaaaagttgtaccgccccgtccaccgccacctaaaattggcctttcatccatctccaatccgtcagagaaaccacattccagccctacactttcgcatgggaaaaaaatgccgatgccaacaccgagaatatctatatcaaaaacccagactccagcaaaaccaatgacgcatcaaggccagaaaagtagtatttcctcttcgtcttcggagcatttgaatagcataagaacgttcgatcgcggagcagatgaccgtggctcaagcatctccttgccatctgcaaatgggcctcgcaagccacttcgcgcctcagtggggagtccgctgcgaagcgaagaatcgagtcccactaccagtcttagctctattacctctccgatgcggaagaagcgccaggcacctttgcccccaatacaaacggactttgacagtgatcctggattttcaaaattgtccgacgaacaaaaggcattgttgcacactcagcttaaggccccaaatctgggtgattcaaccagaagactaataccacttgaccagagtctgctatccgatgaggcaaccgagtcgagtaattacgacgagagcttaagtacatccaatgccgacgaggaggtaaatgtggtataccgacgcattttggtgccgccaactcaacccgaaaacactgttgaacgtagcaaggaggatcaaaaatcgcctatcgtgtataacgacttcgatagaaacgtaagcccattggggcacaataaatccactcatgggaaatggaagaggcgaaagggaccagcaccagcggttccaataccaccgcgcaaagtcttacaaaggcttccgctgcaagaaattcgccacgagttcgaaattattgcggtacagcagctgggtcttgagaaacaaggcgttattctggagaaaatgatcagggatcgctgtgagcgttccttagatgccaccgatactgatggtcccgaatccgcagaagtgctaaccaactcaaaggaagtggaagatcttatattgcaactgttcgagctggtcaacgagaaaaacgaattgttccgcagacaagcggaactgatgtaccttcgacgtcagcatcgcctggagcaggagcaggcggacatagagcatgagatacgagtattaatggggcaaccggagcacaacaaaaccgattcggataaagcccatgaggaagtattaatcaatcgccttgtgaaggtggttgaaatgcgtaacgaagtaattgatagcctagagactgaccgagttcgcgaggcgcgagaggatatgagcatcaagaatcggcttcatatatacaattctgagcgcgaggaaccaccagcacatccgagaagcgctgacaaatcatccaaaaagctgtctaaaaaggaacgaaaaaaacttaaggaggaaaataagctgggcaagggcaaaaagtcggacctcgacaaggacgtcgatgagtccgaacaggcaccagctttggaaaaggttaaaaagaagcgaaacttgttctttttgaaaatgtag

SEQ ID NO: 23565 - protein, 996 aa, DROSOPHILA
MSDRRGTKVGTGTKALEYWCRVVTQGYNGVKVENMTTSWRNGLAFCAIIHHFRPDLIDFDRLKADDIYENNDLAFTTAEKYLGIPALLDAADMVSYEVPDRLSILTYLSQFYKVLGKSLKHPKPEEPLGEESEPPQKKCNLPVFLAERVLVGKRAYHRTCLKCARCSSLLTPGSFYETEVNNIYCCETCPDEESEPESDILKLKTTTTDSPNDKQMVAQSSDYSEAEDKQEDLEDNDIRTTDKPENFQPPSNKDEQNNELTINPVNPILSEERKISFIPLDEEDGGLIEQYNKSTTPVKPAIPEKPKVSTLPLDDEQHAGVEQNNDLAVSPENDIPKEKLKISSVSIYLEDDRLVVDAIHPDNLDKQEALNNTSDALIPESQEAPIPENNTQVAIKPEDHISPRKENKIFSNTESCSKQEGVLPKQMDLESPKDKVIETKASETDYPEDLNPFKDDDSSKGANPFDSSDDEVELLKAIPAQQSKGKVVPPRPPPPKIGLSSISNPSEKPHSSPTLSHGKKMPMPTPRISISKTQTPAKPMTHQGQKSSISSSSSEHLNSIRTFDRGADDRGSSISLPSANGPRKPLRASVGSPLRSEESSPTTSLSSITSPMRKKRQAPLPPIQTDFDSDPGFSKLSDEQKALLHTQLKAPNLGDSTRRLIPLDQSLLSDEATESSNYDESLSTSNADEEVNVVYRRILVPPTQPENTVERSKEDQKSPIVYNDFDRNVSPLGHNKSTHGKWKRRKGPAPAVPIPPRKVLQRLPLQEIRHEFEIIAVQQLGLEKQGVILEKMIRDRCERSLDATDTDGPESAEVLTNSKEVEDLILQLFELVNEKNELFRRQAELMYLRRQHRLEQEQADIEHEIRVLMGQPEHNKTDSDKAHEEVLINRLVKVVEMRNEVIDSLETDRVREAREDMSIKNRLHIYNSEREEPPAHPRSADKSSKKLSKKERKKLKEENKLGKGKKSDLDKDVDESEQAPALEKVKKKRNLFFLKM

SEQ ID NO: 23566 - DNA, 4172 bp, DROSOPHILA
gtgctaaccaactcaaaggaagtggaagatcttatattgcaactgttcgagctggtcaacgagaaaaacgaattgttccgcagacaagcggaactgatgtaccttcgacgtcagcatcgcctggagcaggagcaggcggacatagagcatgagatacgagtattaatggggcaaccggagcacaacaaaaccgattcggataaagcccatgaggaagtattaatcaatcgccttgtgaaggtggttgaaatgcgtaacgaagtaattgatagcctagagactgaccgagttcgcgaggcgcgagaggatatgagcatcaagaatcggcttcatatatacaattctgagcgcgaggaaccaccagcacatccgagaagcgctgacaaatcatccaaaaagctgtctaaaaaggaacgaaaaaaacttaaggaggaaaataagctgggcaagggcaaaaagtcggacctcgacaaggacgtcgatgagtccgaacaggcaccagctttggaaaaggttaaaaagaagcgaaacttgttctttttgaaaatgtagttgggggctggttgagttgaagtgtttacgcatcgaacaattgaaatttattttatataaatttgtaacctattaagtttctattgccatatgtgagcatttcaataaataaagtatatattttcctttagcaacagaactttggattgagaacgacgaatgcgaatcatattactatataactctgggataataatttttaaaataaaacagaagcgaattaatcagttacaaattctaaatcttaaccttaaaaaacacaaagctcccacacattttaattattacttcggttctgtgatatattattattatgtttagttagtggagctagtatgtttttgcgtagagctatcgataagaatcgttgaatggttaatgtcaggcgctggaaattataacatccctaaaccgataagacccattaatagaatgtatcagtaataagatcgtacaacagcgcaaacaatcgcggtacgctgattgacttcccctagaaaaccaacttcaaattgcaacactatcattaacaataatgaatcgggttaaaagaatatctaattactttgactctatgctacccctgatcgataatattttgcaagtagtgaatcagatcttcgatgattacacttcctttgatggccaaaagctcatgcacttataccacctcatttacaagcagtgcgcggcggagcgcaattggaataatccagcccagaagaacgggagaagtctttacattgtgctatccgactgcctgatgaagcgactaaaaaacatagcatgggtaatggagaaccaactcgacgacaacaaaccaattcgactgatcgccaaatatttagagcactgggtaccctatcaaaggtcatgtgagaaactgaacctagcttgctaccacttcaaccgcaactgggtggaacgggagcggcttaagggagacaaagaaacttatccgatatatcgcttggccatgattagctggaaggagctggtcttcgagcccagcgtcacgattctcgccgccattaggctgattttgagtcagatgcccagggaatacaataaatcattggaataccaagtataccaggtgctccaatccattgtggaactgtacgccaacgataagtaccaagatgtgtccttgccttctaggatagacaaaattttcactgagaaggtgatggatttctacaagtcaacgacgttgcacgaattccaaaagatcgtcgtatccaatgactacaaggatttcaagcatttccttaggtacgcatgcctagccatgccagaaattgagaatgggacacaatttaaggcaatactaaaaagatacctcgctgcgaggctgcaggagacgaggctgtcaggcaaggattatatccaagccttcttgggactttgtcgcggtcctttgcagcgagcattgcgggaccacacaaaattggcggaagtcgtggatgcggtgtgcaaagaagaaattaatagaaagggccagataattgaccccacccgtctgcttgtcacatatgccaacgaacttatgaccaaaaggcaggagtccgaggaagcaattattgatgaacttaaacggatcgttaaatgcgtggagtttttaagcgatgagtacaaatttattgacatgtatttgaaagcacttcggattcgacaaatcaatgaaacatccacctcggacggcgttgagtccataatgtattcccttctgaataaaaaaatggcaaactttgtaactagatgtatatatgtgcagttaagagatgtagataagttgagaaccctaaaaaaagagtttcaagatcacttgaatagcaaggggatcaagttaggattcgattttcgtccaaaatgcttcaaaaatgatgggagttttgagaattttaacctcacgttgcccgacgaactgcagcaagcttggaaggagtttcgtattttttacgaagcaagaaaattacaaagcaaggcaattatacaacttaataacgaattatcctctggtgagataacctgtcatttgaatcagtcggtctatattctcgaggtaagcactttgcaaatggccgttctgatgctattcaatcggcatgaacgatttacggagcaggaattggtgactgctttgggagtcgagctggagaccctccaagaggtgagtaataggttatgtatagacattactcttgacttacctataaaattatttttttttcttttcttttaggcattaaaacagattaagtttctggtttatatcgaagtaaataaagtaaattatatagaaataaacatggactttacaaaccggaaacgccgactcttctgcaatgagcccctgcccagaaaaatgagaaagattgaagagaaaagcgaaattgaattgaaaatacggcgagacaagcaagtggatgctgcaatagtgcgcattatgaaaggtcaaaagcaactggaatattcggaattaatttcactcgtttatgaggagcttaaagatcgggtaaagccacaagtgagttttatcaagaaaagacttgactacctggtggagcgtgaatatttggaacgtgataattattataatatttacagatatttgtagtatagaaaatgaaggtatacgattttaataatttgaaaaatattttgtataattaacaaaacgaagcaaataaacaataacaatatatatatataacgtttatattgctaacgttacagcttagttattttaattaaattactaaaataaatttgagaataccccttgataaaatcttgcaagtgattgtatagaactaaatagctaaaggctacatcctcgtttaatttgacgcatatccgttctgagccatcagtctcgaaatctggggttattaattcgcttgtataaaggcgctcagcatggtgatccctcaggtgcttctccaggtgcgattcgtttgagaaggcaatggggcaatagaggcacaggcgttgttgatgcacacgcatttcgttgagcttcagcatcccagctctccgtcgagatatcttccaccttggagtgggtgagtagtttaactcgaagttgggcttggtcctggagtctgtgggtttcgctaaatccagttccgctatgctctcgcccttttgccgtctgacgtggcttctatggaggttaagaggaatgttaaaaccaatcctaagtcacctagtccttaacttactcactttaagcaatgacttgtaacgaaactttcgagggaagattttgcagctgaatcgatcgcaattgatgtcccagcatgcgtgagatgaaaagttgtcgatgggaaaagcctccaagcacgtagaacacatttttggctggccagccaattgatagcttatctcttcctcgtctctttgattgtgctcttcctcatttggatcctccagggcgaactcctccttaaccagatcattaacatctaacataattactgcaagatggaagcgttagaaatgtaaacgtttttttcctgtttttaagctcaccctcttataagccagtctgggaataagataaatctgtgggattttccgtttttatgaaattttgacatctatccttaatatgt

SEQ ID NO: 23567 - DNA, 2100 bp, DROSOPHILA
atcgtacaacagcgcaaacaatcgcggtacgctgattgacttcccctagaaaaccaacttcaaattgcaacactatcattaacaataatgaatcgggttaaaagaatatctaattactttgactctatgctacccctgatcgataatattttgcaagtagtgaatcagatcttcgatgattacacttcctttgatggccaaaagctcatgcacttataccacctcatttacaagcagtgcgcggcggagcgcaattggaataatccagcccagaagaacgggagaagtctttacattgtgctatccgactgcctgatgaagcgactaaaaaacatagcatgggtaatggagaaccaactcgacgacaacaaaccaattcgactgatcgccaaatatttagagcactgggtaccctatcaaaggtcatgtgagaaactgaacctagcttgctaccacttcaaccgcaactgggtggaacgggagcggcttaagggagacaaagaaacttatccgatatatcgcttggccatgattagctggaaggagctggtcttcgagcccagcgtcacgattctcgccgccattaggctgattttgagtcagatgcccagggaatacaataaatcattggaataccaagtataccaggtgctccaatccattgtggaactgtacgccaacgataagtaccaagatgtgtccttgccttctaggatagacaaaattttcactgagaaggtgatggatttctacaagtcaacgacgttgcacgaattccaaaagatcgtcgtatccaatgactacaaggatttcaagcatttccttaggtacgcatgcctagccatgccagaaattgagaatgggacacaatttaaggcaatactaaaaagatacctcgctgcgaggctgcaggagacgaggctgtcaggcaaggattatatccaagccttcttgggactttgtcgcggtcctttgcagcgagcattgcgggaccacacaaaattggcggaagtcgtggatgcggtgtgcaaagaagaaattaatagaaagggccagataattgaccccacccgtctgcttgtcacatatgccaacgaacttatgaccaaaaggcaggagtccgaggaagcaattattgatgaacttaaacggatcgttaaatgcgtggagtttttaagcgatgagtacaaatttattgacatgtatttgaaagcacttcggattcgacaaatcaatgaaacatccacctcggacggcgttgagtccataatgtattcccttctgaataaaaaaatggcaaactttgtaactagatgtatatatgtgcagttaagagatgtagataagttgagaaccctaaaaaaagagtttcaagatcacttgaatagcaaggggatcaagttaggattcgattttcgtccaaaatgcttcaaaaatgatgggagttttgagaattttaacctcacgttgcccgacgaactgcagcaagcttggaaggagtttcgtattttttacgaagcaagaaaattacaaagcaaggcaattatacaacttaataacgaattatcctctggtgagataacctgtcatttgaatcagtcggtctatattctcgaggtaagcactttgcaaatggccgttctgatgctattcaatcggcatgaacgatttacggagcaggaattggtgactgctttgggagtcgagctggagaccctccaagaggcattaaaacagattaagtttctggtttatatcgaagtaaataaagtaaattatatagaaataaacatggactttacaaaccggaaacgccgactcttctgcaatgagcccctgcccagaaaaatgagaaagattgaagagaaaagcgaaattgaattgaaaatacggcgagacaagcaagtggatgctgcaatagtgcgcattatgaaaggtcaaaagcaactggaatattcggaattaatttcactcgtttatgaggagcttaaagatcgggtaaagccacaagtgagttttatcaagaaaagacttgactacctggtggagcgtgaatatttggaacgtgataattattataatatttacagatatttgtag

SEQ ID NO: 23568 - protein, 670 aa, DROSOPHILA
MNRVKRISNYFDSMLPLIDNILQVVNQIFDDYTSFDGQKLMHLYHLIYKQCAAERNWNNPAQKNGRSLYIVLSDCLMKRLKNIAWVMENQLDDNKPIRLIAKYLEHWVPYQRSCEKLNLACYHFNRNWVERERLKGDKETYPIYRLAMISWKELVFEPSVTILAAIRLILSQMPREYNKSLEYQVYQVLQSIVELYANDKYQDVSLPSRIDKIFTEKVMDFYKSTTLHEFQKIVVSNDYKDFKHFLRYACLAMPEIENGTQFKAILKRYLAARLQETRLSGKDYIQAFLGLCRGPLQRALRDHTKLAEVVDAVCKEEINRKGQIIDPTRLLVTYANELMTKRQESEEAIIDELKRIVKCVEFLSDEYKFIDMYLKALRIRQINETSTSDGVESIMYSLLNKKMANFVTRCIYVQLRDVDKLRTLKKEFQDHLNSKGIKLGFDFRPKCFKNDGSFENFNLTLPDELQQAWKEFRIFYEARKLQSKAIIQLNNELSSGEITCHLNQSVYILEVSTLQMAVLMLFNRHERFTEQELVTALGVELETLQEALKQIKFLVYIEVNKVNYIEINMDFTNRKRRLFCNEPLPRKMRKIEEKSEIELKIRRDKQVDAAIVRIMKGQKQLEYSELISLVYEELKDRVKPQVSFIKKRLDYLVEREYLERDNYYNIYRYL

SEQ ID NO: 23569 - DNA, 4001 bp, DROSOPHILA
atttcatttgatatttcactaatttttccagctgtcgcgtgttttggtaaatatgtatgtttaaatatatatatatatatatggggctgttgttatttaccaacgttatgaattaagtagcgacatcgaatcagagcaaaaacgaaaagaggggcacaggggtctgtttaaatttacagaaatcaaacaatttgactgcgaattggaatatttaattagttgatttattggggtacagcatgttttgctgttctgggtttgccctcgtttttccctcgaggttttggttttgcgtttttcccaagaattttttgattgccataattaagtaaataagcaacacccggtttcgctttaatttgccagatagggtgtttttcgtggcttaggagcatctttgaattagcttcatttaactgaatccgatagtcctcacagttggaattatatttagacccacaaggaccttgcagcatatgtggctcagttgctgttgcacacagatctagtcagttgtaatagcagttgttgcctttgttgccgctgtttatgcatatttaacacccttgagctattattgcgcgattaagcggaagaatttagccaagctacgcattgtcattgcagctcgagtcgtcggggtcgttgcgcaccaaagtatgctatattaaaagttacagtgggcgaaaaggcaagaaaggtctcaactttaaaatatatcggtaaaatgttgtattatttcttataattaacttaatcattaactaaaaatatataaaaacaattccaacaactccagtgtgtaaaatttatttaaaataccttacttatcttgcttagccatccatatacacttatttcaattgctagctttaaaaactatagtaaactttaatggggaagacgaattactttacatttgggatgtatgtatacacttccttacagaagccatgtgctagaatcggagtaacatccagaggcttggtatcctggaaaactacgtcttgtgccacgcgaatagcgagtgcgcgatgagcaggtaaaccgttgcgagaaaaatactggtcagcatcatgggaaagccgtagatgaagaactgcacaaaggagatcttatagccatactgttgggcgattgccgctgcgacaacattggccgaagccccgatcagggtgccattaccaccgaaacaggcgccatatgacaaagcccaaatgaggggcgttaatggaacgctgatggcatcgttacggtgcaactcaatgttcagtctcagcagcatcgtggtcaccgggacattgccgacaaaggccgccagaatggcggacatccagatgattatcaggatggccactgtcgtctgataacgctcctcgacgctcatgatcaccttgactgtgagatcacacagccagcgaatgaagcccaatttatccaccgcctcagtgagcacgaatagagcggccagaaagagcagcgctgaccattcgacctggtcaagtatcgcctcaatgtcgttcatcttggccagaatgagaagcaggaaggcggccaaaattgccacccaacccaatgtggcaccgtgcataaagggcagtgaatgcaacaggaaaaatatgatcacaaaacacagcgtgaagaggcacttgatcagcagcgtcttgtcccggatccgatgatgtgcctccaaatgggccagggtctgaaaatagttttcggccggcttcagtaactgtcgtcccgtcggctgtcgtatgcgcatttcttctgcccgagccgtaatatccgcactcgatcgccgtctactgttctcccgctcagctgccagctcaagttgttgttcctccagtttaaacaaagatttcctcatggtcacatacatgacagcatagcccgctacagccgccaataaaacgccaggcaacatgtgaatggtgaaatcgaggaaatccactccggcggagatcacttccgaattggtggcaatgatcacattgggtggatcacccactggcgtgagggtgccaccgatatttgagtacatcaccaccactatcaggacaagtggcgtctggacggccatggcttcgcacaaacggatcgcaattggcgccatcagaagcagcatggtcacattatcgagcatacaggacatgatggcggtaattgagctgagcagcaggagcattggccagggattacccttggatattcggtacgccagcacagccatccaatcaaatacacccgtctcggacattatcgccaccagtatcatcataccgaggagcagtattagagtttcgaaatcaatccaggagattattgtttccagagtcggtcgatttcccagcgccgttagaatcgctatcccagtggtggccatcataagagcagcgaatgtacgatccgtaagctcgaagacgatcagtatatagaaaccgatcagcagcagagcggcatagagtacaccattttccgttaccaagggatacaccgataccaccatcagcagcgccaccggctcctcgcttctgctctccagcgaaatcaccgcctgggcattactaacctccgagatctgaacggttttggacgtcttcgtgaaagcctgactctgctcggccagatagacaatccacatatccgaactccagaatttggttttcaattccgaatcccgccactccacgcgtacgcccacatggggcgtctccataatcacgctttcatgcttctgcaattgcaaatcgatgggacccttcagcgttatctgagtcgcatcatggggcacggacaggcggcggagcacagtctcgttgggcaacacagtgaccaccgatgtcaaatccggcgtggtggcattccgaaccagaatgtaagtaaagaaagcccaaatcagcagaagcgcaccaatccttatgatcttgaagatgaatcgcccgacggagattgtctccggctcatccaagtagttcggttcaggttgttcaggcatccgtagtctacggggaatgctagattggtgcgacgaaggccatgcctggcgcactccgtctatttggcacaaatctgctacacgaaaaatatcactcagaaatttcatttgaaaggtacgtctaagtaaatcctctaaaattttgaatataaggaaaagttgttaaaatgtgttgatatttaccaaaaagtaattgcgactagttttaaaaatcttgatattttccataagtaaatagtatatttagacaaacttattgaatataataaattatcattgttacagattcattattaaagtacaagcatgaaaccatacgaactactaacaattaggcgtaaacaaattaaatttattattgcaacactgtaactacagtataatccttttcgaggcaaatttataccaaaagtttaatcatttttgagcattttttaactggatctttccacagtgcatcccatgctgggtagggcgtgctttgagcagaagttaagtgtcgcttgagcctttttaaatatagagaaaacccatatacggctgccctgaaagcctcgcatagctgcagtcataatacgcaccattgccaagccactggcctccggaatcctgaatcctgcatcctgcgcccagcgccctgcacccatgccccctgcgccctgcacccatgccccctgtcccctccttctccccaaaggaccattgtcaattgacaatgccgctggcagatgtgttgatagtttcaaggagtgttgagaggagcaggagaaggagttgcagcaggggattggtatgggtggtggctcggctgcttgggctgttgccagttgaatgcaaatattaatagcgcaaattttgtgccgcacaacaaggctgagaatatgtatgtatgccagggccaaaaggagcaagtatgtatatgtgtgagccctctcttattttaccattttaaatgcagaaattacagctcgagttttttcttttcagtgtatttatttcg

SEQ ID NO: 23570 - DNA, 2001 bp, DROSOPHILA
atgcctgaacaacctgaaccgaactacttggatgagccggagacaatctccgtcgggcgattcatcttcaagatcataaggattggtgcgcttctgctgatttgggctttctttacttacattctggttcggaatgccaccacgccggatttgacatcggtggtcactgtgttgcccaacgagactgtgctccgccgcctgtccgtgccccatgatgcgactcagataacgctgaagggtcccatcgatttgcaattgcagaagcatgaaagcgtgattatggagacgccccatgtgggcgtacgcgtggagtggcgggattcggaattgaaaaccaaattctggagttcggatatgtggattgtctatctggccgagcagagtcaggctttcacgaagacgtccaaaaccgttcagatctcggaggttagtaatgcccaggcggtgatttcgctggagagcagaagcgaggagccggtggcgctgctgatggtggtatcggtgtatcccttggtaacggaaaatggtgtactctatgccgctctgctgctgatcggtttctatatactgatcgtcttcgagcttacggatcgtacattcgctgctcttatgatggccaccactgggatagcgattctaacggcgctgggaaatcgaccgactctggaaacaataatctcctggattgatttcgaaactctaatactgctcctcggtatgatgatactggtggcgataatgtccgagacgggtgtatttgattggatggctgtgctggcgtaccgaatatccaagggtaatccctggccaatgctcctgctgctcagctcaattaccgccatcatgtcctgtatgctcgataatgtgaccatgctgcttctgatggcgccaattgcgatccgtttgtgcgaagccatggccgtccagacgccacttgtcctgatagtggtggtgatgtactcaaatatcggtggcaccctcacgccagtgggtgatccacccaatgtgatcattgccaccaattcggaagtgatctccgccggagtggatttcctcgatttcaccattcacatgttgcctggcgttttattggcggctgtagcgggctatgctgtcatgtatgtgaccatgaggaaatctttgtttaaactggaggaacaacaacttgagctggcagctgagcgggagaacagtagacggcgatcgagtgcggatattacggctcgggcagaagaaatgcgcatacgacagccgacgggacgacagttactgaagccggccgaaaactattttcagaccctggcccatttggaggcacatcatcggatccgggacaagacgctgctgatcaagtgcctcttcacgctgtgttttgtgatcatatttttcctgttgcattcactgccctttatgcacggtgccacattgggttgggtggcaattttggccgccttcctgcttctcattctggccaagatgaacgacattgaggcgatacttgaccaggtcgaatggtcagcgctgctctttctggccgctctattcgtgctcactgaggcggtggataaattgggcttcattcgctggctgtgtgatctcacagtcaaggtgatcatgagcgtcgaggagcgttatcagacgacagtggccatcctgataatcatctggatgtccgccattctggcggcctttgtcggcaatgtcccggtgaccacgatgctgctgagactgaacattgagttgcaccgtaacgatgccatcagcgttccattaacgcccctcatttgggctttgtcatatggcgcctgtttcggtggtaatggcaccctgatcggggcttcggccaatgttgtcgcagcggcaatcgcccaacagtatggctataagatctcctttgtgcagttcttcatctacggctttcccatgatgctgaccagtatttttctcgcaacggtttacctgctcatcgcgcactcgctattcgcgtggcacaagacgtag

SEQ ID NO: 23571 - protein, 666 aa, DROSOPHILA
MPEQPEPNYLDEPETISVGRFIFKIIRIGALLLIWAFFTYILVRNATTPDLTSVVTVLPNETVLRRLSVPHDATQITLKGPIDLQLQKHESVIMETPHVGVRVEWRDSELKTKFWSSDMWIVYLAEQSQAFTKTSKTVQISEVSNAQAVISLESRSEEPVALLMVVSVYPLVTENGVLYAALLLIGFYILIVFELTDRTFAALMMATTGIAILTALGNRPTLETIISWIDFETLILLLGMMILVAIMSETGVFDWMAVLAYRISKGNPWPMLLLLSSITAIMSCMLDNVTMLLLMAPIAIRLCEAMAVQTPLVLIVVVMYSNIGGTLTPVGDPPNVIIATNSEVISAGVDFLDFTIHMLPGVLLAAVAGYAVMYVTMRKSLFKLEEQQLELAAERENSRRRSSADITARAEEMRIRQPTGRQLLKPAENYFQTLAHLEAHHRIRDKTLLIKCLFTLCFVIIFFLLHSLPFMHGATLGWVAILAAFLLLILAKMNDIEAILDQVEWSALLFLAALFVLTEAVDKLGFIRWLCDLTVKVIMSVEERYQTTVAILIIIWMSAILAAFVGNVPVTTMLLRLNIELHRNDAISVPLTPLIWALSYGACFGGNGTLIGASANVVAAAIAQQYGYKISFVQFFIYGFPMMLTSIFLATVYLLIAHSLFAWHKT

SEQ ID NO: 23572 - DNA, 2862 bp, DROSOPHILA
cctcgtctctttgattgtgctcttcctcatttggatcctccagggcgaactcctccttaaccagatcattaacatctaacataattactgcaagatggaagcgttagaaatgtaaacgtttttttcctgtttttaagctcaccctcttataagccagtctgggaataagataaatctgtgggattttccgtttttatgaaattttgacatctatccttaatatgttctgtattctttatcatttgttcatttgtatcttcagggtccggttcatatttgatggtgttttgacagtgactttgtttttctgaattttcttctaatatttgtgctcctccagattttcttaaaaactttatttatttattaatattcaaattatttattatttaggttttttggacagctgatcagtcattgcttttaaggtgaccagttttttgactatcgatcttcattgatcgggcctctatcgtttcgatatcgatataatttaagggaacaataaatcattattgggtcattatatttttgtaatgtaatgtaattggataataaaaaataaaatatagttccgttgtgtttgatcttttttgtattacatgggacttcttttaataaatgtttcatttgggtcttaaattagctaaaatgtaaaactgtaagggtatgtaagcaacggttttctttttaggtatcttacctacttcttataagatatttatgtataaaagaatattcttataaatatatagagtcgatgaagtggccgaatgattacactttagatattgtattcttttagtttcataaaaaaacgtgatttttgagaacttttaagaaaaaaaattttcatttaataagagagcatatcatgcaagtcccttgacctatcatgcttgacctcatatatgcatatatgagacacatatcagcagaagctattacattacattcctgccaaactaatcccttaccttgcgacccatttggtgctctcctagatctgctcgagttccttgtcggcctttttgcagaatgaatctaagagttggaacccgaagctactggcaggtgccatgtttatggcgacgtcgcaggaccgtaagccgtagtagctgtggctgaactctaaggatatgcgataaacctcggcgcaaaagatgtgactataattcaaatgatcgtgcattatgtgttgaagctggaccaacttggccaagtatctcatttgactgtgggtcagtggacgagcagtgaagttacgctgcgactcacagcctccagtcaccttctccatgggtagtccgaagacgagagatatagcctctggcaaggtgtacggaattcttgtgttgctgctcaggcatacagccacaaaggtatcaaatattcctcccaacgagatgcgttgcctatgcaacagatgatcggcgatccggtggctgtagtggattaccttgcgcggctgatccgcctccagaatcttggccagttccagaaatatcaagccaagggccttgatgtcgaaaatgtacgttccattgcacgtggctaccaccaaaatagacgtggggtgatgtcgtccgtaaaaactgggctccaccagcagcgatatgatcttctgatcctttatgtcctttagtgcactgtggtatgtggtatccacctggtatatcaaaacaattcgatctagttgcttctccaggatttccagttctcgttttccgaaagggtaacgaatgttttccgggagactgtccagagcaaagctctcgtttccatcgctcttgttcattgtaatttatgctaatttgccttaagttactttaaataccaattttaatagaaactaaccttttcggataataaaagctttgaaaagaacaacgacagcaaatttatcgatatcaagaattacattggaatcgagatggtataaggacaacaattatcagaactatcgattaccttccgacttagttgatacacattcctcggttggcttacacactcacctcatttagccaggtcacacaccacactgaaaaaattaaataaaaatcaatagagaatgctatagtcgacttccccgactatctatcagataccctttactcagccagtagaacgaaagcgaaatttcataatttttttgggatatcgatagatattgaagaataaaatgaggaaaaattaaaaaattgtgggcgtggcatttcaaagtgtggcagtcgtaatgtttgaactttagcattaatttgaggtgtctgtttagaaagcacttgtattactttctattaactattaataagaaatacattttttaattactacttccggaaaaatgtcaaaatgcttatgtgtgctattacttgctaacatttatagtcttaagacgcccattacttaaccaagtttaaaggagctttgccttacagctcacctataattaagggcatagataatggaactggattggttgccaggatattgaatcgcttatgatttgaccacaagttaatcaccgacgatgcccgaagatttgtagcaatccgatcgatttgctaacggccagctcacggcaggggccagtctaaagtggtcatcaccgcaaaatggaacaaataagtgcttcttcgcaaatccgcacctttcgctccggctaataataaaacccgaagcgattgcactgcaaaaggttaattggtttgtaagcgcattggatggaaaacgacgaaaataaaaaagtgaaagaagatggcaaaggaggtttgcacacaatactggccgtaattccaggcagctgactcaatctaattggcgcacgcggcgcatacttaatgcgcttagatgcgggcc

SEQ ID NO: 23573 - DNA, 862 bp, DROSOPHILA
aaaaggttagtttctattaaaattggtatttaaagtaacttaaggcaaattagcataaattacaatgaacaagagcgatggaaacgagagctttgctctggacagtctcccggaaaacattcgttaccctttcggaaaacgagaactggaaatcctggagaagcaactagatcgaattgttttgatataccaggtggataccacataccacagtgcactaaaggacataaaggatcagaagatcatatcgctgctggtggagcccagtttttacggacgacatcaccccacgtctattttggtggtagccacgtgcaatggaacgtacattttcgacatcaaggcccttggcttgatatttctggaactggccaagattctggaggcggatcagccgcgcaaggtaatccactacagccaccggatcgccgatcatctgttgcataggcaacgcatctcgttgggaggaatatttgatacctttgtggctgtatgcctgagcagcaacacaagaattccgtacaccttgccagaggctatatctctcgtcttcggactacccatggagaaggtgactggaggctgtgagtcgcagcgtaacttcactgctcgtccactgacccacagtcaaatgagatacttggccaagttggtccagcttcaacacataatgcacgatcatttgaattatagtcacatcttttgcgccgaggtttatcgcatatccttagagttcagccacagctactacggcttacggtcctgcgacgtcgccataaacatggcacctgccagtagcttcgggttccaactcttagattcattctgcaaaaaggccgacaaggaactcgagcagatctag

SEQ ID NO: 23574 - protein, 265 aa, DROSOPHILA
MNKSDGNESFALDSLPENIRYPFGKRELEILEKQLDRIVLIYQVDTTYHSALKDIKDQKIISLLVEPSFYGRHHPTSILVVATCNGTYIFDIKALGLIFLELAKILEADQPRKVIHYSHRIADHLLHRQRISLGGIFDTFVAVCLSSNTRIPYTLPEAISLVFGLPMEKVTGGCESQRNFTARPLTHSQMRYLAKLVQLQHIMHDHLNYSHIFCAEVYRISLEFSHSYYGLRSCDVAINMAPASSFGFQLLDSFCKKADKELEQI

SEQ ID NO: 23575 - DNA, 2493 bp, DROSOPHILA
tccgcctccgtctctgtcttcgtcttcgtctcatcatccgactaagtgtgttcgtcaaatgtgttattttgcgttacttgtttctcagcgtgtcgttttcgttccatttccgttttgtttccatttccgtttgatttgtctttggttcactaagctatgaaagtacaaatctccaccttaggtatgctacaagtaaatctaaacaaaaaaaaaaaaattattaccaattgttaagcaatatcaaagtttgatcaattcgttaacgaaacgcatttttgtcttttaatttcttttttattgtcctgtcaattaattgtgtactgtcctactctgttgctgtggctcgataccttcatgttgtgtgctaaaccaaaaccaaataccaaaaaaaaaaaaaaaatcaaatccaaatcaaatttcaacaccaaatcaaaatgcatttcccatatgcaaatcaaaatcgaaaaaaaaatcaaaaaatataccaaaaatcctacgtttcaacccgtgaatttgtagtctcttctggagctcgttcacaccttggtaagtcgaaaacaaaacacctaaagaaaaaaaggaaacacagacgtacaattttttgggtactccaaacaagaaaagaaagaaacgaaaatatttgttacagtcgcatcttcttcagttgattctgaattttatgttcacctcatccaagcatccaattgatccattgatccatcgcatccacttgtccatccacagaaagcatcgagttttgtttgccttcggattttttttttcttttaaatatatgcatccataaaatcacacacgagattctttggttcacaaatgtaggtggcatctctcatcacttctttttcgatcactcacttcctcttcccaaactctaatcatttacagcttggagttaagaaataccttcctaaaatctacaagtcaatgcagtcattagtcacacaagtcaaatcttctttgaagtaaattaacaattcagaaagagcagatttctcaattgtatcagctaatttcgcaaatatttaaattcaaccaaaacttgttgttttttttgcgtaacttatggattaccttccattttgaataccccaaagtgctgacatattgagcgcaaaaagtaaatatgtacgtctgaaacgcctgcaattgacttttgcattttttcccaaattgctgatcaacatttaaatgccccatggctgtaattgcattataattgtaccagcacctaccccattcgcacctttcgcttgcatataatgccattttgttgattttaaattacatttgaatacacacaaaaactgcgaaccgcaaaacccagagatcgaaaagtcaacaaatcattcatgtaaataaaacacgacaacaagaggagtgaagacaacaaaaagtacaaaatataaattaacaacggaaaaaatgcattcataattttttatctcaccaacacaccagcacgcacactcgcaaaaaaacaaaaaaaaataataaaaataaatataaacacatgcatatcatgagtatgttttcccatattcatttccatattcattttttatcgtttttcgttggcatactttatagggcaagatgaaagaatctcgatatatatatccacatatatatatatatagataaataattgtatgtgttatgtgtaccgtgtctatatgtgtatttagtttgatttccgatttgtgtttttccttttgccaatcagccagcgattttaacactcatactaacccatttatccacgaaagtcatcgaaatattattgttattattatttactctactctactctactctactcatagtttggcatgtgagcatttcgagcagaattttgtttgatttctcccgaggttctccgtttctccaaaatcaccatttctcacattctctttatatatgtctgccatcacaaaatgctcccgatcgttattaaatccttatgttttgatttccatcaacgaaactccaccaatttcttccctcatctctctcaaactcttgatctcttaacgtttttggttgtattcgtttgaattttaatcaaagctttttatggtaaacaaatctcatcaaatataaatcactttatgagttttcgtatcgattaatatctctgttgatgttttgttaaccaaacgaaggaattatgtatacaaaaaaaaaaaacagaaactcgataggtttcccatccaataaaatgaaatgaaaacccaaaggtcagcagcagaacaaagacaaagaaagaaccaatcaaagctaataaaaatgcaagtaaaacgaaagaaaatatctgtatatccttatatgttatcactcaaaaaaataacaacgaaaaaaaaaaaaacatccctacaaaacccccaaacgtatccctaaatgtcctaattgtctgcgtctaagccatttgtttatatgttttccaaatacaataaaactcacccaatcacacac

SEQ ID NO: 23576 - DNA, 493 bp, DROSOPHILA
tgcgagtgtgcgtgctggtgtgttggtgagataaaaaattatgaatgcattttttccgttgttaatttatattttgtactttttgttgtcttcactcctcttgttgtcgtgttttatttacatgaatgatttgttgacttttcgatctctgggttttgcggttcgcagtttttgtgtgtattcaaatgtaatttaaaatcaacaaaatggcattatatgcaagcgaaaggtgcgaatggggtaggtgctggtacaattataatgcaattacagccatggggcatttaaatgttgatcagcaatttgggaaaaaatgcaaaagtcaattgcaggcgtttcagacgtacatatttactttttgcgctcaatatgtcagcactttggggtattcaaaatggaaggtaatccataagttacgcaaaaaaaacaacaagttttggttgaatttaaatatttgcgaaattagctgatacaattgagaaatctgctcttt

SEQ ID NO: 23577 - protein, 87 aa, DROSOPHILA
MALYASERCEWGRCWYNYNAITAMGHLNVDQQFGKKCKSQLQAFQTYIFTFCAQYVSTLGYSKWKVIHKLRKKNNKFWLNLNICEIS

SEQ ID NO: 23578 - DNA, 2806 bp, DROSOPHILA
tcgataacatgctcattttagcgccgtgcaggttatgtaaaataacaagtagagtcgttgagatcaattaaaaatatataaaaactcgaccgatattctgttaatatcaagccatggtcttcctgaaccttcccttgctggtacggtcccgtggtccggacgaattctggcggaagagacgcatcttcaagctggcagcggtatgtttccgaatatcgtggccacaataaaaataatgagctcttagtgcttaatttctgcagcattatagaagccgcactcgcaatgtctactccttcgccatccggagtgtccatagggcactggcctatgccaccaaggggcgaaagctaaagaaactggacatggcgcaactgtggagcacacgcgtggaggcgggttgtcagcagtatggagtaggtctggaaaccttcaaagagggcctcgcgcgctccgatattctgctcaacaagtgggtaccaccggaaaattcccatatcctttaacaacctataacatctttcagaaaagtcctatccgacctcgccatttgggagccgcgatcttttgaagctctagtaaagatctctcgagagcgggcagctgtggagggaatgccagacatcaaacggagatcggcatttaaccaggtctatggactgagcaacctgaagttggattaacatagccttaagtaggagttcaaatatagatatttgtatgttttaaacgtgtaatctttaattttcactttgaagggagtaaaatcgtttgggatttgttctttagattagtttttaactccgaattcgtatttacatttagttacataattcgtaacttctgcttgctgaatgaaatttgatactaaatcattaatttatttactgcaactaccttttccgcgaatgaatccaatattttttcgagtaaaatgacaaatgtgattaatgacaaaacacctgtgctgctagttttaacaagtaactcgaaatttattcaatgacggtccatgcgcaatgcaaacaaaaatattgcatgagcttttattgtagtttttagtttcgggtttgtgggtgtgttacatactaataaaaagcatagaattcatagaattgtgagacagtgtccggaggcgagatctactccaatttggccaggatgtcggactcgcggaagaggaacagctccttctggtcaccctctaggttcaccttggtgccaccgaattcgggcagcagaacacgatcgccctccttcacgccaatgggaatgtggttgccagtggactgcggatgaagtgggatgttcagtgattagatgaccatctctgcattgataatggcgaaatactcacggcattacgggtgccagggcctacggccagaacggtgccctcaagtactttgcccaccgctttctccggcaaaacaatgcctcctttcgtcttggtcagcgcctcggcacgctggattaggatgcggtccagcatggggatgatcttcttgatagcggcggcctgaggatcattaaaaaagacccaacaattaacccatgtttcaatgtttcatgtttctctcattgattacacaacagcccggcgaatgggatgtggaccgaaagccgtggaaccttctcgaaaaaccgatatcatccttcgatttcaaactgtcttctaaacctcatatggggcaatgcacttttaacttaccattttaattcttaaatgcaaactggagcggttgataaaagttaatgagtgaactttttactcaactacacgtgccggcgtaactattctcgctagatgcgggactgcttatcgtcggtgtgaccaggctatttcacggatataacattgagaaataattttttctgttcgaatacactgagagaagtcaatgcaaaaattaatagttgtgtataacttttaaaatggtaataaacttttcgccaagtaattgccgagttgatttcctataaaacatgaagatgaaaatgagtctggtgggtggacttccataataacttgtataccaatttcaggaattactccttttatatgcaatttaaacatattaatttaatttccattaatttataataaacatgttgtgcaattttctgttctcatctttgttgagctaaataatcgttttttaagaaattaaatcagaagcccagaaatcttctgggctttactggtgttttaattttttcaaatttactaatattaaaatataatataatataaaataaacataaaacagaattgtttgtttacttcctcgaaattaggtatgttcaaaccaaggagttgctattgatactagcgatttaaatcgattgactctggcagcggattgttcacactacaccctgttgcaaagtgcaagacaataaagacaagcaacaaaataattgaaaagtgtggcattcctgagaaaaattaaaaaatttcagaattttctaaacatcttgtttttaagaagggaaaatagcacgaaacaactatcgatagctgctgacactcccaccactaaatctgattgggagatttatttgagtcaccgttttgccttgtttacatttaatgtaatttgtaccagataaatcttatttgattttactcaagtcaagtggcacgatgtgcttttgttgttcacttagtttacagtttgtgactgctattttcgtttagttatattcgccaataagccagcaattaacccactaaaatgtctgatcgtcgtggcacaaaagttggaactggtacgaaggctttggagtattggtgccgagttgt

SEQ ID NO: 23579 - DNA, 546 bp, DROSOPHILA
tagcgagaatagttacgccggcacgtgtagttgagtaaaaagttcactcattaacttttatcaaccgctccagtttgcatttaagaattaaaatggccgccgctatcaagaagatcatccccatgctggaccgcatcctaatccagcgtgccgaggcgctgaccaagacgaaaggaggcattgttttgccggagaaagcggtgggcaaagtacttgagggcaccgttctggccgtaggccctggcacccgtaatgcctccactggcaaccacattcccattggcgtgaaggagggcgatcgtgttctgctgcccgaattcggtggcaccaaggtgaacctagagggtgaccagaaggagctgttcctcttccgcgagtccgacatcctggccaaattggagtagatctcgcctccggacactgtctcacaattctatgaattctatgctttttattagtatgtaacacacccacaaacccgaaactaaaaactacaataaaagctcatgcaatatttttgtttgcattgcgcatggaccgtcattg

SEQ ID NO: 23580 - protein, 103 aa, DROSOPHILA
MAAAIKKIIPMLDRILIQRAEALTKTKGGIVLPEKAVGKVLEGTVLAVGPGTRNASTGNHIPIGVKEGDRVLLPEFGGTKVNLEGDQKELFLFRESDILAKLE

SEQ ID NO: 23581 - DNA, 3126 bp, DROSOPHILA
aaattggcggtgcatgaaattgtcgataccaatggcgctggggatgcattcgttggaggtttcctatcgcagtttgtgcagggcaagtcgctggatgtctgcatcaggtgcggaaactatgcagccgggcacattatcaagaatccaggttgcacatactccggcgaaccggagttcgttgagtaaaaccggatgcggaagctacagaaaccttacacacatcggacatcgaaggagccagacaaagcgcagcaagatttgcaattgttaattaagtaaatgagagtgactaaaagattttgttaacactgataattgtttgtacatacatataacccacactcagacacatacaaaagcatacacatgtgaaatgacatgaacaaatagagagagtgaggcttgtgtcttatagatagagcaatattcgaatttaaattgataataaaacaaaagtgacacgcgagcgagacacaaaagtcaacattttgtacaacttgaaatctttgtattgattttcagataagaggtgaaaggaggtttatttcctcatccttttatttattgggtttcttatccatttatggtataagataccaatcgggagaataatgcatacgactacaatgtccaaagttacaacgaggagtcatcagcagataagattatcaacaacgatagatagacgagttaaacattaaataaaacttgtgaaacacgcagctgtttcatttgcttgctaatgcggcccataaattcacaattaacccaaaaaagaagattagattatcagttcagcaacatgctttgactagtttatgaatacaaaacaacatgctaaatattagaaaacttatttggaaaaaacaatgtgcttgtaaatcttttttttttgctatacaaaagagaactgctgtataccttgtatacctaaacctaaaatagaattttgttttgtttgccatggcgacttgtgacattgaaccccagatcagaggcactaatcgaccagatagccccggatgaagggcaggcccgttggcacccgcttttgatagcgcacatagtccgactggaagaagttgagcagggagtactcctcgacgtagatgcgatcgtggaagaacagccagctgaccagtgtgtaaatgcatatgcagatgggattcaatagcacgatctgggttccgatggaccaccagaaccagccgacataagacgggtggcggcagtaggcgtagatcccgcttgttattagcttgtgttccgagtgtttctcattctggacctgtaggaatagatgtgtgatgagaagtttacaagctatttagttagttttaattaataatagtgtgataattccttaagtgcaataatatttatatgtccatgtattaacaaatcatcacgactaaccaagtgagtgaagctccggccagctgtgatgatggctgccttgcgaaccatctcgcccagcaggcacaggaccacgcccgccacccaaatgtatccgtatctcttgaactgcggcaggtagtacacctctagtgagaactcgatccaactggctgccgccgccagtccatagtgcacagagtggttcagcataaaggagtcgagactgagagtgcgcggattggcaaaggcgataacgaggaactccgagtagtggaaaagggacatgaagcatccgtaggcgccaaattgctgccactcggtgggagcaaagcagatgaccagcacactcacggccatggcaaagcccaggaaggatgccctaatggccacctgtggtgcaagaatagttagcgccatagcactgataaggtttatcgcgtctcatcgattgactcacctggtagtcgtggttccgcagcacaaaccgtatgatcatgttaataagggcgtagtacaaaaatggaccccagaggacggcgccccacacctgtggcaccactccataaagattctggggcaccgagggaatcaggactagagctgcagtaatcagaaagcaatataaactgatgcggccttcggaacacaggctggtgccaccggccccaggagaagccactcggctctttgcacacataactggggaatcgggattctttttgtgctgctgctgtgcgcaaaaacacggaaattgaggttttttaaaacatttgcttggtttaatgcgccaaaatgtaaataaaccggcaaagctttcgataacgataggcagcacagtgaataaccgctaaagtataggctcgtgattatcatagaaatcagtaatataattcttacagcttttaataaaataaatcataaatcataaattaaattaaataaataaatatttaacaccacgtttagcagaaaatggttttaaaaataaattatgcgggcaattctctttagcctataccccctgtaacaataagcgatagttatgcactgttacatatcgacatatcgagttctgaggatttaatttaattttatatagtcagaaaaaatttaatagtaacttaaatgaattacatttgtaggtattcacctatacctttttaaataaatttcttaactgcacgccttgcatcgatattttatcgataacatgctcattttagcgccgtgcaggttatgtaaaataacaagtagagtcgttgagatcaattaaaaatatataaaaactcgaccgatattctgttaatatcaagccatggtcttcctgaaccttcccttgctggtacggtcccgtggtccggacgaattctggcggaagagacgcatcttcaagctggcagcggtatgtttccgaatatcgtggccacaataaaaataatgagctcttagtgcttaatttctgcagcattatagaagccgcactcgcaatgtctactccttcgccatccggagtgtccatagggcactggcctatgccaccaaggggcgaaagctaaagaaactggacatggcgcaactgtggagcacacgcgtggaggcgggttgtcagcagtatggagtaggtctggaaaccttcaaagagggcctcgcgcgctccgatattctgctcaacaagtgggtaccaccggaaaattcccatatcctttaacaacctataacatctttcag

SEQ ID NO: 23582 - DNA, 931 bp, DROSOPHILA
gcagcacaaaaagaatcccgattccccagttatgtgtgcaaagagccgagtggcttctcctggggccggtggcaccagcctgtgttccgaaggccgcatcagtttatattgctttctgattactgcagctctagtcctgattccctcggtgccccagaatctttatggagtggtgccacaggtgtggggcgccgtcctctggggtccatttttgtactacgcccttattaacatgatcatacggtttgtgctgcggaaccacgactaccaggtggccattagggcatccttcctgggctttgccatggccgtgagtgtgctggtcatctgctttgctcccaccgagtggcagcaatttggcgcctacggatgcttcatgtcccttttccactactcggagttcctcgttatcgcctttgccaatccgcgcactctcagtctcgactcctttatgctgaaccactctgtgcactatggactggcggcggcagccagttggatcgagttctcactagaggtgtactacctgccgcagttcaagagatacggatacatttgggtggcgggcgtggtcctgtgcctgctgggcgagatggttcgcaaggcagccatcatcacagctggccggagcttcactcacttggtccagaatgagaaacactcggaacacaagctaataacaagcgggatctacgcctactgccgccacccgtcttatgtcggctggttctggtggtccatcggaacccagatcgtgctattgaatcccatctgcatatgcatttacacactggtcagctggctgttcttccacgatcgcatctacgtcgaggagtactccctgctcaacttcttccagtcggactatgtgcgctatcaaaagcgggtgccaacgggcctgcccttcatccggggctatctggtcgattag

SEQ ID NO: 23583 - protein, 299 aa, DROSOPHILA
MCAKSRVASPGAGGTSLCSEGRISLYCFLITAALVLIPSVPQNLYGVVPQVWGAVLWGPFLYYALINMIIRFVLRNHDYQVAIRASFLGFAMAVSVLVICFAPTEWQQFGAYGCFMSLFHYSEFLVIAFANPRTLSLDSFMLNHSVHYGLAAAASWIEFSLEVYYLPQFKRYGYIWVAGVVLCLLGEMVRKAAIITAGRSFTHLVQNEKHSEHKLITSGIYAYCRHPSYVGWFWWSIGTQIVLLNPICICIYTLVSWLFFHDRIYVEEYSLLNFFQSDYVRYQKRVPTGLPFIRGYLVD

SEQ ID NO: 23584 - DNA, 1425 bp, DROSOPHILA
tgttgtcaagctcatagcttgccgatttaaaagtggaatcttttcttaggttaacccttcaacattgtaacaatatatatttaaatcttagtaacggggtttttgttttaataaagattttcgtatgctcataaaaatttccaactgtcctaatcaaccggaaaaaaatgttgtcaaaaatcgaatatttccaaacggggttttctccataacttggccaaaaaaggtggcacacctaaaataaagacagttttgtactgctaataaacatgcctaactatccctatcaaaatttttatgatattcgaaaaacaaaattttaacaaattttcgcatttttattaaggggtacccccatcaaaatttgccaaaaattgaaacctcttggatcttccaggttttaacacaggtggatggggaatttagttacgaattcaacgaggtatcgcattccagttttggacaactatttttgttgctattgaaaaatatgtacttatttaataaaaaaaaataaacaaaataaaaatattgtcaaaaatcggataattcctaacggggttttcttcataacttggccaaaaaagatggtaaagctaaaacaaaaacagttttgtactgctaataaacatggcaaactaaccctatcacaacttttatgattttcgaaaaacaaaattttaacaaattttcgcatttttaataaggggtacccccatcaaaatttgcaaaaaaatgaaacctcttgaatcttccaggttttaacacaggtggatggggaatttagttacgaattcaacgaggtatcgcactccagttttgcacaactatttatattattttagaaaaaattctacatagtttgtattaaaaaggatgagctcgtgatttccagttccccattttctttaatattttgtagtgtaaaggaacacattttaaacacagttactagcggctgttaaggacatattagggattttaaggattacaactcaccttgggagcaatcgggccccgtccagtggcgttcgcacacacattgtcccgtttccagatcgtaggttccgtgctcggagcagccgggcaggcactggtacacctgctggtcgatcgtgccgcaatcctcgccctgccatccggccttgcaatagcattgtccggcgacgcaggtgccgtgtccggagcacaaaggatccaggcagtcgtacggaatgaccgattgctcggacagcgagtgctgctcacatcccgcctgctcggagcacataatgtgcctatcgtccaacgatcccgtggaggtcctgctgcgtaaacaaccgccttcggtgaccgcatccttctatcagagagtcaaatttttgatcgaggagaactcggtgcagtcgtatgcccacatggacgagtacagcgagaagtaagtga

SEQ ID NO: 23585 - DNA, 2569 bp, DROSOPHILA
actgggcggccacccacaacagatgccgcagagtatgtcaactggcagcaacacaatcggccatggtggcatcgatcgcggcggcgttggactgccaatgggcgctggcacgatgcccggcggtgtgggcggtggaccggggggcgtggccggtggaggaccccaggtgggagtcggtccacccgggagcggtaacggtggcaattgccagataagcggctcacagccgctggtcatgcccggattcccgttgcgtaattcccactcagcgcacgcaccgcactattcgccatattcgccatccaggtttcacatagataaacgctgtcagcaccgatgttcctggaaatgcttgagcatcgccttaatattcgtatccgtcgtcctaaccgccatgttggcgtactttgcagctgtcagctcgatgaaacccaacatggacagcaccaactgcatcctagtccaggacgtgaagtcacagccccacgatctgcgcggcggattggccaagtccaatgagaagggcgtggcaacggccttccccacggaggaatcgattcagaccagcacctcggatcacggccagaatggacacggactgatgaacccgtcggcgggcagcggaggcagcaactcgggcattcagcagcagttgctgctgcagcagcagcagccgcattcgatcaaccagccgcttaccccgctggacgcgaccaatacccatctgcaggatcaccatcagctgacctacggtggcgcattgcctggtggtgttggcgggattggtatgagcggcggtggcataatgaatggtggactgaatggcggactgggtggccagttgatgcagcaaccgggtggcggcttgaatggacaccaccatcaggcgctgcagccgcaactgggcggtgtggtggagctgaaggagttcaacgaggcctaccatgccaccatacccgcctaccagttctggaccttggaattccgcaacaaacatcccgcattcattcgcttcaatttcactctgccctggggcgcacactttgcggtctattcgcgtcgcaatgtggcgccttcggtgacgcaacacgattttgtggagttcatcaagggcggacgacttgatagccatctgagacatcgacgcagttccgcgaatgccaccacaactgggcaagatatggagctgtatcgccaggacaaggaccagagtgcggaatcggctcaggatcaggactcggaacaggacgagagtcgcagtttcgattccagcgaatcgtacgatgtggagacacccctcgatacggccaaacagcatctgcaacggattggcaagccccaaagtcactgggtgaacaaacgatccgctggcgatggcctgcccgctctggatgtcgatgccatgacggtgaatgtatccctgctgcagtacttggacaccggcttgtggttcatatccgtctacaatgacgagctggtggcccattccgtatcattgctggccgaggaggccgagggcgtgagtaccacatgtcccaacgattgctccggcaggggaagctgctatctgggcaagtgcgactgcatcgatggctaccagggcgtggactgttccaagagcgtctgtccggttctgtgctcggctcatggacactacggcggtggagtgtgccactgcgaggagggctggaagggcgccgagtgcgacattccggtgggcgagtgcgaggtgcccaactgttccagccatggacgctgcatcgagggcgagtgccactgtgagcgcggctggaaaggaccctactgcgatcaacacgactgcctggatcctttgtgctccggacacggcacctgcgtcgccggacaatgctattgcaaggccggatggcagggcgaggattgcggcacgatcgaccagcaggtgtaccagtgcctgcccggctgctccgagcacggaacctacgatctggaaacgggacaatgtgtgtgcgaacgccactggacggggcccgattgctcccaagccgtctgcagtttggattgcggccggaacggagtgtgtgagtccggaaaatgccgttgcaattccggatggacgggcaatctgtgtgaccagctgccatgcgattcccgctgctcggaacacggacaatgcaaaaatggcacctgcgtttgctcccaaggatggaatggtcgtcactgcacgctgcctggctgcgaaaatggttgctctcgacatgggcaatgtacgctggagaatggcgaatatcgctgcgattgcattgagggatgggctggacgtgattgctccatcgcactggagctgaactgcaaggataatatcgacaatgatggcgacggaatgaccgattgctcggacagcgagtgctgctcacatcccgcctgctcggagcacataatgtgcctatcgtccaacgatcccgtggaggtcctgctgcgtaaacaaccgccttcggtgaccgcatccttctatcagagagtcaaatttttgatcgaggagaactcggtgcagtcgtatgcccacatggacgagtacagcgagaagtaa

SEQ ID NO: 23586 - protein, 777 aa, DROSOPHILA
MPGFPLRNSHSAHAPHYSPYSPSRFHIDKRCQHRCSWKCLSIALIFVSVVLTAMLAYFAAVSSMKPNMDSTNCILVQDVKSQPHDLRGGLAKSNEKGVATAFPTEESIQTSTSDHGQNGHGLMNPSAGSGGSNSGIQQQLLLQQQQPHSINQPLTPLDATNTHLQDHHQLTYGGALPGGVGGIGMSGGGIMNGGLNGGLGGQLMQQPGGGLNGHHHQALQPQLGGVVELKEFNEAYHATIPAYQFWTLEFRNKHPAFIRFNFTLPWGAHFAVYSRRNVAPSVTQHDFVEFIKGGRLDSHLRHRRSSANATTTGQDMELYRQDKDQSAESAQDQDSEQDESRSFDSSESYDVETPLDTAKQHLQRIGKPQSHWVNKRSAGDGLPALDVDAMTVNVSLLQYLDTGLWFISVYNDELVAHSVSLLAEEAEGVSTTCPNDCSGRGSCYLGKCDCIDGYQGVDCSKSVCPVLCSAHGHYGGGVCHCEEGWKGAECDIPVGECEVPNCSSHGRCIEGECHCERGWKGPYCDQHDCLDPLCSGHGTCVAGQCYCKAGWQGEDCGTIDQQVYQCLPGCSEHGTYDLETGQCVCERHWTGPDCSQAVCSLDCGRNGVCESGKCRCNSGWTGNLCDQLPCDSRCSEHGQCKNGTCVCSQGWNGRHCTLPGCENGCSRHGQCTLENGEYRCDCIEGWAGRDCSIALELNCKDNIDNDGDGMTDCSDSECCSHPACSEHIMCLSSNDPVEVLLRKQPPSVTASFYQRVKFLIEENSVQSYAHMDEYSEK

SEQ ID NO: 23587 - DNA, 3309 bp, DROSOPHILA
atagcagataatgtgacattgtttcatctaagcgccgcacgccgtttgctggtgacccatgacattccgtggctcatggcagatgtgcttagcttccggtgagcagcacggataagtgagtttttttttatattttacacatttctcctcgttttagtccgtggcagagaaagaccagcaagggcattcagaagttcatcgacgagaagtggaccaatgtggacgacgtcaccaagattgtcaagccagaggcgcaggcctggttttgtgtgcgtcagctgctccttaatcctcagatcatggagaactatgctttcaacgaggcacgctgcaagcagttacacaaggttagttgccacctacatatatctatgattaatgcgctgacttaccaagctgacttccttagcttttgggtctcatgcacgagccgttgctggaccagctgccgccacttatagagctaaaggtgttcctcagccgcctgacgctcagcggcaatacggccaagacacagccgctcttgctggaggacattccgcagatccaggaggaactgctcaaggatgtcgaggaaaatggcggcttctatcagattgcccaggatcaggactcggttttccttagcaagaacaaggaaaacatctgcgctttggccactcgcctcagcaaagcctacggcacggacttgctctgtgaactggagcagaatatggatgatctcaagatgggcgaagcaaaggatgccggcgctggtggcgatggagatacggaccatacttgcgccacttgccaggcgaaggccaaaaagaagtgtgcctgctgcaagaaggtgcactactgctcccggtgggttggacgcaacttttgcggagttcgcttcttctataatattttttctttcagtgattgtcagctcaaggattggccacagcacaagctcgtctgccttaaaacttaattgtgacccagcgtctagtatacaaaataattttttcaatataatagaacattccaaaaatgtaaaaaggtcgactttcttttattttttcatctggattcaggttcaatacgttttattttcaattagcgaatagcttaaaaagaactttcacgtagtctctcattcagcaggcagtgcgcagctgtttagctgttctgcctgagatggtccttaaccacgtccaaagcgggtgtctcctcaccgaaatccttgatcacgaccacggagcagccgcacaccttgcggggcttgccctccttgtcgatcttgcacagaccggaccattcgcccagcttcttgtgcgagtccacgcggataagggggatctggtgctcgttgcacagggcggtaaccagcttcttgtagttgggctcgtcgaaggactcggctaggatgcacagaacagcctgacgcctgttggtaaaacaatatattgtaattaggaatggttttttttcatacaatgcaactcgatacgctgtcatttgctcagtaattggaaggtttttaatcaatataaattcataaacacggaccaattaatttcatcacagtcagaacagcaaaatcaagatgatttaatgtggaaacacacttgggatttatctttaatgcacttagtggattattataaatatcattacgattaataaacgattaaaaaattcaaggaggaaataagattcatttcctgaaaataggttaagttgaatgaagacccacactttttaaaacgtggtctatgtatttcaaatgatttgaactgaaatatatatttctatcaatcatatagattgctttcaactatagaatggtcgactttgaaatatattactatagcttttaccctttcgcattttgcatctaagagcccaagtgaataaccacgttgaccgccagattgtgggactacttacttgtccagggccttgcaggcctggtggatgccatggacgagtccatcggcgatcagggacttcttcaagacctcctggagggcagtgttaatgtccatggcgccatcgagcacaggggcagcggagggaacatcactagatcggaaaaacatatactattagcaatcaacgccacatgccatgccgcattacacaaaactcgacttagccttgcttggtcagtaattggagaatttataatcaatggaaattcataaacacggaccaattaatttcatcaacaagaggtttttccgagcaaggcgtaaaatgcgtttatcgcccatgaaacaattacttacacatcaacgtcggccattgttctgcggttaaggatgcactgcactggaaaagatagttaattgttcatatttattacattttcgataagaaaacctcttcatttcggagaaataaaatccaagcatctgtaccttttgacaaccggaaagaaagagaacaaaatcggcatggcgctggagatgtgagtttttagctattggtacaaatatcgatagtttcgcagagctgcatagtgacgcgatcgatagtggtgtgcaatggaaatttatgccaatttcttacttgctatgacattatcttaacttagatttcttaaatattttaacttttctgatgaactttttctaattaaatgatttttttttatcccaataagcttgagtgggtttcccagttttctggtatatattatattatatctttaagagaaagaatgttgctacagaaatctatctatacatctataatctgtccttgccacttgttccagttattactttgtttttacatgattttgtaaaagtgttaaatttaaagatttatatttggaaagcaattatattctacagaaatctattctaattcgtgcaatttttgcgcagtgcacatgaagtacatttaatctctttgttataaacttgaacttaacaaccttctgtggaatgctaattaaaaatatttatatatttaagagtaacatcattgctatcgtacaaatatatttcaatacaattgcgatgaaaagttctttcgctcttttagcagtgcacagagttaccgttttgcgagttaccacgcattagccacagatgcgtcacctgcggcacctggtaacactgagataaacaataccgaattcccaaacgcccgcaactcgcgcttccgacgacagcagcccgtggtaaatcacctataaatataaatatacgtgactatatctcccgattcgattctacgccggatagcgacttatacgagttgagagcgcaggcggccacctgaagtgcaataccttgtttatgtttacataagaaggcagcagcagca

SEQ ID NO: 23588 - DNA, 600 bp, DROSOPHILA
tccagtgcagtgcatccttaaccgcagaacaatggccgacgttgatgttgatgttccctccgctgcccctgtgctcgatggcgccatggacattaacactgccctccaggaggtcttgaagaagtccctgatcgccgatggactcgtccatggcatccaccaggcctgcaaggccctggacaagcgtcaggctgttctgtgcatcctagccgagtccttcgacgagcccaactacaagaagctggttaccgccctgtgcaacgagcaccagatcccccttatccgcgtggactcgcacaagaagctgggcgaatggtccggtctgtgcaagatcgacaaggagggcaagccccgcaaggtgtgcggctgctccgtggtcgtgatcaaggatttcggtgaggagacacccgctttggacgtggttaaggaccatctcaggcagaacagctaaacagctgcgcactgcctgctgaatgagagactacgtgaaagttctttttaagctattcgctaattgaaaataaaacgtattgaacctgaatccagatgaaaaaataaaagaaagtcgacctttttacatttttggaatgttctattata

SEQ ID NO: 23589 - protein, 139 aa, DROSOPHILA
MADVDVDVPSAAPVLDGAMDINTALQEVLKKSLIADGLVHGIHQACKALDKRQAVLCILAESFDEPNYKKLVTALCNEHQIPLIRVDSHKKLGEWSGLCKIDKEGKPRKVCGCSVVVIKDFGEETPALDVVKDHLRQNS

SEQ ID NO: 23590 - DNA, 2324 bp, DROSOPHILA
tattttatcaattctgtttaattttcctaatttttgatttctctctaatcgtgtctagtaacccataaaactaacgacaattcgcataaacaaacataataaaggaaacgttagtaaaacaacagagtgtaaaaaaggtttagcaaccgcgaaaacgacttacgaattttcacaacaacttgatgttttgtaacggagtttcaagaaactagtaaaaactttattgtgaattcttctgctgcttcttctttgcaagtgtggcaaaaattttgttgctctgcggatttatcgagaacatcaaccactcacggtaagttgtgctaattattgcttaaacttatttagttggctatttttattgcaatttcttgagcatgattcacaaggggaattcaaatcagaggctgccctttaatgaatcagctacttggttggcatggcctacattcagttctctaaaaatcacttctgatatataaatacgcagaactaaatgcagccactgatttgaaatatcaaatatattgcaggtcttcgttctgcataagcttgatgttctgaagtatattgtatacatcgtttttttgacgtgcttttcaagtgttaataagttgagctgcttctatatcatactcatatgtatgtgtgcaaatgatatatctgtcagttgtccatcattggctaagatcaaatccgaatctaagccatttcgagttgaacaaacccaatcgcaacgccgccgaaagcgagaggcacgggtacgtgaactccatattccgaccactctgatctaatgccgctgaaatcgcacaaggttgtacttgtgtacgagcgtatgtagatagatggatgaatagtatgtggtccaatacattccgatttcgatttcggattcggtttcgctttcgaagtcggcttaaacttggcacctgttgcggtcagagcaacactcgactacactgtcgcacaaagttcgcatagaattgaatcgagcttgaaaatgttttgtggtcgcaagtgctgtctgttctgcctgttcatgagcgcctggggcttcttgatgctgaatctgctgggtatcttcttctacgtccagtcactgatgctcctggagtccctgcccttgccccaccacttccccagtcaggaggccttcaaggagcaggcggacgaggcctaccaggacgtgtccacacggtgctttgtagccgccgttttctatctgggattcgtcttcattgcgatagtggccattcgtcgggataacaagagaaggaagcgactctacaagcggggtcccggtcacttgcgattccgtcgttgatttgtatgattggttattgaataaacaatttattttcatggttccaattgcatttcacccactcagcgacgtccacccacttgttggttcgaaagatcgaaagaaccagtttgttgaccgcattctgcgattagccttaacttctttatcgccaagccacttttcgatttcaagtctggctgactgttgtccactccgcattatgcattcgtctcggaccaaccgatttttgacagcgcacgtgacaccttcaccgaggtgtgttctcttttgggcatcataaatttccgtgaaattctctttccgaaacatgctaatgggaatggggtgtgggttcccagttctggctattcccccccctttcacctctataccgtagtctagtctacaccggggttatgtatcttgttcttatcgaccgagcttttgtgtcttacacgaaaaccgttgtgtaaattatcgtacacgattttctagttgtacgcttgtgtatctggcttgttatcaccaccaaccaagtgcagtctgctgaaaactggttcactgcatttactcattttttcgggaactcgggttaactgatttggagatctggcaatacctgggaaatattctaaatttcctccatggatggtcttctatataattgtgccacccgagagaccgtacaatttcttatgcagatgtagaatcgtattttttacgaatctatgaaacacactcgtagaaaagtggttcaattcagaaacatttgatattgacatcaaattgagatttttaagtttgtgacgcgaaaaaaattttatattttgctaggcaaacacttggctaagaaaatcaaaggtctcttcccacagagaagggaagtgaagagcaagtaccatgtcccgatttttgatagctaccaaagagcgtctccagaggggatgtgagtgaaagaattatgtccagaagtttttcgcttcaaagtagaataaaaccttcctgaatccccagtgcg

SEQ ID NO: 23591 - DNA, 324 bp, DROSOPHILA
atgttttgtggtcgcaagtgctgtctgttctgcctgttcatgagcgcctggggcttcttgatgctgaatctgctgggtatcttcttctacgtccagtcactgatgctcctggagtccctgcccttgccccaccacttccccagtcaggaggccttcaaggagcaggcggacgaggcctaccaggacgtgtccacacggtgctttgtagccgccgttttctatctgggattcgtcttcattgcgatagtggccattcgtcgggataacaagagaaggaagcgactctacaagcggggtcccggtcacttgcgattccgtcgttga

SEQ ID NO: 23592 - protein, 107 aa, DROSOPHILA
MFCGRKCCLFCLFMSAWGFLMLNLLGIFFYVQSLMLLESLPLPHHFPSQEAFKEQADEAYQDVSTRCFVAAVFYLGFVFIAIVAIRRDNKRRKRLYKRGPGHLRFRR

SEQ ID NO: 23593 - DNA, 4817 bp, DROSOPHILA
acatttagtttaatttgctattaagctgtatgtattttaagtatggaatttccctttttactagttcctaaaagcaataccaaatgcttccatttattctattatattttttaagcacgtctaagttatagatctttaatttagtcatgatgacagctgattagattatgataccactatcgcttttatcacaccagcttctgggctcatgccgaaatggttatcccacaaggtccgaagagtatggcgtcggggggacggacttacagaaataactttggttctgaagaagagccaattcaatgggttcaaggttggccatcacgctgggagcaagaagcgaatcagacgcttaatttgtaatctctgcagaggtgggagagtagccattatggcgataccagtcgcatcctccaagacgcactccatctcgccttgccctgtacttcaaaattaagtgtgcccagaatggacttgctctgtggctcattctttggcgacgacgaggagcataatgactcggctaaagattcagcaccattgcccacgacttcgccagtgcctcagactatcaaaagaaaatcgcgtgtaagatttagccgcagcaccatacgaaaactccaactcaacgaactggaacagttgggctccacaaacgcctttttcaacttcctgctcgcccagcgaattcgggaattgggcttggtcggtctcaactacctggatgtgttcaagtcccagcgactaatttcggggaaacgcatctggaactgcatgtatgagttggctgaaagtgttcgtcagaacgatatttaaacctttcgggataagaggaaactcgatgaaatcgtctaccaaatgtattcgtgcgaaaaaagaccgaagatcgctgagaacgcactgagagattgggagacgcagcagaggaggagagacctgaaatcgaaatcgcttggagaacgtttccccaaaccgagtaagatcagttgaaggtggcgcgttgcgctcgacggttgtcgctattctggttctcgctcaagttatccgaactcttggaacagctgggtagtctggtctggcctggcgcataaagacgcgatatcggtcaagttcagacgaagaagacgacgacgcggcgatcactcaattagcctcaccgtgagggcgcgtgaaattcacttttaaatttcccccaactcgattttcacatacacaaattgcttttgttacgattctcgcgtgtgcttggttgaaaaggaatttgtcacagtgccaaaaggtgtgtgtgttcttcttggaaatgtccacttagctcgtaaactattccaatgttctaaaaagccataaattagccctaaggtcgcacgtgaaaccttcaccacctgggctagcctaactttacgcaactgagaacagagcagatcgcgatttgaggcgagtcaacaaagtgcgcagcagaagtccagaatattgattgactttgcaatcaaatttgctcagttcgaaattttcagagtcagggaattagcactcagcttattttcgggccacatattgtttgaaagcagcccatatccaagttctacatgtgtgtatatattattgagagttattttgcttgtcagttagcagtaattggaggagggcacataaaccaccgtgctagctacccataaattacacattagataacgccgacatgtgctcatcgctgatttcgagggcccccatataagtcgcgttagcctgagccccacttgtccaactgagatctgtacaaacactttaaaccggttatatacatatagtacccgctgggaaaacaaatagcaaacccaagccggcaatatatgaataaccaagcaactaaccaaccaaccagctggctggtaaacagtcgcgtcgtagtattattttggcttattgataaacaaaagcctgtcaagtgtgcgatcgcatatatatatatatatatacaaatgtgtttatatatttgcattcttggccatgaccaaggaaatctgatgcatgtcgcgtaagtgataatatacaaatcgaattacgtcacgttgactgcaggcactcaaacctccttgactacatattatttttcaaggggattgcgttatcggacatttaaacttttcgctttgtggcacacgcccttttaattaatagccataaaatagcaagcgaaattggaagcgtgaaatttgattttttcttaagtgttacgactctttcagttatttttagctcgaactaaaaagagttactaactgaataaacattaagaattaccaagaacgtattaaacacagcaaagacctgttttggccaaacatctattttttcatttcaaccgaaatcactagtttgcgcactaacaaaactttagctatttcttttgattttacatctcgtatcgctttctattcgcccgcgcctgaatagtttctattatacttcgaatgattgatggccgcctatgacacgggcaaattggaaacaggttttcgaatggctcattaatatctaccacctttctctgcccctttcgcagatgagcatctcggcggtggatcgcaaagagccgggcagtgtgagcagcggtctgggtaggcgatacgggcagctgctccgtggagccaagtacacagattgcgtgttccacgtgtgcgaggagcaagtgaaatgccacaagctcatcctgagctccgccagtcccgttttcgaggcaatgttctttggtcccatgcaaaacaacgagcccgagccggaaatcgaaatccacgacataagctctgccatcttcaaggtgctggtggagtacatctacacgggcgtcgttgactacaatggcctggagctggtggcctgcattgagctgtactacgccgctgagaagtatctgctggaggagctgatcgccgacacgctgatggttatcacccgcaagctgcgatttgccaatatcttgcccgctctagagctaagtgtttgcatgggcctcgacgggttgctggaggtctgcatgacctttttcatgcgatgctgtgttaataatggacagtatatgagccaccttaaggagcactatgtgcacgtgtccaaggagtgtgtgaaggccataatagcggcgtgcaaggaaccgcacaagttactcatctggtatgtttatgagtggacacgacaggagtgcgagcagttgggtctgggtcccagcgatgccgacttagtagtgcacgacttgggtggcaaaacaagcgactggcctgcggcttcgggtgctagtgatttggaatcacctgccctaactccggtggttttggtggagcgctgctattacaaggcctgcaggccctttacagtggatgcagaaactccgctgtttcgcttgcgtctaaagtgctctagatttatctccttgatgggcttggtcctgaacagcaggctgactcccaacctattgggtcacgtccagcagctggagtaccgcgaatcgctgcggctggacctttgcgaggtgcccgctgaaagcgagggtccggccacgtcgcccgtatggagtcacgttgtccagagccagaataccaagtacaactgcaacctgcatcttggctggcgacgcgaagaggcctgtgtgctgaatccggagctgacctatgagctgcagatccgctgggacagcagtgcttacggcgccgagtatccgtgcagcctgcagtcctgccaggcggacggaattcggttcactgacgaggacagcttcagcggaagtctcgtcaagggactgcgctatgccaacctggtgtagccacttcagccgcgatatcataattagttagtccgtaagacgtgtatgtatttattgccctaagttaatgtacgctgcctcagagttcaataaactgtgagtaatatcgcttcaaacacaagacgtctgctgataaatataaaaagccggtttgcagccgtttttgtttggcgaacgaatcgaactcgatcggggaacggcgtcctggctgcgaatacggaaacttatctcacctgttgttgcggccactaaaaaaaaaaaatcggtaaaacaataaactataatataatcaccagatgtaaacaaagcgaaattgaacgagggacagtgtggccaactggtcataataattcttgcttaaattggggcgaccgtaaaataattaacagtgagaaactggctattatttaataacttaatttttgtttaaatgattaatgatttaaagctgctgcgctgtaaaagctttatttgctgttcagaattaaaatattaatgagcactatcttaaatctaaacataaaaaccaaacattttacagtaacaatggaatcaaaaatgcagtggaaaagcgctaaacacccgcgaaacagtgctgtaaagttcttcacagagtagtgttggcagacgccgggtgcaaaacaataatagtccgctttggtttttgtttacgctgcaaaaatgacgattttgtacaaagtggagggcaaggagttcagcaaggacagcgtttttccgcacaagaaggtcctctgctcagtctccgcacggaacatcgttgcgtttagcgccctccagagcgccatatttccggcttcccacggaggagatgccggcgatggatccttgccgggagcgggtttggccgtaggcgcgagcaacagccatgtgtacgtgtgcgacatcgtgacgccgtgggaatactataaggtgtgctcctccaaatcgcttatcagcgtcctccagtggagtcccaatggggagcaactgctgcttggat

SEQ ID NO: 23594 - DNA, 1533 bp, DROSOPHILA
ttgcgctcgacggttgtcgctattctggttctcgctcaagttatccgaactcttggaacagctgggtagtctggtctggcctggcgcataaagacgcgatatcggtcaagttcagacgaagaagacgacgacgcggcgatcactcaattagcctcaccgtgagggcgcgtgaaattcacttttaaatttcccccaactcgattttcacatacacaaattgcttttgttacgattctcgcgtgtgcttggttgaaaaggaatttgtcacagtgccaaaagatgagcatctcggcggtggatcgcaaagagccgggcagtgtgagcagcggtctgggtaggcgatacgggcagctgctccgtggagccaagtacacagattgcgtgttccacgtgtgcgaggagcaagtgaaatgccacaagctcatcctgagctccgccagtcccgttttcgaggcaatgttctttggtcccatgcaaaacaacgagcccgagccggaaatcgaaatccacgacataagctctgccatcttcaaggtgctggtggagtacatctacacgggcgtcgttgactacaatggcctggagctggtggcctgcattgagctgtactacgccgctgagaagtatctgctggaggagctgatcgccgacacgctgatggttatcacccgcaagctgcgatttgccaatatcttgcccgctctagagctaagtgtttgcatgggcctcgacgggttgctggaggtctgcatgacctttttcatgcgatgctgtgttaataatggacagtatatgagccaccttaaggagcactatgtgcacgtgtccaaggagtgtgtgaaggccataatagcggcgtgcaaggaaccgcacaagttactcatctggtatgtttatgagtggacacgacaggagtgcgagcagttgggtctgggtcccagcgatgccgacttagtagtgcacgacttgggtggcaaaacaagcgactggcctgcggcttcgggtgctagtgatttggaatcacctgccctaactccggtggttttggtggagcgctgctattacaaggcctgcaggccctttacagtggatgcagaaactccgctgtttcgcttgcgtctaaagtgctctagatttatctccttgatgggcttggtcctgaacagcaggctgactcccaacctattgggtcacgtccagcagctggagtaccgcgaatcgctgcggctggacctttgcgaggtgcccgctgaaagcgagggtccggccacgtcgcccgtatggagtcacgttgtccagagccagaataccaagtacaactgcaacctgcatcttggctggcgacgcgaagaggcctgtgtgctgaatccggagctgacctatgagctgcagatccgctgggacagcagtgcttacggcgccgagtatccgtgcagcctgcagtcctgccaggcggacggaattcggttcactgacgaggacagcttcagcggaagtctcgtcaagggactgcgctatgccaacctggtgtag

SEQ ID NO: 23595 - protein, 417 aa, DROSOPHILA
MSISAVDRKEPGSVSSGLGRRYGQLLRGAKYTDCVFHVCEEQVKCHKLILSSASPVFEAMFFGPMQNNEPEPEIEIHDISSAIFKVLVEYIYTGVVDYNGLELVACIELYYAAEKYLLEELIADTLMVITRKLRFANILPALELSVCMGLDGLLEVCMTFFMRCCVNNGQYMSHLKEHYVHVSKECVKAIIAACKEPHKLLIWYVYEWTRQECEQLGLGPSDADLVVHDLGGKTSDWPAASGASDLESPALTPVVLVERCYYKACRPFTVDAETPLFRLRLKCSRFISLMGLVLNSRLTPNLLGHVQQLEYRESLRLDLCEVPAESEGPATSPVWSHVVQSQNTKYNCNLHLGWRREEACVLNPELTYELQIRWDSSAYGAEYPCSLQSCQADGIRFTDEDSFSGSLVKGLRYANLV

SEQ ID NO: 23596 - DNA, 5561 bp, DROSOPHILA
gaacacttgaacgccagtgtgtatataacaagctgctcgtttattttcaaaggtgggactacacaatagaccataatatagttttggaaccatgaacgtttggtttcccttggattgtctcaatcgatttcgagttatgcagcatttgaattaatcgttccgaatcaaatataattatattttgcaaaatttttttaacaataagtattaaccttattagtaataacaaagttatatttaatacattatggacaaccctcattaaaatagcacatttaattacgtcgaaaaaaaatacccttactaaagtctaaacattggatacatcctgaaagaaataccataattgccagggctgcattgtgcgcaattaatcgtatttgaaaaagacacaagcaatcgaaatttaaacgaaacatcagttgggggtttggtaattttacatttgtttattttctcatttagttaatgcccttcaaacgcacaatttgctctttaggcattattaattacattctgtaaaacctacttataaattaaactgcggcaacaatacaatttgccaatcggatttacgcgcttgtttatgtttgcttgttttatgttttaaatgtgattttgttatgcttgtatacgggaatctatgcatttaatttaaaaccactgggggctaaatagctatgttggttaattcagtttctcatttgttttgtacataatacaaactgcattcattcgcttaatgttggctcgctaatttaatcgctactgtttttgttaggcgaaagaacttaactttaagaaatacaatgtatgcaattaatgaatgtttagttggtttaaatgtatacttctatgttactggctacgtacgtctgtctgtgagggcgagcgattcacgatacgcattcgcattctcgtttcaagatgagtggatgatttgagggtcaggatgggagtatagtgggcaaccattcacgcacaaagtctctcatgtcgttcagtccagcttcttcatcgatttgagggcccgttcccgcagctgcttctcgaggtcctcgttgatgacaccggctccggaggcgcccggcaacagtagcgccagcttgccagcgtttccattccgcttggccgcaaccgagtgcggcaactgctcatcctcgtcgctgctgccctgggaactgctgtccgcccgcgacttgccggcactgcacttccgcttgtgcttcttatgcttcttgctcttcttgctgtgcttcttgtgtttcttatgcttcttgcgcttggaggaggcctctgagtcgctgtcactggaatccgccggcttcttcgccttcttgcgctttttcttgggcacatgctcgtcctcggaatcgctgttgtcgccagcctcgtcccgacgcgtcttcttgtgaccgcgcttgcgactgctcgtcgactcctcatcgccgctggagattgcgccccgcttggacttcttgtccgagcgccgcttgtccttctccttctcatgctccttctcttttccctttaaagccgccgcctccttgctcttcctttgctgcagcttcttcttgagcctctcatccccactggagttgtcctcgtcgtcactctgttcgctgctggttgagctctccgagctgcgccgtaccttctccttcttgcccttggaagtctccatgttggttggctgcttcttgcgacgcggctgctcctcgctatcatcgctctcggcactgctatccgaactgctgctctggctctgatcgcgggatttctttggtaccgccgccgacgcagcagcagctgccttggctgcggctagacgctcgtggggcttaaggaacggtgagggcgtgcgggacagactggcatagctgctgcgcacggctggaccctcgtccagcactatgatcgtttctggcttgtttttgcgctgctgctcctcgcgacagagatcgatggtgttcaccgccgggccagcatactccaccgacgagcgccctgtaaccaaaaggagtccacaattaattacccactgttaagttgatcatttgcttgacacttaccaattggactctcgcgcttgcgactgtgttgcgaactggagcgactgcggcttcgattgcgactcaggctgcgactgcgactatggctactacgccgtttctccggcggactggcactgcgctgtcgctgttgccgtccacctgccgagcttcccgatgatgagcgccggtttcgtgcaggcggcgggttgtcccaccgattcatgtgaccgccaccaccgcccggtgagctgcgcctttcccttgagttggggcgacgatctcttgaatttcgtcgttgctgcggcgacgagaagcgacgtcccggtccctgatgcggggagaattgcttgcggaacggctgattctgctgcattggcgactggcggtggtcgcgattatagcgattctgttgcggcgactggcgcctgtcgaagcgacccattccgcctccccctccgcgtcctccgccgccaggactgtgtctggcctgccagtggatgcgcccgccaccgcggaagttgggcgatccgccgcgatgctgccacatctgccgatgtccgccgccacgcccgccaccacgtcctccacctctaaagttcatcatcggcgaacggcgacggttgttgaagctgcacggaacgaaattaacatgattgaattagttaagccattgttagttaggcaatagaatcaacttaccgtcttggagagcgagaataacgcataggcgagcgtgatagccgcctggatctcgacctgcgacgcgaattggatcgctgaaagcgattgccgccgttgccaccgccattatcctgtcgcatcggactgcgtcctcgcggggagaagcgtctgccacctcgacgaccacctccgccaccgccaaactgcctgcctcgatcgttaccgcgctccattgaactagccgagtccccgcgattgttgcgatattgccgcttgttttgcacactgttcttgttgcgtcggtgctcaaactgatcctggttgcgctccggcgacaaagatatgctgctggagcgtcctcgtcggcgactgcgtcgcgaggaactgcgggaacgtgaccgcttggcgctgggcgatcgagatcgactgcgcggcgatcgcgaccgggaatgcgaacgggagcgcgacttgttcttggaggccggcggtaccggcgaggacttgtccgtcgagtggcggccgttgacagtcttggcgggtgcgggctccaccgagcctgtctttttgccggcggttcgcgagcgtgaacgtgaacgagaacgtggtcgtcggctggatctccgctccctggagccgggacgcgcggcggaggaggagccgcgtttacggattttggcagccgcattggcggccgcttctcgtgcggcactgggcaccgaaccgttgttgttggccggcttcattgagcgggatctggagcgggacttggatttggagcggtcacgctgccgatctcgcctagaactgtctcgttgggagcgggaacgcgaacgggatctcgatcgatcccgctgccgctgttcctcctcccgtttgagtatctcgtcctttttctgctgtataaactccgctggtatacccgaatcgctttcctgtgccgaaagcagcagggcccaaagttcacccataaactggcgggcatttcggccgttcaagaagcccgtcatattgatctgcattttcttggggcacggatacttctcctcctccagctgattgtagacaaactcgacgaccacgtcgtcctcgatgtgcaggatgtcggtgatcttcttgctgatccacggacgcagtacgtccagcttgactttcgacatatccaccctcttgttcaggcaatcgccgaacttcatttgcttcatcagcttcttctccttgtcgctgaaccgcgtgtcctgctgctgattggtgccctatttgattttgcgggggggcggggtgaaaaataaacatatttgcaggatattccatttaaaaaaaagggggaataaattatcacaaacgaatgggcaatgtattgaaaaaccatttatcgattagtttgcgggggggtgtcgacgcttttggcttaccgtgaacatcatcttggctgcgtatttgtgattagagtcctgcgggaatttcggtgcactgccgccaatttgtggcccaactttaggccaggcacatttgttttctagcgcagcgagggcgagtcaaaaatccaataaaaatatgtaacccggcaccacgcaagtcgattgtcgtctacaggagcacacacacactcgcgcagcgtcttttcgccgtatgtgtgatggccggggagatgcgatgcctttggcccgaaacaatcgctatcttaacaccctgctcgcgcgtttatcactctaatgcgttctgtcgtcgttgcgaacagctttaatggcagttttctggctatttttcagcactttactatcgcaaaataaaaaattatattcgtgaaaacggtctgcgccagtgatggcagcagcggcccaaaacacgagtaatcggaccagcgcaggactatcggcaaatgttatcggcgagcatctggcagcgctgcgcacagggtgttaactgtcttttttaattcaaatgcgaccgttacattttaaatcttttcaaacttaaaacgaattttaaaatgatctgtttagattggtttctatttttactataaaagagctacattttctagatcatttaaggcacatgtcggtatgtgcgtagccatagcaattacattctatttatagtttcattattatatttccatccttttgaacaattttatattccatccctttggaattaaacgactgcagtcacatttcgaaacgaatgtttttatttagcattttcgaatgccgtaattaggggttctaataaatacacactacaaacgcacagaggcatttaatcaattttgtttaaatttagacttaacattaggattcgattatttttcgagcaaaatttcaattcaattttataaagctgagtgggatttaaaggagaatgagagatggggggaaaacattaaataacattgcaaaattgatttcgctacaaaaaataattccttttaattaagccagccagccagccagccagttcagcccagctcggcttggctccgatctgctccgacccaaaactcgctcagttcttttggttgctgttggtgttcctggtggttaccgccttcgccttccttcgtttcctccttctacggtatcatgttcggctcctgggcggcgcccgtcgagtacttgggcttgcacacgcatccgctctccaccagcacgtaatcctggccagtcagcgtcaccgggccgagcggaatgaccaggaacaggtagggcacataggtttgcgtacactcgccgcggaccacatcgcactcagaggatctgaaattgaccatagtagtgagctttaaaaagaagaactagtggagattgtggagtaatgtaagtt

SEQ ID NO: 23597 - DNA, 3267 bp, DROSOPHILA
atcactggcgcagaccgttttcacgaatataattttttattttgcgatagtaaagtgctgaaaaatagccagaaaactgccattaaagctgttcgcaacgacgacagaacgcattagagtgataaacgcgcgagcagggtgttaagatagcgattgtttcgggccaaaggcatcgcatctccccggccatcacacatacggcgaaaagacgctgcgcgagtgtgtgtgtgctcctgtagacgacaatcgacttgcgtggtgccgggttacatatttttattggatttttgactcgccctcgctgcgctagaaaacaaatgtgcctggcctaaagttgggccacaaattggcggcagtgcaccgaaattcccgcaggactctaatcacaaatacgcagccaagatgatgttcacgggcaccaatcagcagcaggacacgcggttcagcgacaaggagaagaagctgatgaagcaaatgaagttcggcgattgcctgaacaagagggtggatatgtcgaaagtcaagctggacgtactgcgtccgtggatcagcaagaagatcaccgacatcctgcacatcgaggacgacgtggtcgtcgagtttgtctacaatcagctggaggaggagaagtatccgtgccccaagaaaatgcagatcaatatgacgggcttcttgaacggccgaaatgcccgccagtttatgggtgaactttgggccctgctgctttcggcacaggaaagcgattcgggtataccagcggagtttatacagcagaaaaaggacgagatactcaaacgggaggaggaacagcggcagcgggatcgatcgagatcccgttcgcgttcccgctcccaacgagacagttctaggcgagatcggcagcgtgaccgctccaaatccaagtcccgctccagatcccgctcaatgaagccggccaacaacaacggttcggtgcccagtgccgcacgagaagcggccgccaatgcggctgccaaaatccgtaaacgcggctcctcctccgccgcgcgtcccggctccagggagcggagatccagccgacgaccacgttctcgttcacgttcacgctcgcgaaccgccggcaaaaagacaggctcggtggagcccgcacccgccaagactgtcaacggccgccactcgacggacaagtcctcgccggtaccgccggcctccaagaacaagtcgcgctcccgttcgcattcccggtcgcgatcgccgcgcagtcgatctcgatcgcccagcgccaagcggtcacgttcccgcagttcctcgcgacgcagtcgccgacgaggacgctccagcagcatatctttgtcgccggagcgcaaccaggatcagtttgagcaccgacgcaacaagaacagtgtgcaaaacaagcggcaatatcgcaacaatcgcggggactcggctagttcaatggagcgcggtaacgatcgaggcaggcagtttggcggtggcggaggtggtcgtcgaggtggcagacgcttctccccgcgaggacgcagtccgatgcgacaggataatggcggtggcaacggcggcaatcgctttcagcgatccaattcgcgtcgcaggtcgagatccaggcggctatcacgctcgcctatgcgttattctcgctctccaagacgcttcaacaaccgtcgccgttcgccgatgatgaactttagaggtggaggacgtggtggcgggcgtggcggcggacatcggcagatgtggcagcatcgcggcggatcgcccaacttccgcggtggcgggcgcatccactggcaggccagacacagtcctggcggcggaggacgcggagggggaggcggaatgggtcgcttcgacaggcgccagtcgccgcaacagaatcgctataatcgcgaccaccgccagtcgccaatgcagcagaatcagccgttccgcaagcaattctccccgcatcagggaccgggacgtcgcttctcgtcgccgcagcaacgacgaaattcaagagatcgtcgccccaactcaagggaaaggcgcagctcaccgggcggtggtggcggtcacatgaatcggtgggacaacccgccgcctgcacgaaaccggcgctcatcatcgggaagctcggcaggtggacggcaacagcgacagcgcagtgccagtccgccggagaaacggcgtagtagccatagtcgcagtcgcagcctgagtcgcaatcgaagccgcagtcgctccagttcgcaacacagtcgcaagcgcgagagtccaattgggcgctcgtcggtggagtatgctggcccggcggtgaacaccatcgatctctgtcgcgaggagcagcagcgcaaaaacaagccagaaacgatcatagtgctggacgagggtccagccgtgcgcagcagctatgccagtctgtcccgcacgccctcaccgttccttaagccccacgagcgtctagccgcagccaaggcagctgctgctgcgtcggcggcggtaccaaagaaatcccgcgatcagagccagagcagcagttcggatagcagtgccgagagcgatgatagcgaggagcagccgcgtcgcaagaagcagccaaccaacatggagacttccaagggcaagaaggagaaggtacggcgcagctcggagagctcaaccagcagcgaacagagtgacgacgaggacaactccagtggggatgagaggctcaagaagaagctgcagcaaaggaagagcaaggaggcggcggctttaaagggaaaagagaaggagcatgagaaggagaaggacaagcggcgctcggacaagaagtccaagcggggcgcaatctccagcggcgatgaggagtcgacgagcagtcgcaagcgcggtcacaagaagacgcgtcgggacgaggctggcgacaacagcgattccgaggacgagcatgtgcccaagaaaaagcgcaagaaggcgaagaagccggcggattccagtgacagcgactcagaggcctcctccaagcgcaagaagcataagaaacacaagaagcacagcaagaagagcaagaagcataagaagcacaagcggaagtgcagtgccggcaagtcgcgggcggacagcagttcccagggcagcagcgacgaggatgagcagttgccgcactcggttgcggccaagcggaatggaaacgctggcaagctggcgctactgttgccgggcgcctccggagccggtgtcatcaacgaggacctcgagaagcagctgcgggaacgggccctcaaatcgatgaagaagctggactga

SEQ ID NO: 23598 - protein, 954 aa, DROSOPHILA
MMFTGTNQQQDTRFSDKEKKLMKQMKFGDCLNKRVDMSKVKLDVLRPWISKKITDILHIEDDVVVEFVYNQLEEEKYPCPKKMQINMTGFLNGRNARQFMGELWALLLSAQESDSGIPAEFIQQKKDEILKREEEQRQRDRSRSRSRSRSQRDSSRRDRQRDRSKSKSRSRSRSMKPANNNGSVPSAAREAAANAAAKIRKRGSSSAARPGSRERRSSRRPRSRSRSRSRTAGKKTGSVEPAPAKTVNGRHSTDKSSPVPPASKNKSRSRSHSRSRSPRSRSRSPSAKRSRSRSSSRRSRRRGRSSSISLSPERNQDQFEHRRNKNSVQNKRQYRNNRGDSASSMERGNDRGRQFGGGGGGRRGGRRFSPRGRSPMRQDNGGGNGGNRFQRSNSRRRSRSRRLSRSPMRYSRSPRRFNNRRRSPMMNFRGGGRGGGRGGGHRQMWQHRGGSPNFRGGGRIHWQARHSPGGGGRGGGGGMGRFDRRQSPQQNRYNRDHRQSPMQQNQPFRKQFSPHQGPGRRFSSPQQRRNSRDRRPNSRERRSSPGGGGGHMNRWDNPPPARNRRSSSGSSAGGRQQRQRSASPPEKRRSSHSRSRSLSRNRSRSRSSSQHSRKRESPIGRSSVEYAGPAVNTIDLCREEQQRKNKPETIIVLDEGPAVRSSYASLSRTPSPFLKPHERLAAAKAAAAASAAVPKKSRDQSQSSSSDSSAESDDSEEQPRRKKQPTNMETSKGKKEKVRRSSESSTSSEQSDDEDNSSGDERLKKKLQQRKSKEAAALKGKEKEHEKEKDKRRSDKKSKRGAISSGDEESTSSRKRGHKKTRRDEAGDNSDSEDEHVPKKKRKKAKKPADSSDSDSEASSKRKKHKKHKKHSKKSKKHKKHKRKCSAGKSRADSSSQGSSDEDEQLPHSVAAKRNGNAGKLALLLPGASGAGVINEDLEKQLRERALKSMKKLD

SEQ ID NO: 23599 - DNA, 3985 bp, DROSOPHILA
gctgtgagttcaaagcaggggtcttgctaaataggccgacatttaataccactcgcgagcaaacagacaaatccctacaaatgattcacatgcattgttgttcttgttgttcttgctgctgctgttgttgttgttgtcgccaacttatcaacatatgatgttcgcccgtgtgcgtatgtgtcggtgtgcatcggtgtgtgcagcgcatcgttgtatgggtggccagcattttcgtgttttcttcttcgcatatgatttgcttttgggggcgggggctctgctagggcttccgcccagcggcggaatgcgccaccgggatggtcgggtacttacttcgaagcgagttctgatccggggacgcacaatgttcgcgcacaaagcctttcaccacacgaaatacaatgataattctctgcagcagaagcagcagcccactgagcagtgtgaccggagctttcgcagcggccgttctatcgatgctgggggcgggttatcgattatttgggcgccaactccagcccccacgcaccacagaggggttaaaactcaccccccccccccccgtaaaataaatgaattccttttttcaataatctattgccctttttttatgatatgaatgaaataagtgagatgaagacgtaaacaagaataacacaatcatcatcataaattgaaatttaagtcctcattaaaatctgcttttgaaatatttacttaacaaacgcaacttttgaattcgtgtcatagataaaactagtctttcaagctctgaaatgtcaattttgagggtagttttactttacgtccagttctaaggcattgtgaattgattttaaagttcctataaagtcacgtttgaatagctttaagtcacgtcacacatgtcccatgtttttttttttacacatttcaaagcaaacatctgattctttaaactcttggccaacaaatagatcaaccacttccattgcaaaagaaaacacatgtgttacgttctcggcttgtaattccgtagctaaacgtacagagtgttatgctaaaaggtaaaagtccttaaactcctgcgccttagtgggtcttggcggccagacgcttgtcgcgctcctccgcaatgctcagcttgacacccttgcccttaggcagggagatgtagggcttgttgcccttgccaatgatgaacacgttggtcaaacgggtggcgaacacatgaccttgcgagtccttaatgtgcacaatgtcgaaggaaccgggatgacgctcacggttgacaacggtgccgacacgtcccaaattcctgcctccggtgatcatgcagaggttgcctgtggagacggagaaatataccagttagttggaatcatacgacttggttaataatattgggcgactgtcattgcacgtaaaagttactgaagcgactttggaatgccgcatcagagaccgtcgtgacaaaaattgcttttggcttattgtttttgaaccacgcaactttcgaggagcgttttgtggtcttcgaaccagccaatgaacacgatgatctacgatagcggatgcttaccagaatcgaacttaatgtagtcggtgatcttgccagaggcaatgtccacctgcacggaatcgttggcgtggatcaggggatccgggtagcggatggtgcgaccgtcgtgtgtaaccaggaaaggaactcccttggctcccagctgggtcttcttgaccttgcacaacttgtactgcaaaagaagcaaagaaaatgtgggttaattttaagacgttttatttctacacaattgcactaccactttcatttaattgcattgtaattgcacgtaaaagttactcagacgactgtggaatgccgaatcagagaccgtcgtatcaaaaattgctttgggcttcgatttgaaccaatagacacatggcaacaagcggaaatcggtcttcgacgtagcccacagaattacaatataatgctttatactccttggtttcttttgtaattgcacgtaaaagttactgaatcaactgggatttgtcgaatcagagaccgtcgtatcaaaaattgctttgggcttcgttttgaaccaatcggcgcactattctacacgcaaaacggtcttcgacaaagccctttcgatatttaagttaattactttcggtaattagcataaagattgattttgtattccaaaataggtgaactatttatgttttaaagatgaagttagatgaatctaattcaagtgctcttgcatgaaaagaattcctagttgaggatgaaacctcagttaataattttagattttaactccatggttggaaagcgggaacctctggaagcacagactagataactcaccttggcctcctcggcggagatgcggtggatgacgaagcgtcccttcacgtcgtagaccagacggaagaactcaccggtcttctcgagggtgatgacatctaaaaaacgggcaatggagcccattagtatggagcacatttgaagcacactcttgccgagcacacaactcacccatgtagccagcgggataggtggggtcggtgcggacctttccatcgaccttaaccaggcgctgcatgacgatcttggtgacctcggcgccattgagggcgtacttcaagcggtttctcaagaagatcagcaggggcagcgactcacggagcttgtgtggaccggtcgagggacgcggggcgaagacgcctcccagcttgtccaacatccatgccttgggggcggctaaacgcttcaaatgcttcttggggccacgagcctgcaaagtgtaagtgggttttagccgttagtcaggtattccaaaggcaaagacaaacaatcgtgaccatatctccaccaccaacagatactcaccatgtttgattcactatattgaacgggcgatcactgcaaatagaacaatcaaacgttagttttgtgccagcattcgctcgccactgccagtgccgcatccgtggccagcaaatccccaatgccgggccttccattgacaaaacttagcacgtggctagctgcaaaaaatacacataccgtccgtcgggcaatacaacaggaaaaggaaaaggcagatttgcgggcggtgtggccagcgggcagttggcgtcgaataactaaatactggattgcggttaccgcgcagggttacttttgcgaggatgccttattatcgggggtattcctcagcccctgtatcaattagcttttgtcagctgtgacgcgatttaatgcttaaatgagaatataaataaagtatattgttataaaccgatgattgctctaatagagagaatcggctacccttaaatatacaatattttactttcatatgaatttatatacacgcaattaggtcttatcactgttatatagtcatgtcaaataaagtcaaatgtaaagttatttttacacagaagtctctcaaatatagggttagtaattaaaactggtctgctaaaagaacacttgaacgccagtgtgtatataacaagctgctcgtttattttcaaaggtgggactacacaatagaccataatatagttttggaaccatgaacgtttggtttcccttggattgtctcaatcgatttcgagttatgcagcatttgaattaatcgttccgaatcaaatataattatattttgcaaaatttttttaacaataagtattaaccttattagtaataacaaagttatatttaatacattatggacaaccctcattaaaatagcacatttaattacgtcgaaaaaaaatacccttactaaagtctaaacattggatacatcctgaaagaaataccataattgccagggctgcattgtgcgcaattaatcgtatttgaaaaagacacaagcaatcgaaatttaaacgaaacatcagttgggggtttggtaattttacatttgtttattttctcatttagttaatgcccttcaaacgcacaatttgctcttta

SEQ ID NO: 23600 - DNA, 955 bp, DROSOPHILA
cggatgcggcactggcagtggcgagcgaatgctggcacaaaactaacgtttgattgttctatttgcagtgatcgcccgttcaatatagtgaatcaaacatggctcgtggccccaagaagcatttgaagcgtttagccgcccccaaggcatggatgttggacaagctgggaggcgtcttcgccccgcgtccctcgaccggtccacacaagctccgtgagtcgctgcccctgctgatcttcttgagaaaccgcttgaagtacgccctcaatggcgccgaggtcaccaagatcgtcatgcagcgcctggttaaggtcgatggaaaggtccgcaccgaccccacctatcccgctggctacatggatgtcatcaccctcgagaagaccggtgagttcttccgtctggtctacgacgtgaagggacgcttcgtcatccaccgcatctccgccgaggaggccaagtacaagttgtgcaaggtcaagaagacccagctgggagccaagggagttcctttcctggttacacacgacggtcgcaccatccgctacccggatcccctgatccacgccaacgattccgtgcaggtggacattgcctctggcaagatcaccgactacattaagttcgattctggcaacctctgcatgatcaccggaggcaggaatttgggacgtgtcggcaccgttgtcaaccgtgagcgtcatcccggttccttcgacattgtgcacattaaggactcgcaaggtcatgtgttcgccacccgtttgaccaacgtgttcatcattggcaagggcaacaagccctacatctccctgcctaagggcaagggtgtcaagctgagcattgcggaggagcgcgacaagcgtctggccgccaagacccactaaggcgcaggagtttaaggacttttaccttttagcataacactctgtacgtttagctacggaattacaagccg

SEQ ID NO: 23601 - protein, 261 aa, DROSOPHILA
MARGPKKHLKRLAAPKAWMLDKLGGVFAPRPSTGPHKLRESLPLLIFLRNRLKYALNGAEVTKIVMQRLVKVDGKVRTDPTYPAGYMDVITLEKTGEFFRLVYDVKGRFVIHRISAEEAKYKLCKVKKTQLGAKGVPFLVTHDGRTIRYPDPLIHANDSVQVDIASGKITDYIKFDSGNLCMITGGRNLGRVGTVVNRERHPGSFDIVHIKDSQGHVFATRLTNVFIIGKGNKPYISLPKGKGVKLSIAEERDKRLAAKTH

SEQ ID NO: 23602 - DNA, 3924 bp, DROSOPHILA
gtgcttggccaccgcctcctgggccttgctcaactggatgtagccctcgtgggcgcgggagcgcagttcgctctccacgctcttgttgaccgacttcgaaataacggacttgatcttctgcgtctcattgaacttggcctttttcgcctgaattggcgcatctgtaaattaataaaacaaaaacatagaatttggagaagattgttaagcatgtgggtaatcacttgatcgacgggtgaaagcagcttgcttttggttcttctttttctgtatcgctgctggtagcttggccttcttgaattttccctgtggcatctttacaaatgacaaatttttatcaagaaaacgaaatataaatgttttgctgtgcagcacgttgttttggttttgccccacaccgataagtctatcgattacgtcctatcaatttaagcggactgccaacctattgcatcctctttgagccacttggcgcgcttttcaaatcactcaaattggtttgttcggtttattttattttcgattgctggctcacttatatataacttgtaacatatatcaaaagggaatactaaagccgcagacggcttcagcaatccgccttccgctttctcgaaactaaacacaaaaattttacaaatttcaatgcaaaactcagattgctcgcgataatcgtttttaacaagaaataattaacatttaaaagcgctgaatattgtttatatgcaagttaagtgggattcagtatccttatttacttatgtatatatatgtagatatatatgtataattataaatatggtatttgtttttattttttgctttagcttttcctctacattcttgttgtctttgctcacttggtgattaaacagagttctcaacgatcgaatattttgtttcttataaaaatcgttttacaaaaatctatgcgtgtgtgtgtgtgtgggttgtgtatgtttgcgtgtgtttgttgaatatgggcgtaaaaataaaacaattaactgttcagtttggcaacgataacgccagttacgattaaacctattatcacagcgatcaccaggagtatcaagatcttgcgccggtagctctggcgactcctggccgccttggccagttccgaggtgccatcctcaacgttggcggccgtctgctcaatactgttctcgatgaaatctggaaagaaattgagatttgcttagaaagtgtaatcaaaaacaagtacaaaaaccttccatcaagcaagcacctagaaattttcaaaactattactaataaggagtgaaaaattttggatatttaaacctgtaatagcagtcagtaaatattttataatatttgcttgctcttatcagtttcttcttatttttgtaagacccgaaataattgattactgttcaaataaacaggaagttaaattaaacgatatgataagcgtatgcacacattacttgccaaatgacacgggttttcataaaagatatggaaaattaaaacgtctaagtcgttgttgataattccaatcaatttcgaaatgtgcattgttattgaagcaaagtcaatgattcataatttcttgcacatgtttacttatcaactcatttgagagatttgctatgcaacctttaagcaactgataagctctgaatattttgttttaccaatggatttctccatttggacgctattaaatatgtggaactgcgtgcatttgggtcgtaaagtgagagccctaattacggcttgtggtttctcgatttgcggtcgttgagccccacttggatggagattactcacccatctgctgcccctgatcgtgcaccagtccactcagctgggtcatgatctggttgacatcgatgatgtccgactctatttgctcgacctgccgccgccgatcgtcgagcatgtcgtgctcctgctggagatgggcctgctccaagcgctgttgctgcagcagctcagcacgggcgttggtctccaccacctgatcggcaaattgctgcgcctgctgcagggtctgccgcatggccgatgagatgcgtcgctgcagattggagtacttctccaccacgccatggaactcccgggtgagcttctccagctgcagcttctgctggcgatctccgtgccgcacaacggcctgtagcctctgcaagtcctgactggtggtctgcacccgggcattgcacttggtgttgatggtgtgcaccttctcccgcagatttggctgctccttggatgtgccaatcagtttcagctgcttctccaactgcttggtgctgctgtggatggcagtgatgttgtggccaatgtcctcactaagagacatgaattccgtcggactgaagccggacgaaccgccggctgccgcaaagctcacttcgggcgttgaatcggccatcgcaccatagtcccgatgggggccaccgcctcctccgttgccaccgggattgttcaaggccttggacatatctgtaagtgcatatgtatcgctgtgagttcaaagcaggggtcttgctaaataggccgacatttaataccactcgcgagcaaacagacaaatccctacaaatgattcacatgcattgttgttcttgttgttcttgctgctgctgttgttgttgttgtcgccaacttatcaacatatgatgttcgcccgtgtgcgtatgtgtcggtgtgcatcggtgtgtgcagcgcatcgttgtatgggtggccagcattttcgtgttttcttcttcgcatatgatttgcttttgggggcgggggctctgctagggcttccgcccagcggcggaatgcgccaccgggatggtcgggtacttacttcgaagcgagttctgatccggggacgcacaatgttcgcgcacaaagcctttcaccacacgaaatacaatgataattctctgcagcagaagcagcagcccactgagcagtgtgaccggagctttcgcagcggccgttctatcgatgctgggggcgggttatcgattatttgggcgccaactccagcccccacgcaccacagaggggttaaaactcaccccccccccccccgtaaaataaatgaattccttttttcaataatctattgccctttttttatgatatgaatgaaataagtgagatgaagacgtaaacaagaataacacaatcatcatcataaattgaaatttaagtcctcattaaaatctgcttttgaaatatttacttaacaaacgcaacttttgaattcgtgtcatagataaaactagtctttcaagctctgaaatgtcaattttgagggtagttttactttacgtccagttctaaggcattgtgaattgattttaaagttcctataaagtcacgtttgaatagctttaagtcacgtcacacatgtcccatgtttttttttttacacatttcaaagcaaacatctgattctttaaactcttggccaacaaatagatcaaccacttccattgcaaaagaaaacacatgtgttacgttctcggcttgtaattccgtagctaaacgtacagagtgttatgctaaaaggtaaaagtccttaaactcctgcgccttagtgggtcttggcggccagacgcttgtcgcgctcctccgcaatgctcagcttgacacccttgcccttaggcagggagatgtagggcttgttgcccttgccaatgatgaacacgttggtcaaacgggtggcgaacacatgaccttgcgagtccttaatgtgcacaatgtcgaaggaaccgggatgacgctcacggttgacaacggtgccgacacgtcccaaattcctgcctccggtgatcatgcagaggttgcctgtggagacggagaaatataccagttagttggaatcatacgacttggttaataatattgggcgactgtcattgcacgtaaaagttactgaagcgactttgg

SEQ ID NO: 23603 - DNA, 951 bp, DROSOPHILA
ctgcttctgctgcagagaattatcattgtatttcgtgtggtgaaaggctttgtgcgcgaacattgtgcgtccccggatcagaactcgcttcgaaatatgtccaaggccttgaacaatcccggtggcaacggaggaggcggtggcccccatcgggactatggtgcgatggccgattcaacgcccgaagtgagctttgcggcagccggcggttcgtccggcttcagtccgacggaattcatgtctcttagtgaggacattggccacaacatcactgccatccacagcagcaccaagcagttggagaagcagctgaaactgattggcacatccaaggagcagccaaatctgcgggagaaggtgcacaccatcaacaccaagtgcaatgcccgggtgcagaccaccagtcaggacttgcagaggctacaggccgttgtgcggcacggagatcgccagcagaagctgcagctggagaagctcacccgggagttccatggcgtggtggagaagtactccaatctgcagcgacgcatctcatcggccatgcggcagaccctgcagcaggcgcagcaatttgccgatcaggtggtggagaccaacgcccgtgctgagctgctgcagcaacagcgcttggagcaggcccatctccagcaggagcacgacatgctcgacgatcggcggcggcaggtcgagcaaatagagtcggacatcatcgatgtcaaccagatcatgacccagctgagtggactggtgcacgatcaggggcagcagatggatttcatcgagaacagtattgagcagacggccgccaacgttgaggatggcacctcggaactggccaaggcggccaggagtcgccagagctaccggcgcaagatcttgatactcctggtgatcgctgtgataataggtttaatcgtaactggcgttatcgttgccaaactgaacagttaa

SEQ ID NO: 23604 - protein, 284 aa, DROSOPHILA
MSKALNNPGGNGGGGGPHRDYGAMADSTPEVSFAAAGGSSGFSPTEFMSLSEDIGHNITAIHSSTKQLEKQLKLIGTSKEQPNLREKVHTINTKCNARVQTTSQDLQRLQAVVRHGDRQQKLQLEKLTREFHGVVEKYSNLQRRISSAMRQTLQQAQQFADQVVETNARAELLQQQRLEQAHLQQEHDMLDDRRRQVEQIESDIIDVNQIMTQLSGLVHDQGQQMDFIENSIEQTAANVEDGTSELAKAARSRQSYRRKILILLVIAVIIGLIVTGVIVAKLNS

SEQ ID NO: 23605 - DNA, 2500 bp, DROSOPHILA
tgataaaagggggtgggctgcaacaaggggaaacaaaacaaaaacacgcaatcggctgtgaatttttccggctgcatgtgagtgcgggatgctggctaattaaaagcgcatcaaaagcggacagaatttgcatagcaaacgaaacgaaacgttgcgaaaattaaatagaaattgttagtggcactttttccttttcacttcgtcaaagctgcctgccaatgactaaaaagtttgtcatgaatagctgtcgttaaaggagcggaattacggaattttggaattcccccgaattctgggcgaacggagccacagcgaatcgtccaataaatgtcagcggaaccaactttgttggccaactatttttataattaaacaaactgattgtgataagtaggaagctgaatgcaaaagttcttccagcagcggccaccaaaggtccgctcataaattggccaaacgtcaaagtaagcattgtactacttggtcaacaagtccttgagacagcgttgggaaaaagtcaaagctcacgacaagaaaacttaatgaaaacttcaaaaattcgtataatttgcacggcatttaaaagaaaatgttatcgttcttagtaatttgcattcattgtgaaacatactgaataaaatattcaagattgtaagacaatgtactctgcatttggcaacatttaactttttataacataaaatagttcatactaacattgaaaatgaatttgttcatttagtatagcttctaatgaatgaatttagtatcaaatattaggttcacctgaccatcaatagaaatgcaatcctaaaactcagcgagaactacaaaatttaagtaactttcttaatttagtagactgttgagagattgcagatactaacaacgctttaaagctcatatgctctgatattaggcggatttgttaatccttttggcaatcttaagaggagaattcgtttcctttgggttccaatcgatgctataacaaaggaaatagttttagaaatgttttactatacaatatgcaggtcatttggttatcaacagagtacttatgcctagagtaagctattccgcggacttggcggtactggccgccgcagccgccttcgcctgggaggcgtggtgcttggccaccgcctcctgggccttgctcaactggatgtagccctcgtgggcgcgggagcgcagttcgctctccacgctcttgttgaccgacttcgaaataacggacttgatcttctgcgtctcattgaacttggcctttttcgcctgaattggcgcatctgtaaattaataaaacaaaaacatagaatttggagaagattgttaagcatgtgggtaatcacttgatcgacgggtgaaagcagcttgcttttggttcttctttttctgtatcgctgctggtagcttggccttcttgaattttccctgtggcatctttacaaatgacaaatttttatcaagaaaacgaaatataaatgttttgctgtgcagcacgttgttttggttttgccccacaccgataagtctatcgattacgtcctatcaatttaagcggactgccaacctattgcatcctctttgagccacttggcgcgcttttcaaatcactcaaattggtttgttcggtttattttattttcgattgctggctcacttatatataacttgtaacatatatcaaaagggaatactaaagccgcagacggcttcagcaatccgccttccgctttctcgaaactaaacacaaaaattttacaaatttcaatgcaaaactcagattgctcgcgataatcgtttttaacaagaaataattaacatttaaaagcgctgaatattgtttatatgcaagttaagtgggattcagtatccttatttacttatgtatatatatgtagatatatatgtataattataaatatggtatttgtttttattttttgctttagcttttcctctacattcttgttgtctttgctcacttggtgattaaacagagttctcaacgatcgaatattttgtttcttataaaaatcgttttacaaaaatctatgcgtgtgtgtgtgtgtgggttgtgtatgtttgcgtgtgtttgttgaatatgggcgtaaaaataaaacaattaactgttcagtttggcaacgataacgccagttacgattaaacctattatcacagcgatcaccaggagtatcaagatcttgcgccggtagctctggcgactcctggccgccttggccagttccgaggtgccatcctcaacgttggcggccgtctgctcaatactgttctcgatgaaatctggaaagaaattgagatttgcttagaaagtgtaatcaaaaacaagtacaaaaaccttccatcaagcaagcacctagaaattttcaaaactattactaataaggagtgaaaaattttggatatttaaacctgtaatagcagtcagtaaatattttataatatttgcttgctcttatcagtttcttcttat

SEQ ID NO: 23606 - DNA, 437 bp, DROSOPHILA
cacagcaaaacatttatatttcgttttcttgataaaaatttgtcatttgtaaagatgccacagggaaaattcaagaaggccaagctaccagcagcgatacagaaaaagaagaaccaaaagcaagctgctttcacccgtcgatcaaatgcgccaattcaggcgaaaaaggccaagttcaatgagacgcagaagatcaagtccgttatttcgaagtcggtcaacaagagcgtggagagcgaactgcgctcccgcgcccacgagggctacatccagttgagcaaggcccaggaggcggtggccaagcaccacgcctcccaggcgaaggcggctgcggcggccagtaccgccaagtccgcggaatagcttactctaggcataagtactctgttgataaccaaatgacctgcatattgtatagtaaaacatttctaaaacta

SEQ ID NO: 23607 - protein, 102 aa, DROSOPHILA
MPQGKFKKAKLPAAIQKKKNQKQAAFTRRSNAPIQAKKAKFNETQKIKSVISKSVNKSVESELRSRAHEGYIQLSKAQEAVAKHHASQAKAAAAASTAKSAE

SEQ ID NO: 23608 - DNA, 7729 bp, DROSOPHILA
cacttatttgcctggaaaaagacgaatttttatttaagaaagtattatttaaaaaaagcttgcttattattaaataacaaataacatgtcacatacacactaaatattctaaaaatatgttaaaaaaaaaaaaacaaaaacggatatttaacctatagtttccgaggtcgaattcacacttccccctagtgattttatatatttacataacaactattattatatttatacaactactgtaaataaccatttaaattaccaaaactgttatgagaatcgtttacctcaagcgaaagatgtgaacccatgttgattttatacatacatatataacaaatacgatacgaatagtttgttcatcctatatttttctcgctgggaggcattattatgtgagtcatggaggggggaacccccactgtaaaatgtttattggctctgtagataaaaaatgttaaaatttttagttttttaaagatttaaatgggtgaagtatggaaaacaaagttcccttacaaaatatacattccatataaaacgtttggagcaatggcaaaataaagcaggaagtttttaataattatggaaataaactgtaaaatctgaaaaattgaaattcctagaaaccgctaaaaaaaaatgtttccattctgggaagaaccagttctttggtattttgccgaacgcgttagtgtttctgtatgagccgggtgtacacgtcattaaattacgaactaaaattaagtctaacaaaataatagcagttggaaaagtgcatagcctaattgtacattcttttagaagatcccttggccaaacaaattcgtttcaatagcaaactacgttataactacccgatgcatcgcacacgaatctcgaactgcaactagttcgtgatttttgcacccataaacttcggaatcggaaccaacgaaccgcaatggacgcgaagtgaaccatgggtttattttattagttaccaatcgcaattcactctgcgcgcattgaattttcgttctggaattgaaattaattcgcttcgaacttcgcgtttagcgttcgtacacggtttttgttcttgtttttttgcgcagtgcgtgtgtacatgtgtgtggtacttgtgtgcgcggcggcaaatgcgaaattacaagcataaataaatgccgtcgattgtttgctaattagctatcggcgaatatcgggaaaacgagcggagaacggcaaataggcgaaaactaaatcaacaggtaaatattgccagcgaaataggaagatggcacaaaaacttccgaaacttcgctcttcctcttcacgccacacacacacatgcgcaaattaggagtgctcgtgtgtgtgtgtgtgttcgctattaaaaatgtctgtcgccgctaacggaaaaaaacaaacacttaaaaagaaacaacaacaacgccggccgcttgtcccaaaaatcacaaaaaaaaacacccaaaaacgaaatgcaaatgaatgagcagggaagagagtgtaaagaagagcacatagagcggcgaaagagcgaccgagatagcggctgtctttacacatattgtctttgctcccgcagttaatcataattttacaacccctctcccttctaccagaaatagatgaatgtccacgtgaatttcacacttcttccacccctctcgctccatcacaacgtccatgtgaaggtcaactatgaccctggacttggagcaaaaacaaaaatattgtatattattgatttgcttcactttttttccgcttctcttgcggtttcttttcctgcttccatgccattgcaaaaagagcaatcagaaaaacagctgattgaggctaaacttgaaataccctataattacagggtacatagagtcgggtacataatgtcgcgtgacaagcgacactaagaacgaaaaaagagaagaatagggagcatagattggcaagatagcgccatctgttgggcatgcaaaacatgcgtagatgtaaacaaaaaatgatattaatcaaaaataaagggtatcctttagatcctttgattttatgaactcttcctcaaaccctagcattgatcttgtacacttcaaaaataagcgtatttataacgaatatttaccatactatataccactatgtatgtttttttgtttacattttattcgactgtttgtcaaccaattgcaaattgatatttgttgcataaaaatagaacgctccgcatttaattaaacccaatgatacgcatacatgtgtacttaagtacaagtactacctttcccgacctactattaccccaccttcgactatcgtcggctttgagtcgttaggacacgtgttatttggtcgatagctggctcctgttgctccttctgtcgcctagccaaacgttggcttgcccatatgaaatgccagttgggatggccagttggataacgcattggatttgatggctggatgaggtcatataaggctgagaacgtagctgtcgttactggaactcctgttccggtctatggcactctaaaaaaaaaaaatggagctgaaccccacccagacctaaatgaaaagctcttctcaattaatacaacctgaagtgatgcgggaacgtggacaggcaaataattccatggttcatctttcgccaaacgtgctactgtattgccagcatttcgtcgagtagttctgtgttttgttgacttatttgctcaatggggccatcggtcaatgcaattacttaagcacacttatttattgcggagtaagccgctccgaccggcttatgtacatacatactacccgtacgaacaatacatgtatgtacatagctacatgaccatttcacggtcacttgcaaccgcataaattgcgctgattccacaccattccagagacatggatccgatccgatccgattcgattcgagtcgatctcatccgggggaacaagtcccgtggctggtgcgataagctccaattcggatacgatgtcaactaagtgaaactgctgacgttttcggttcgacatcatctcgataggggatagatatacttactctgctaactgtaaataagtatgttcgaaatgcttaagtgcaaaaaacttgttcaattctcatgggtaacttcacttatcgctgagctttgaacctttgaaaatgcccataatgcttgcattgtaaaatataaaggatagtgattcaagttgtatgacgctagatggaattttttatgtcattttttaagtaattttttaagtaattttttagtatgattcaagaccgatgacaatagttttcatatcatttatgacacaatatctttatcaagtttaaatacattcgaatacgaattattctagtagcttcgttcaaacctacgctttttgcacgaaaatggaatttgacagtgctcccgattcgtatcggaaatcaaaagtcaattgatagtggaaacatgactgattgtcatgtttagttttttttttttttatctggtcgaaaccgcctaactccggccacgcccctaatcccgcgcccagatcgcagcccctcctccaaggccaccggtgacgcgttggaggcacttgaatcaatccgccacttgaattcggctccgttaattttccacccatcgaatcccaaccgcctgccaccttatcaatagccgaaaatatataaaaaaaaaaaaaaaaaatagaaatccactctccactctatgcaaattctatcataatgataactcaaatagcggcgaccggtctataaatacgattcccccctttgtgtttacccatcattagttgtgtaattttatgcagatagtaaaaaagttaggcgagataagcattcagtgccagtgcagtggaaacgaggatataaactatttctaatctgggaacacgtttaagttagaaaaccagcacaatcagaaataaagtttgaatccgaattcggaaagagtcgtcgcaagagttaggaacaaattcgggatgcagggatgcaccagatggcacaagatgatcttcaactttaatattctcaacttgctgcaacgaattttagcaggcactgtgcgtctggagtatcaaataaatacaagataaatggaaaatggatgtcagagaagtacgaaaacatcatatatatttggataagataaggccaaaagcatcaggtgctctcatgtgtcacacagaaaagccagtgcgaactggaaagagcaagttgctcccattagttgtgtgggtgcatacgatatacagttgagaataaatacaaaaaactgaaagtaaaatgatagaattggaattgggattaataatgacaaattaacagccgaattaatatccgaaaaaaatgtatttaactaagagaattgaatcatctgattagcgaaacatgagtataaatgtaagataagatagagtcgaaattccttagctggaaactattggaagaaatcaagaatcacgtgaggagaagcgattgagtttcatatactaggccatgtaacaaatacatgcctatgtacatacatatcagtgacgtcggaagcaaagtgttaagtttaataatcagatatcagataagctattcgatcgatttataatgccaacacatccaaagtgctgcaaaggccaacgaacagtgcaaactcaacatttggctgagtcaatccgttctggaagtctctggtgaccaccaaactgaggagtatggatcggaatcgaatcgaatcgaggtcgcggatcgtcttggaacggattggcagtcaagtcggagttatctggaaataatgctttcgttgcgatcgcctgccgatcgtttattccagtcgccccattatgtctgtcgtaaatatgtacgtacatacatgtatgtatgtatgtaatgtacatagctcaagttgctatcgcccggcgataagctcctcgctcctcgtctgccaatcgccttcttgacacttgcacctgtatgtcgtataagtcgtatgtctggaactgcggttctagttccatatcgcgctgagtgcgtcgactggcggattataaagctgtcaattaaaatcatatttcgctttatgactgccaaatatttaactccagtcgcgttaatctggactctaagctgttgccataaatcgatagctaactaatttggtatatggcacactcatcggtcttatattaaaatcgaataatcgcagtgagtttgaattgttgatagccagaaatgatggactttctagcctatgcattgcatatcttaatgacattcctataaatgactataaataaagactgattgacgattagttaataaatgatcatccaaatgtctaatccacgtattttcttaattaaccagagtgttgcaatcatcgcatttactgggatcttcggaattttcaaaccctttatcgattttatagattaatagacccataaattggccatcggtttttgtgcatatccttaacactccattattgcgtcaattgcaagaatttcgctgccaatcaatatttaattgtggcaacgtttcccagtcgaaagctcgcctcaattgtgccttattgaaattgcaaataaagtgaaaatcaatagatgaaaattactttataacgagtcaattggaaattgtgcaaacaagatgacaactttgtttggtactctggtcgtcagaatatttaagcagttgaccaaaagaggcggtgctccaccattgaatggagacatttattctgtccttcgacgcactttaattacacaaatggctaatcaaaggcggatggtcgggtggcgggtggtaaatgcattggccgcggagtatcaattttcgttggttaaggggttggtgaagggggatggcgaagggggcggatcaacagcacgcgagtcgctaaacatttaattgattccgtggccgtgaatggtagactctcgtttcgctctggatacaggaaattaccgcttttacacacttgatattgctggatatatccggttatagaaattacacccaaaacggaagatgctcatgaattcgcgtttgtttatatccttaaagtagctgaacattattaactcgatttctctgcctcttgcaggtgcatttccaagcgggcttaaccaatccgtggatctgaaaaggaggagcaggcgtcggtcgttggaggcgccggcatagagaacttttccgagacgcgagcgcccagcggagcagtcgccaccacgacgtcgacatcgccaccgccgccgcgagccgcgctgctgtcaccagccgagcatttggacgccagcgccgacgatcgcgggcgtgtgtacaagctccggaagaagaaatacctgaacgcagcgcatatcacatagggagtcgtcgtcggtggaggagtggagtagccagtgcggtttgggtgctaggaatcggtgctaggagctaggattaggagatcaaaactggaaaaaaggtgcatatgtgcggaatgcactgagatctgagatcattgatcacttgttgttatacattgatcgttggctcgtcttttcttatgttattatgaatgagctttgaattcactggctttgatcatcttaattatgaaatatttggcgaattctaatgtcgatgtgcttttgttttttagcataatttaattcgaggaggaatctgggaaagcgcaatgcccgtacaatccccaattgagatcagcaaccgtgccatcgagcacattgacgatgtggatccactagagtaccatggccattgggagccggtgggcgtggcccgggtacagaacacaggcacctccgcaatggtcacattcagcaagcgaaaacaacagccatacataatcggcggtgccctggagcaggacatgtacgtgttcgagcagctgcacttccattggtcggactgcgatgaatccggctgcgagcatacactggagggcatgaagtactcaatggaggcccatgccgtccactacaattcgaagtacaaggacttcacggaggccaagaacaagcccgatggcctggccgtcgtcgcattctttattcaggcctgcggcgagaaggactgtcccgagttcaagaagatcaccgagggcatccgcatcgttcaaaagatccatacgagtgcatcgctggattccggtgcgtgtgcaattttcaccgagtatggttttaaaaatgtgacttactctattactcttggctctgcttttttagattgcctatcatggattggtctgcaggagctgagcaaacattattacacgtacaagggttcgctgacaacggcgccgtactttgagagtgtcacctggatcatataccgcacccccatctatgtgtctcgcggccaggtgcgtgtttttctcaccaagatgatcccccaaatactttcatttggaacactaaatttgagaaacctcttttgatttgcaggttcaggtgtttcgcaatttgcaatcgtgtcccaaagatgagtccaaaaagatagtcaacaattatcgcgagatccagcgtccgcacaaggatccggaaatcttctttgcgcgcaacaccaatccaaagtccaagttataatgtgcttgccatatgacttggatacaattctacaattcccgctcccgctgactttcctttttccaacctttcgcgcaattttctccgcccaatcgcctatctaaactatagctatgtgtaaacatttatctgt

SEQ ID NO: 23609 - DNA, 1396 bp, DROSOPHILA
cgcattgaattttcgttctggaattgaaattaattcgcttcgaacttcgcgtttagcgttcgtacacggtttttgttcttgtttttttgcgcagtgcgtgtgtacatgtgtgtggtacttgtgtgcgcggcggcaaatgcgaaattacaagcataaataaatgccgtcgattgtttgctaattagctatcggcgaatatcgggaaaacgagcggagaacggcaaataggcgaaaactaaatcaacaggtgcatttccaagcgggcttaaccaatccgtggatctgaaaaggaggagcaggcgtcggtcgttggaggcgccggcatagagaacttttccgagacgcgagcgcccagcggagcagtcgccaccacgacgtcgacatcgccaccgccgccgcgagccgcgctgctgtcaccagccgagcatttggacgccagcgccgacgatcgcgggcgtgtgtacaagctccggaagaagaaatacctgaacgcagcgcatatcacatagggagtcgtcgtcggtggaggagtggagtagccagtgcggtttgggtgctaggaatcggtgctaggagctaggattaggagatcaaaactggaaaaaagcataatttaattcgaggaggaatctgggaaagcgcaatgcccgtacaatccccaattgagatcagcaaccgtgccatcgagcacattgacgatgtggatccactagagtaccatggccattgggagccggtgggcgtggcccgggtacagaacacaggcacctccgcaatggtcacattcagcaagcgaaaacaacagccatacataatcggcggtgccctggagcaggacatgtacgtgttcgagcagctgcacttccattggtcggactgcgatgaatccggctgcgagcatacactggagggcatgaagtactcaatggaggcccatgccgtccactacaattcgaagtacaaggacttcacggaggccaagaacaagcccgatggcctggccgtcgtcgcattctttattcaggcctgcggcgagaaggactgtcccgagttcaagaagatcaccgagggcatccgcatcgttcaaaagatccatacgagtgcatcgctggattccgattgcctatcatggattggtctgcaggagctgagcaaacattattacacgtacaagggttcgctgacaacggcgccgtactttgagagtgtcacctggatcatataccgcacccccatctatgtgtctcgcggccaggttcaggtgtttcgcaatttgcaatcgtgtcccaaagatgagtccaaaaagatagtcaacaattatcgcgagatccagcgtccgcacaaggatccggaaatcttctttgcgcgcaacaccaatccaaagtccaagttataa

SEQ ID NO: 23610 - protein, 250 aa, DROSOPHILA
MPVQSPIEISNRAIEHIDDVDPLEYHGHWEPVGVARVQNTGTSAMVTFSKRKQQPYIIGGALEQDMYVFEQLHFHWSDCDESGCEHTLEGMKYSMEAHAVHYNSKYKDFTEAKNKPDGLAVVAFFIQACGEKDCPEFKKITEGIRIVQKIHTSASLDSDCLSWIGLQELSKHYYTYKGSLTTAPYFESVTWIIYRTPIYVSRGQVQVFRNLQSCPKDESKKIVNNYREIQRPHKDPEIFFARNTNPKSKL

SEQ ID NO: 23611 - DNA, 5056 bp, DROSOPHILA
agaagaaaaaaaaacatgagaaaaaaatgcaaataaagcgcgtttattttatggccagcaaatcaatcaactttattaattacaagtaattaaagtttaattaagagcccagtacagtgcttcttcttgcttttgtttcaaggttgcatgtgtgtgcgtgtgtttatacgatgtgcgcgtgtttgtgtgtccgagtgtgcttttgtgtggaaaataaatgcaaatatttatttggcaaaagtcacaaattgtggaacggatgcggtgggcggagctggaaacaaaatggtggcaaaagtagtgcgatattgttgttgctgctgctgcaattttgtttgtctgtttaattaaagcaatatgtggcctccaggaaaggaatgttgggttaattgactcatcacttatacgacaaacgaagcacaaacaaacaaacaaacaagccaacgaacacacacataaagcaggagtaagaagaagaagaagaagagtgtttcccaaatcagcgcagtcgacgaagaagaaagaagatgaaacagttcaaaaaccatttaaagggcgtggccagcattttgacattttggaaaattccacactgcgcagctccatgacgctctcgaccaatcagaagtgtggattccaaacgcaaaactacgcccacacacataacggtaatagtgggaacagcaggtgttgttcacagagcgacatctgccggcagcccagcaacacttccaaggcctattagcggatacaagagccggcgtagtcatgacacaaaccgcagcacgcctgtctatgcaaacgaaaaactgcgaagatttggtatcgattggcgatgggcctcggacacatcgattattatcgaatcaaacaataacaaaaaaaaatcgcattaaaaaacaatcaaaacaagctgaagttactcggaatcaattgaatcgcgcaccgcgaatatgcaaccgctccgcccccccgcgcccctttgacagtgtgcacagccatgaccacgcccccgccaccgcccacgctcgcatcagacgcaattgaaggcgcggtgtacgcagcaggcgaggcactgcatcatcaacatgaccatccgcagcagcagcagcagcaacaacaacaacagcagctagcgaggaattccctgctggcggacctgcgaaggtcaacgaatttctggttccgtgcggccaaatcgacggacggactgcagttgctggcccaaagctgcactagaattttgcagcatggactggtgagtcgcatttgcccgtggaaatcccgaaagcatcgcacacacctcggcgaataccctacacttagagcgaggcatgttgatttgatcattcatcttgcactatgaaacaatagttgaataatttaaagataaatcatcttaactcagctcaagtggtaaatatttctacagaatcaagtgaacctaataccccaataactaattataaagtaggggagtctctaaagtctatgcaatcagctctttgcagtaagcaatcaaatatgatataaacatttacatatgtattcaaatgaatttccctgaatgtctgtcccacataaagagagtatcagctactcgctgcgcgcgtgtcgtagactttccccattgttttgcaatcgaattgtatttatgcaacgcctcactctccattcttatcagttgcagcccgtggaacttcgccgactggcggacgactttgagtttctgctggccagtgcgggaaaacagcaacagcagaccaaaccgcagccttatcgaccggattacgccgcccgagacagtgcgtcaatggtcaacggagtcgaggagtttctcggcgagtggactacccgctgcctgcgtgcccgttgcctttcgcagtgcctgcagacgctggtctccgatccggagctaatggagctgtactatcccagcgaggaagccttcctgcgacgatccggtgatgccaccgccttgttcgtttgcctaacggctgtccagctcaatcagagcggactgctaagccagctggaggttaggcatcaggtgcgccaccgacgcacttgctcacagccgaactttagcatatcgcccaaactgcaagcggtgccggaggagagactgcagaaacgcatcttcctgcggcgattgaagagcctaccaaatttaagtcaggaggacgaggagctggacgatagagcagccttcagacggcgttgccaaacattcagcagctccagaagccacaagctgagggaggatcacttggatgccccatctaccagttcttgttcgtcccacgacagtcccagacgcattcagctgatcaactgtgatgacataaagatctggaccgaccaaacgccccaggaagtgccagaggaggtgcacgaaaagttgcaacaggcatccaaagcgtccacgtcagtgggcggctatctgggcagcttcttcggctcgccgcctctctataccagttggtttcatcgcggcgtcggcgacgatctgaatgcctcgggagatggtggtatgttggacaccttcctgcccgtgaacggtcgaaagctaaagaagcagcacaccctcttcgagggcgtcagcatgctggacgaggcggcatcctccacagcctgcatctcgtcggcaccatgggatattcaaggatcagccggcgacagtaccacttccacaacagcgtccagttctgtgagcattacgcccggcagcgataagatggaccagcaatcgctggcctccttcctgcaaatgtcccggcaaacgcacaacaatacacaactggagaaggagaacgctcacttcaggatttcggaggcctgcattacggccatagagcacgtcaagtggagcaggagactggcgacaccagcgggtccgacgagccataatctgtcggagccgaatttgatgccctatgcagagcagattcccggcggcggcatgcagaatcacagtgctgaggccgtgggtctccagctaatatcccgcttcagtgagcagcagctaccccgtttgggccatctcaagtggctggtctccgagcaggaggcaccgcaacaactgttgccgctgcccacgccgaaacaggatcatgagcaggccagtctgaccagaggcacctccagttgggcgccgccgcgtcagcagatcatattcaccgaacatccctcggagagccgatccaaggtgctgcaaaagcagaatcatcgctgtgccggctgtggaatgcgggtggccaagcacctgcagcagcactttcgctactgcacttacctgggcaaatacctgtgcaccggctgtcatcgcaatcagatttctgcgattcccgcgaggattctgcgctcctgggactttcgctgctatccagtctgctcatttgcctaccgtctaatcgagcagatgtacgcctttccgctgttccacgtcccagatctgaatagccaactgtacaagcacaaggaactggcgaaggcgagaaagaggaggctgcaactgcaggcggtcaagggattcatagccaactgtcgatttgcaacgaggtaagtgggacagtaaagaaacaaagcgttctatgcaatcacttcttttatgtcttcctcttgtgcagggagcagtcattcttcaatgccattccggcgcacattacccaggatccggacatgtggtccatgtgcgatttcgttgacgtgcaaaataccagcatgaatcgctccatcaaggaggtgatcgcactgagcgaacagcacgtccacaactgtgtggttagtagtccgaaatgggatggctgaaagcaccattcattgatcgttatttgatcttatatcttacatatatttcagctatgtacaggtcgtgccttcgtctgtgagcactgcaagggcggtgagctcatctatccgtggcagcgaaaagtccaacgctgcgatcggtgcggtgcctgcttccacaacggctgctggaaggtcaggagtcggtgtcgcaaccaaaacgatccttgtcccaggtgctcccgccttcaaagccgtgccagctaacatccgatcaaagaaaatcgaagggcaggataggaattggcgaagaaatgtagtgaaatccactttcgcctcggaaactgtatatacaaaatttggttttggcgataggaatttgtttttttttttttttgttttttgttttttgtaattcgcatagtttttagagttaggcctttttttttttgtaaatccaaagttgcttattcgtaaaggtattgctgaatatataacatgttgctttccgtaagtaatttgtttataaaaaatctcttttaggatccatttgcttctaaacgaaactagaaccaaattgaaacatcacttatttgcctggaaaaagacgaatttttatttaagaaagtattatttaaaaaaagcttgcttattattaaataacaaataacatgtcacatacacactaaatattctaaaaatatgttaaaaaaaaaaaaacaaaaacggatatttaacctatagtttccgaggtcgaattcacacttccccctagtgattttatatatttacataacaactattattatatttatacaactactgtaaataaccatttaaattaccaaaactgttatgagaatcgtttacctcaagcgaaagatgtgaacccatgttgattttatacatacatatataacaaatacgatacgaatagtttgttcatcctatatttttctcgctgggaggcattattatgtgagtcatggaggggggaacccccactgtaaaatgtttattggctctgtagataaaaaatgttaaaatttttagttttttaaagatttaaatgggtgaagtatggaaaacaaagttcccttacaaaatatacattccatataaaacgtttggagcaatggcaaaataaagcaggaagtttttaataattatggaaataaactgtaaaatctgaaaaattgaaattcctagaaaccgctaaaaaaaaatgtttccattctgggaagaaccagttctttggtattttgcc

SEQ ID NO: 23612 - DNA, 2478 bp, DROSOPHILA
atgaccacgcccccgccaccgcccacgctcgcatcagacgcaattgaaggcgcggtgtacgcagcaggcgaggcactgcatcatcaacatgaccatccgcagcagcagcagcagcaacaacaacaacagcagctagcgaggaattccctgctggcggacctgcgaaggtcaacgaatttctggttccgtgcggccaaatcgacggacggactgcagttgctggcccaaagctgcactagaattttgcagcatggactgcccgtggaacttcgccgactggcggacgactttgagtttctgctggccagtgcgggaaaacagcaacagcagaccaaaccgcagccttatcgaccggattacgccgcccgagacagtgcgtcaatggtcaacggagtcgaggagtttctcggcgagtggactacccgctgcctgcgtgcccgttgcctttcgcagtgcctgcagacgctggtctccgatccggagctaatggagctgtactatcccagcgaggaagccttcctgcgacgatccggtgatgccaccgccttgttcgtttgcctaacggctgtccagctcaatcagagcggactgctaagccagctggaggttaggcatcaggtgcgccaccgacgcacttgctcacagccgaactttagcatatcgcccaaactgcaagcggtgccggaggagagactgcagaaacgcatcttcctgcggcgattgaagagcctaccaaatttaagtcaggaggacgaggagctggacgatagagcagccttcagacggcgttgccaaacattcagcagctccagaagccacaagctgagggaggatcacttggatgccccatctaccagttcttgttcgtcccacgacagtcccagacgcattcagctgatcaactgtgatgacataaagatctggaccgaccaaacgccccaggaagtgccagaggaggtgcacgaaaagttgcaacaggcatccaaagcgtccacgtcagtgggcggctatctgggcagcttcttcggctcgccgcctctctataccagttggtttcatcgcggcgtcggcgacgatctgaatgcctcgggagatggtggtatgttggacaccttcctgcccgtgaacggtcgaaagctaaagaagcagcacaccctcttcgagggcgtcagcatgctggacgaggcggcatcctccacagcctgcatctcgtcggcaccatgggatattcaaggatcagccggcgacagtaccacttccacaacagcgtccagttctgtgagcattacgcccggcagcgataagatggaccagcaatcgctggcctccttcctgcaaatgtcccggcaaacgcacaacaatacacaactggagaaggagaacgctcacttcaggatttcggaggcctgcattacggccatagagcacgtcaagtggagcaggagactggcgacaccagcgggtccgacgagccataatctgtcggagccgaatttgatgccctatgcagagcagattcccggcggcggcatgcagaatcacagtgctgaggccgtgggtctccagctaatatcccgcttcagtgagcagcagctaccccgtttgggccatctcaagtggctggtctccgagcaggaggcaccgcaacaactgttgccgctgcccacgccgaaacaggatcatgagcaggccagtctgaccagaggcacctccagttgggcgccgccgcgtcagcagatcatattcaccgaacatccctcggagagccgatccaaggtgctgcaaaagcagaatcatcgctgtgccggctgtggaatgcgggtggccaagcacctgcagcagcactttcgctactgcacttacctgggcaaatacctgtgcaccggctgtcatcgcaatcagatttctgcgattcccgcgaggattctgcgctcctgggactttcgctgctatccagtctgctcatttgcctaccgtctaatcgagcagatgtacgcctttccgctgttccacgtcccagatctgaatagccaactgtacaagcacaaggaactggcgaaggcgagaaagaggaggctgcaactgcaggcggtcaagggattcatagccaactgtcgatttgcaacgagggagcagtcattcttcaatgccattccggcgcacattacccaggatccggacatgtggtccatgtgcgatttcgttgacgtgcaaaataccagcatgaatcgctccatcaaggaggtgatcgcactgagcgaacagcacgtccacaactgtgtgctatgtacaggtcgtgccttcgtctgtgagcactgcaagggcggtgagctcatctatccgtggcagcgaaaagtccaacgctgcgatcggtgcggtgcctgcttccacaacggctgctggaaggtcaggagtcggtgtcgcaaccaaaacgatccttgtcccaggtgctcccgccttcaaagccgtgccagctaa

SEQ ID NO: 23613 - protein, 825 aa, DROSOPHILA
MTTPPPPPTLASDAIEGAVYAAGEALHHQHDHPQQQQQQQQQQQLARNSLLADLRRSTNFWFRAAKSTDGLQLLAQSCTRILQHGLPVELRRLADDFEFLLASAGKQQQQTKPQPYRPDYAARDSASMVNGVEEFLGEWTTRCLRARCLSQCLQTLVSDPELMELYYPSEEAFLRRSGDATALFVCLTAVQLNQSGLLSQLEVRHQVRHRRTCSQPNFSISPKLQAVPEERLQKRIFLRRLKSLPNLSQEDEELDDRAAFRRRCQTFSSSRSHKLREDHLDAPSTSSCSSHDSPRRIQLINCDDIKIWTDQTPQEVPEEVHEKLQQASKASTSVGGYLGSFFGSPPLYTSWFHRGVGDDLNASGDGGMLDTFLPVNGRKLKKQHTLFEGVSMLDEAASSTACISSAPWDIQGSAGDSTTSTTASSSVSITPGSDKMDQQSLASFLQMSRQTHNNTQLEKENAHFRISEACITAIEHVKWSRRLATPAGPTSHNLSEPNLMPYAEQIPGGGMQNHSAEAVGLQLISRFSEQQLPRLGHLKWLVSEQEAPQQLLPLPTPKQDHEQASLTRGTSSWAPPRQQIIFTEHPSESRSKVLQKQNHRCAGCGMRVAKHLQQHFRYCTYLGKYLCTGCHRNQISAIPARILRSWDFRCYPVCSFAYRLIEQMYAFPLFHVPDLNSQLYKHKELAKARKRRLQLQAVKGFIANCRFATREQSFFNAIPAHITQDPDMWSMCDFVDVQNTSMNRSIKEVIALSEQHVHNCVLCTGRAFVCEHCKGGELIYPWQRKVQRCDRCGACFHNGCWKVRSRCRNQNDPCPRCSRLQSRAS

SEQ ID NO: 23614 - DNA, 5616 bp, DROSOPHILA
ccactaacccttgccagcggccccttcggtagctctttcactcaactggaggccatgaaaggaaattgtaatgatcgaaatcaaaatgttttcgttactttgcctcctaatgaagcttgaatagtgcgaatgactctcaagtcttagctctctctcactctttctcgttcttgagtgtcgaatctcgagtacacgcgccttttaatcgaaatttgatgatggattccccgccagcagccggaatccaatggggaaatcagtcagaggttgagtatctggtctttactctttcttagccgcctttattgttggccatttggggggcttggttctggccgctatttgcctttgttatttatttattgttattaccgtacattgctcgctggaagttctgaaatgatttctattttcgtaattgtctaaataggtttcgatttggcttgaaattgagcgaaaagagaaaaccaacgaaaaatagggttcttgagggttcccaggggcaaacttcgacggtgagttggcaactttctggtccgccaggtggcagctgcattgcaggtgacaatgaaggggtggctgtacccatatatacacttatacatatatatttgtatatggtagtagttacacatgtgtttccatgcacattgaattgaaaattatacctcttccccacttgccacgctctgcttgagtcgggtctgcaaaagttttcaagcttgttactattgaataatagtatattaattttactgcattttttattcccccgagcacggtatgcaagccctcaacttacttttaattgaattgaaagtcaaaagttttgagctcgtggaaaaaaaagtgaaaatgtcgagacaaattgacacagaggaaaagttgccggtgcacagggaaaatgtataattaaaggcaaatttccacggcagtatgctggctgaaaggaaaatctgctaaattaagagcagaatgaacacacacagttgtattttttagttttcaaatgagttttgttttcattgcgtatattttctgttttcgtttgatattttgttttgtcgcttaaatttgcataaatttcttgttctaactaatacataaatagttgtttgcatctgatacgattttgcatttaacaataaattaaataagttaaaattaagcttacgttgactctcagtgcttgttgtctttatctaaactcgtatatcatttacaattcatcttaaagactacgattaacttatgttcggagggggacgaggaaaacagtagtgttggcaaagtgctgatagaattggagatccttcagtgttctataggttcgaaagagtgctttaaagttaagtatgtacaaggcaagattttctctgacttaatgcctaggttgtatttcgattacagctactacaatgttttccttacgcctaactacacgctaattgtgtctggaggggagtgagtggttttagtgggcttcttgggggttttggcatcacagtgttgggcagcggactactaagcatagatgctcagctgcctgcgtcgataggtcgaggatcagtgcgtgaactgacgcagggtgttgttgttctgctgctgcttctgagaggcggacttctgctggaaggatctgcgtcctgtggtggcacacagtccattccgcaggggcaaagctggtggcatcggtggcggcgtgggcgtcttgctgcgacccagttgctccaacggcatcgagtagtgggtattgctgtagatgtagttgtggtccaggatctcgctgcccatctcctgatcgtatagctcacgctgcttgaagtgctcttgggtcagtcgcagttgcggctgattcggtccacccaacggggcgccatgcaccatgggcacatccgcgtatgagtagcaggaatcaccaactgtagccgtggccgagaggaactgcggcttggtatagtggttcagctggggattctgctgatgcacatcccgacccatggtggccgacttcatgtgcagcacaaatgaggcactgtcgtcgatggctccctgtgaaaccagggccttgttgttattcagcttcttctcactgatcattgtggcggtgggcactaccaactgttggaacttctgctggggatcgatggcgcccaggtcattgacaggcatcgggcacattccatagtgatgggtagctccgggatgatgaggtgcggtataggtgttggggaacgtggagtggatgcccagggagcagggatgatgctgatggcgcgacatgtagtcctcgtcgcagaaggtcttctggtattcccgttccttacggcccagagccgagttaccccacagaccgcccttgatggtttcgcggatcttatgacggcagcggtacagaaccaaagccaaggcggtaatcgtggcagcagatcccaccaggagagctccaatcaaggcctgcttgcgaggatcggcatgtgtgcatcccatcatagcaggattcaaatggcgcaaggattcaccgcgcagacgttcggggaactcacacagcagttcggagacatcatcctgactggcattcttggccaccagcagattgtgcagccacatcacacggcagtcgcaggacaagggattttcggaaaggtccagagtctgaagatccttccacgggaacagaccttctgccaaggaagtcagcgcattggccttgagaacaacatgcttcaattgggacagcccactgagggcaccttcttgaacctccaaaagcattttgttggacgatagattcagatactccaggttaccattgtcgctgaaggctccggtcatcacacgcttcagcctaagagctccattcacctccaggcgtttaagttgcttcaggcccatgaatgcgccttcgctgatcacctcgaaatcgttttgacccagggacagctgctccagacgaaccagcttgctgagacccacggagggaatgcgatccagacgattatcggaaagatcaagaatgcgcaactcctgcaagccgaggaagctgtcgtgggagatgttgcgtagactggcacccttgagttccaggcgagtaagtcctttcaggtcctggaaggcatcagcctgaatgctctgcagggtgttcattccaaggaacagctcagccagactgggcatggcttggaagatcacgggatcgggaacggtggtcaaggcattatcatccagataaaggatgcgcaactgggagagtccatcgaaagccttgggatccagatagccgatgcgattctcgcccagattcagctcctcgatcttcaggagaggagtaaaggtgccctggtgaagttccgagatttggttaccacgcagattcagaacagtaactgccgacagaccaatgaaggtcttattgctgatctgcccaatcttgttgtgattcagatgcacctcctgcagcttcttctgataggcgaaggtgcgctgcggaatggtcatcaggtgattcgaggacagatcgaggaaggtcagctccgcgtagaactggatggacgagtcgatggtcttgatcttgttgctcttaatcaccagtcgctggatggatggattcagagcaatgggcagcacgtccagctggccctcgccacattgtaccaccagggtattatcatcgcactgacagccgggcgggcaattggccaagcccgccgcaggctccacaccaatgctggccaaaatgcaccagatgcccacgaaggcgatcatcatgtttcgctgcatcttgggatctctgattctcttttgatttctgtctttcggtttgcttcgctctgtgctgctgtttcaattctttcagagtttctgttgattttttcagttttccatagtgctgcgggtagacaaacgagggaaaaattttcaaaattagtttctgtcttttctgtgagttcggttaattagcctattttcgtggaactatttctattgattaaaatttacagggttcttgaagcaaacatttttatgttttcacaagtatttcatattggatatatttttagatttggtgttggaaaaatctatattaagttgctaatgtttcggtcctaataaattctcattttagaaatttcaaactcaataaatatttaaagtcagtaatttaactgaacaaaattaaaatgttccaattatatttttcgtattttatattttctggcagcctaactttattttgttgaaacttttcttccggtattctaatttccacaatattccactttttcagcacttttataaaatgcacattgtatgccacaagtgaaacttacctaatgtttttctttgatgattgcttggcaacaatttttagttttcagcagattaaatcgttggtgaacagaacataaaatgcaaaatgcagtgtttcggtttttgtttgtattttgtgatgtgtttgcgttttcactgtttcacttttggaaaaatattttgaatagccaattttttgttttgtcacatttgctcaactaaaacatgtgtgttgttcaaaattaaaattttggtttgttgtattgcttgtttcgttttttttttttttgtttgctgattgtttgtgaaacgtgcgcgataatccaatggttcgctttgactgcacgcttcaagttgttgttaggcgttcgacgggtttccgtttgaatttacgtatttcgtgttaccaactctggtaagagagaggaacttggtcgcaattgggtctctatagctggcagacaaccgctcacgacgaggcaacgaactacactgattttacgaagtgcctgctgcacaaacgatacctcggctggccacttttgccggggtggttgagcggtacagagcggtaacagagccgtttgagcggtatgagatggtggtggtggtggtggtggctggcagctgcatcggacatgggtaaaaagagcggcgtggctgaggcgagacggccttgcgaaggcgagttctctcagataaacccgccagcaggtagtcggaactggttgtgagtgtcggatacaaatgtatctctagttgtctctctcgatggagaactcagtgtggcgagtttcactcgaagtttccactcatttatctggctatacgtgccccatatatccaggctcgctctccgacaattgcaactcacacgttgaacgagccgcacgtcctcgacgaaatgctgtcgcccataaaacctaaaactagaactgaaatagtcaacgaaaaaagtaaaaaaaaaacaaaactgaagagaaaactaaaacagcccaagtgctgtggcataattaagaccccataaaaagtacatagtcctacgcagaataggagctagatggatatttatgggccgcagacatgtcctggcctaagtggagccttttagtgcggtttacagtccaaatgtgacgcacttgaaattgatatttttgtatctgcgagtttgtatctcgaggacacgaaagtgttgcactcgagtatttctcaaaaaatattgtgtcatctgatacatttgagatgcatttctcattcttggcatgcagagcaaacaactatttacaactcggcaaaatcacaaaa

SEQ ID NO: 23615 - DNA, 3174 bp, DROSOPHILA
caaacaatcagcaaacaaaaaaaaaaaaaacgaaacaagcaatacaacaaaccaaaattttaattttgaacaacacacatgttttagttgagcaaatgtgacaaaacaaaaaattggctattcaaaatatttttccaaaagtgaaacagtgaaaacgcaaacacatcacaaaatacaaacaaaaaccgaaacactgcattttgcattttatgttctgttcaccaacgatttaatctgctgaaaactaaaaattgttgccaagcaatcatcaaagaaaaacattagcactatggaaaactgaaaaaatcaacagaaactctgaaagaattgaaacagcagcacagagcgaagcaaaccgaaagacagaaatcaaaagagaatcagagatcccaagatgcagcgaaacatgatgatcgccttcgtgggcatctggtgcattttggccagcattggtgtggagcctgcggcgggcttggccaattgcccgcccggctgtcagtgcgatgataataccctggtggtacaatgtggcgagggccagctggacgtgctgcccattgctctgaatccatccatccagcgactggtgattaagagcaacaagatcaagaccatcgactcgtccatccagttctacgcggagctgaccttcctcgatctgtcctcgaatcacctgatgaccattccgcagcgcaccttcgcctatcagaagaagctgcaggaggtgcatctgaatcacaacaagattgggcagatcagcaataagaccttcattggtctgtcggcagttactgttctgaatctgcgtggtaaccaaatctcggaacttcaccagggcacctttactcctctcctgaagatcgaggagctgaatctgggcgagaatcgcatcggctatctggatcccaaggctttcgatggactctcccagttgcgcatcctttatctggatgataatgccttgaccaccgttcccgatcccgtgatcttccaagccatgcccagtctggctgagctgttccttggaatgaacaccctgcagagcattcaggctgatgccttccaggacctgaaaggacttactcgcctggaactcaagggtgccagtctacgcaacatctcccacgacagcttcctcggcttgcaggagttgcgcattcttgatctttccgataatcgtctggatcgcattccctccgtgggtctcagcaagctggttcgtctggagcagctgtccctgggtcaaaacgatttcgaggtgatcagcgaaggcgcattcatgggcctgaagcaacttaaacgcctggaggtgaatggagctcttaggctgaagcgtgtgatgaccggagccttcagcgacaatggtaacctggagtatctgaatctatcgtccaacaaaatgcttttggaggttcaagaaggtgccctcagtgggctgtcccaattgaagcatgttgttctcaaggccaatgcgctgacttccttggcagaaggtctgttcccgtggaaggatcttcagactctggacctttccgaaaatcccttgtcctgcgactgccgtgtgatgtggctgcacaatctgctggtggccaagaatgccagtcaggatgatgtctccgaactgctgtgtgagttccccgaacgtctgcgcggtgaatccttgcgccatttgaatcctgctatgatgggatgcacacatgccgatcctcgcaagcaggccttgattggagctctcctggtgggatctgctgccacgattaccgccttggctttggttctgtaccgctgccgtcataagatccgcgaaaccatcaagggcggtctgtggggtaactcggctctgggccgtaaggaacgggaataccagaagaccttctgcgacgaggactacatgtcgcgccatcagcatcatccctgctccctgggcatccactccacgttccccaacacctataccgcacctcatcatcccggagctacccatcactatggaatgtgcccgatgcctgtcaatgacctgggcgccatcgatccccagcagaagttccaacagttggtagtgcccaccgccacaatgatcagtgagaagaagctgaataacaacaaggccctggtttcacagggagccatcgacgacagtgcctcatttgtgctgcacatgaagtcggccaccatgggtcgggatgtgcatcagcagaatccccagctgaaccactataccaagccgcagttcctctcggccacggctacagttggtgattcctgctactcatacgcggatgtgcccatggtgcatggcgccccgttgggtggaccgaatcagccgcaactgcgactgacccaagagcacttcaagcagcgtgagctatacgatcaggagatgggcagcgagatcctggaccacaactacatctacagcaatacccactactcgatgccgttggagcaactgggtcgcagcaagacgcccacgccgccaccgatgccaccagctttgcccctgcggaatggactgtgtgccaccacaggacgcagatccttccagcagaagtccgcctctcagaagcagcagcagaacaacaacaccctgcgtcagttcacgcactgatcctcgacctatcgacgcaggcagctgagcatctatgcttagtagtccgctgcccaacactgtgatgccaaaacccccaagaagcccactaaaaccactcactcccctccagacacaattagcgtgtagttaggcgtaaggaaaacattgtagtagctgtaatcgaaatacaacctaggcattaagtcagagaaaatcttgccttgtacatacttaactttaaagcactctttcgaacctatagaacactgaaggatctccaattctatcagcactttgccaacactactgttttcctcgtccccctccgaacataagttaatcgtagtctttaagatgaattgtaaatgatatacgagtttagataaagacaacaagcactgagagtcaacgtaagcttaattttaacttatttaatttattgttaaatgcaaaatcgtatcagatgcaaacaactatttatgtattagttagaacaagaaatttatgcaaatttaagcgacaaaacaaaatatcaaacgaaaacagaaaatatacgcaatgaaaacaaaactcatttgaaaact

SEQ ID NO: 23616 - protein, 737 aa, DROSOPHILA
MQRNMMIAFVGIWCILASIGVEPAAGLANCPPGCQCDDNTLVVQCGEGQLDVLPIALNPSIQRLVIKSNKIKTIDSSIQFYAELTFLDLSSNHLMTIPQRTFAYQKKLQEVHLNHNKIGQISNKTFIGLSAVTVLNLRGNQISELHQGTFTPLLKIEELNLGENRIGYLDPKAFDGLSQLRILYLDDNALTTVPDPVIFQAMPSLAELFLGMNTLQSIQADAFQDLKGLTRLELKGASLRNISHDSFLGLQELRILDLSDNRLDRIPSVGLSKLVRLEQLSLGQNDFEVISEGAFMGLKQLKRLEVNGALRLKRVMTGAFSDNGNLEYLNLSSNKMLLEVQEGALSGLSQLKHVVLKANALTSLAEGLFPWKDLQTLDLSENPLSCDCRVMWLHNLLVAKNASQDDVSELLCEFPERLRGESLRHLNPAMMGCTHADPRKQALIGALLVGSAATITALALVLYRCRHKIRETIKGGLWGNSALGRKEREYQKTFCDEDYMSRHQHHPCSLGIHSTFPNTYTAPHHPGATHHYGMCPMPVNDLGAIDPQQKFQQLVVPTATMISEKKLNNNKALVSQGAIDDSASFVLHMKSATMGRDVHQQNPQLNHYTKPQFLSATATVGDSCYSYADVPMVHGAPLGGPNQPQLRLTQEHFKQRELYDQEMGSEILDHNYIYSNTHYSMPLEQLGRSKTPTPPPMPPALPLRNGLCATTGRRSFQQKSASQKQQQNNNTLRQFTH

SEQ ID NO: 23617 - DNA, 5016 bp, DROSOPHILA
caaaagccttatgaatattaaaactagagcgagcgtgggcgagactttgtcgtcatcattgttgcaactgtttcatcccgaccaaaatgacaaggaaagtgcccgaaagcgtttgcagacatcttcttggctgatcccaaaaagtctagacaagttagcaaccgaaaacttttgttacgttttcggtttgttgcaaaaggagtttctgcattactgtaggcatttcttcaattagcgtttttattatttttaattaacaattttgtaacttaatccttgcagccgagtgtagctcagagtgctgaaatgttgctctccagctcgctttccagtggcataatcgaatcagcgccgcttgagcaaagtttgtctaaggacaaaaagttttccagctccaccagacatgtgcataattatgctggtcggggtggcaggcgataggagtttagggtggcccagacaaaagggtggacaactaattgagcgatccttgttgttgcaaagaaatgttttccaacttactctagacaaccggcagacagtgccatcggccaagaaaatagttggggtgtggccgggtaaaatgttgagaattaagtttgacagactggaaaaatggcaattaggctgaagatatgattatcatacagaaggacagttaataaagggtagtgcaagtgggattaagagaccgagttctccgaagatgattaccaagtattccccgggagggaagtgagtttccgattcaaagggaaaagttttccattccttttggcacatacgagatgaacttttgtaatgccattaagatgctttatgttttatacatgacagaagggtaaatcatttaactattcttactacgccctcgtatagggactgttaattatgtggcctacggctgaccatttttcagtaaggctttattttttattaatttaaatgttaaaagcactatttgcgtctcagtacagtagcagtattcgtcttccttggattatttttctttcctgtacgtgtacacttctacgctgctttcagatccttctgcccctctagtaagaaccacaccgcactgaaagcacacactgttgagatcctcggcacaatcgtcgcaatatggcagcccgcagttgccgcaaaccgtgaaggtggagtcctccaatcctcggcagatcatgcaggtccttttggcgaacttaaagtgccgtatccaaccaaatgcgaccggacatgaaaaccgtagccaaaggaagacgttgacctgctgctggatgcgatgtgtggccaggttatcctcggcatcgtgaatcaaaaactccagagatctaagccgattccgcaggatgcggttatacaggaaaaggatgcgctgtttctcacgcttgtagtagaagaagctgcaaattactcgccgcattcgcagaaatgttgtgctctggtagataagcactatgatgatcaggtacagcagtataagctggtaatacatcttttttggcaggacatgtgcattcggaaggcactccttgttggacagcgaggttgagaccttctcgtggatgttgaagttatgcatggtggtgcgcagcagtctcgccatttgacccacaccactgatctatatttacagggaataagttaagaattcgggttatttatatatttaattgattaactttatattgcttacattgaatcggacttcatgctcaccatcctgctggtaaacgatcttcgatcgctttctgacaatctgaagtaattctacgactaagtggtctatcaatatgaatagtcccgctgtgactaattctagtagaaactgtaacaaattaaagcaaaccgtagtggactcgtgatgggttcgactaaatatgtgatccacatcaatgtacttggacttttcataggtgcgcagtggcaaaatggcatcaatacgctgctccttacgccgctgatccacgtgcttgaaatatttagtgatatagaagttgtcgaactccacgtcattgagatacttcacatagtagttgatggatacgtaaaccatccgcagcatgaatagacataggatcttctgaagtatgcccatgactttattgaaaatccgtttttggcgttcaaagtcttccttaaaagcctgtcctgtcctctcagcggacttcagttgactcttggcgaactgttcgtcctttatttcatagttcaccactatctgtgagctgttgtcaaatagtttcttttcggccttcaacaactccacgtaagtctccccaaagttttgtggcaccactgcggatgggtcgcatatcttatccggattgccaaagaggtctagctcgcagataatatccactctgtagggccaacagatggccttagctatcatcgagggaaaatttgttgtacattttctgtaaccatttcgaaaaacctccagacacgcgcgatggccacttcttagctgatgcttgcacctatttctcatattccgttgaaatcgctcctgaactgcagctggagttggtagctccttacctccatttccaatttcacttacgttcatcctgctcgtttctctgccccatctttcatagatgggttttgtattcttgtcaccgtatttctcatcttcaatgtccgaattttcaacggcatacttaagatcgactaggacctcttgtaattcgtaaaatgtatgtcgtatctcctccacatctcctcgcatatgcttcagagtgtttgtaaacggcttggccatcaaatcaaatcgggttttggatagattgtaggtcagcactgtagtgcagacaaatacacgggcaacctcacccgcattttccaccaggttagctataggtccggatattataaaggcaaaggccactgcacgtaaatatgtccttccagattttcctaccaatgccacgaagatcagcaggattacggcacgaactggaaggctaagcatgaagatcgttccggtcactaggacaaagattatgaagacgtagaggtcggtggctccgttcacgaacaggcgacccagggtaaaattcagggccgccagcttccagaggaggaagcccaacacgagtcccagtaggaaggtaacgaagcgccgaagacattggatccgggtacttccctcgctctgtggtccatacaaaaagcaaaagattggaagaaatggccgagtcaaaagggataacatttcggacaataaaagataagccaccttttgtggcagtcacaaaatagtcaagacttaaatctttcaaaacattaagctttgatttattttatcatatttgaaaaataatgtaaaagtcttactgtaaagtaaatgattttttccactttaaaaacaaatttaaagtgcatataaaatggttcaaaattaacagtctcaataattaggtgccatcaagggccagctagtctggcattgaccaaactttaattgcctttgactccctctgtgacttttaattttctacccatataaatgataccccttcgaatgagtgcaaaagtccaggagttgcctaggaccccccagacaatcggcagctgaccaccagactagactagaccacttttcgctgagtaggagaatgcgagaacattcagtttatcgtttccctcggcggcaacgggtaatccaattataatagagctggtccgccggctgcacctgcctcacttgggggcattcttctaaaatataaaaattgattacatgcgtgtctgccagtctccttctgtccacacactccaccttttgggatgcgttccaccgatcctggcggcgattcaaaacttgtttgttttggttcgcgccggcgagcgttttaaaaatttatgaactgcagtcaaccgacaaaagatggatggcatcgaaagcagttggtgcggagtaggaggtggagacacctcttcctctggctcactccgaaattggtgcagttgctcaatgtcgtcgcgctcggcggtgtcactcgctgcatattaaacagtttttgggattcagtctcccgagtcccagaggccgcacttcatcaacttggggttcggtctcgaatgtgctaaaaaattgattgatcctgcaggaggcggagggcggagacagtcgagagctcctccactttgacgacatcatccgtagacgtagacgacgagacggggcgtggtcgggtctcaggatgctcgacgcacgcattaaaacaatttaaaattcccaaagaccgaaacactaggcaacccactacggtgggtggcattgcccagacaagtggctaaataggcaggttggagaagtggtggccttgattgcatcccaagtaaaatgttccatttggaaatgttccatttgggagcaatggctggggctaacgagtacttgaactatggaaagttatttgtcacaaacaaataataatatttatattatttaataatgtattaaaacgaagatgaatgtatttatatttatgcattcctactatataaaatactgatatctgcaatatacataaatatttttataaacacttgctagcattaagtcatctgaaattttatttttatttctttatgtagtcacaagaaatacttctaccgcaaccactgtacacatttaccatgggcggtcgagactgcgtgctgggcagcctaggacctgctcttgtaaagctttaaatgcattaaattgtcaaagcgatggctatgctaaaagtttgctggccataaaattgcatgccacagacaaaaaaggagtcgccccatcatcatccacatgcgacggaggcgaatacggatccccagctcccgaatcgctccagctttcgaatcccgacccaatccagaaccgaagctggtcagtcagtcaagtctaaaaccaaatgaatgatgaattgcctgtcacttgcaatttttgcagacagacgaaaaaacacagagagaaccgattccagtgttggatgttcgtcttcgccggcttgtttaaat

SEQ ID NO: 23618 - DNA, 2055 bp, DROSOPHILA
atgcagcgagtgacaccgccgagcgcgacgacattgagcaactgcaccaatttcggaagcgagggaagtacccggatccaatgtcttcggcgcttcgttaccttcctactgggactcgtgttgggcttcctcctctggaagctggcggccctgaattttaccctgggtcgcctgttcgtgaacggagccaccgacctctacgtcttcataatctttgtcctagtgaccggaacgatcttcatgcttagccttccagttcgtgccgtaatcctgctgatcttcgtggcattggtaggaaaatctggaaggacatatttacgtgcagtggcctttgcctttataatatccggacctatagctaacctggtggaaaatgcgggtgaggttgcccgtgtatttgtctgcactacagtgctgacctacaatctatccaaaacccgatttgatttgatggccaagccgtttacaaacactctgaagcatatgcgaggagatgtggaggagatacgacatacattttacgaattacaagaggtcctagtcgatcttaagtatgccgttgaaaattcggacattgaagatgagaaatacggtgacaagaatacaaaacccatctatgaaagatggggcagagaaacgagcaggatgaacgtaagtgaaattggaaatggaggtaaggagctaccaactccagctgcagttcaggagcgatttcaacggaatatgagaaataggtgcaagcatcagctaagaagtggccatcgcgcgtgtctggaggtttttcgaaatggttacagaaaatgtacaacaaattttccctcgatgatagctaaggccatctgttggccctacagagtggatattatctgcgagctagacctctttggcaatccggataagatatgcgacccatccgcagtggtgccacaaaactttggggagacttacgtggagttgttgaaggccgaaaagaaactatttgacaacagctcacagatagtggtgaactatgaaataaaggacgaacagttcgccaagagtcaactgaagtccgctgagaggacaggacaggcttttaaggaagactttgaacgccaaaaacggattttcaataaagtcatgggcatacttcagaagatcctatgtctattcatgctgcggatggtttacgtatccatcaactactatgtgaagtatctcaatgacgtggagttcgacaacttctatatcactaaatatttcaagcacgtggatcagcggcgtaaggagcagcgtattgatgccattttgccactgcgcacctatgaaaagtccaagtacattgatgtggatcacatatttagtcgaacccatcacgagtccactacgattgtcagaaagcgatcgaagatcgtttaccagcaggatggtgagcatgaagtccgattcaatatcagtggtgtgggtcaaatggcgagactgctgcgcaccaccatgcataacttcaacatccacgagaaggtctcaacctcgctgtccaacaaggagtgccttccgaatgcacatgtcctgccaaaaaagatgtattaccagcttatactgctgtacctgatcatcatagtgcttatctaccagagcacaacatttctgcgaatgcggcgagtaatttgcagcttcttctactacaagcgtgagaaacagcgcatccttttcctgtataaccgcatcctgcggaatcggcttagatctctggagtttttgattcacgatgccgaggataacctggccacacatcgcatccagcagcaggtcaacgtcttcctttggctacggttttcatgtccggtcgcatttggttggatacggcactttaagttcgccaaaaggacctgcatgatctgccgaggattggaggactccaccttcacggtttgcggcaactgcgggctgccatattgcgacgattgtgccgaggatctcaacagtgtgtgctttcagtgcggtgtggttcttactagaggggcagaaggatctgaaagcagcgtagaagtgtacacgtacaggaaagaaaaataa

SEQ ID NO: 23619 - protein, 684 aa, DROSOPHILA
MQRVTPPSATTLSNCTNFGSEGSTRIQCLRRFVTFLLGLVLGFLLWKLAALNFTLGRLFVNGATDLYVFIIFVLVTGTIFMLSLPVRAVILLIFVALVGKSGRTYLRAVAFAFIISGPIANLVENAGEVARVFVCTTVLTYNLSKTRFDLMAKPFTNTLKHMRGDVEEIRHTFYELQEVLVDLKYAVENSDIEDEKYGDKNTKPIYERWGRETSRMNVSEIGNGGKELPTPAAVQERFQRNMRNRCKHQLRSGHRACLEVFRNGYRKCTTNFPSMIAKAICWPYRVDIICELDLFGNPDKICDPSAVVPQNFGETYVELLKAEKKLFDNSSQIVVNYEIKDEQFAKSQLKSAERTGQAFKEDFERQKRIFNKVMGILQKILCLFMLRMVYVSINYYVKYLNDVEFDNFYITKYFKHVDQRRKEQRIDAILPLRTYEKSKYIDVDHIFSRTHHESTTIVRKRSKIVYQQDGEHEVRFNISGVGQMARLLRTTMHNFNIHEKVSTSLSNKECLPNAHVLPKKMYYQLILLYLIIIVLIYQSTTFLRMRRVICSFFYYKREKQRILFLYNRILRNRLRSLEFLIHDAEDNLATHRIQQQVNVFLWLRFSCPVAFGWIRHFKFAKRTCMICRGLEDSTFTVCGNCGLPYCDDCAEDLNSVCFQCGVVLTRGAEGSESSVEVYTYRKEK

SEQ ID NO: 23620 - DNA, 3516 bp, DROSOPHILA
tgcttatatgtcaatagatatgaatatttatatatgtacctgcctactgaaaccgcccattgtatattttgggcaaatctttaaaattgtattaggttagttataaagttattaagttataaagttataaagttataaagttattaagttattaagttattaagttattaagttattaagttattaagttattaagttattaagttattaagttattaagttattaagttattaagttattaagttattaagttattaagttattaagttattaagttattaagttattaagttattaagttattaagttattaagttattaagttattaagttattaagttattaagttattaagttgttaagttattaagttattaagttattaagttattaagttattaagttattaagttattaagttattaagttattaagttattaagttattaagttattaagttattaagttattaagttattaagttattaagttattatgttataaggctttaaaattattaccacactaaggtatttagatttcggatatgaaattgataaatgacgaaaaagaatgctagcctcgggcaagggacatcaccatatggactcatgtgttgatactgactaagaatacttatagagttgaaaccttttgatttttaccaatatatactctggcttaaaatatcctgtgatcaagcgaaagtgaaagttttattttgttttaagacagcatatcgggttatatacgaaaatgctgtataaatggacttcgacatgctcgtacgaccgcctcttgcaaaaaaatcgacatagccccaacaataatcccgcagctctggcttggactttgtcattctacacttgaagtctgctgttctcgagaactggaccatcaagattgcgagctaggtcgactggctgctttagacggtactcgctgtgacggagaaggaaatgtaacatctagctcctatgcgacatgttgtcgttcttgtcaaatcggattagcagttaaagcgagtaaagccaattgcaaagatccattattttcatttattttcttaattgaatcataccgagcgtgctgttacggatctgctgactttaaagaccagcccggtatcgacgaaatcgataaggctaattctattactgatgaaggtgaattgccgtttgtttctgaagaggatatgaatgtaactattgttcttaccggcgatggtaagtatatcttatttgtgtatcatttgaaatcataattaattgtactcattggtagatgacatatgtggaaaaattgaaaacctttgcgctcacatatgcgaaaacactttcgacgcataccaatgtaagtgccaccccgggtttatgttagataataacaacgtaacatgctctccgatgaaaacccaaatatgtcccagcggttacaatttagataaactggataacaaatgcattgacattgatgaatgccgggaagatcttcatgactgcaaatcatcccaatattgccataatacgaatggcggataccactgcttaaatgtgaaagaaaaagagtgtccaccaggatttcattatgaccatgattacgatgcatgtaaaggtaattttaaaaactgtttgaaatacagataaaactagatagtctagactaaactggactatcagttttactctgctaggatgggtaatgggatattttaaaattaaaatttatacaataaacacattccatccacaaatgtgctgccaatttgggcagctttcggccgtgggcgtggcttaaacttttttggcatatgtatttaaaagactaacaattaaataacaaaaatgacaacgtttcctaaaagtgtcgggtgttccagttttggcggtttgcgggcgtgaaataaagagcacacccctgtaacatatttttcaatatgtcgtgtatgccctttatctctgcgagtacaggtataagctatgaatcggttcggatatctgaaagtttaaaaaacttatatatagcatttttaaattgtattattttagtttttaatcagtcttaatccggtatctgaaaattaaaaatccgatctatagcattcctttaatcttattattttagcttttttaatttgaagtgcgttctattcacttagatgattacaaatgcaaagatcgtaaatgcgttaaaattcaatcttgtgataaaggattcagcttgcataacggtacctgttccgatattgacgagtgctcacataaatcattaaacaactgtcatgtcaatagtaatcaggaatgtgttaacacagtgggaagttattcctgcaattgcctgcctggatttaatttggatgctacactaaataagtgtgttggtaagtacgttttttcagtaaaataaggattgttatttattttgacttccatagatataaatgaatgttcaataaataatcacaactgccttccaactcagagatgtgataacacgatcggatcatatatatgcacggtatattaatctgtatacaacatgttgcttttgttacaacctgtattctatatagcgcctacaaagctgcggaacaggctataccttaaatgcagaaacggggaattgtgacggtaagagaccttgttaaaaaatattatttatacactagtgggcataagtatttgtacaagaaatatattcaatatatttctttataactcattgtatacttaaaccaaaattgtttaataattttagtaaattggtagactatcgttgttaaattagctaacataaacatatggataacttcattgttgatttaacaaaaattactcttttacaaattagcaatggcataagtattttgacaattatttaaatgttataaaatgaaaagaacaaaaagtcaactaaaaattataacaaattaatacaaaatataccctcccttagcgtctatcaccatttgcagacgttttggtatagactgtaccaagctgtggatataatctattgaaatattcttccataaggtttgaatttccaaaatcgtttcttcgcgacttctaaataagtttgcacgcctttttttgttgtatatatgaccagaggttttctattatgttgaggtctggactttgaggtggctaatccaatgtgtttacgcaaacatctttcagaaactgcgtaatcagtttggccttatgacagggagcattatcctgctggagtataaaggactttccaatcaatttatcaccaagtgcatggttattaaggccatctaaatattttctttgattcatggttccatcaacaggaaccaaatctcccaagccagtgaaggctacacatccccaaaatccccagttcctctgttttcaccatgtttaacaaatttataactgaaataaattgtgataccgtagtatcacgttatcaagaaccatttgatctaaaatacataagtcaaaattttatattcttcgaaccagagatcaatgcgaagtaa

SEQ ID NO: 23621 - DNA, 914 bp, DROSOPHILA
gtcaaatcggattagcagttaaagcgagtaaagccaattgcaaagatccattattttcatttattttcttaattgaatcataccgagcgtgctgttacggatctgctgactttaaagaccagcccggtatcgacgaaatcgataaggctaattctattactgatgaaggtgaattgccgtttgtttctgaagaggatatgaatgtaactattgttcttaccggcgatgatgacatatgtggaaaaattgaaaacctttgcgctcacatatgcgaaaacactttcgacgcataccaatgtaagtgccaccccgggtttatgttagataataacaacgtaacatgctctccgatgaaaacccaaatatgtcccagcggttacaatttagataaactggataacaaatgcattgacattgatgaatgccgggaagatcttcatgactgcaaatcatcccaatattgccataatacgaatggcggataccactgcttaaatgtgaaagaaaaagagtgtccaccaggatttcattatgaccatgattacgatgcatgtaaagatgattacaaatgcaaagatcgtaaatgcgttaaaattcaatcttgtgataaaggattcagcttgcataacggtacctgttccgatattgacgagtgctcacataaatcattaaacaactgtcatgtcaatagtaatcaggaatgtgttaacacagtgggaagttattcctgcaattgcctgcctggatttaatttggatgctacactaaataagtgtgttggtaagtacgttttttcagtaaaataaggattgttatttattttgacttccatagatataaatgaatgttcaataaataatcacaactgccttccaactcagagatgtgataacacgatcggatcatatatatgc

SEQ ID NO: 23622 - protein, 202 aa, DROSOPHILA
MNVTIVLTGDDDICGKIENLCAHICENTFDAYQCKCHPGFMLDNNNVTCSPMKTQICPSGYNLDKLDNKCIDIDECREDLHDCKSSQYCHNTNGGYHCLNVKEKECPPGFHYDHDYDACKDDYKCKDRKCVKIQSCDKGFSLHNGTCSDIDECSHKSLNNCHVNSNQECVNTVGSYSCNCLPGFNLDATLNKCVGKYVFSVK

SEQ ID NO: 23623 - DNA, 5287 bp, DROSOPHILA
gatgctgcaaagtctacagcaactgattcagtgggtcaccgacctggcactcaacatgctgcatcgtctgcccgaggaggtaatgaagaccaagctctccggaaagcggcctagctacgatatcagccgagacatcgtggccatcagcagtctgcgcgagctgctggttatgatccgcatttggggcctgttaaacacccagtgcctgcccgtctacaccaagacgatggacaacatcgatgtgctagtgatcttgtttcgtttgcttactcgcctggcccagaatcctgcagaaccggacgaaatgctgctggacgagtgcagcctgctttccaagcagctcctaattccccagcccaccaagttcaaccccaccacgctgctgagtgcccaaggattcgcggccgtaaagtcgggacagctgcagttcacctccatggaggagccaacttgcttgcaggacatggagacggaggaggtggtcttcgccagctctgtgaaggatggcgtgagcaatctccaactgggcgcccgacccagccacattcggagatgcgcccgctgcggattcgtgttcgtgaataacgccagcaaagtggccaagacgtcggccctcaaggcgtggtttagtaagtggctgcactgccactgtgggggcttttggaagcaggttcactagtaaatctatgtgagcaatgaccttagttattaagtatgatttaagcttcaaataaaagtacatgattgccagcaattttagtgaaatcaagaaatttaatatactaaatatatttcttctttgcacgacgtgctcgttcaaaaaacttaagccacagagaagtcaccaccatacttcactatttcaaaactaaatttatttgaataaaatatattttttaactctatctatgaattgtggttggtgtatttgctaacggtttgatattaacaacaacaacatatcgaagaacttgcatcactagcatgtcaatcgatatcaggacgtccaatgtgtctgtcggctgtcggcaatcgatatctcctctgcaaatagatattttcagaataattggcttatttcacttcgccctaacgctgcagtaatggtaagtgcatcgaggtgcaacctgtagtcgccagaagtcgaaattcctagagaaccgagtgccccaggtccaggcttaaccgagtgctgagtgcccaccctgtcgacgtcaaaagagggctgcctgtggtgagaagcaacgcccccccggtccaaatcccacgtccatgtatccctggagctcctcctcgtacggcggccagattcccagtgccgccaacgtccgggtaaatactccgccaatcccagattacgaatcttggatatgtgtaatcgttaatccacttatcttcaatttggtcaatccttcgtctcaacttccggacttcttccgggaatgagtaaagtgggcttatctcgagtttattttatttttatatgtatatcttagccaataatattgcttaccatctgtcctttcagaccatgccgaatggtttggatgaccaggagaagctgctcgctgaagccattggactagcgaggaagcaggcctttcaaatgaaccactttctggataaggagcgtatgctggactcgctcaagtgcgccagcaccatgctgggcgagctgcggacctccgtcctttcccccaaaagttactacgagctgtgtgagtaaaaccaaagcgtctttatacaacttcagatctaatcgatttaaatgaaccgcagacatggccgtcaccaacgaactgtgccacctggagctgtacctcagcgagaaaatcgacaagaaaacggatttgtacgagctcgttcagtactcgcatactattgtgccgcggttgtacctcctcataacagtgggcattgtgtatatcaagaatgaccctacgctgaagcgcagcattctaaaggacctggtcgagatgtgccgcggtgtccagcatccgttgcgaggcctctttctgcgcaactacctgctgcagtgcacccggaacatcctgcccgatgtgatggttgaggagaacgagcacgagggcaatgtctatgatgccatcgacttcgtgctgaccaactttgccgagatgaacaagctgtgggtccgcatgcagcaccagggacactccagcgaaaagacgcgtcgcgagaaggagcgtgaggaactaaagatcctggtaggcactaatctggtgcggttgtcccagctggagtcggccactctggaaatctaccagcgactcattctacccggcatcctggagcaggtggtcagctgtcgcgatgcaattgcacaggagtacctaatggagtgcatcatccaggtgttccccgacgagttccacctaaagacacttgaccccttcctaaagtcctgcgctcagctggagaccggtgttaatgtgaagaacatcataatatcgttaatcgaacgattggctgcctataaccagcgaagtggcaaggtaagcctcccccgtcgcttccagcgctaagataatatctaaactacttatattttagacaagtggtaatgccatcgatgccatcatacccgccgaggtggaactgtttgaagttttcagtgtccaagtggctaacatcgtgcagacccgaatggacatgccgttggaggacaccatatcgctgcaggttgctctgctgagcttggctcagaaagtgtatcccgatcgagttgactatgtagataaggtgctgggcacaaccgctcaaattttgcagcgcatgaacatgaacaagtaggttgaactctaataggggagcatcaagtttgctacatattcattccttgcagcatctcccatttgctatctgtaaaccaggagttatcgcgccttctgcgcatctgtatcgacttctacaacaacgccttgaccataattcaacttcaaaacttttgcccgctgctcgaaaagtttgactacacatcccgtaaatcgctggccctgtacctagttatgaacatcttggacaacgaaaccctagttccaacagctgatcaggcggatagtctgctgaccatcattacgccgttgattaaggacgatgatacgaacaaagaaaacggcgcggcagcaggaaatacgactccggatgccgaggagtttgccgaagagcagggggttgtggcacggtaggttattatttccttcgcacaaaacatttctaaatcatttccctttttaagatttattcacctcatgcgctcagatgaaccggacatgcagtataaaatgctgcagaccgcccgaaagcatctgggaaatgggggcgggcaaaggctaaagcatgtcctacctccgcttgtcttcgccgcctatcagctggccttcaagtacaaggcgatcgccgagcaggatgagaactgggacaagaagtgtcagaaaatcgtgcaatactgccacagtaccatcagtgcgctggccaaagccgatctcgcagacctagccctgcgtctatacctgcaaggtgccctggtcattggggagatcggttatacgaatcacgaaacggtggcatacgaattcatgacccaggccttctccctctacgaagacgagatctccgactcaaaggcccagcttgcagccataacgctcatcatgtccacttttgaacaaatgtcctgctttggcgaggagaacgctgagccgcttaggacgaattgtgcgctggctgcttcaaaattgctgaaaaaaccggatcaatgtcgcggtgttgtggcctgtgcggcgcttttctggagtggaaagtaagttggatatgaaatcttgattgaaattttactgatataacttaattcgctaccaggcaaaacggcgaggagatgcgtgacgagaagcgaactttggactgcttaaagaagggtgctcgcatcgcttcgcagtgcttggataccggagtgcaagttcaattgtatgtggagctgctgaatcactatctgttttacttcgaacgcggcaactcgcttatcactgtggctatgctcaaccaggttactatagctcattgaaaattgaaaagtccatttaactaaatagaatttcaatattacagctaattgccaaggtgaatgaggagctgcccaacctggagcccagcgaggagaccaaacagatcgagagccattacaagaacacgctggcacacatccgcagtcgcatggaatccaatgactcgtcgctggaggtctcctttgcgggcataactctcaattagcccagcgcacccactttggataaccctgggaagcatccaagcgctactaaagccctgcaggaggatcagccaggcccgtttttatacagctagttatcaacttgctcgtagaccgtttagacttattcaaagctctgcgagagtattcaaattgcttgtgtgtgaaactaaattccatggttaggaaagttgtgggccttcgaccaacttttgatttgtcaatttgatttcgatcgtaatcgtaagtgcaaagtaaaaacattcttgattatttccccaatttatttagtatgatagctatgcgtatatttaccccagaggatttttaatttaccatatttaatctccaaaccttccctaaaaaataatgtgaaaatattgttaaacaaaatcttacataccattatcgaattggttcacgaatcgccacgcgctacgtataaatatgtattacaaataaagttaagaccaaattgttttcgcaaaacaatgcgcctgtatgtgtggcctggactacagtgaatcaaaactcgtcagcgataaacatgtaaagtaattcgtttattaaaaatatataagccgactaatttccatcggtctatcaatcaatcagttaacttagcttccatttacaatacacgatgagttcgcactcgtacatatcctacagactctcgccgatcgaatctagctccgcgtccttattcgtccttccatcaatcacatgcgctacaagggtgctggatgttcgtgtccttccggttcctctgattggtgtggcagtattcgggggatggagcggtgttgggtggcagtttcgtgttgcttcgagaccagttagtgggtgagagtggttagggacaggcctggtactgcgggcagttaacttggtgcgtatgcgcaacttaaagctaatatttttagtcactaggttctaagcataaacattacagatagaagcgcctaattcactttgagtgccatatagcagcaaatggaa

SEQ ID NO: 23624 - DNA, 2422 bp, DROSOPHILA
ggacgtccaatgtgtctgtcggctgtcggcaatcgatatctcctctgcaaatagatattttcagaataattggcttatttcacttcgccctaacgctgcagtaatgaccatgccgaatggtttggatgaccaggagaagctgctcgctgaagccattggactagcgaggaagcaggcctttcaaatgaaccactttctggataaggagcgtatgctggactcgctcaagtgcgccagcaccatgctgggcgagctgcggacctccgtcctttcccccaaaagttactacgagctgtacatggccgtcaccaacgaactgtgccacctggagctgtacctcagcgagaaaatcgacaagaaaacggatttgtacgagctcgttcagtactcgcatactattgtgccgcggttgtacctcctcataacagtgggcattgtgtatatcaagaatgaccctacgctgaagcgcagcattctaaaggacctggtcgagatgtgccgcggtgtccagcatccgttgcgaggcctctttctgcgcaactacctgctgcagtgcacccggaacatcctgcccgatgtgatggttgaggagaacgagcacgagggcaatgtctatgatgccatcgacttcgtgctgaccaactttgccgagatgaacaagctgtgggtccgcatgcagcaccagggacactccagcgaaaagacgcgtcgcgagaaggagcgtgaggaactaaagatcctggtaggcactaatctggtgcggttgtcccagctggagtcggccactctggaaatctaccagcgactcattctacccggcatcctggagcaggtggtcagctgtcgcgatgcaattgcacaggagtacctaatggagtgcatcatccaggtgttccccgacgagttccacctaaagacacttgaccccttcctaaagtcctgcgctcagctggagaccggtgttaatgtgaagaacatcataatatcgttaatcgaacgattggctgcctataaccagcgaagtggcaagacaagtggtaatgccatcgatgccatcatacccgccgaggtggaactgtttgaagttttcagtgtccaagtggctaacatcgtgcagacccgaatggacatgccgttggaggacaccatatcgctgcaggttgctctgctgagcttggctcagaaagtgtatcccgatcgagttgactatgtagataaggtgctgggcacaaccgctcaaattttgcagcgcatgaacatgaacaacatctcccatttgctatctgtaaaccaggagttatcgcgccttctgcgcatctgtatcgacttctacaacaacgccttgaccataattcaacttcaaaacttttgcccgctgctcgaaaagtttgactacacatcccgtaaatcgctggccctgtacctagttatgaacatcttggacaacgaaaccctagttccaacagctgatcaggcggatagtctgctgaccatcattacgccgttgattaaggacgatgatacgaacaaagaaaacggcgcggcagcaggaaatacgactccggatgccgaggagtttgccgaagagcagggggttgtggcacgatttattcacctcatgcgctcagatgaaccggacatgcagtataaaatgctgcagaccgcccgaaagcatctgggaaatgggggcgggcaaaggctaaagcatgtcctacctccgcttgtcttcgccgcctatcagctggccttcaagtacaaggcgatcgccgagcaggatgagaactgggacaagaatgccctggtcattggggagatcggttatacgaatcacgaaacggtggcatacgaattcatgacccaggccttctccctctacgaagacgagatctccgactcaaaggcccagcttgcagccataacgctcatcatgtccacttttgaacaaatgtcctgctttggcgaggagaacgctgagccgcttaggacgaattgtgcgctggctgcttcaaaattgctgaaaaaaccggatcaatgtcgcggtgttgtggcctgtgcggcgcttttctggagtggaaagcaaaacggcgaggagatgcgtgacgagaagcgaactttggactgcttaaagaagggtgctcgcatcgcttcgcagtgcttggataccggagtgcaagttcaattgtatgtggagctgctgaatcactatctgttttacttcgaacgcggcaactcgcttatcactgtggctatgctcaaccagctaattgccaaggtgaatgaggagctgcccaacctggagcccagcgaggagaccaaacagatcgagagccattacaagaacacgctggcacacatccgcagtcgcatggaatccaatgactcgtcgctggaggtctcctttgcgggcataactctcaattag

SEQ ID NO: 23625 - protein, 770 aa, DROSOPHILA; identical to SEQ ID NO: 11064

SEQ ID NO: 23626 - DNA, 4233 bp, DROSOPHILA
attttttttagtttcggcatatttattttctttttatttttaggctctttcattgttttttggaatattttgtgatagctttatgctaaatacatacatagttttaatgactggtgcttaagcgcgtagcttatttgttatattataaagtaaattaattgcttgcttatatttttgttttgtttagaaattgaatttattttctttttatgtatttataaaaaagcttttaattatttacaataattgaactgcttttaagcataacctaaatattaagatcactgtatgcaaattaaatggccgatcagcaggatggtcaatgtgaaatagttttttttttgcccaatccacaccgtccgccaaattgtgcgcaagattttcttatatacacctgcgattttcctgcgcttttcctggtagacaacctttcgaactaaatactaatttatacaaaatgctttcgctcgaatacacgtaacataggaatatacaactagagtatgaatatacagatttactgcgattttcacttttaaagaaaataaatgaaagtgaatataggccctttgtgtactgtatttcccaaaattctctccaaaagtgagaaacgcagcaaacccgattaaattagatcgattcccttgcttttcaagtttcctctttaacccttgtagaagtaatgcagctcgatatccggatccggcctggttttgatgatggtgcggcccaaagtgccgcacgtcttggccggatatcagtgataccgcctcagactcccgttgttgttgcccacagtgccgccaactgccacgcccactccgccaccaatgccatgatgattgttgttggacagtgtagacacattgttattgttgttgaaggatctgcgcccagtggtgttgccatggatcagggccatgcccactccattcctcagcggcagggctgggggtggtggtgtgggcgttggactgggtggcaaatcatgatccaatggcagcgagtaatgcgaattgttgtgaatatatcccggttcagacatcgcatcacacggcttggcatagactcctccgtagtgctgattgtggctctggttctggttgtggttaaagtggtcctgggtgagacgaatcccgttggcaagcggctggctatagtgtgacaaggtgctctcctgcaccaccggtggtcggtggcgcggcagcgaggtagcattcagtggcttcccaccgttgcaggccagcaaacgcatatcctgctgcgagtggtgcatcttcgaggtcgattgttgttgctgcgcctgttgctgctggccattgttagtcatgtagtgaatgtggctgagctgggcgaaggagttggaggcctggtccactgcactgggcacctggagctgctgtacggcgccgctggcggtgctggcgccaccaccaccaccccgaccccgcagctgaggcgggggtggtgcttctagctaaagctcggtgaccggtatcatccggctgttgccagcgatgtagggatagcccccagcggcaggatgaactccaccgccaccaggaggtggtcgcgacatgtactcttcatcggagaaggtcttttggtattcgcgctccttacgccctaacgccgaatgtccttttagcatctcccgaatcctatgacggcaggtgtagagaaccagggccaaagtggttattagagcggcacaggccaccaccaggatcccgatgatcgcctgcttactggcggctccatgggcacagcctaaaagtggttctgccaaatgggccagtggcaagtccctcagagccgttggataggcacagatgacgggcgcatactgtccactggcattcctgctgaccagcaaatggcgcagccatagtagtctgcagtcacattcaaatggattctccgagagatcaagggtttgtagatcagcccagggcactaaaccttcatccaggctgctcaattgattggccttcagcaccactgtgctcagatggggcaagccacccaaggcgatggaggataattcgttcaactgcttgttactggagaggttaaggtgctccaggtttgtgtttccactgaaggcaccgctttccacgcgtctcagtcgctgggcacctgtcagttccaagtgcctcagctcccgaagacccgaaaaggcgcccgaggagatcacctcaaagtcattctggccaatgtttagctgttccaggcgtcccaatcgctgaaaagctgctgtgggtatcgcagggaggcgattatctgacagatccaaaaagcgaagggacaccagacccttgagagcatctcccgagatgttgtgcaagccagctccgcgcagatccaatctggttaatcctttgagatcctggaaagctcctccgggaattgtcataaaggaattggtgcccaagtatagctctgccagggagtggagtgcctggaaggttagttctcccggcactgtggtcagtgtattatcatccagatagagcaccctcaggttgtccaagccatccagggcatgtggatcgatgtggctgatgcgattctggccgagattaagctcagcgagcttgaccataggcgaaaaagtgcggtactctagttcggcaatcaagttgcctctcagatttaaaacactgatggtcgacagtccgaggaaggtcttgttcgacacctggccaatcttattgtggtccagatgcagctcctgcaatttggcgtgatacgcaaacgatcgttccggtatggtgagcatgtcattgaatgacagatcaaggaaagtgagctgcgcatagaactgcatggatgagtcgatggtcttcagtttgttgttcttgatcaccagtcgctggatggcgggattcagggcgatgggcaggacgtccagcgtgccctcgccgcaattgaccatcagggtgtcgtcgtcgcactcgcagccattcgggcagttggccaatcccagggccactggcaatgtggccaaaaccaggcacaggcacaggcacaggcagaggctaaaagcctggccaagatggggagccaacgacatggtaattgcccgtcgtctgctcattacacgctcactgtcttttggctctttgcactcgtcgtcgcttcgtttgtgccgctctccttttctacgttaactacgttctggccaagttcgccaatggctttccagtccagactccggcattcgcctgcaaatagatgaaggaaacaaaaaggtgcggggttagccgggcttcgctttaaattgattttccattagagttcaaaattgcttggcttttggatttccattggatttggcagctgcagagctgcaaagcaatcgcattgcccccgtcgggagttaatcggtagttttgtggattactttcagctccagccctccatacaccccccacactcgccccgaagtgtacccccatttgactgtcgggcagtaaacaaatgaagacaatttaaatggccacggcctggacattaggaacggaattagcgactggctaaaagcaaatggaagttgtttcgagtttcactttaacagttgcctgccagtctgctgcagacctaatggttgccaggcagtttagcttgaattggatcggaactctggggttgggttatcgattgaatggatggaagcagattgcacggaaccgcacgatttcctcaggaattcttcattaaatctgaagtacaaactccatgagctactacagagtgatctggttagtattgctaaatataaaccaatgcatattttaaacgtaaaaaaaagagtaaagtgttgtcttagtttatttaaaattgctttaataatattttagtcgtttgaaggcccaaaccatgtaacattgccaaagtctgttttctaacccggccaagtcggcacacatgtcagacaaagggccaacgccagcaaccctttgtgtcaactggcaggtccccaaagtcagaccccggccccaaacctcaacccccatttaagccctgttgccttaaagctaccacttcccaatggatctccgagcaggccaaagatatgccgcatagttggggccaaacttaaaaaacaacttgcactttgtttgctttggggacatttatcagctccggggctgatgggctacattggacggaggtggaggagctgggatctgggatctggggacaactggcaaaacaaaacttaattta

SEQ ID NO: 23627 - DNA, 2233 bp, DROSOPHILA
ttgcaggcgaatgccggagtctggactggaaagccattggcgaacttggccagaacgtagttaacgtagaaaaggagagcggcacaaacgaagcgacgacgagtgcaaagagccaaaagacagtgagcgtgtaatgagcagacgacgggcaattaccatgtcgttggctccccatcttggccaggcttttagcctctgcctgtgcctgtgcctgtgcctggttttggccacattgccagtggccctgggattggccaactgcccgaatggctgcgagtgcgacgacgacaccctgatggtcaattgcggcgagggcacgctggacgtcctgcccatcgccctgaatcccgccatccagcgactggtgatcaagaacaacaaactgaagaccatcgactcatccatgcagttctatgcgcagctcactttccttgatctgtcattcaatgacatgctcaccataccggaacgatcgtttgcgtatcacgccaaattgcaggagctgcatctggaccacaataagattggccaggtgtcgaacaagaccttcctcggactgtcgaccatcagtgttttaaatctgagaggcaacttgattgccgaactagagtaccgcactttttcgcctatggtcaagctcgctgagcttaatctcggccagaatcgcatcagccacatcgatccacatgccctggatggcttggacaacctgagggtgctctatctggatgataatacactgaccacagtgccgggagaactaaccttccaggcactccactccctggcagagctatacttgggcaccaattcctttatgacaattcccggaggagctttccaggatctcaaaggattaaccagattggatctgcgcggagctggcttgcacaacatctcgggagatgctctcaagggtctggtgtcccttcgctttttggatctgtcagataatcgcctccctgcgatacccacagcagcttttcagcgattgggacgcctggaacagctaaacattggccagaatgactttgaggtgatctcctcgggcgccttttcgggtcttcgggagctgaggcacttggaactgacaggtgcccagcgactgagacgcgtggaaagcggtgccttcagtggaaacacaaacctggagcaccttaacctctccagtaacaagcagttgaacgaattatcctccatcgccttgggtggcttgccccatctgagcacagtggtgctgaaggccaatcaattgagcagcctggatgaaggtttagtgccctgggctgatctacaaacccttgatctctcggagaatccatttgaatgtgactgcagactactatggctgcgccatttgctggtcagcaggaatgccagtggacagtatgcgcccgtcatctgtgcctatccaacggctctgagggacttgccactggcccatttggcagaaccacttttaggctgtgcccatggagccgccagtaagcaggcgatcatcgggatcctggtggtggcctgtgccgctctaataaccactttggccctggttctctacacctgccgtcataggattcgggagatgctaaaaggacattcggcgttagggcgtaaggagcgcgaataccaaaagaccttctccgatgaagagtacatgtcgcgaccacctcctggtggcggtggagttcatcctgccgctgggggctatccctacatcgctggcaacagccggatgataccggtcaccgagctttagctagaagcaccacccccgcctcagctgcggggtcggggtggtggtggtggcgccagcaccgccagcggcgccgtacagcagctccaggtgcccagtgcagtggaccaggcctccaactccttcgcccagctcagccacattcactacatgactaacaatggccagcagcaacaggcgcagcaacaacaatcgacctcgaagatgcaccactcgcagcaggatatgcgtttgctggcctgcaacggtgggaagccactgaatgctacctcgctgccgcgccaccgaccaccggtggtgcaggagagcaccttgtcacactatagccagccgcttgccaacgggattcgtctcacccaggaccactttaaccacaaccagaaccagagccacaatcagcactacggaggagtctatgccaagccgtgtgatgcgatgtctgaaccgggatatattcacaacaattcgcattactcgctg

SEQ ID NO: 23628 - protein, 540 aa, DROSOPHILA
MSRRRAITMSLAPHLGQAFSLCLCLCLCLVLATLPVALGLANCPNGCECDDDTLMVNCGEGTLDVLPIALNPAIQRLVIKNNKLKTIDSSMQFYAQLTFLDLSFNDMLTIPERSFAYHAKLQELHLDHNKIGQVSNKTFLGLSTISVLNLRGNLIAELEYRTFSPMVKLAELNLGQNRISHIDPHALDGLDNLRVLYLDDNTLTTVPGELTFQALHSLAELYLGTNSFMTIPGGAFQDLKGLTRLDLRGAGLHNISGDALKGLVSLRFLDLSDNRLPAIPTAAFQRLGRLEQLNIGQNDFEVISSGAFSGLRELRHLELTGAQRLRRVESGAFSGNTNLEHLNLSSNKQLNELSSIALGGLPHLSTVVLKANQLSSLDEGLVPWADLQTLDLSENPFECDCRLLWLRHLLVSRNASGQYAPVICAYPTALRDLPLAHLAEPLLGCAHGAASKQAIIGILVVACAALITTLALVLYTCRHRIREMLKGHSALGRKEREYQKTFSDEEYMSRPPPGGGGVHPAAGGYPYIAGNSRMIPVTEL

SEQ ID NO: 23629 - DNA, 2494 bp, DROSOPHILA
tggcctatgcgaaaaccaaacaataaatcgaaactctatttgattaattttaaagaagaaactcagccaagggcataactgaattaaagagcaaattcacatggcgtttctggtcattgttcactgcgtaaacatttgtaaatttgctctttttcaggtgtatacacggtgcaaacaaaactcgactgaacggctaaaaaatggtcataaaatagcatttgacaaatgacgcacttcctgtcaacgcacacaatcacaaacgcatacaatcacacacgcacacatttatcccttatcggtaacttgtaaaaagaggtcgaaacaattgcattgcttttaaacatgaatctgctcacatagttacacagtttaacaatataataattcattgtttgaatttatttatgagcgcagctcaaatatttaatatgcacaaacggcagtttgtttaaatgtaatttagtggaataattaaacaaatgcggattttattcaaaactatttagttgctgtccgattgactaacctttttgtaaacgagatcctattaaaatttaacaagtaatcataaaatacattttcttacagttcttacgccagccatccaatttgttagctcactaactttgcagcgaaattataaaaaaggctttaattgcataattaaatttattggctgtacaattttccataaggtaattttatcagttttgcagagaataattgcaaaattaaatgagctaattaaaccatttccaagtggaataaaaaggctcatttactttgcaattggatcagttttagcaacccagacttaaatccgttttcaacagatactcgacgcgacgtttttccttaggaggcagttgaaagaattttgagacaaagttattcagttccctctttgtatgcagtgggggccacattgttttatagcacaggattctagaaaagccacgaaagtcccggttaatttatgttatcatttctaacttttagcttacttcttcaggaaaaactggtcgcagatattgcgttgattggcaataatgtgctccatttcgtgaaggaactgcctatcatatttcgctttggagtccagataccgcacatagcaattaagatcgctggaaataatggtgtgtcaggaaacctaagtaactcagcaagttctttcttaactgactactgaaagtgctttatatcgtagctgggatgcaaactggcatcggcctcgtcgtggaacttgatccttggctcataccactcgtcgagctcctggagacgatggaactcatatcgggaagcaagtcctgacaaggaaaccaacgaagtggtcttcgtcctagtcaggaattcctccactttcttagccttctcctgggccttggccacaaacttcgcgttgaggcggtgaactggtacatttttaccccgcaggacatctcccgctgaggggatcgacttaatggttacaaggctcgtcgcggacatgttgaaaatttgatactgctcttgggaaactggagatttttgagatatattaaatggcttatttatgcggtgactactttgattcgacaattaacgctttaataaatacgccacatagttgtcaccgtcaacaacatctgagtccttggggaattattgttttaagccgctggtgtttataaatatacatggaaacagccgagaacatcatgaggattcatcagacgatatatggaaaggggtcaggctgctgtattttatttacacggccattcacattggcatttcaaaaatcattcattaattttttaattcaacaatcaggctggttcaaagtggcgtggaataaaaaccaaaaaaggaatctctgtaataatatcacatgcaattattgcaggcaatatgcatgcaattatgctaaaggatatccattgtaaaaaaaactttgcaagtgagcccgaaatagagttgcgaactcgaaagttctcaatgcgattggatagcctttgtaattatgatgtccctaaaaaaatgaaaaactaacagggccctgttcgaactttcattgacttatttgtacccttaataatggtccctcctaataatctatgaggagtagtgcgactgctaatctacccacatttgcacccattatccaggtgtggtcgaaaattattctcaaaaagattccacacattttcgcgccattaaacatgcattcgcgcatttaatttcattttttgaaccgcccgagttgacggaacagagccatcagccggaccacaagagtggcccactgaagggggaataggagctgccgccgacaggagagttggccaatgtttgcacagcaaaaacatggcccaaaacgctgggtctattaagagcacatttgaccaaagtcggggctccggcacgtgtgcaatgaaaacaaacgagcccattattgttacacttttctttggcaaccggccgcagagaccattaatgatgtgttatg

SEQ ID NO: 23630 - DNA, 435 bp, DROSOPHILA
atgtccgcgacgagccttgtaaccattaagtcgatcccctcagcgggagatgtcctgcggggtaaaaatgtaccagttcaccgcctcaacgcgaagtttgtggccaaggcccaggagaaggctaagaaagtggaggaattcctgactaggacgaagaccacttcgttggtttccttgtcaggacttgcttcccgatatgagttccatcgtctccaggagctcgacgagtggtatgagccaaggatcaagttccacgacgaggccgatgccagtttgcatcccagctacgatataaagcactttcagtacgatcttaattgctatgtgcggtatctggactccaaagcgaaatatgataggcagttccttcacgaaatggagcacattattgccaatcaacgcaatatctgcgaccagtttttcctgaagaagtaa

SEQ ID NO: 23631 - protein, 144 aa, DROSOPHILA
MSATSLVTIKSIPSAGDVLRGKNVPVHRLNAKFVAKAQEKAKKVEEFLTRTKTTSLVSLSGLASRYEFHRLQELDEWYEPRIKFHDEADASLHPSYDIKHFQYDLNCYVRYLDSKAKYDRQFLHEMEHIIANQRNICDQFFLKK

SEQ ID NO: 23632 - DNA, 4751 bp, DROSOPHILA
actttcagatatcggaaaatctccccgttaatcttcgattaaggcttgtgtggatagatattcaatttatttgacacgttaagcaacatattgacattttatagataaattacataacaatgcctgaagcactgtcaagacattgtcaaaattgttctgtatatatatggtgtcaaccttattacattacattacattacataatttcattgcggataatatatcttatttctaaacacaactaaatctcaaaccccattctactcagtaatagttttgaaaaaagatatttatctcactgataaggccacagtttgattttgccgttgacatgttgaaaccatgcagatcagagaagtcattcttgacaagtcatgcaaaacacatcctgggtctatttctgcggactaaaacttacaacggaagtaatagtataaaaataaaatttgtctctgtggcgtgattcacaaaattgagcatgagggacaaatggcttttagaactgcatggattcttcatatatatgttaatgcttcagaagcagaatattcagaaattcgtgattctaattactctagatatttctggcataccactttaagtaagtacgacaaaaaaactgcaataaccattgaaaaaccttgactccttgcgattgattagaaagactagttctgagttataaagggaacataaattaaattataaaactgttacaatgattcattgcaaatgtcaaaatagggaagttaattttaagaaaaggaaaacttgcaaaataagttgtctttttccaaattgtagaaaattaatttaaataaatttagctgattgaatggccaaacaaagggaaccttataaacaatatgagataacttaaaaacgtctataaagaattaaattctatctccttggcataagcttctctcagcattttctcacgtaaccgggttacatcctcgtctatcccgtacaagagctcgaattttctgaaaaatatttcgagaatgtacaagtggcctgcaagagatgtttactatttaattaagattacctcactcaattcaccaggagttcgtttccacaaccaaaacatgtaaagtggtatataaagcatggatgacaacgccgtgaaccaaccaaaagcatgcgcccaccatggatagctgtagtccagatacttaacaggagtccactgaactatgttaaagaaaaacactccctataaaaaaatataattagataagaaatgattatttaataaaaatactaaccaagcatatagcgggcgttgtgacacaccagcagaacttccaccaaacagtgggataatatccgatcatatcctttattccgtcataaaatcgatccactccatagcaccaagatattgaaacacattcaaagaatatgagccacagtaagcaaaagccgctaactgcatatgaatccaatatttgaaaaatatacatgccaccctaaaaaataatgacacccagtgaataaagttcgacagcggtgccaactttaaaacatacttgtgtaatacaggttaagcccactaagtagctaagagcgcatacaatagcaataaatatttctttccgcttccgcagcaactgcggccattcatcaataatggcagtgataaagccctccattgtacaaaactgtgagtccaatccaatgagcagaagcatgaagaagaagaggcaagaccacattggagaccctggtaactgcagaactgccgatggatagacaagaaatgcaaggccaggtcctgatgcggctacatcagccactggtcgctgttgctcgtgagccataaatcctattaccgaaaatattacgaatccagcaaacatactggtgctagaattaactgtgcagacaataagcgcgtccctaaaaataattttttttaccaacaaaatgtaaattttgtttgagttcagtgacctacttgtagacgttattggtaaacttgttgtaacttcctaacgccaccaaagtaccaagtccaagcccgtatgagaaaaatatttgcgtcacagcgtcgatccacacctataacatattttaaaaatattttaatcaatgatataactaagactatgcttttattccatagcattcaattattagttcacttcaattttttacggacttaaactttccaaaactgttttggaatacgataaagaactcagtaaaggacaagagaaaatgctatagtcgactatttatagagtatagttcacagacatttttatttaaatcgaacgtcacctcgttgtcaaatggtatatttttattggttaaaaagcatttaacaggaagaaggaagcatttctgatcattaaccgaatttatatactcgtgatcaagaccaaagacgggtcgatctagtcttgatcgtttgtctgacaactataaatggtagaaagtttagtttaagaagcatatacgttgccgcgatgctacagcgttccccccatttttctcaggaagttgccacgcccattccaacgcccacaaaccgtacaaatctgtcataccaacacttgtactacatatttaatgcgtcggtatgccaagaacacattggccactttgatcaggaaactccactatagcattctcttttgtttttatgaaaataataaaattcttattttacctcagaattagtcaactttgaaaagtttggaattatataaaatttaatgccttctaaagcgccaggtaatgtaattccgcgaaccagtagaatcgtcaggagaacgtagggaaacaaggcagtaaaatatactactttccctgtccattttactcccttccaaatacaaaagtagcagaggatccaaacaagtaataaagttccagccaactcccagcgaatatttccaatctcctcaataccatgcgatatttgaagagctcgccgccttaaacaaaacatttgattgaatgatttaatgaactcgcacttgaatatattacgtactcccaaaactctttgactggatctgtgagttctaaagatgttatgttaagagcagatacggagcaaaccttttgcgtggtgccgttgataatcttatcccagcaatgcaaatttttcctttcatattgactgacacagttgactgtgttccaccaattgttgcacgttctccacggaacatctgaatgagcgtaatgtgtttaagcacaaaatagcagatttaaatttaaatatgatttaaattaaaccgattacaaacctgctctcatcgacataaagaagtaaaataccgcccacgcaagaatgacaatatagtatacattcatccaacaagacattacagcagcagcatacccaattcctttaaaagagataccatataaaaatgtttatgtcgttcattgcatagccataacttgcaaaaaaacgttaattattatatagtcgtttacaggtaaaggtcaaaggtaagggtaacaaaaatattttctcacctttaaatatgggtgcaattttgaatacaccgagtccaccaatcgtcaacatttgaccaagagctagttccatgaaaaacattggaatacctgccaaaaacagtgtaataatgtatggtaatataaatgcaccgcctccatttttgtagcacaaatagggaaatcgccaaacgtttcccaaacctatagctaggcccactactgatagtatgaaatccattttggaagaccatgatccgcgatcggggagttgctcaatttttaccaactgaaaaattaaaaatataaatatatacaaatataaatgtctagattcgattttatatggaatctaaatgttgctcaactattattaaaacgagtaaaaaaagttttgatatattttcatatttttatttggcttgtaaatttctatagattggccaaacaattttttgccatgtccagtctaatacccacaagccgctcaaaactctaagagccaagttacaaatttttggtttgtaggtacgtaagtacttaagtttttggtgtaccgataaaatagtaagacaaattaaaatgaaacaagagagaatgctatattcaacatccacaagaagtgagaatgagaaaacaatttaaaaatttttcaaaagtgtgggcgtggcagttttgggtggcttgtgggcgttagagtggtcgcagcgtctatgtctctggaaactgtatgttaatctcaacttcttagcttctttagttcctgagatctcaacgttcatacggacggatcctgatatatatatatatatatatactttatatagtcggaaacgctttctttcgcctgttataattaggaaaaaagcatatcttacaaattatttgtcggtttcgcgcgacagacgaacatggcgagttgggcttagctattggtgctgatcaagaatatatatactttttatggtcggaaacgtcttcttttgcctgttacatacttttcaacgaatgtagtatacccttttactctacgagtaacgggtataaaaacttgcgctcctactatgcctgtagaatccgcatgcttaatttcaacattctagcttttatatagttcctgagatagagacgttcatatggacaggcggacattggcagatcaactcggctattgatcctgatcaagcatatatacactttatagggaaacgattcattctactagttacaagcttttaacgaatctagtatactcagtaacctacaag

SEQ ID NO: 23633 - DNA, 1605 bp, DROSOPHILA
cccgatcgcggatcatggtcttccaaaatggatttcatactatcagtagtgggcctagctataggtttgggaaacgtttggcgatttccctatttgtgctacaaaaatggaggcggtgcatttatattaccatacattattacactgtttttggcaggtattccaatgtttttcatggaactagctcttggtcaaatgttgacgattggtggactcggtgtattcaaaattgcacccatatttaaaggaattgggtatgctgctgctgtaatgtcttgttggatgaatgtatactatattgtcattcttgcgtgggcggtattttacttctttatgtcgatgagagcagatgttccgtggagaacgtgcaacaattggtggaacacagtcaactgtgtcagtcaatatgaaaggaaaaatttgcattgctgggataagattatcaacggcaccacgcaaaaggtttgctccgagattggaaatattcgctgggagttggctggaactttattacttgtttggatcctctgctacttttgtatttggaagggagtaaaatggacagggaaagtagtatattttactgccttgtttccctacgttctcctgacgattctactggttcgcggaattacattacctggcgctttagaaggcattaaattttatataattccaaacttttcaaagttgactaattctgaggtgtggatcgacgctgtgacgcaaatatttttctcatacgggcttggacttggtactttggtggcgttaggaagttacaacaagtttaccaataacgtctacaaggacgcgcttattgtctgcacagttaattctagcaccagtatgtttgctggattcgtaatattttcggtaataggatttatggctcacgagcaacagcgaccagtggctgatgtagccgcatcaggacctggccttgcatttcttgtctatccatcggcagttctgcagttaccagggtctccaatgtggtcttgcctcttcttcttcatgcttctgctcattggattggactcacagttttgtacaatggagggctttatcactgccattattgatgaatggccgcagttgctgcggaagcggaaagaaatatttattgctattgtatgcgctcttagctacttagtgggcttaacctgtattacacaaggtggcatgtatatttttcaaatattggattcatatgcagttagcggcttttgcttactgtggctcatattctttgaatgtgtttcaatatcttggtgctatggagtggatcgattttatgacggaataaaggatatgatcggatattatcccactgtttggtggaagttctgctggtgtgtcacaacgcccgctatatgcttgggagtgtttttctttaacatagttcagtggactcctgttaagtatctggactacagctatccatggtgggcgcatgcttttggttggttcacggcgttgtcatccatgctttatataccactttacatgttttggttgtggaaacgaactcctggtgaattgagtgaggtaatcttaattaaatagtaaacatctcttgcaggccacttgtacattctcgaa

SEQ ID NO: 23634 - protein, 513 aa, DROSOPHILA
MDFILSVVGLAIGLGNVWRFPYLCYKNGGGAFILPYIITLFLAGIPMFFMELALGQMLTIGGLGVFKIAPIFKGIGYAAAVMSCWMNVYYIVILAWAVFYFFMSMRADVPWRTCNNWWNTVNCVSQYERKNLHCWDKIINGTTQKVCSEIGNIRWELAGTLLLVWILCYFCIWKGVKWTGKVVYFTALFPYVLLTILLVRGITLPGALEGIKFYIIPNFSKLTNSEVWIDAVTQIFFSYGLGLGTLVALGSYNKFTNNVYKDALIVCTVNSSTSMFAGFVIFSVIGFMAHEQQRPVADVAASGPGLAFLVYPSAVLQLPGSPMWSCLFFFMLLLIGLDSQFCTMEGFITAIIDEWPQLLRKRKEIFIAIVCALSYLVGLTCITQGGMYIFQILDSYAVSGFCLLWLIFFECVSISWCYGVDRFYDGIKDMIGYYPTVWWKFCWCVTTPAICLGVFFFNIVQWTPVKYLDYSYPWWAHAFGWFTALSSMLYIPLYMFWLWKRTPGELSEVILIK

SEQ ID NO: 23635 - DNA, 3528 bp, DROSOPHILA
tctttcaggtttcaacacatatggatagggaattaagttacgaactcaacgagatatgacattccagttttggacaactattcttattgctattgcaaaaaaactcgttatttttgtaaccaaaaaggaacgaaaagaaattttgtcaaaaatcgtatatttccaatcgctgatttctccataacttggccaaaaaggtggcacagcgaaaataaagactgttttgtactgctaataaacatacctaactatccctatcactagttttttgattttccaaaaataaaatttttacaaaatttcgcatttttgataaggggtaccctcatcaaaatttgcaaaaaattgaagcctcttggatctttcaggtttcaacacatatggatagggaattaagttacgaattcaacgagatatgacattccagttttggacaactattcttattgctattgcaaaaaaactcgttatttttgtaacgaaaaaggaacgaagagaaattttgtcgaaaatcgtatatttccaatcgctcatttctccaaaacttggccaaaaaaggtgtcacagctaaactaatgactgctaataaatataactaactatccctatcactatttttatgattttcctaaaacgaaattttaacacattttcgataaggggtgtaaaactgggcgacacatttgatacatgtaacaatgaactgggtgaaacataaaggcgtaaggtttgaagttatctgacttaagcacttaaataaatagttaaaaacataaataactgtgctctttgattttgttaaatttgttaatggctctgattggacagcgccgtgacgccacagttttcgacttgatgtcgttgggtaaccaaatcgcttgttatcattttgattgatttatggtgtgtccgtgcgactctgctaattagctgctaatgtaaatttgagtcgagcgcctcagtcatgaagcgttcgccgatcagttggtcacttctgtggatgggctacacatgcattttcctgctggccgatagcccagcccctgtggaatcccatcacattttgggtctctttgtcaatgtgcaccggtcgcagttaatggtccatttggcggtatgtcgcgctcttttgcagaggggtcaccacttaaccctagtcaccacattgccgctggaggagcaggaaattcagggaaatgtgtcacacatttacattccctggcagcagccaaaagaggaagtatcctcctcggacctcattctgcgcctggaacggatgtttaggcgtttggagcattctggagatctgcttgatctgccggagtggaagatgtttctcagaaatcaacctaatactccctatgatctcctcctcttgggctatcatttcaacgatcatctgctgggagttgctgcgcatttcaattgtccagtggccatagtttccacccaacagccaactggatttgtcaacagccttatgggtaatcccgaggagcgttggtatgtcccacagccgtatgatggccaacagcgaagtggaatctcggcctgggtctttggaatgtgggagaagttcatggagattttggcgaggagagtgctggcaaggatctaccggtatgtatctaaacgcagttgtttagcgatcaattgagattttctttttagtttgcactttcccgaaccgcaatatcccagttttgaaaccatgcgacggtcggtggttctggctttaagtaatcatcacatgatcagcgagggtcccatagctccacttattcccagtatggtggatataggaggtatagtcctagagcaacagcttgataagactcctctggaaatatcagccggcaatcgatctctcatcatcttcagtttgggcactcgtttcacttggcggaagtccactaaagaactggtgcggactttcacaaaagcttttgctcagtttccggactatgacatttactggacctacgatggtccaaatggtagtgccatcagcttggattaccctcaccttaaagtcgccaagtggtggccccaaacgcagatgtggcaaagtggcaaggttcgattgttcatcactcatggaggcaaaggcagtgtctcagaagctcttttttacggagtgcccatgctgggactacccttaattggcgatcaacgagataatcttcagagaatgcagtcgaaaaactggggtttgaccttatccaccaacaatctgacgcattggaaactagcgaaggccataactagaatgcttagcgattcgagttatggtgaaactatattgaaagcttctcaattgtatcgcgatcgtccagtgagtcccagcgatttggtgacctattggatcgagtatatcgttcggcataaaggagctaaaaatttgcacaatcccgccaggcaactcaatataatcgaatatcattccatcgatgtttattttatagtttatgggctcttaatcctaacgattgccatactcagaaaagtgaatagcttgctgtgactagaagtattatttattggatacaaaaatatattaaataagtagctaggaggtcaacttaatcgacaataacttaagtacactcgaatgttgcttgtcaatacttctgattggaacatgggaatctatttaatttatttttaaagaggaccgaaaatgacagttacttaagaacttttctatgaaagcgttacagtgattttgagttcgacagattcttatgattttaataaataaaacactgtagactctttcaaaaaagtccaaaagaactaatactttcagttctcaatgtctgattttatctagtttcactggcatcttaaactcagcttaattaagattacattttaagtgtattttctgtaaagtaatcacttggtccaaatatgaatttgaatcggtctttaatattataatattattactcataatactaacaaccaaacatagtatgcctttagtttgctcgcttatccgaacgaacagttcggatttctggatttctttgttctatggccattgcgtatatttaaacacagtttttcttcaaatgccatgaactttataatgtagatttaagttctggcgttttcattctttcaatgggaatttggtttagcttttgccattctgacgttttgactgcaaacgctgttgcagattgggattccgatttggaagacccgggcgtggacatcgaccgttcctcacatcatatgccccgtagttgcaaaacggcggactgacttctccactttgaatgcggctgaaaaaataaaaattgggggtttaacaaaattatatggcacttaaagcattacgtaatgataatattgacaaaaaatggtttaaaagtgcttaaaccttgaactcaccgtcgttccatcaccgagaatccctcaacgccgtttttcagcctcttgcacgtttcgtcgctgaggtggcagtcgcatcggcagcgctgctccctccgctcccacagacgcagctccaggtgctcc

SEQ ID NO: 23636 - DNA, 1477 bp, DROSOPHILA
atgggctacacatgcattttcctgctggccgatagcccagcccctgtggaatcccatcacattttgggtctctttgtcaatgtgcaccggtcgcagttaatggtccatttggcggtatgtcgcgctcttttgcagaggggtcaccacttaaccctagtcaccacattgccgctggaggagcaggaaattcagggaaatgtgtcacacatttacattccctggcagcagccaaaagaggaagtatcctcctcggacctcattctgcgcctggaacggatgtttaggcgtttggagcattctggagatctgcttgatctgccggagtggaagatgtttctcagaaatcaacctaatactccctatgatctcctcctcttgggctatcatttcaacgatcatctgctgggagttgctgcgcatttcaattgtccagtggccatagtttccacccaacagccaactggatttgtcaacagccttatgggtaatcccgaggagcgttggtatgtcccacagccgtatgatggccaacagcgaagtggaatctcggcctgggtctttggaatgtgggagaagttcatggagattttggcgaggagagtgctggcaaggatctaccgtttgcactttcccgaaccgcaatatcccagttttgaaaccatgcgacggtcggtggttctggctttaagtaatcatcacatgatcagcgagggtcccatagctccacttattcccagtatggtggatataggaggtatagtcctagagcaacagcttgataagactcctctggaaatatcagccggcaatcgatctctcatcatcttcagtttgggcactcgtttcacttggcggaagtccactaaagaactggtgcggactttcacaaaagcttttgctcagtttccggactatgacatttactggacctacgatggtccaaatggtagtgccatcagcttggattaccctcaccttaaagtcgccaagtggtggccccaaacgcagatgtggcaaagtggcaaggttcgattgttcatcactcatggaggcaaaggcagtgtctcagaagctcttttttacggagtgcccatgctgggactacccttaattggcgatcaacgagataatcttcagagaatgcagtcgaaaaactggggtttgaccttatccaccaacaatctgacgcattggaaactagcgaaggccataactagaatgcttagcgattcgagttatggtgaaactatattgaaagcttctcaattgtatcgcgatcgtccagtgagtcccagcgatttggtgacctattggatcgagtatatcgttcggcataaaggagctaaaaatttgcacaatcccgccaggcaactcaatataatcgaatatcattccatcgatgtttattttatagtttatgggctcttaatcctaacgattgccatactcagaaaagtgaatagcttgctgtgactag

SEQ ID NO: 23637 - protein, 490 aa, DROSOPHILA
MGYTCIFLLADSPAPVESHHILGLFVNVHRSQLMVHLAVCRALLQRGHHLTLVTTLPLEEQEIQGNVSHIYIPWQQPKEEVSSSDLILRLERMFRRLEHSGDLLDLPEWKMFLRNQPNTPYDLLLLGYHFNDHLLGVAAHFNCPVAIVSTQQPTGFVNSLMGNPEERWYVPQPYDGQQRSGISAWVFGMWEKFMEILARRVLARIYRLHFPEPQYPSFETMRRSVVLALSNHHMISEGPIAPLIPSMVDIGGIVLEQQLDKTPLEISAGNRSLIIFSLGTRFTWRKSTKELVRTFTKAFAQFPDYDIYWTYDGPNGSAISLDYPHLKVAKWWPQTQMWQSGKVRLFITHGGKGSVSEALFYGVPMLGLPLIGDQRDNLQRMQSKNWGLTLSTNNLTHWKLAKAITRMLSDSSYGETILKASQLYRDRPVSPSDLVTYWIEYIVRHKGAKNLHNPARQLNIIEYHSIDVYFIVYGLLILTIAILRKVNSLL

SEQ ID NO: 23638 - DNA, 9059 bp, DROSOPHILA
tatagaagatccaaaatacaggctgcttgctcagcggcattaaaagatatattctcagctatttaatctaagataatgataaatatcttgttagctggtaaatagttattaagtctctgagaattatattctaagataaattgatataaagatttaaagagattaagatataaagatataaagatgttttcttctatctaaaaacatataatttaacgtggccctcttcgtgttccattccatcactccaaatgcgacgccgcggtatttaaccgcgtttttgttatggcgtagtgcacataggccttcaataaagccttctaatactcagtagcgatcaaacttcattgcaaaattaatatttgttattgttttcgcgatactaaatgccttccgatgcgttcttcaccaaaagtgtaacgcggagctgagataaattcgcgcatcgcattaaaattgcgcttactttcaccgcactcgaattgataaacgtatgtacatacgagcgtactggctcgcatatgtatctggatatgtgtgtatgcagcagatagtttctgtaaagtggatacgtacataaaatgggatagttgtgcggaaacggctcgaactactcgaattacggtcgcaaaatgtttatctttgtggcgtttcgaatttcgaatggatgtactaaaaggccggggactactcattttacaagtgcaaatagcccattggtttcgctcgacttcttataatccaatcgaattataagctcgtatgttttcacaatatacctataacaaatacataggttcttaaaggctgcttccttgagatgcaccccatatcaagcagataaagtacctttatatgtgtatcttgaaatagagtgcctattgactaccaaaaaagttgaactatcttacatgaaaacagatttacagattgagaaaggccaggccgagttttctatagtgcagctactaacctaatgtttaatgcgtttcagtaagccatgatgagggaatcggcgcatgatatcaacatggacacctggaatcagtggatcctcgaggccatatcaaagatcaggtcccagaagcagaggccctccgtgcagaggatttgccaggcgatcggcacacaccacaagttccacgaggacattgtggcagagaagctggaaaaagctgtcgagtcgggagccgtcataaaggtctacaacaagggactgcactcctacaaggcaccaatggccaagcgtcgcgtcaaggtggacaagaacactaatctgtacaaattggtggccaaggcggtccacgacctgggcgaatgcgagggatctaccatcaagagcattgagaactacattcagaagttcaactgtatcgacttgtcgcccaatgtggacttcaaggcggtcattaaggcttcgatcaagaaggccgtggatgccggctttctgatccaggaggggaagctatataaaaagggcaaatccttgacaaccccacggaaatgcgcacccgtctcggaggtggtcataaagggcgaggagtcctgcacccactgctcgggaaattcgcagaagaacctcaacggaatcccagagcccttgagctcctgcaagcagtgtgggatctcattgcacaccacctgcgccaacatcgccggcaggtgcaagtcgcaatcctacgtgctgctctacatgctcgtcaccaagggcactatctgggattgccagaactgcgcggactgcgccgtttgcaaaatgagaaatcggggcccgtgcttactgcagtgcttcgtgtgtaaggaccactttcacttaacgtgtcttgatacgattccagacaaaaagccgaagcatccatacaggtgagtcagtgtaaaattgccagctcaacttgactttacggtctttataccccatttaggtgtaagacatgctccaagcaaggctttgatactccgaagttggttaagaaagacaattcaagaattaaaatggaagctgagaggtaatcttaaatacatttaaacttaactatttatattgaaaggaaaaactattattttagaatgaccccctcgtataaatatgcctccaataagcgccaatccatcaaaaaggatggcaacatcgagagtccttcgacctcgaaactttgtgtctacaacgacggcaacggccagagaaggaaagtgcccgccagcttaagctctagaaaaatgaaccacagtgaggaccagttcgagttccccagcaagcaaaagaggtcgcaaatattacagggaggctacttggctagccaggaaacgcggaagcgaaccttttcggatctgtcctccacgagttcgtccagcgagagtgaagacgaagacgatgaggacgacgacaggaacaggaatggcgatgacaacgaccaagacgagagcacgtcgtcggattcgtgcacatcatccagctcagattctgactccagcgagagttccagcgacacctccgaatgggatgacgaatacgacgaggaagaagactacgacacagatcgcagcacgataagggagaaaaatgtctttgagagtggcaagcagagctgcgctaaacttagtactggcgatggcctaggctccccgcaaaacaatgaattgggtagcgagaattgggggtttgctgccgtggcaaaaaaccccatcgatatatttgtgaaatcgaaacataatagcaatgtcaaaggaattggttactccaagccagcagcaagcacgtttgccacgtcccccgcagccaatcgagtgcaaaagagcactccagtagcttcgtctactcccgaaaaaaactctgcaccgattggcggcatgacaattaagcgtcagactgccaatgggcagaagaaaaagattgttcccttgaagagcatgcccctcgaagcgggcaagtcgtacgaaaaatgcgaggacgacattccgtatctaacagaggagactgttatgaaagttcaactgctagaggagatagaacgcagcagagagacccacagccaagctgatggaaagcgggaaatgaacaacgacgaggatgcgcctggggaaagtacaaagcgggccaatccctttgagaaccagccccttccgcctggtgtcaccgccacggatgtggaattgtatcaagaggtgctccataaggccgtcgttcaaatgtccaataatcatatagagaaggtgaacgacgtaagcctgaaatccggacagaacacccagagtccaaagtcgattcaaattggaaagtgggacattgaaacctggtactccagcccctttccgcaggagtacgccaggttgctgaaactgtttttgtgcgagttctgcctcaagtacacaaagagtcgttctgtgctggacaggcatcagaacaaatgcatttggaagcagccgccaggcactgaaatattcaggcagggaaacatatcggtgttcgaggtggatggcaatgtcaacaagatttattgccagaacctgtgcctgctggccaagttctttctcgaccacaaaacactctactacgacgtagaaccctttctgttctatattctcactaagaatgatcaaagcgggtgccatttggttggctacttctcaaaggagaagcactgcacccaaaagtacaatgtgtcctgcatcctgacgatgccgcagtaccagaggcaaggctacggtcgcttcctgatcgacttcagctacctattgagccgagaggagggacagctgggcactccggagaagcctctctccgatctgggacgactttcctacttttcctactggaaatcagtcgtgttggagtatttgtacaagcatcgcaactacacaaagatcaccttcaaggacatcgccattaaaacaggtctggctatttccgacatcgccctggccttcgagttattgaacttcatcaagctaagaaagaacgatggcgacattaggtatcagattaatgtgaaaattgagtggaaaaaggttttggcccaccataacaaaatggcgaacagcaagacgcgaataatcattgaacccgactgcttgaggtggagtccgttgctgtcggtgtcgaaattacccaacataatcaagcccatttctaatcgtgaatatttgagcaaccaaatggagacaaattctagtttcaaggaaattaatgaagacaaaatcagcgtaaagcagggtgtttccacgtcctcaaaggtgaatcaggagtcttccgagttgtctaccaagaatcggggacccagctcggaaaagttaattgacgaaagggaaaaccagcgaaaacgtgcatatccggaggagttcttaaagtcagcgtctaatgaggcaaagaaacccaagttgactgcacctcagccgaacctcgaggatcagtctttcggtgagctctccgactcatcggattgcaaatcttctaaagatctttcggaacagttgaccaaaagagctcaaaggttggccaaacgcaacgacctcatcccccacaccaacaaaaggaagcatttcgaccggccccttgagaacaatactacttcaaccgaccataatccgccagctcaaagtcaagcggatactgcgggcaccgaaaatggccacaagtcggaagaaacggctgccaaggagaactgcaaaaatgttgtggaaaaggagcatgtcgacaagccagtcaacattatgcccaaactgcggggtaagcagtccaatggtaagcgttccgaggagcctcagttcaatgaaaatcctacatcagacccagtcgcagttgcctcgctgagtccagccaaggaaataactagggagccggttaaagtggcaaaaacggagagtcctggcaaaaaccaggagtcggccaagcacgatgctgaacccaatagcgtcagcgatcaagtgcttgatgcagtggccaagaagacgaaaaagacgttgttctctgatgtagcatcgtacaacactgaggatgtaaaatataattcagaggaaaagccaatggcaatcgcgcaagagccaaaagaaagtcccacggaggctggcataaaggagaccaagccgcttgaagttcctgagcagaaggccaaagcaaagagtcccgagaagccggcaaccgttgcggagacagtattgcagcacgtacatgctcctgtgaatacggaaaagatctccacggaagaaagtaaactggagttggatgtgcactacttaaagctttcgccggactccgcgctcaatccaccagtggcctcagtgcagaaaccagtgcccgagcctccagctccgaaggagaaagctaaagacctccaggccgctcagccaagcgaagccttgcagaagcaaccagaaatagagatggtcaaaaaaaccgaaaccaaaaccgaaacccctgtatctaatccgccatcaaaccgtactgatgtttcctctctcgtcgagcaaccagttaaggctgcgccagaaaaagtggagcagcctatggtcaaagaagctgtcgacatcaaagataaggcactcaaaaaacctgtgccagatgtgcctgtcgtaaagccagaggctactagctgcgaaaagaaaatcgatcacagcaagacgaaagtgtttcacgaaaaggaagccatcaaaaccgatcaacaactagtgcaggttaaggaggaggaaaagtcaaatgcgagagcgccatcggcacccattcccattcgggacaagatccaactaaagggtaacgaacacgcccagttgcagaactccattccctcccagttcccactgaatcagatgccgaactatcacacttcgcagtactggcagtgggaatactatggctacaatctctctcacctggacgcatcgcagaagggacagaagcagttccacaaggacctggccacgacaatggcgtacacgcacaactttacgcaaaacctttatcagtccgccaatctggccatgcagcacgcccatcaccagatgcaccagaccaaggagaagcacaaggtggagcgcaagaacagcggcaagaaggaggagcagaacaaggtggtgtccagtgtcaatgtggtcagcacggctcgcgaggatgcccatgtgcagcattgcaacgagtacgcggccaacaaccaggcggccttgtacaaccagaaatgcgcaagtcagcagaagcaggcgcaacaaatgaagtctctggccaatgtccagaacccagtgccccggcagagcaactccaacgcgccagagtcgacggttcttatgcctaatccagtgatttcccaggcgggatctgtgccggccaagcaaaaagtcgaacacggagtcaactcgacatcggtcatttcgcgcgagggaaagctcaacaagattgggcattctaacattcacgccaccgcccagcacgctaatcttcaagtgggaggcggccagtccgacgtcaacccgaacatggtttacaacacggagtcctcggcgaattcggccatgcagcactacgattgcggaatcagtgcccagatcaacatggactcgccggccaatattggctccgccatcgcgcacggtcctcaggagatctcagccacgtccaatgtgcacatgcatcagccgcacaggcagttctctgactgctccatgcagaaccagccggtaacgacgcccatgcacatgtccatccaaaactcccacatgcagcagcagaacaacttgaatttgaatctggcgccagaaggctcgtcaaatattaacctcttaagtaatccacagcaccagcaccagagcaggaaactcaatgcccaggtaatgcattccactttgtttttgcctgtgtctcgtattaatttctatatacttcactctacaggcggacattgcagttagctcaccgacaccttcgcacagagccacgacgcccaagcaaattcggagcggaaatacccagcaacgcgacgctaagaacgcggcgccacccacaaccacaacaaatactcatcatcagattccccagggcggagcagcggcaaatatttccaagtcgcatcacgactccttgcacaacctgcagttctcgcagcacggacaccagcagaacatgcagcccatcgactacgtgcccatcccgcaaatcagtcagaacttctcggcgaatccctcgaactatgacatcgtgggcatgccggcggtgatccagcagcggatgtcactgaacggatcggtgcactcgctggccaattcgcaccagcgcatcgagcagccatcgtcagcgtgtgccgtcaataacttttacttgcaaaacaacatgccggcagctgagaacgcgcctcgtgtgccggtctccagttctctgggcggtccgccgacggcgggtaacaatgatcagcggcaggcaggtcaggactcgataaccacggcgaatagtagtggcgcaacagcttcgctggcgggcaatctgtgtagcctgtccaagctgcagcagctgaccaattgtctggagagccagccgtgtaacacgtcaccgggggcccaggtgaatctggcgccctctccgcaccatccaattccgcccaactcgacccctccgccgcacctgctcatgcagaacagaaacatctccacgccacccaacatgctgcaaacgcaggtaacgccgctgcagtacaagtactatccgggcaacatgaacatcccgccaatcacgtcggcgcaaaacacgagtcggaacacccgcaacacaccctccgccccggtgcagcacacgtcgacgccgatgggcagcggtaacaataggaccgccaatgtccacatcagcccgaacctgatggccccatacggagcgatcaacagctaccggatgtcgccgcagcaatccccgcccactggaagctacagctcgggaggcgactaccccaactcgcagattccgatgcagatgatgaatatgcaatctcagtaccaggatgcctgcgtgctgcagcgaggcactccatcgaacccgatgtaccccacgtattccccctacttacctctcaacggttctattcgcagataatagatgcgcacattttatatgttactttattaagtatgcctgtacataaatgtgtgctgtaaataaatatatattacgtcaatttaacaatccaatcccccagtttaaaatgattcagcgtcgttggcgagtctgttgtttaatacttttctttattgcttagatctaacattgttcaatcaaagcttgtttattatttcgaatctgctataatctagactaatgtcaatgtgttcttagtttccttctgggcacggctgcccttaacaaaaagagaccaatcttcgaatgttattccgtatgagtttttctattcgtgggttttatgttaaatacacttgggtagaacgatcgattgcttagacggtatgttacgagctatgaatatttatttagcttttgtttgtttttcagaatgaaaactaataacttagcgtagttatgcgtttaaaaggaattcactatgttaagataataaataaataggtggaaaataatggtaaggaataaaggccgagctctgtttgtccagtcaaggtggcacctaaacgacctaaacgacaagataaaataaaacttttctgattcgcaagcggcaggaaatgtaaatttaataagtataggaagcatttagtggtttattgatcacgtattgtatatgatctcattaattgtctaatataattaagtttactttttgggcgaggacagaacacaaatcatggcccatacaaacaacgaactttaaatacattcaaaaatgtaagggaaacaattagaaaactgcctttcgaccaatcatctatacagtacgtatatgtacaaacatcgttacaaatcaattgcaaaggcaaagcaatacaattatcaattactaataatctgagtatatttgagctcgttatggcggtgtcgccctgaactggacacggagttattggaccatagtctgtctatttacactcgctattgcgacgaccattcgttgacggggtaagta

SEQ ID NO: 23639 - DNA, 6814 bp, DROSOPHILA
atgatgagggaatcggcgcatgatatcaacatggacacctggaatcagtggatcctcgaggccatatcaaagatcaggtcccagaagcagaggccctccgtgcagaggatttgccaggcgatcggcacacaccacaagttccacgaggacattgtggcagagaagctggaaaaagctgtcgagtcgggagccgtcataaaggtctacaacaagggactgcactcctacaaggcaccaatggccaagcgtcgcgtcaaggtggacaagaacactaatctgtacaaattggtggccaaggcggtccacgacctgggcgaatgcgagggatctaccatcaagagcattgagaactacattcagaagttcaactgtatcgacttgtcgcccaatgtggacttcaaggcggtcattaaggcttcgatcaagaaggccgtggatgccggctttctgatccaggaggggaagctatataaaaagggcaaatccttgacaaccccacggaaatgcgcacccgtctcggaggtggtcataaagggcgaggagtcctgcacccactgctcgggaaattcgcagaagaacctcaacggaatcccagagcccttgagctcctgcaagcagtgtgggatctcattgcacaccacctgcgccaacatcgccggcaggtgcaagtcgcaatcctacgtgctgctctacatgctcgtcaccaagggcactatctgggattgccagaactgcgcggactgcgccgtttgcaaaatgagaaatcggggcccgtgcttactgcagtgcttcgtgtgtaaggaccactttcacttaacgtgtcttgatacgattccagacaaaaagccgaagcatccatacaggtgtaagacatgctccaagcaaggctttgatactccgaagttggttaagaaagacaattcaagaattaaaatggaagctgagagaatgaccccctcgtataaatatgcctccaataagcgccaatccatcaaaaaggatggcaacatcgagagtccttcgacctcgaaactttgtgtctacaacgacggcaacggccagagaaggaaagtgcccgccagcttaagctctagaaaaatgaaccacagtgaggaccagttcgagttccccagcaagcaaaagaggtcgcaaatattacagggaggctacttggctagccaggaaacgcggaagcgaaccttttcggatctgtcctccacgagttcgtccagcgagagtgaagacgaagacgatgaggacgacgacaggaacaggaatggcgatgacaacgaccaagacgagagcacgtcgtcggattcgtgcacatcatccagctcagattctgactccagcgagagttccagcgacacctccgaatgggatgacgaatacgacgaggaagaagactacgacacagatcgcagcacgataagggagaaaaatgtctttgagagtggcaagcagagctgcgctaaacttagtactggcgatggcctaggctccccgcaaaacaatgaattgggtagcgagaattgggggtttgctgccgtggcaaaaaaccccatcgatatatttgtgaaatcgaaacataatagcaatgtcaaaggaattggttactccaagccagcagcaagcacgtttgccacgtcccccgcagccaatcgagtgcaaaagagcactccagtagcttcgtctactcccgaaaaaaactctgcaccgattggcggcatgacaattaagcgtcagactgccaatgggcagaagaaaaagattgttcccttgaagagcatgcccctcgaagcgggcaagtcgtacgaaaaatgcgaggacgacattccgtatctaacagaggagactgttatgaaagttcaactgctagaggagatagaacgcagcagagagacccacagccaagctgatggaaagcgggaaatgaacaacgacgaggatgcgcctggggaaagtacaaagcgggccaatccctttgagaaccagccccttccgcctggtgtcaccgccacggatgtggaattgtatcaagaggtgctccataaggccgtcgttcaaatgtccaataatcatatagagaaggtgaacgacgtaagcctgaaatccggacagaacacccagagtccaaagtcgattcaaattggaaagtgggacattgaaacctggtactccagcccctttccgcaggagtacgccaggttgctgaaactgtttttgtgcgagttctgcctcaagtacacaaagagtcgttctgtgctggacaggcatcagaacaaatgcatttggaagcagccgccaggcactgaaatattcaggcagggaaacatatcggtgttcgaggtggatggcaatgtcaacaagatttattgccagaacctgtgcctgctggccaagttctttctcgaccacaaaacactctactacgacgtagaaccctttctgttctatattctcactaagaatgatcaaagcgggtgccatttggttggctacttctcaaaggagaagcactgcacccaaaagtacaatgtgtcctgcatcctgacgatgccgcagtaccagaggcaaggctacggtcgcttcctgatcgacttcagctacctattgagccgagaggagggacagctgggcactccggagaagcctctctccgatctgggacgactttcctacttttcctactggaaatcagtcgtgttggagtatttgtacaagcatcgcaactacacaaagatcaccttcaaggacatcgccattaaaacaggtctggctatttccgacatcgccctggccttcgagttattgaacttcatcaagctaagaaagaacgatggcgacattaggtatcagattaatgtgaaaattgagtggaaaaaggttttggcccaccataacaaaatggcgaacagcaagacgcgaataatcattgaacccgactgcttgaggtggagtccgttgctgtcggtgtcgaaattacccaacataatcaagcccatttctaatcgtgaatatttgagcaaccaaatggagacaaattctagtttcaaggaaattaatgaagacaaaatcagcgtaaagcagggtgtttccacgtcctcaaaggtgaatcaggagtcttccgagttgtctaccaagaatcggggacccagctcggaaaagttaattgacgaaagggaaaaccagcgaaaacgtgcatatccggaggagttcttaaagtcagcgtctaatgaggcaaagaaacccaagttgactgcacctcagccgaacctcgaggatcagtctttcggtgagctctccgactcatcggattgcaaatcttctaaagatctttcggaacagttgaccaaaagagctcaaaggttggccaaacgcaacgacctcatcccccacaccaacaaaaggaagcatttcgaccggccccttgagaacaatactacttcaaccgaccataatccgccagctcaaagtcaagcggatactgcgggcaccgaaaatggccacaagtcggaagaaacggctgccaaggagaactgcaaaaatgttgtggaaaaggagcatgtcgacaagccagtcaacattatgcccaaactgcggggtaagcagtccaatggtaagcgttccgaggagcctcagttcaatgaaaatcctacatcagacccagtcgcagttgcctcgctgagtccagccaaggaaataactagggagccggttaaagtggcaaaaacggagagtcctggcaaaaaccaggagtcggccaagcacgatgctgaacccaatagcgtcagcgatcaagtgcttgatgcagtggccaagaagacgaaaaagacgttgttctctgatgtagcatcgtacaacactgaggatgtaaaatataattcagaggaaaagccaatggcaatcgcgcaagagccaaaagaaagtcccacggaggctggcataaaggagaccaagccgcttgaagttcctgagcagaaggccaaagcaaagagtcccgagaagccggcaaccgttgcggagacagtattgcagcacgtacatgctcctgtgaatacggaaaagatctccacggaagaaagtaaactggagttggatgtgcactacttaaagctttcgccggactccgcgctcaatccaccagtggcctcagtgcagaaaccagtgcccgagcctccagctccgaaggagaaagctaaagacctccaggccgctcagccaagcgaagccttgcagaagcaaccagaaatagagatggtcaaaaaaaccgaaaccaaaaccgaaacccctgtatctaatccgccatcaaaccgtactgatgtttcctctctcgtcgagcaaccagttaaggctgcgccagaaaaagtggagcagcctatggtcaaagaagctgtcgacatcaaagataaggcactcaaaaaacctgtgccagatgtgcctgtcgtaaagccagaggctactagctgcgaaaagaaaatcgatcacagcaagacgaaagtgtttcacgaaaaggaagccatcaaaaccgatcaacaactagtgcaggttaaggaggaggaaaagtcaaatgcgagagcgccatcggcacccattcccattcgggacaagatccaactaaagggtaacgaacacgcccagttgcagaactccattccctcccagttcccactgaatcagatgccgaactatcacacttcgcagtactggcagtgggaatactatggctacaatctctctcacctggacgcatcgcagaagggacagaagcagttccacaaggacctggccacgacaatggcgtacacgcacaactttacgcaaaacctttatcagtccgccaatctggccatgcagcacgcccatcaccagatgcaccagaccaaggagaagcacaaggtggagcgcaagaacagcggcaagaaggaggagcagaacaaggtggtgtccagtgtcaatgtggtcagcacggctcgcgaggatgcccatgtgcagcattgcaacgagtacgcggccaacaaccaggcggccttgtacaaccagaaatgcgcaagtcagcagaagcaggcgcaacaaatgaagtctctggccaatgtccagaacccagtgccccggcagagcaactccaacgcgccagagtcgacggttcttatgcctaatccagtgatttcccaggcgggatctgtgccggccaagcaaaaagtcgaacacggagtcaactcgacatcggtcatttcgcgcgagggaaagctcaacaagattgggcattctaacattcacgccaccgcccagcacgctaatcttcaagtgggaggcggccagtccgacgtcaacccgaacatggtttacaacacggagtcctcggcgaattcggccatgcagcactacgattgcggaatcagtgcccagatcaacatggactcgccggccaatattggctccgccatcgcgcacggtcctcaggagatctcagccacgtccaatgtgcacatgcatcagccgcacaggcagttctctgactgctccatgcagaaccagccggtaacgacgcccatgcacatgtccatccaaaactcccacatgcagcagcagaacaacttgaatttgaatctggcgccagaaggctcgtcaaatattaacctcttaagtaatccacagcaccagcaccagagcaggaaactcaatgcccaggcggacattgcagttagctcaccgacaccttcgcacagagccacgacgcccaagcaaattcggagcggaaatacccagcaacgcgacgctaagaacgcggcgccacccacaaccacaacaaatactcatcatcagattccccagggcggagcagcggcaaatatttccaagtcgcatcacgactccttgcacaacctgcagttctcgcagcacggacaccagcagaacatgcagcccatcgactacgtgcccatcccgcaaatcagtcagaacttctcggcgaatccctcgaactatgacatcgtgggcatgccggcggtgatccagcagcggatgtcactgaacggatcggtgcactcgctggccaattcgcaccagcgcatcgagcagccatcgtcagcgtgtgccgtcaataacttttacttgcaaaacaacatgccggcagctgagaacgcgcctcgtgtgccggtctccagttctctgggcggtccgccgacggcgggtaacaatgatcagcggcaggcaggtcaggactcgataaccacggcgaatagtagtggcgcaacagcttcgctggcgggcaatctgtgtagcctgtccaagctgcagcagctgaccaattgtctggagagccagccgtgtaacacgtcaccgggggcccaggtgaatctggcgccctctccgcaccatccaattccgcccaactcgacccctccgccgcacctgctcatgcagaacagaaacatctccacgccacccaacatgctgcaaacgcaggtaacgccgctgcagtacaagtactatccgggcaacatgaacatcccgccaatcacgtcggcgcaaaacacgagtcggaacacccgcaacacaccctccgccccgcccgaacctgatggccccatacggagcgatcaacagctaccggatgtcgccgcagcaatccccgcccactggaagctacagctcgggaggcgactaccccaactcgcagattccgatgcagatgatgaatatgcaatctcagtaccaggatgcctgcgtgctgcagcgaggcactccatcgaacccgatgtaccccacgtattccccctacttacctctcaacggttctattcgcagataa

SEQ ID NO: 23640 - protein, 2271 aa, DROSOPHILA
MMRESAHDINMDTWNQWILEAISKIRSQKQRPSVQRICQAIGTHHKFHEDIVAEKLEKAVESGAVIKVYNKGLHSYKAPMAKRRVKVDKNTNLYKLVAKAVHDLGECEGSTIKSIENYIQKFNCIDLSPNVDFKAVIKASIKKAVDAGFLIQEGKLYKKGKSLTTPRKCAPVSEVVIKGEESCTHCSGNSQKNLNGIPEPLSSCKQCGISLHTTCANIAGRCKSQSYVLLYMLVTKGTIWDCQNCADCAVCKMRNRGPCLLQCFVCKDHFHLTCLDTIPDKKPKHPYRCKTCSKQGFDTPKLVKKDNSRIKMEAERMTPSYKYASNKRQSIKKDGNIESPSTSKLCVYNDGNGQRRKVPASLSSRKMNHSEDQFEFPSKQKRSQILQGGYLASQETRKRTFSDLSSTSSSSESEDEDDEDDDRNRNGDDNDQDESTSSDSCTSSSSDSDSSESSSDTSEWDDEYDEEEDYDTDRSTIREKNVFESGKQSCAKLSTGDGLGSPQNNELGSENWGFAAVAKNPIDIFVKSKHNSNVKGIGYSKPAASTFATSPAANRVQKSTPVASSTPEKNSAPIGGMTIKRQTANGQKKKIVPLKSMPLEAGKSYEKCEDDIPYLTEETVMKVQLLEEIERSRETHSQADGKREMNNDEDAPGESTKRANPFENQPLPPGVTATDVELYQEVLHKAVVQMSNNHIEKVNDVSLKSGQNTQSPKSIQIGKWDIETWYSSPFPQEYARLLKLFLCEFCLKYTKSRSVLDRHQNKCIWKQPPGTEIFRQGNISVFEVDGNVNKIYCQNLCLLAKFFLDHKTLYYDVEPFLFYILTKNDQSGCHLVGYFSKEKHCTQKYNVSCILTMPQYQRQGYGRFLIDFSYLLSREEGQLGTPEKPLSDLGRLSYFSYWKSVVLEYLYKHRNYTKITFKDIAIKTGLAISDIALAFELLNFIKLRKNDGDIRYQINVKIEWKKVLAHHNKMANSKTRIIIEPDCLRWSPLLSVSKLPNIIKPISNREYLSNQMETNSSFKEINEDKISVKQGVSTSSKVNQESSELSTKNRGPSSEKLIDERENQRKRAYPEEFLKSASNEAKKPKLTAPQPNLEDQSFGELSDSSDCKSSKDLSEQLTKRAQRLAKRNDLIPHTNKRKHFDRPLENNTTSTDHNPPAQSQADTAGTENGHKSEETAAKENCKNVVEKEHVDKPVNIMPKLRGKQSNGKRSEEPQFNENPTSDPVAVASLSPAKEITREPVKVAKTESPGKNQESAKHDAEPNSVSDQVLDAVAKKTKKTLFSDVASYNTEDVKYNSEEKPMAIAQEPKESPTEAGIKETKPLEVPEQKAKAKSPEKPATVAETVLQHVHAPVNTEKISTEESKLELDVHYLKLSPDSALNPPVASVQKPVPEPPAPKEKAKDLQAAQPSEALQKQPEIEMVKKTETKTETPVSNPPSNRTDVSSLVEQPVKAAPEKVEQPMVKEAVDIKDKALKKPVPDVPVVKPEATSCEKKIDHSKTKVFHEKEAIKTDQQLVQVKEEEKSNARAPSAPIPIRDKIQLKGNEHAQLQNSIPSQFPLNQMPNYHTSQYWQWEYYGYNLSHLDASQKGQKQFHKDLATTMAYTHNFTQNLYQSANLAMQHAHHQMHQTKEKHKVERKNSGKKEEQNKVVSSVNVVSTAREDAHVQHCNEYAANNQAALYNQKCASQQKQAQQMKSLANVQNPVPRQSNSNAPESTVLMPNPVISQAGSVPAKQKVEHGVNSTSVISREGKLNKIGHSNIHATAQHANLQVGGGQSDVNPNMVYNTESSANSAMQHYDCGISAQINMDSPANIGSAIAHGPQEISATSNVHMHQPHRQFSDCSMQNQPVTTPMHMSIQNSHMQQQNNLNLNLAPEGSSNINLLSNPQHQHQSRKLNAQADIAVSSPTPSHRATTPKQIRSGNTQQRDAKNAAPPTTTTNTHHQIPQGGAAANISKSHHDSLHNLQFSQHGHQQNMQPIDYVPIPQISQNFSANPSNYDIVGMPAVIQQRMSLNGSVHSLANSHQRIEQPSSACAVNNFYLQNNMPAAENAPRVPVSSSLGGPPTAGNNDQRQAGQDSITTANSSGATASLAGNLCSLSKLQQLTNCLESQPCNTSPGAQVNLAPSPHHPIPPNSTPPPHLLMQNRNISTPPNMLQTQVTPLQYKYYPGNMNIPPITSAQNTSRNTRNTPSAPPEPDGPIRSDQQLPDVAAAIPAHWKLQLGRRLPQLADSDADDEYAISVPGCLRAAARHSIEPDVPHVFPLLTSQRFYSQI

SEQ ID NO: 23641 - DNA, 2747 bp, DROSOPHILA
cgaggaacataataatgttcttggccttctgggaattgggttgtggtagttgtagcctcttggtgatctcctcgtcggcgatgttgtaccagtactggggatccatctcctccgggggagtgtacttttcggtagccacatccgtggaaaacttcaacttattcgctgcctgtcctgtcaactccagaacgttgtgcacctcctgtactccacacagtgctgttccggccaaggccagaaggagcaggattgggagtactaactgccgctgggaggaacccatatctaattgctctgctgctgatgaaatatcacttactacaccgaatttaccgaaaagtacggacttatataccttgattactgtgctcccagacaaagatgcctaaatttaggtttatggtcctctgggcatatctcgtctggaatgtcgtatctttcataatatcagctctgtctagcatggtgcccagttaggtaggcaaggaaagggtataagctattcaactatcataccccgttttccaccatctaaagcgtatcttttggttcgttgggatccattatttgaccttcgttacttcaaaagctacaaatacgctgcccatttgtctttctcatgattcccaaaatggtagactcacctttgcaaagaacttaccgagcattctgaaccatttcagtcacgtttggggttataaagatctttaagagtattatgatcctaatcttagtagaacgtgtagctaacttatcacagcatttttgcgctttcactctgggtggtattttcgacagcatctcgtggccgaagattttattagaaagaaaacatttttatatagtatcactttacttttgccaaataaactttttcgtattccttgctattttatgatactcttatatggcaatatgaaatttttaatctttgaaaataatgtcataaagtactcaaaattttaatatttcacattctaaatttaatcaaaattgtattatgttaaggcgcagtctaagccatctggacaagctgccgaaggcaaaggtggccgaatggctggccgggatcgacaccattatttgcagcacggatggggtgctgtggcaggagaatacccccattgagggctctgtagaggcattcaatgccataatttcaaagggaaagcgatgtctcatagccaccaacgagtgctgcctaacaaacaaggatctgttccagaaggccaagtgcctgggcttcaatgtcaaggagcaggacattttcagctcgtcgggtgccattgcgagttaccttagcgaccggaagtttaagaagaaaatcctcgttttgggtggtgacggtatccgcaaagatctgaaagaggccggattctgttccgtggtaaacgatctgcagccaaatgaccagaaaaaaatcgacttcgtcaggagcttagttctcgatccggatgtgggagctgttttggtggccagagacgacaacatgatagcgaacgagttgcttgtggcctgcaactatcttcaaaatcccaaagtcttgttccttaccacttgcattgatggattccagccatttgggaaaaagaggatcccagatgccggatctctggcctctgccatcgagataattgtacaacgcaagcctatcgttttgggcaaaccgaatcagcggattttgggcaagttgatgaagtctggcgaaataaagcccgaaaagacgcttgtcattggaaactcgtaagttcaatgattacttttattgaggatcatactttatcctctttcctttaggcttaaatcagacattttatttgcaagtatatgtggtttccaatcattattggtgggctgcgataacggagcgatcgaaaaagccgagaaaattaaaaaagagggagatgagaagaaaatgaaacttgttccagatgcttttctctccggtcttgcttcttttggggagtatttatgcatctaggtgatgtcgggcaagaaaagcgatttccatatccaaaaaacatacccagctgaccaaaaagtaatttagatcatattcaaaattcaaactaagccgctcaaaagctgaacagctgttttgtttctgagcactcctgtgtgctaaatgatttcggtattttggcttttagcacaagtcgcgagtcagtgctaccagtatatttgtaaatttttagttttaaaatttgtaatctaaaatagtaaagcaaattgccagttttctgttgaaactaatagttttgcatcaataatcgcgaagaaaaagttgaattaatgtgataataaaaaaatacatgttgttggtatatttttggtatttgatttgattgcttcgtggtcgcactgaaagaagaagagtaataaaacatcgaactatcgaagaacgatatgccccgataggttcggacaagacaaagaacaaaatgttctctgcaaaagctgtgctcgcttaaaaacgcaaaaagtcagtgcatctagtgcattgtcagtggtgcataagattgttctataaatagcgaaaaatgaaaataaactgcaggcgaagtagaaaaaacaccttgagttgagtgcaacggctgtgcgagtgtgtgtgcgtgagagcgagagtgcgctcgtgtgtgtgtgtacacatgcatgttgataaacgaaaataaaacaagggaccgccccccgccgtagaatagccaccccgcaaagttcatcaccctaaccagaatcggtggcactgc

SEQ ID NO: 23642 - DNA, 747 bp, DROSOPHILA
atgttaaggcgcagtctaagccatctggacaagctgccgaaggcaaaggtggccgaatggctggccgggatcgacaccattatttgcagcacggatggggtgctgtggcaggagaatacccccattgagggctctgtagaggcattcaatgccataatttcaaagggaaagcgatgtctcatagccaccaacgagtgctgcctaacaaacaaggatctgttccagaaggccaagtgcctgggcttcaatgtcaaggagcaggacattttcagctcgtcgggtgccattgcgagttaccttagcgaccggaagtttaagaagaaaatcctcgttttgggtggtgacggtatccgcaaagatctgaaagaggccggattctgttccgtggtaaacgatctgcagccaaatgaccagaaaaaaatcgacttcgtcaggagcttagttctcgatccggatgtgggagctgttttggtggccagagacgacaacatgatagcgaacgagttgcttgtggcctgcaactatcttcaaaatcccaaagtcttgttccttaccacttgcattgatggattccagccatttgggaaaaagaggatcccagatgccggatctctggcctctgccatcgagataattgtacaacgcaagcctatcgttttgggcaaaccgaatcagcggattttgggcaagttgatgaagtctggcgaaataaagcccgaaaagacgcttgtcattggaaactcgtaa

SEQ ID NO: 23643 - protein, 248 aa, DROSOPHILA
MLRRSLSHLDKLPKAKVAEWLAGIDTIICSTDGVLWQENTPIEGSVEAFNAIISKGKRCLIATNECCLTNKDLFQKAKCLGFNVKEQDIFSSSGAIASYLSDRKFKKKILVLGGDGIRKDLKEAGFCSVVNDLQPNDQKKIDFVRSLVLDPDVGAVLVARDDNMIANELLVACNYLQNPKVLFLTTCIDGFQPFGKKRIPDAGSLASAIEIIVQRKPIVLGKPNQRILGKLMKSGEIKPEKTLVIGNS

SEQ ID NO: 23644 - DNA, 2948 bp, DROSOPHILA
gcctgttttgtttgttaccgtgggagtcgtgggatttgaagactcagactcagcctgtgattacgatgatggtgacccaaagaagattccattagtcactgctcagacaggcctttttcggagttcaaatgatagtgtttccgattgtttgttccagaagcaacacacatatgtatgtatgcagagtattaaaaagcaagcctacacaaattcccgcagtttgtatgcaaattctattctgtataatattttttcgaaaaccgaaaatccaaagtgcaaaatgtgttctggaaaatgccagaagaatttctcgacacttttacgccccctttactctttagatatataggaattttcataattttctacctgttgagagtgttgatttgacgcggctaatataaaaatactttggccactaaatgactttatgaactattttaagcatctgccactttttcttatttctcgcttttcctctgctgagtcatgtcgcgtgcgttttctatcagacgaaagagatgacgtcgctcaaaacaaaggaattttcaagcattgttttgaaaattataccagcaatttgcttgaattagtagctcatcaatcataaagttttacttcttaaaatatatcatcgcgaacatatactatatcaaaaacaaagtgccgccctctagtgttcatatctaatttaccagtgatgcaagtacaagttcagctagttacaaacaagtatcttcttttcatttgctgcacctgttaaaatggtacattttcatacaatctcatatatgttttctgttcctaacattttagggactggccctgtagtggattgtgtacccaacacagccaaacaaacagtgaggcaatcacccttcgaaatgggccaaaagcacaccaacaccagtgcagcagtgcatgcactcgatggctgtgtgtgcgtgtgaaagtagtgaaagctgaaagccgagggcgaacggggccaatacttatgcttatgcaaggcagccgagatgccgagatgccgacgccaccgccccaaagggaggccaaaaacggaaaacaggcgacattcatcgcaggacgtgaagtgttcactgtactttgggagcggaggataagtcaagacgtcaacagaggaagctgtacgatggtgagctccaaaaataaacaaaaatcacaggagtgcaactcctagctcctaaaggtgttcacgagtatgcagtggaaagtagttgtagtagtgctttcggaggcactttggggttatatgtcggattgggtttcactttcttcgctgcattacagttcgccccccactcgctgcccgtgacgtcacgactgttgcttctggtggtgacactgctcttctgccccgtgcaggcgcatctctcgaagcgaagctactcggatcagagtgtccacggctacatgaccgaggtgccccaaaggataacaggtggtacatagtggcagcgagataaccctttcgtttccaatgcattctagcgcacctgctggtggaacgaggtgtgtaaggaggagttccagagcctcttccgctgcaagtgcccccagttctcctactgccggtaagtttccgtttccggccgagtgcccggaatgcaatgcgacgggggaaaccgaaaccgaattagatttgcttcccccgattcggttttatgcaattactttcgcatttcccagctcgccgggacgctactacaatgcctactgctcgatgacggataccggttatatttggacccagccgaactgggattggggggcgtaggatgaagccgctccggactttgcccccgccacgccccctcaccaacaacacagctcgctgtgacgtcaaacacactgactgccgaccaaacgcctccgcaagccaaacgaaaattattccaggaggatacccacttggagcctcctgctcagcctccaaaaatactctagtggagatgggctagtctccctcgttgttatcgcacctcgcgctgactaaaaagtaccaagtgtcgcgttacttttcgcacgcactgtttccgcgctgctgttggaaaatcaatataggctttccaattcacgacggcttgtggcagggccacagtgaaaccgaaacgactagttctgcacgtttttaagttacattaaaagaaaccataagatgttaaatttaataatatttatatttatacgttcctagcacttttttaataaatttattcgagactagagtgcaacctttttgaactgtcttgtaagataaagaaatgatctcattggaatgaattttccactggactgactatgttcgatgatttgccccactgtgcaggaccaaggcgcaggcgtcgcagtgaaagcgaaaatcgaacagcgtgggagtgcgtgtgcgagtgtgtgtgtgtgtgtgtgtctggagcagagtcagttaatctattgccagctcgacatatagacaccgccaacagatgttggcagtgaggaaaatcgagtgatagaagccagaaccgagtcgccgttgttttgggtgaagaaaatcgcaggacttccagaaaatgtcgcgtctcctgttcgtggcgctgctagccataagcttgggatatgtggcgtccagcagcagcaaccacctgccagcgggcttggccatggacctgggaccaggtgtcaacctcaacgagcgcttcttcgaccaggtgcgggcgctcatcaagcggaggctccaggagaaggggctcgcgaagccggaacagccagagctggcaatgccactgaccgacgatgatgcagtggccctgcagaaccaacgcagctacgacaacgtgccacttccggcggccagtgtgccgactcccgtgctcgtggagaactggcccaccgagcagcacagctttggccaggtcaccgccgtggccgtggatccgcagggtagt

SEQ ID NO: 23645 - DNA, 609 bp, DROSOPHILA
atgcaaggcagccgagatgccgagatgccgacgccaccgccccaaagggaggccaaaaacggaaaacaggcgacattcatcgcaggacgtgaagtgttcactgtactttgggagcggaggataagtcaagacgtcaacagaggaagctgtacgatgttcgccccccactcgctgcccgtgacgtcacgactgttgcttctggtggtgacactgctcttctgccccgtgcaggcgcatctctcgaagcgaagctactcggatcagagtgtccacggctacatgaccgagcgcacctgctggtggaacgaggtgtgtaaggaggagttccagagcctcttccgctgcaagtgcccccagttctcctactgccgctcgccgggacgctactacaatgcctactgctcgatgacggataccggttatatttggacccagccgaactgggattggggggcgtaggatgaagccgctccggactttgcccccgccacgccccctcaccaacaacacagctcgctgtgacgtcaaacacactgactgccgaccaaacgcctccgcaagccaaacgaaaattattccaggaggatacccacttggagcctcctgctc

SEQ ID NO: 23646 - protein, 152 aa, DROSOPHILA
MQGSRDAEMPTPPPQREAKNGKQATFIAGREVFTVLWERRISQDVNRGSCTMFAPHSLPVTSRLLLLVVTLLFCPVQAHLSKRSYSDQSVHGYMTERTCWWNEVCKEEFQSLFRCKCPQFSYCRSPGRYYNAYCSMTDTGYIWTQPNWDWGA

SEQ ID NO: 23647 - DNA, 3456 bp, DROSOPHILA
gacatcccatgcgaggatcttaatgcccagctaagggctgccaagttcggttatcgggccaagttcatagcacaaacgctgcaagagatccagaaaaaggggggacaaaactggttcataagcctaaagagcatgccgttcgaaaaagctcgcgaggagctgacactgctacccggaatcggatacaaagtggccgattgcatctgccttatgtcaatgggtcacttggagtcagtgcccgtcgacattcatatttacagaattgcccaaaattactacctgccacatctaaccggccaaaagaacgtaaccaagaagatttacgaagaggtctcgaaacattttcaaaagctacacggaaagtatgccggttgggctcaagctgtaagtacactgaaagttgcaatttagtctgtgtgtttcttataatatcattatttcagattctcttttctgccgatttgagtcaatttcaaaatacttccacagttgcttgtaagaaaaaatccaataaaaaacctaaaaagtgatcttatctattggattaaaaaaaaaaatattcctacttgtaatatttgaatattaaaatataatagaaatgtatatactaatgtatatataaatatatatctaaacagagaaagaacttgatactgggtttcatatatcttttttttattgctaaacagatgtaattgattaaataaagtgtacattaaatgtccgttttgtatatacatcgccatatttatgtgtacagattgcgctcgaatttgaaatttaggatattcaaaatgtgttgtgtccgttttagaaattcatcacctaaggaaaccacttttagatacgcatacagatgtttaggatatgcttatgaagtggttattcgaatcttttattggagtgagcactgtacaagtgaaagtttcagtatctgtatccgcattcgtatccgtgtccgcatctttatatctgtccgtatcttgataaaagtcctcgtctacaggcctccattcgcctccgctgatcccgccgccccctgagttccctgttgttgttgctgctgctgctgctgctggagcttgctgctctgggagaaatcgatacaggcgccggaggtgagatcaatctcctcggaatcggatccatcggaaccctcgtcggagtgtccggatagggcggccattccgcccagttccatgccgtgcgacggcgccttatagagctttagttctgtataggtcttcgatagcttatcctgatccgtggcctgctggtgtccctggtgctgttgttgctgatgctgctgctggaatgccgggtgcatcatggtgaagctccccgaattgggtccattgcccacctccgccagttccgaatccttgctcgcggaagagaggttctccggcgtctggctgggcggtcgagccgtagctccgttgccggatccgccctgcaccgctccaccgcccatgacggggggcgtgcccaggctgaggcagcgcatccgccaggcgtcctggaggagctgcagtcgtgcctgcttgcgccacttggcccggcgattctggaaccacacctgcaattaaaaaaggtaatttactctatatagatttggccttttgttgttggatctaaaaacgaagatctagattcatattcttttaatatttttgaaatatttgcaagattttatgagataataatccaaaaggccaagtaaagctaaaattttatttttatatttttgaccaagttaatcaaaatcacttcaatttccttatatttgttgtacatattgcacattgcgctcttacaactcagtgtgttttgttttaattcattaaattatattttttatacaagaaatgggaaattgaattaaatgaaataaagaaacgtgtactaattatttctaagccattaaaggtaagaagaagtaccttaactataaataacaccccaaaagagttaattcctaatcacccattacgaatcacccaaattctatataggattttaaatcggatctcgcaggtttgcggatcaactgggtggatactttgcctggtctgtagggggaattcacctggacgcgtgcctcgctgaggctgatcctcagggccacctcctcgcgcaggaagacgtcgggatagtgggtcttctggaagagtgcctccagctcctgcagctgctgtggcgtgaaggtcgtccggttccggcgctgtcgcctacggccaaacatatactccgtgagcagatcgccgggcagcggtgatataaaaggacctgccattagtgttcaatgtttcggttactcgaatgcttattaattgtacactttagctgcacgagtggacttgttttgtgaattttctagtttttcgtatgcttaatatgacacacaaaaataaaactgtcgtagtgtcacgactataatgacattaggttactatgttactgaacactttttttttagttttgaatactgtgttgctagatttgtatattatttcatcacgtttccttttttgtttaggttatagattgatattgattgtggtttttcataatttttcacttatggcacacgaaacaaaaattgtgttttaacatttgatttctaaatcgccaacagttggcgccactttcaaaaaaaaaaaaaaaaaaaaatagttggcaattctagcaaaggttgatttcgttgcttttcgctgagcgtttggccagcgactgtggaaatgcaggcagcatcctgcggcttttatgcagttgccaaaggactcgggctaatatgtatgtacgtgtttgtctcgtagtatgtgtgtgagggtgcgcctgcgactcgctttataattaagaaactcacacacacacttacaatgcagctaattgcatttttgtaaagcttacttgttgccttagcaagtgtttaaaatttagatttattaaaaaaaatgctattcaattattgaaagggcttatttgtaattgttttttatatattattttttatgttttaattgcatttttaaaattatttttgtcctgctctgttgtttttccctctctctctatctctggctgttgccatctccctctttccttggccacgctgcgcagcctccgattgttaatctcgctctctcatttgttgcagctaaagctttctcccgcggctctcctttctctcaggatgttgttgttattgtcttctcgttttgacttcgttaaattacggcacaagcacaaaaacgtcataagcgttgttgttttgcgcacagtgggcaaaaagtctaaaggagtcaacaaaaaaacacattcaaaatattatacaacagttttcaagctttaagttgcattatcgaaatggcgatactaagcataagcatagtactattgtttataaaaagtaaataataataattatatcttatgtaacctgaatttactgat

SEQ ID NO: 23648 - DNA, 946 bp, DROSOPHILA
atagtaacctaatgtcattatagtcgtgacactacgacagttttatttttgtgtgtcatattaagcatacgaaaaactagaaaattcacaaaacaagtccactcgtgcagctaaagtgtacaattaataagcattcgagtaaccgaaacattgaacactaatggcaggtccttttatatcaccgctgcccggcgatctgctcacggagtatatgtttggccgtaggcgacagcgccggaaccggacgaccttcacgccacagcagctgcaggagctggaggcactcttccagaagacccactatcccgacgtcttcctgcgcgaggaggtggccctgaggatcagcctcagcgaggcacgcgtccaggtgtggttccagaatcgccgggccaagtggcgcaagcaggcacgactgcagctcctccaggacgcctggcggatgcgctgcctcagcctgggcacgccccccgtcatgggcggtggagcggtgcagggcggatccggcaacggagctacggctcgaccgcccagccagacgccggagaacctctcttccgcgagcaaggattcggaactggcggaggtgggcaatggacccaattcggggagcttcaccatgatgcacccggcattccagcagcagcatcagcaacaacagcaccagggacaccagcaggccacggatcaggataagctatcgaagacctatacagaactaaagctctataaggcgccgtcgcacggcatggaactgggcggaatggccgccctatccggacactccgacgagggttccgatggatccgattccgaggagattgatctcacctccggcgcctgtatcgatttctcccagagcagcaagctccagcagcagcagcagcagcaacaacaacagggaactcagggggcggcgggatcagcggaggcgaatggaggcctgtag

SEQ ID NO: 23649 - protein, 261 aa, DROSOPHILA
MAGPFISPLPGDLLTEYMFGRRRQRRNRTTFTPQQLQELEALFQKTHYPDVFLREEVALRISLSEARVQVWFQNRRAKWRKQARLQLLQDAWRMRCLSLGTPPVMGGGAVQGGSGNGATARPPSQTPENLSSASKDSELAEVGNGPNSGSFTMMHPAFQQQHQQQQHQGHQQATDQDKLSKTYTELKLYKAPSHGMELGGMAALSGHSDEGSDGSDSEEIDLTSGACIDFSQSSKLQQQQQQQQQQGTQGAAGSAEANGGL

SEQ ID NO: 23650 - DNA, 4913 bp, DROSOPHILA
tggatgaccaactgcgcccctctgaccgtatctataaggtcgttctaacggcgcggcgtacgtgctggagcccgaaatggaaatgcggcagtgcttccaactgtccaaacaaggagtcccgatcagagctagttgggtgacggagtgctggggggaggaaaccgctggcgggtcaacagagttcagacacacataggtattaactagaagtcgtgactaagcctaatctggagcagggcatccctggttgctaatttaactaagtgaatgccagttccagttagataacgcccggcaatagaaccgtgtcaggacacggactgctccaaatggctaaggtcacgcgaagtgcaataaaagaaggcctatcccttcaaaggaacggagtgtgggtcccccaaggacgccagtggagtgcggaagtgcgctacagccgaaaccacagagtacttgagttcgttgggccattcttctcctggctttcctgtttgtcctgcatttgcgtgttccgttttcgcagcaggagggtttctttaccttctgggtgttattgattgcaacaggctgtgtgtgatgcccgcccccttgaaaccagaatagaaatccaatttggcgctcacctgtttttgtttttgttgttgctgcagtccttgaatcgaatccttgagtccttgagtccaagtatgtgtgtgtatgggtgtaatgtgtgcttgatgaccagtgtccgcaaatcgaagtgctagcgaaagcaactgaaaggggttggctgcattaaagcccgcgaactgcgtacaatttgcagctaaatttatgcgcaacttcgattaaacataaaacaactcagcgaacagcaacaaaaacaaaatatcagcctgtgagaccagctgcttgtagcaaccaaatgttagactgaaacgaatcaatcttccgtggctagtattattttcacttttggcggttctccagtctttcgcaacagaatgcgtttacttcccatctgagcacggtcacactgcccaagagtccagctgcgtcgttgaaaaatattttcgatgcctcgaaggttgatttatttcagaggaaatagcaggaaataaagttgaaaacgcagattacgagcagcagccgccaagaggagtgcacaatgaacatttacaacaagttgcgggccagggagcatggctacggtgagtctttcgcttggcgggagaatctcacttttggcgctcgaatttcctgcgatcaaaggtgttgatttttaaaaggtttcaatgggttttcctggccatctggtcaatgtgcatcctgcacggccacctgaccacagagcattgcctaaggggtgaagaaacccgactagttgctccactggaaactgctgatcgtgcagaagttccgtggaaaacaaagccacggcactattttcatggtttctcctctggttttcgtttttctttttaggcaatgagaggacctacgacttcgccctgcgccgcctttccgtggccaaggaggacagctggcggggcatcgcgccggccaactactgcccagacttcaatccggaaccgccgatcttctccgccaagttcgccaactgcgatggctatcggcacatcctggcgatcgccaacgaggacggcaagatcacgctgcaggacaccacccagcgcaaccaccagccggaggagcagtccctggtgggcccgcagtgccacttcaacgccgttttcgatctggaatgggcacccggccagatgcgcttcgtctccgcctcgggcgatcacactgccagactgtgggaggtggcgggctccggcatacgcggcctgaactcctatgtgggtcacacaaggtccgtcaagtcggcggcctttaagcgcaccgatcccgctgtcttcgccaccggcggccgtgatggcgccattctcatctgggacatcagggccaatctcaatatggacctcacgtcacgcgtggacaactgcatctacagcggtcacacgggcggaccgggcacgccagtctcacagcgcaagcagcgcacacgcactcccaagatggccggaggaaccacctcgagcagcatcactggcttggccttccaggacaacgatacgttgatctcctgtggtgccggtgacggagtcatcaaggtgtgggacctgcggcgcaactacacagcctacaaaaaggagccactgcccaggcacaagctgccatatgccggcagctccaccttccgtggattcaccaacctcattgtggacgcgtcaggcacgaggctgtatgccaactgcatggacaacaccatctattgctacaatctggcctcctactcgcagcgcccgctggcgtgctacaagggactccttaactccacgttctacatcaaatcctgcctcagcccggacggcaagtatctgctgagcggaagcagcgacgagcgggcttacatctggaacctggaccacgccgaggagccgctcgttgcactggccggacacacggtggaggtaacctgcgtggcctggggctccagccacgattgccccattgtcacgtgcagcgatgatgcgcgtcacaaaatctggcggattggacccgacctggatggcctcagcgaggcggagcgggcggaaaagtaccgaggaactgcctcctacgtcagggagttcggcaagaaggcatttggtccgtctagtggaaatcacaagtacaatcttcgagatctggagtccacgccaagatctctgaagcgccttatggatcaaaatgaaaggacgccaggttccgtggaaaagacgacgaccaagcgttcgttcctggaaatgctgggcgtagctggccaggagacggaagccacagaacagccccagaaacgggcgaagccactggagtcacgtggaaggcggctctttggaccttctagccaggaaactgcttgcaggcacatacaacttcagtccataaacgaggaagatgcctcgccgagcaagagacaaaaggagaactctgccgcggaggatgtctcaccactgcacaagcttctcagcacaccaagtcattcccctttgagtgagaatgtcaaccatgtgtacacctccccgccaaccacgtcagcggcagcagcagcggtggctgcagacgcgcttaatccgccgccgatctccgctgccatctactcgcccacctccaacctgcccaattacgtgctggatggcgaggcaccgcacctgggcatcatgtcgcccaagcggaaggcgaaggagaaggtggactggctgacgaatatccgcaaacagaagctgatgagtggcagggcccatgtgacgctcagcgaaaagatcagcgaggagcagcaggccgatgtgctggcatccccgcgcctccagagtctgcggcagtcagagtgcagtcccaggatacacgcctcgccccgcagacgcatctcccatacggacggaggcggtggcacgccggctggcagctcctcgcactcccattcccaatcccagccaaaaacgcccacttccagtaggcgaaacagcgagacgacgctcctgcgattctttagcattcagagaagtagcagtgtgccggcggaggaaacaacgacaacgaatgcggctccctcctcttctgatccccatcccccggcagtgactgcgcccgcagccacgcccctcagcatgcgcacgcccacgacggcggtgggcagcgattgacgcggagcctcgagccacagcaccattattgcacttgtagttttaagcggacattgtttaagttattttatgtagatagtaggttgcatctatcgcgggacgagttggtaaccaactccccgccctctgtacagagccaaaagatacgaaagactaacgtacccgaataaaagtaactccattttaaagctgccttgattgattctctaaaaactaactcgtttaatgtactgtttattcaattttttttttggcataatcaaaacggtttatatgtggcactcatggctaacaagtggcactcagaccattttactgcagctttttctgttgctcctgctgctccctcttggccgcattattaatccgcatggtctggacaagctgcttggccaccccagcgagcagtatgatgtgggtgaagtgaagggcagcgctggagaagttcgtactgggataggtgttccagcagtactcaatcagtccgaggatcaggcagcgcacgcccagcgagtacggcgtcgaccaggccaaatagggtagcgagtggaagtaccagacgtagaactgatagtgcaaggatcgggagcaggccacgcccaccaggttgcacaggaagaacggcagcagggccagctgggtgcagcgatcgaagtggatgccatagcgttccggttccgcctgtgcgggtgccggagtggcctttcctccagacgccttctgcaggctcttctcgaaggccttcaggaaggattgctgctcggttgtaaacttcttctggtccttgtccttgtccttttccactttctttggtcttttctgcgcgttcagctcgaggttctgctgggctatttgcggctgcagctgatcctcaatacggcgcaggcgcacgtagctctggaaaaaggtccaagtgggcttggcgaaggccagcaggagcagcagatgcaggcccaaaagcgaaacgtggaaggtgcggttctcgaacagatctctgctcaggaagcgatagttgaccgtccacttgtgctcgaagatgcgtcccaaatcaaagctgccccgcagatactccacaggatgggtgagcaggaaaggagcgcccagcagcagttgtatcactccgcagacagccagctgcaggatcgtccgcagaagtcccaggttggccaagtagaacagcaagag

SEQ ID NO: 23651 - DNA, 2639 bp, DROSOPHILA
agcacggtcacactgcccaagagtccagctgcgtcgttgaaaaatattttcgatgcctcgaaggttgatttatttcagaggaaatagcaggaaataaagttgaaaacgcagattacgagcagcagccgccaagaggagtgcacaatgaacatttacaacaagttgcgggccagggagcatggctacggcaatgagaggacctacgacttcgccctgcgccgcctttccgtggccaaggaggacagctggcggggcatcgcgccggccaactactgcccagacttcaatccggaaccgccgatcttctccgccaagttcgccaactgcgatggctatcggcacatcctggcgatcgccaacgaggacggcaagatcacgctgcaggacaccacccagcgcaaccaccagccggaggagcagtccctggtgggcccgcagtgccacttcaacgccgttttcgatctggaatgggcacccggccagatgcgcttcgtctccgcctcgggcgatcacactgccagactgtgggaggtggcgggctccggcatacgcggcctgaactcctatgtgggtcacacaaggtccgtcaagtcggcggcctttaagcgcaccgatcccgctgtcttcgccaccggcggccgtgatggcgccattctcatctgggacatcagggccaatctcaatatggacctcacgtcacgcgtggacaactgcatctacagcggtcacacgggcggaccgggcacgccagtctcacagcgcaagcagcgcacacgcactcccaagatggccggaggaaccacctcgagcagcatcactggcttggccttccaggacaacgatacgttgatctcctgtggtgccggtgacggagtcatcaaggtgtgggacctgcggcgcaactacacagcctacaaaaaggagccactgcccaggcacaagctgccatatgccggcagctccaccttccgtggattcaccaacctcattgtggacgcgtcaggcacgaggctgtatgccaactgcatggacaacaccatctattgctacaatctggcctcctactcgcagcgcccgctggcgtgctacaagggactccttaactccacgttctacatcaaatcctgcctcagcccggacggcaagtatctgctgagcggaagcagcgacgagcgggcttacatctggaacctggaccacgccgaggagccgctcgttgcactggccggacacacggtggaggtaacctgcgtggcctggggctccagccacgattgccccattgtcacgtgcagcgatgatgcgcgtcacaaaatctggcggattggacccgacctggatggcctcagcgaggcggagcgggcggaaaagtaccgaggaactgcctcctacgtcagggagttcggcaagaaggcatttggtccgtctagtggaaatcacaagtacaatcttcgagatctggagtccacgccaagatctctgaagcgccttatggatcaaaatgaaaggacgccaggttccgtggaaaagacgacgaccaagcgttcgttcctggaaatgctgggcgtagctggccaggagacggaagccacagaacagccccagaaacgggcgaagccactggagtcacgtggaaggcggctctttggaccttctagccaggaaactgcttgcaggcacatacaacttcagtccataaacgaggaagatgcctcgccgagcaagagacaaaaggagaactctgccgcggaggatgtctcaccactgcacaagcttctcagcacaccaagtcattcccctttgagtgagaatgtcaaccatgtgtacacctccccgccaaccacgtcagcggcagcagcagcggtggctgcagacgcgcttaatccgccgccgatctccgctgccatctactcgcccacctccaacctgcccaattacgtgctggatggcgaggcaccgcacctgggcatcatgtcgcccaagcggaaggcgaaggagaaggtggactggctgacgaatatccgcaaacagaagctgatgagtggcagggcccatgtgacgctcagcgaaaagatcagcgaggagcagcaggccgatgtgctggcatccccgcgcctccagagtctgcggcagtcagagtgcagtcccaggatacacgcctcgccccgcagacgcatctcccatacggacggaggcggtggcacgccggctggcagctcctcgcactcccattcccaatcccagccaaaaacgcccacttccagtaggcgaaacagcgagacgacgctcctgcgattctttagcattcagagaagtagcagtgtgccggcggaggaaacaacgacaacgaatgcggctccctcctcttctgatccccatcccccggcagtgactgcgcccgcagccacgcccctcagcatgcgcacgcccacgacggcggtgggcagcgattgacgcggagcctcgagccacagcaccattattgcacttgtagttttaagcggacattgtttaagttattttatgtagatagtaggttgcatctatcgcgggacgagttggtaaccaactccccgccctctgtacagagccaaaagatacgaaagactaacgtacccgaataaaagtaactccatttt

SEQ ID NO: 23652 - protein, 769 aa, DROSOPHILA
MNIYNKLRAREHGYGNERTYDFALRRLSVAKEDSWRGIAPANYCPDFNPEPPIFSAKFANCDGYRHILAIANEDGKITLQDTTQRNHQPEEQSLVGPQCHFNAVFDLEWAPGQMRFVSASGDHTARLWEVAGSGIRGLNSYVGHTRSVKSAAFKRTDPAVFATGGRDGAILIWDIRANLNMDLTSRVDNCIYSGHTGGPGTPVSQRKQRTRTPKMAGGTTSSSITGLAFQDNDTLISCGAGDGVIKVWDLRRNYTAYKKEPLPRHKLPYAGSSTFRGFTNLIVDASGTRLYANCMDNTIYCYNLASYSQRPLACYKGLLNSTFYIKSCLSPDGKYLLSGSSDERAYIWNLDHAEEPLVALAGHTVEVTCVAWGSSHDCPIVTCSDDARHKIWRIGPDLDGLSEAERAEKYRGTASYVREFGKKAFGPSSGNHKYNLRDLESTPRSLKRLMDQNERTPGSVEKTTTKRSFLEMLGVAGQETEATEQPQKRAKPLESRGRRLFGPSSQETACRHIQLQSINEEDASPSKRQKENSAAEDVSPLHKLLSTPSHSPLSENVNHVYTSPPTTSAAAAAVAADALNPPPISAAIYSPTSNLPNYVLDGEAPHLGIMSPKRKAKEKVDWLTNIRKQKLMSGRAHVTLSEKISEEQQADVLASPRLQSLRQSECSPRIHASPRRRISHTDGGGGTPAGSSSHSHSQSQPKTPTSSRRNSETTLLRFFSIQRSSSVPAEETTTTNAAPSSSDPHPPAVTAPAATPLSMRTPTTAVGSD

SEQ ID NO: 23653 - DNA, 4595 bp, DROSOPHILA
agacttttttattatcttttttccaatcgaaggcaagtaacagcttgacctattcgacattgaaaccgattccgaaaacaataaattattttaaccaaaccgatcgtaatctttacaatgcatacttaatagacatacacacttgcatacgtactttaaacaataacatgcctttcaataaaattgaatatattttatctgcgttcaataaaagactcaagttgaccgacatccccttcctcctttacgtaggtgctcaaattccgctggaaacagagtgccaattcgttatcttcccgatcccgtttcagttcctctctgacctgccgccacatccgttcaaatccactatcgaacggcattcccaggaagcgattatgtctggaacggagttcattgccgatctgctgccacattgcctcgaattccccgtcgtagggcatccctagaaatttaccctcacatccggaggattcgaacatgaaggagtactcaaacatgtttcagtctaaaatatattataattacaaaaattacaagctttttttggagcaactaatttgtaggatttaatccttttttttttgttttaatgatatgatatcatgtatgatttgtatgatattatattaatattaatatcttatatcatagtatttttggtcccagcgtcggtcttcttcctgcagcttaggaaagcaaactgagtagaggattctcaaacgaagtgcagaccaaaaaagaggccacaaaataatgctgaatgtacataagatccattgcgacaaagaacataaagtaaacaaaaatcaagcagggcatcaaatttcctgtgattctgtatagggtttttaatggtatttttcgtatatacacaagtccaaccaaaattaaatggttcactctaagctttttatacgcttaaaaaaaatagaattttgaaagctcaagtatggtcagatcttaaacgaagatccgttagtttaacatttttttttcttcaagagaacaagttgagcgtgggtaagttttggctccaaattaatagacctccatggacttctcaaagagttgcgacaggttttcctgcgtctgcgccctgggtgctagcttagtgatcctttcctggggcagggttccctccaccaaggcgggtatatcgctgctggagaatcccagctctcggaggccattttctatgcccgcgcgttgcataaaaccgcgtacagtgtccgccaaaagacgaccggcgtctgctttttcgacacctcgcacttctgcgcccagcaactgggcagcctccaaatgccgatccggacaagctggagcagtgaactcaaagaccgccggagcactgatcaccacggataggccgtgtggaataagagcgtgatccgcggagtagccctttggcttgtaatccctcacatttccagaaataggataggaaaggccatgacacaggtgcactccggcattaccaaatcccacgccagccattgtggaagccaggtgcatctgggatcgggcttctaggttatcgggctggtaaatggcgttcacaaagtttttccttatcgtctccaatgcgaatcgtgcccacacatccgacactgggttcctgccctggtaggtgggtctcaagctgggatcactgggcgccaaaccgcgttccctgtaatccaccgccgtgaaactctccagggcatggcagaacacatcaaagccagcgaaagccatcacgcgttgcggctgggatagggtgtgcagaggatcaatcacagctagagttagatagaacgatattagaataaattatttaaagaagttcagttttttacccaaagtaggtttgaggaacttgctggaaatcccagttttggcatgcaacttcttgtaatcaaatatagctactccagtggtttcggaacctgttcccgaagtggtgggcatcgcaatcaggggcttcagttttacggatatctaaatggaattcaagtggtattaaaggtactaagtctaaaaaggagacctcacctccttgcctctgccaattgggcagtttacataatccaaaaactctgcatttgcatcactgctaaaaagattagctgccttggctgtatccatggcagatcctcctccgatggccagaaatgcatcgaactccttgccgcgcgcaaactccacggcatgccacatgctcccatccgtgggctccacccgggtttcatcatagacttcgtagttgatgccattacgagccagtgaatccaaggccactttcacggagggcaattgcacgacatttttatccgtgaccaaacaaaccttccgagctcccaagttgcgaagatcggctcccacttcggcacttactcccggtccaaatcgaacagtcgaggctgacatctgtttatcaatacatttgaccaaatttgaattagaatttgttatataccgaacaaaatttaagttaaaagtattcacaagatctaaaatataaattctattgggatgcttaagaatatagagatagtattatctggtccagggtatgaccacctgtctaaagatgagaatctactatctggaggtgctccaaagtccaaggttttgccacttacctcgaaggcgtattccatgcgacccgtttgggaggcggttggagctgctgagccatagttatgcgaatgggcggggcacttgcagctataagaccatactttatttaaatcacttgaaatcagttataaaacgcaatttttacttacgagttggccacgatcgtgttgatcaaacctaagacattcttccgcgacattctgtatataaatgaaatcagctggactggtctttcgtttgataagaacccgccgaatcgatagctggcgccaaaagacagcacttcataatcgatagctaacaatttgaaattctctgtcttgcagctttgaactacaagaagacccgaaaatgtgcgactaccagatggagtactcctttatttttgaagacagctcctgcgagggcgatgcctcgatggcatcctacgacaatggattcgagtccatgtggcatcaagtgcgcgaggagttgcaaagggagcgggagatgaatgagctctgccaggttttccagcaaaacttgagcctgagtccgccggtcatcgcggatagatggagattctgactggacctcccaaaagccaacttattgtgatatttgtaaattatagttttagcagttcgtttgccacatgagtggaacatcgtgaatgcacttttgataagtgctcggttattttatattgtaactaccagccttcagaggcgatcgtatgcatagtttcttgaagtcaatttgtccgtgtattcaaatgtttgctttcgtgaaaactcgcattgttttgtcactctaccaagtaatcaatttgtaccaatcaatcgcatatggttgtcctagatctaaaaatggcaataatttgccttcggtattgcacctaatgtattcaagaacaagtagggaagctcgaaatttctcaaatacttacccaaaaaatagatagaaatatattttcgattcgcaatcgttcaaaaacccattcgtttttaattacgggtcccacagtaagatgtgactgcgattcaattgtaatgggaacaattgttcccattacaatggagctaattacctaaatgtatgtccgcccatttttcgcgctggatttacaactcaatttgccgcgctatctggccgatctgcgaacataaactactggcaatggtaaacgatgttgacggcagtttccctcattagcatgcagatcgtcgccgatcttctgggcgccaggccataaaacgtttgattccaggcgtatcgttcagcagtttgtgttgaactggtaataactcgacatcgcgatcgcgagatgaagtggcttagtttgttcctggtattcggcatcctcggactcatcggcagtctgggcactttagccctagcggaacccaatccggagcccaagggtcgtccgcacacaacgcgacgtcctcgaaacgataacgacaacgatcgacgctagcaatccgagcggctggaggagatggaaaaacccacgaaatctccccgaagatgcaccgaaccacaaaggacacaggaggcacagcgactcacggtgaaggtgaaatgttttggagtcgagaaaatgcaatatgttgaggtgctgctcatctagcgagtggcatcttcccgtgcacaataaagactcattcgtttacaacagagttttgatcatgggtttattcgatagttttcttcgacataggtctacagttaaattggtcagcttaatgataccctgacgctctcggggattcttcgatactgattgattggcggataaagcaggctgactgactttctttggttgtgcgagggttttttttggggagtgcgtttgtatttaccatatatttgattctgtttcggattttaccattaccatgcgatattgaacgttgcttagggcttatcataatttacaaagtgccgcatcttgcggcttatcaaatttaattcaatagtttccgttt

SEQ ID NO: 23654 - DNA, 1192 bp, DROSOPHILA
tcaagagaacaagttgagcgtgggtaagttttggctccaaattaatagacctccatggacttctcaaagagttgcgacaggttttcctgcgtctgcgccctgggtgctagcttagtgatcctttcctggggcagggttccctccaccaaggcgggtatatcgctgctggagaatcccagctctcggaggccattttctatgcccgcgcgttgcataaaaccgcgtacagtgtccgccaaaagacgaccggcgtctgctttttcgacacctcgcacttctgcgcccagcaactgggcagcctccaaatgccgatccggacaagctggagcagtgaactcaaagaccgccggagcactgatcaccacggataggccgtgtggaataagagcgtgatccgcggagtagccctttggcttgtaatccctcacatttccagaaataggataggaaaggccatgacacaggtgcactccggcattaccaaatcccacgccagccattgtggaagccaggtgcatctgggatcgggcttctaggttatcgggctgctttgaactacaagaagacccgaaaatgtgcgactaccagatggagtactcctttatttttgaagacagctcctgcgagggcgatgcctcgatggcatcctacgacaatggattcgagtccatgtggcatcaagtgcgcgaggagttgcaaagggagcgggagatgaatgagctctgccaggttttccagcaaaacttgagcctgagtccgccggtcatcgcggatagatggagattctgactggacctcccaaaagccaacttattgtgatatttgtaaattatagttttagcagttcgtttgccacatgagtggaacatcgtgaatgcacttttgataagtgctcggttattttatattgtaactaccagccttcagaggcgatcgtatgcatagtttcttgaagtcaatttgtccgtgtattcaaatgtttgctttcgtgaaaactcgcattgttttgtcactctaccaagtaatcaatttgtaccaatcaatcgcatatggttgtcctagatctaaaaatggcaataatttgccttcggtattgcacctaatgtattcaagaacaagtagggaagctcgaaatttctcaaatacttacccaaaaaatagatagaaatatattttcgattcgcaatcgttc

SEQ ID NO: 23655 - protein, 71 aa, DROSOPHILA
MCDYQMEYSFIFEDSSCEGDASMASYDNGFESMWHQVREELQREREMNELCQVFQQNLSLSPPVIADRWRF

SEQ ID NO: 23656 - DNA, 4663 bp, DROSOPHILA
ctagaatgacgtctgatttttaatatgatcaagagatgagagaaataattaatgcataaactatgttaagacttttttattatcttttttccaatcgaaggcaagtaacagcttgacctattcgacattgaaaccgattccgaaaacaataaattattttaaccaaaccgatcgtaatctttacaatgcatacttaatagacatacacacttgcatacgtactttaaacaataacatgcctttcaataaaattgaatatattttatctgcgttcaataaaagactcaagttgaccgacatccccttcctcctttacgtaggtgctcaaattccgctggaaacagagtgccaattcgttatcttcccgatcccgtttcagttcctctctgacctgccgccacatccgttcaaatccactatcgaacggcattcccaggaagcgattatgtctggaacggagttcattgccgatctgctgccacattgcctcgaattccccgtcgtagggcatccctagaaatttaccctcacatccggaggattcgaacatgaaggagtactcaaacatgtttcagtctaaaatatattataattacaaaaattacaagctttttttggagcaactaatttgtaggatttaatccttttttttttgttttaatgatatgatatcatgtatgatttgtatgatattatattaatattaatatcttatatcatagtatttttggtcccagcgtcggtcttcttcctgcagcttaggaaagcaaactgagtagaggattctcaaacgaagtgcagaccaaaaaagaggccacaaaataatgctgaatgtacataagatccattgcgacaaagaacataaagtaaacaaaaatcaagcagggcatcaaatttcctgtgattctgtatagggtttttaatggtatttttcgtatatacacaagtccaaccaaaattaaatggttcactctaagctttttatacgcttaaaaaaaatagaattttgaaagctcaagtatggtcagatcttaaacgaagatccgttagtttaacatttttttttcttcaagagaacaagttgagcgtgggtaagttttggctccaaattaatagacctccatggacttctcaaagagttgcgacaggttttcctgcgtctgcgccctgggtgctagcttagtgatcctttcctggggcagggttccctccaccaaggcgggtatatcgctgctggagaatcccagctctcggaggccattttctatgcccgcgcgttgcataaaaccgcgtacagtgtccgccaaaagacgaccggcgtctgctttttcgacacctcgcacttctgcgcccagcaactgggcagcctccaaatgccgatccggacaagctggagcagtgaactcaaagaccgccggagcactgatcaccacggataggccgtgtggaataagagcgtgatccgcggagtagccctttggcttgtaatccctcacatttccagaaataggataggaaaggccatgacacaggtgcactccggcattaccaaatcccacgccagccattgtggaagccaggtgcatctgggatcgggcttctaggttatcgggctggtaaatggcgttcacaaagtttttccttatcgtctccaatgcgaatcgtgcccacacatccgacactgggttcctgccctggtaggtgggtctcaagctgggatcactgggcgccaaaccgcgttccctgtaatccaccgccgtgaaactctccagggcatggcagaacacatcaaagccagcgaaagccatcacgcgttgcggctgggatagggtgtgcagaggatcaatcacagctagagttagatagaacgatattagaataaattatttaaagaagttcagttttttacccaaagtaggtttgaggaacttgctggaaatcccagttttggcatgcaacttcttgtaatcaaatatagctactccagtggtttcggaacctgttcccgaagtggtgggcatcgcaatcaggggcttcagttttacggatatctaaatggaattcaagtggtattaaaggtactaagtctaaaaaggagacctcacctccttgcctctgccaattgggcagtttacataatccaaaaactctgcatttgcatcactgctaaaaagattagctgccttggctgtatccatggcagatcctcctccgatggccagaaatgcatcgaactccttgccgcgcgcaaactccacggcatgccacatgctcccatccgtgggctccacccgggtttcatcatagacttcgtagttgatgccattacgagccagtgaatccaaggccactttcacggagggcaattgcacgacatttttatccgtgaccaaacaaaccttccgagctcccaagttgcgaagatcggctcccacttcggcacttactcccggtccaaatcgaacagtcgaggctgacatctgtttatcaatacatttgaccaaatttgaattagaatttgttatataccgaacaaaatttaagttaaaagtattcacaagatctaaaatataaattctattgggatgcttaagaatatagagatagtattatctggtccagggtatgaccacctgtctaaagatgagaatctactatctggaggtgctccaaagtccaaggttttgccacttacctcgaaggcgtattccatgcgacccgtttgggaggcggttggagctgctgagccatagttatgcgaatgggcggggcacttgcagctataagaccatactttatttaaatcacttgaaatcagttataaaacgcaatttttacttacgagttggccacgatcgtgttgatcaaacctaagacattcttccgcgacattctgtatataaatgaaatcagctggactggtctttcgtttgataagaacccgccgaatcgatagctggcgccaaaagacagcacttcataatcgatagctaacaatttgaaattctctgtcttgcagctttgaactacaagaagacccgaaaatgtgcgactaccagatggagtactcctttatttttgaagacagctcctgcgagggcgatgcctcgatggcatcctacgacaatggattcgagtccatgtggcatcaagtgcgcgaggagttgcaaagggagcgggagatgaatgagctctgccaggttttccagcaaaacttgagcctgagtccgccggtcatcgcggatagatggagattctgactggacctcccaaaagccaacttattgtgatatttgtaaattatagttttagcagttcgtttgccacatgagtggaacatcgtgaatgcacttttgataagtgctcggttattttatattgtaactaccagccttcagaggcgatcgtatgcatagtttcttgaagtcaatttgtccgtgtattcaaatgtttgctttcgtgaaaactcgcattgttttgtcactctaccaagtaatcaatttgtaccaatcaatcgcatatggttgtcctagatctaaaaatggcaataatttgccttcggtattgcacctaatgtattcaagaacaagtagggaagctcgaaatttctcaaatacttacccaaaaaatagatagaaatatattttcgattcgcaatcgttcaaaaacccattcgtttttaattacgggtcccacagtaagatgtgactgcgattcaattgtaatgggaacaattgttcccattacaatggagctaattacctaaatgtatgtccgcccatttttcgcgctggatttacaactcaatttgccgcgctatctggccgatctgcgaacataaactactggcaatggtaaacgatgttgacggcagtttccctcattagcatgcagatcgtcgccgatcttctgggcgccaggccataaaacgtttgattccaggcgtatcgttcagcagtttgtgttgaactggtaataactcgacatcgcgatcgcgagatgaagtggcttagtttgttcctggtattcggcatcctcggactcatcggcagtctgggcactttagccctagcggaacccaatccggagcccaagggtcgtccgcacacaacgcgacgtcctcgaaacgataacgacaacgatcgacgctagcaatccgagcggctggaggagatggaaaaacccacgaaatctccccgaagatgcaccgaaccacaaaggacacaggaggcacagcgactcacggtgaaggtgaaatgttttggagtcgagaaaatgcaatatgttgaggtgctgctcatctagcgagtggcatcttcccgtgcacaataaagactcattcgtttacaacagagttttgatcatgggtttattcgatagttttcttcgacataggtctacagttaaattggtcagcttaatgataccctgacgctctcggggattcttcgatactgattgattggcggataaagcaggctgactgactttctttggttgtgcgagggttttttttggggagtgcgtttgtatttaccatatatttgattctgtttcggattttaccattaccatgcgatattgaacgttgcttagggcttatcataatttacaaagtgccgcatcttgcggcttatcaaatttaattcaatagtttccgttt

SEQ ID NO: 23657 - DNA, 735 bp, DROSOPHILA
agaattttgaaagctcaagtatggtcagatcttaaacgaagatccgttagtttaacatttttttttcttcaagagaacaagttgagcgtggctttgaactacaagaagacccgaaaatgtgcgactaccagatggagtactcctttatttttgaagacagctcctgcgagggcgatgcctcgatggcatcctacgacaatggattcgagtccatgtggcatcaagtgcgcgaggagttgcaaagggagcgggagatgaatgagctctgccaggttttccagcaaaacttgagcctgagtccgccggtcatcgcggatagatggagattctgactggacctcccaaaagccaacttattgtgatatttgtaaattatagttttagcagttcgtttgccacatgagtggaacatcgtgaatgcacttttgataagtgctcggttattttatattgtaactaccagccttcagaggcgatcgtatgcatagtttcttgaagtcaatttgtccgtgtattcaaatgtttgctttcgtgaaaactcgcattgttttgtcactctaccaagtaatcaatttgtaccaatcaatcgcatatggttgtcctagatctaaaaatggcaataatttgccttcggtattgcacctaatgtattcaagaacaagtagggaagctcgaaatttctcaaatacttacccaaaaaatagatagaaatatattttcgattcgcaatcgttc

SEQ ID NO: 23658 - protein, 71 aa, DROSOPHILA; identical to SEQ ID NO: 23655

SEQ ID NO: 23659 - DNA, 2369 bp, DROSOPHILA
tctctcagaagccccagaaatgaatatttgatggccgtagtgccggcgaacaaattaaaagcgctggcaaaagcttgttgcatactttatggcgctaatttggaaggagcaggacctcatctgcgtgtatctatgtaagcgaaggaccagttgccgaagtcaagccccctcgccctgctttttgtttatgcacgcacattatttgcaaaggattggccacttccacttccacttccacttccactcccactctcattttcctgctttcggcaaccgcatttctgtgctgcaaattttgtcgcaacaactaaatgcttttaagtgcatttcattgttctcgctccgggctgccaaagttggaagcccccgaaaaatgtccgcaccattgcgaaggaccagttgaaccgggggaacttgaggtgtgctggccggaacaccaaactagtttttcccaagtgaacgaactgaacccgatgaacctcataaatattcattcgcaatttgtgtaaataccaccccgctgcacacttttgataatgtgtcgcattttaattatgaattaattgcgaatgatttcaacatcgggcattttaattgacatgccattgtgcggcgcatatctgccatatcggcaaggtgtcatccactcaagcacacacgcatcatttatcacgcgacagggaatgacgatgtccaggtccgggagcacactatataaacgtactcatgccgcgggatgttgcatccattgtgtggtcgccactcgtttcaatcaatttcatttcgttatcgttattgacattttgtaatttaatcgtgtgctttgtcgcttgctgaccgtcatgccgcacacacactcgcacagcgctgcactgcgagaaataggaagcagattgtatagattatggtttaaaactatttaacttgtaagtatgaatatgctttaaaccatatgcttaatcaatgaattaatcgatttggataattacatgcattttgattaacgatcatagtttcgcgtgtaagcaaactcactcatgtggctgcttttaactttatcagcttgtttggcttggggttttcgcagaccgagcggtttaaaaaatgagacggcgaccagatgacacggagtctccttcgcaaaaggggcagtcggcgatatccgatgacgtggccaacgcggagatgcgaaagcattattaatggcccgagccaaaggaccaaagggttttgcgggacgcggtgatgagcaggtgcagccactaattagttgcagccacacaaaaatttgtaatcggtagaaaaggcagcacagaagtccttgataatgatgttcgggcgccgaatgagtaggtaaattagatgccatccttcaaataggaatccacccagaaatgttgtcctttgccttgatttctgcggtttcacacacacacacacacacacacccacacatgaggagggaaagcgcttaaaaactcattttgctcggagcaaaaaccgaaacgacagctgcgtcactttaatataaaatgtaaatttacaccaaactactttttggttgtctgcttgtacatatctccgccgccattttccgagtcagcaatggttgcccttttccgccttcctccccatcagattttcccttggggtcaaccgctggaaaatatttcgagcggttcgcatgaaatattcgatttgggcagaaaagtgaaaacgggcccaagaataaatacgccgtaatattttaatcaaattatgcaattcagtggacttctgtttctgtttctgtttctgcttctgctgccgtttgagctcctgccttccgccctgcggatttcaattacgacaacatatgacttttgaattaaatgacctgaaaattgtccctaccctgtcagaaacagcatgaaaaggaccaaacagacgcacagccccactttacgatcccatcaacctgggtaatgaccaaattaggacgactgctccgaggattcgagtgggtggatggctgttgtcgaagcattcgataccctggcaaattcattgttcctcagccagcagttttgcgggaatttctttattcgtcctgtcatttcttggtcacgcgggccttggggcaagggaggaactggaaatgaccacaaagacatggtagcaaggacgaaaatgtgcatgaggatgaggcaggacacaaatgaggcgagacaacaacacaataatgtacaatactccatgtaactggcagcgtgtaagcaacaaggaaagttcaagcaattcggttagagagaccgctgaaaacgctgtacaggatgcacaggactcaagacctcagacttatagatggaaaaaatattacaaagcataca

SEQ ID NO: 23660 - DNA, 369 bp, DROSOPHILA
atggcatctaatttacctactcattcggcgcccgaacatcattatcaaggacttctgtgctgccttttctaccgattacaaatttttgtgtggctgcaactaattagtggctgcacctgctcatcaccgcgtcccgcaaaaccctttggtcctttggctcgggccattaataatgctttcgcatctccgcgttggccacgtcatcggatatcgccgactgccccttttgcgaaggagactccgtgtcatctggtcgccgtctcattttttaaaccgctcggtctgcgaaaaccccaagccaaacaagctgataaagttaaaagcagccacatgagtgagtttgcttacacgcgaaactatgatcgttaa

SEQ ID NO: 23661 - protein, 122 aa, DROSOPHILA
MASNLPTHSAPEHHYQGLLCCLFYRLQIFVWLQLISGCTCSSPRPAKPFGPLARAINNAFASPRWPRHRISPTAPFAKETPCHLVAVSFFKPLGLRKPQAKQADKVKSSHMSEFAYTRNYDR

SEQ ID NO: 23662 - DNA, 2501 bp, DROSOPHILA
ttgacacgtcgaaaaatgtgtgatgtaactagaagttaaaggacattcaaactcaaatgattggttggttgccattaagcacctacgagctcaccatatatttagcttgccatatgatctttttggcctttagctgatagcccaaaaaaaggaagcctcgttccacgcaaatactttaagtttaatccgctttaagaccactacaacgaaggatgaccagcaaaatatgttgcggtcatgttttggctttgtgttttttcttgctatctccttgaaaatccatgatccgaatggatgcttggggtcgagcgataaaacccctcagctcacatgtgaatgtttacgaatatacatacatgtatatttgtgtgccgggcttaggccaacagaagcgaccgagcccacagttaaagtcgattccagagcaccttgacgacgaaaccacaaacatttatattaaagcagcaaagccaggtggtaaaacaggggggcggagactagcggctgggggcgtggcagccacactaatgtggtgtgggccacactagtagcacaaactttaatcataataataacaaggaacttttgcgttacatccgtgccacgaacacagatgaagttggccaaagttgccctgttgttggcggactgaatgggtatttatgttgcacactgacagcacaggccgcagatagatgaggtcctcctggctggggaaaacccaaaggggtctatggaatatactgctaacatgctttttaaactgtctgtgttcaaatttcactgctttttcgtatgaaaaactctattgctgcccgtttttatgggtttgttgctggattatgccgacagagaggtaattaaaatgttcgtgtatttcttcttatgtacttattaaagttattatttaaggcttttcggattatatgatgtactattttgaaatatctaaacattgcattacatttcaataaatctcgcagtcagctcttgaatttatgtacattatttttggtccccgttactatatttttcccaaattatgagcaactcatcggccttttacgtgcatttggaggatcctgtgcggagtgatccccccagtggactgcatcgcaagtatcgcccatttccgacccgcccccatgaggagcgtctggaggaggcggaggagcgacgcaatcggctgggtgagcacaaggtggagcagctgtccgttcgtctggcgcgagtggcgctgatcacggatcgccaccatcgccagaccacccaaagttggctagactcccaagatcgcattactcgcgacatggacgaacatgtgcgcaagcggacggcccagatctcgaaacgtctgagaaacctcagcgatcacaaccacaaggttcaggtgcgcaaggacgaggccaagcaggagaagcttctccgaaaactgactcatctctacgaggcgcagaacgccagcactatttcgcgattttggggcaaaattcacaagtaggctgtaagtcgaagtaaataaatttggcagtcgattcagaagcaataatcaaacttgcgtcttctaaatacaatatattgcacggataagtgatttaaaaacatagtagttaaaaacattcgctatcacagaaaacaccaatttggttattagctattgcgttcttttttctgcttcagacattttcctttgtgtatggaagacaccattttccgcttagaaagtttgcctgtcgcagcgcttgtcaaacttccacttttcgaccaagtctgccatcgacatagttgcagaaaatcgcttgtcaactttccaacatgcccatgctgcgtttttatagttaacttttagggctttaagtttgtccaggttgtccggcaatttgcattggaatgaaagctaaaagttgagtacgaaaaattagttacaatttgtgtcgaagcagaacaaattagccgccgcccgggggactcgtcaagtagaaagtgggtggcgaattgaaaggatttcgtagagttttctgccttttcgctcgttcttcgtcctgaaagccaaatcccgattatgtgcactcaactgcaagtcagcaggagcgtgtgtacatacatatatttgtttggctacacacacacatctcaaatcatgagtcaaaggagcgtgttgctggtggccaactaagtgctttccctttgtccaaaagcatcttgctcccagttagcagctcccagcatcaaacttgaagttcaggctgagcacttgacctgttttcgcccaacttatttgatttgtggcctgccggtgacgctccttatgcagttgccttcgcattcaattaagctcttgggctgtgtgttttgggggcaggcaattgccctgagaagcatgcttcataaattggtttttattggggtcccatgtgtgttttttttttttttttttttacgattacgatgatgtttttattatttgatcaacgcactgttacccatgcggcaacttaatt

SEQ ID NO: 23663 - DNA, 501 bp, DROSOPHILA
gtacattatttttggtccccgttactatatttttcccaaattatgagcaactcatcggccttttacgtgcatttggaggatcctgtgcggagtgatccccccagtggactgcatcgcaagtatcgcccatttccgacccgcccccatgaggagcgtctggaggaggcggaggagcgacgcaatcggctgggtgagcacaaggtggagcagctgtccgttcgtctggcgcgagtggcgctgatcacggatcgccaccatcgccagaccacccaaagttggctagactcccaagatcgcattactcgcgacatggacgaacatgtgcgcaagcggacggcccagatctcgaaacgtctgagaaacctcagcgatcacaaccacaaggttcaggtgcgcaaggacgaggccaagcaggagaagcttctccgaaaactgactcatctctacgaggcgcagaacgccagcactatttcgcgattttggggcaaaattcacaagtag

SEQ ID NO: 23664 - protein, 152 aa, DROSOPHILA
MSNSSAFYVHLEDPVRSDPPSGLHRKYRPFPTRPHEERLEEAEERRNRLGEHKVEQLSVRLARVALITDRHHRQTTQSWLDSQDRITRDMDEHVRKRTAQISKRLRNLSDHNHKVQVRKDEAKQEKLLRKLTHLYEAQNASTISRFWGKIHK

SEQ ID NO: 23665 - DNA, 20460 bp, DROSOPHILA
cgacgcacacacgcacaccctgctttctaggcctctgccatttaagttcaatcatttggagcgtcgtcgctgcgttgtcattgttgttattgttgttattgttgctattgttgctattattgttattgctgctgctgtttgtgttgctgtcgctccatgtgctcctcacatatgttgaactaaaaagaattggaggagcagagaggcagggcgaagaaaagaactgtacatttgtacggggtgtattggtttagttgggtaccctacgctacagaagaaagtagaaggttgagaaggaatatgtctcctacttttcgtgcgttagcacgcttttgtaacaagtttcaataaatagattatagaaactataaaaagcaacaattcggatatgacagtctctatatcttgttttgtgtagcgtattcggcatgcagcttagctctcacccttggcaacggcaacaaagtaggtgcaacaaagagtcatagcgaccgtctctcctgcgcctacagagcaactctccccacccccagcccctcaggaaaatggtcagactgcttctgcctctgcctgttgctgctttgcctgctctttctgtcccacacacttgctctctcgctcgttgctcgtaataagcttacacagaaaacaaataattgaaatctaaagaagttctcctttaaattattaaacgcaaaggtataattagatacaatgaaaataagtttcttgcatgcagatccttttaagctacgaaatcgctgttaaaggccatataactagcattgcattagttggtgatttaagtgcttgacttttcgcgcagtgtggcgcactctcttcggctctccgcccccgtcagctgttgttgttgcactgtggggctttggggctgcgataccagctgtttcgtttcgtatcgtttcgttgcgattcgtttcatttcgtttcgccgcgattcgattcgagtcgagctgcttcagttgaagtttgtcgctggccgcgttcagttgtccggctagaaaagcggaagaccgggaaatccagacgcgctacagacgcccgatatctgctcccactctcagcgcaagatcgcgggaaatcaggaagctccgaaaacatcggataaccgtttttatttttattcccctttggttcgttctcgcctccgtttcttctgttgcttctgttacttctggtaatttccatttccctcggggggatacgcgctcaaacgcaactgcaggcggcgcaaaacaagaaatgtagatagcgccaaaaattaaaaaaataagaaaaatagagaaaaataaaaaagcgaaaatcattgttattgcatggaaaattactacagaaatctcctgcaaagcagcccagtcagagtggcactaaagcaaaccaaaccaaatcaaacccaaaactgagacaacaacaaggcggcggagcataaattagattggcctcatagtcgaataataacgagctcgagccgcgtaaacaaattaaacgatgctgaccgccgttgttgttcaaatttaaatataaactattattgttatctctgcgcttgccgttgtctattttcgcgccaaatgcaatcggttcttcggttttttcggggtattaggggagagggcattacataattagtgagcgcgtaaattaaattataaacgaaaacggacgaaaatcgagtaccaactttcttcgtttcctctgatcaaaacaatacattttatccacagttttcgtgtcttaagtttcggagcccttcgccgatttccagcaattagttactacatcatatatgttctgtgttatcaaaaacgcgagcgaaagaagcgctctatctgcgattgtaaagacaaacaccacaagaaagtagctgtgtgcccctcgggcaaatgaaccgaaattaaaggagattacaaacatcgctatcaagcaaatgtagagactgttagtccggcgaacaaagggtaagtaagaaaggttccatctatacagtactccagttttccccaatacatttgcaaatgtcctttgaggccaggactgttactaagaggcttttccgatgaaatggaatgttccttagggattgtcgtaatggaaaaaaacccaaggcactgcaagaaacaaaatgcactttagaattggttaaaatatatccttaagctggtattcccctaacataggttgccactcgcatttatctgcagtgccccacttaatgtcttcatacataaataactggctatttttgaatatttgaattctctattgaatctatagagaaaccattcccttccccagtgcacaactctcgactggagtagaagctcatgctattgggtttgcagcatcgcttcccacaaaatcctcacaaatctttggcagattgcacatgtgaaacctgcggttgttggccaattccggctgttttcccattttttggccagtgccagggactttgcggattgacgggctgtcaagtcagcgcaacaggttcctgggccaagatgcgtatacagaaaacagaatcgaatggaagacacactgattcaattcgttcagtattggatttgctgctgccacacaacttcaagttgaggaaattggcacttgacctaccgcacgggaatctaaattaggcggcgtgttcgcttgccgagcgtttcgccctctctttccgccccactgcgaaggcgaagcctcgcacgcggtttttggtaaactgctgagggcatttgttcactttgctggctgcgtttgtttacggtttccattacccgcttctcgcggcttcagctttttccagttctatttcgagttggccatccactaattaggcagcttgtcgggcagcattcgagttaaatgttcggcactgcaaatgacatggtccttgcggccatacacacgatactatccattgttacactcgtacaatacatgcggtgaaacaatcaagtacgccgacatgggcgtaattcgcagacaaacaagaagaacgaaaacgaactgagcctgcgaattaaggcccctgctcggcaatgaattctcttcgccatgccaggccatcggccatcccggcgtatacgtaatgctacgggccgaaaagaattgaggaatggctggcagttaatgccaattatgataaacggttgctatgtagccgtcgcacacagatactctacacactggcgcgcgccacacagatactcacgcagatacagatactcatgcactcgcactcgcacaactgttgctcgcgatgttgttgatgtcttttagttgttgccaggcgcattaagattgccgcttgtgcttgtgtgtgtgtttatgtgtgttgagtgattgggtgtacgagtgtgtgatgggaaatcacttgaaccatcggctgagagggcaattgatatgtgcttccatcaatgttgcaatcagttaagcggctttcgagcgccagaaacaactgaatcggtctgtaaactcaatcgaattcgtccttttgcgacaaaaacaacagtcatggtccttccaatgacctgcggccactaccattattaattcgatcagctgtacgcttcgcagattccagtaattcgataaaagtttatttaagcacttatttgaacagattcaaataagtaaattgaaagtttagtacattatttcatgtttaatgcggatagtttaaaagttgtgttgtttgttgtatccgcgaatgctgctttaatcatagtcatttctatgggcgcaagacgaggtgactgaactcgcaacagcaactgcagcagccactacaactgcagcaagtgcagcagcaacacaattgcaactgcagtctgttaagcttgcttgccgttaatttgtgcaatcttctacttttacctacttattacaagtagtcacaaacaaaactgagtattttccatgccgttttcccatgcttcagattcaagggtatttacgcatgttcttcagctaactgcaagcataatccaagtgggaaactttctgacttacccataattgtaaagacttaattaaaagagtttcaataactaatcaaatggatttccctcacagcgcacataactcaccatccatatcagtatatcagtagcctaataaatggcgattggcccgacttaagtcaagtgaatatataaaaaatctaatcgccaaatattgtttatggtggtcaagtacgattagaagttctttggaaaagccatagcaactgccaaattcagatttctattcatttactgccgctgctctgcaaattgtgtgcgaatatttgtggatttctgtatgtaagtgggcaaattgcattacaaccgaataataattacaatgcaaaagtaattttgtgtgcgaaattctaattccccatgcagccgaataattggggttggatttatctatcaagaaactaatggaatcacattagttttaaatacaactttgcttcaacttagcttaaattaatggtatggatatttcatcagttggcattataattagcccgtggcattataattagcataatatcagcactcctatcggcatctgcctgccatttggattgcgtcagccgaagatcggaattagatccttgttgacaattgagttgccaaaatagcgggcagatgttgcacccagggcaattgaaatgccagaatgtgtttgtatctttgcatctttctatctggtgatgcagatctgcatctgcgagtcagctgacaccgttactcacgcactcatggcacccaaaataaaactgtgcataatgtcagtgcactgaactggccgcatgaatcgcagtcagaactgcaattcggtggcaagttgcaatcaatatgagtttatgcagcggggtcaacgaactggccgctgaaaactcattagcgtagtgccgcaggcccaaatctcagtcggggaaatcggtcgaaatcggtcgaaatcggacgaaatcggacgagatcggacgagaaaccgggggaaatcggcgaaaaatcggtgcaggccggggaaaatgtagctttctagccgcatgatcgcacagctgaaaacagctgaaagcaaagcgacgagcgcgaatagcaaattgcaaggcaaacagctcgtggcggtcgccatagcccacatatacatacccccactacatacatatgtacatgcatgcatatatgcacttgtatctgaacaatcagcgtcaataagcagcgcaatcgccgttcgtcatcgcgctgctactgcagctgccgcacaatggcgaataataaaattagccacaatgacgaacaaagaagcgctggcagtgcaagtttgtaatggccattacaaaacaggctaatctgcgggaagttggctcgcagggagcctcgtccactgtcactggccaacagaggagggcatttagcgacgttctgataacgcggactcgtaagcctcttagccgattaattgatacattactctactatgccaagtagacgtgcaacagagtagctcggctttctatgccgtctaattgccattaaatgtactttacagctggcccgagcccgagcattggacaattacgtatacggcccgtgtgcactctgcactctctacttttgatggctggccatttggggcgtccattagacagagtgacaccgggcacactcgcacctcacaactcacacctcacacctcacacttcccacttggccatctcagatcacacattttgaaacctcccccctaggcgacaactcttcgccgagaagattgcgccaacagctgcacctgtggctatttccgcgttggcagcaccactggccgcaccgaaaataggaatccgaacagaagaagtcggatggggcttcgagaagtctattttcgatcgtcagatctcgaggtgcatgcagtacataagtcggccgatcagatcggagcaggcctgcagtcttgggagggggacaggctcctgggaatcctgctctcgcttatcctgcttggagtccctgtcagtgtccttctccttgtccttatcgctctcctcgctctccttgtcgctggccgccctgctgataaccacaaaggcgagcaccttcaggccgccgtggtgggcggctataacctcgggcaccagggacatgcccacggcactgacctccattgtccgcagcattcgctcctcggccacagtgccgagaatgggacctcccatgcaggctaagacgccgctgtgcaggaacttctggatgcccattcgcttgccaatctcgagtgccttctccagcaggtccttgtcatatgcgttcaccatcgagaatcggcggctgccaaagcgcggatcactgggaccctctagcggcgtctggtgcatcatgcccaccacattgatgtggtcctggacaagcattatgtcgcccagggcgaatccgtgatctacggccgctgcttcagaggtcagcatgatggtcctgaccccgcacaactgcatcacgcggacgggcagcgcacaggtggccaggttgtagccgtcgcaggagtggaaactgtggaccagcgctattatgggcgctcccatgaccgtgcccaagacgaagctgcagtccggctctatgccgtcggggaagttgggtatgtcctcgtagggaatgaccaccggctgctccaccaagctgaccatatcgctcaggaagctgccgcagattagtccgtactttggcctgatgtggctaacgttcacgatgtacttggccatggcctcgacttcctcgaaggggtagaagaggctctggggcgtcgggatgaccagcttgggcttccggcgttcctcctcctccatctgcagaagcttcctggccgccattcgcttggcaatcggcgacctggacttgcagcagtcgtagttgcacattttgagtaggatgggtcgccaaatgggtgcgaaacttcaccaattttcgaattttttggaaaatactcaaaagatgacttttagggcatagcttagggctgtttgtgtgtgagaggcttaaataagaattaaaccatgtattgacggcagaaataaatcaacgatttattaagtccgcggaaaacaggaggtgtgactcgaatcgaatgacgctaaaaacaaaaagccagggtctggtcgaaaaacaaaaccacaaaagcgcgccatgacgtctggttaaaattggctgatgaattccgaaatccagctgttcacaaagttcgtttccaaaagcgagggccaaaaactgcattaaatcataaaacaacagttttccgaaaagggggcattttttgtttgtttttccctagttaacaaaacaaatgaaaaaactttggaacatccaagctaactctaatcagttacatgcaatatgtagaagcgtggagcgcttttctcttttattttccctagttttcactttccaaagttcaatcggagtctttaagctcaaacagacagtgcgaaatagatttaattatcagcgtcgacggtgccacgcccatgctgccgccgctgtgggcggggaagatgctgtttaccatgtttaccatacgtatacgtgataataacgctcatacgcatggcggcacataggcaacgccccggccgttgtttacttgttgtgtgtttgtgtgttgtggatgccgttcaatgtcaccacacgccagagttcgtttacagcatcgcatccatggcacagctagcgattggagtgctggtgtgagtggataaattaaatacgtccattcggagattcggaactggcggtaaactagacactcaagactacactgagatgaatcggggtgctgtaagtggcatctcattctagcgatcctatcattgcaatgcagttaagaagaagaaaacattaaaaagtgcacacagtgtacttactccttctctgtgtgaaaaatgaaagaaagtgcgccctttattctgccagtgcatcgcctgtctggagtgtgctggtgtagactggaccaggccgaggcttggctcaatactttcgctaattagttgggccaaccagcgaaaagcagctacattgtctcggccatgtttaccatgaccacctctgtcaacgaatccactggccagctgttcgaagtcgattcgtgcgacttggcgggattcggatgggtatggggtttgggattgggattggggaatcggcgaagcgtttagtatgctcgtgacgtggtcgataataaaaaattattaataggaaactttgtagcgctgtttatgttattcgagtgcgcgccaaatggcttgggttacaaaagcagcctttgtcgccgattgtttttcccgatttgtgggctatttgctattttgttattccagtgcagccgcctacaatgtcagagtcacgtttgtgtgattcgccttgctggctacggtgacgatgacgaggcttcgatgcggggccaaaaaccgcaagagatcatccgggcctgtaactctatcatctgttttccatttgtttgtttacttccccgactttgtatccgtatctgtatctgtatctgtaaatgtatctgaacctgaatttgaatctgtatctgagaatctgagtccaaatgtgtgtgtatctgaatgccttgtttcggcttgttgtgcccattgttaggcttgtttctttgtagcccccatatctttgcccactttcggttggctatttgtttgtcactttgcgccagcctgccaaaaatgccctgtttgcagttgatattaatttcggtttcacattcacccgccgctccattattgttttttgtttttcacattcttttattattattattttttttcgaaatctcaccttgccccaggaagaggagcgaacccgtttcggccattcccagtgctcagttatccagttgcccagttgcccagttgccagttccgagttcccaactcgcagctcccagtttgtttaccaacttttgtgctgcgttttgctttgtgaccgttgtttgccttttatttttggcattgcgcgattttacgctgtctgtgcaggcccgctaaatacacggcagtagagccaacaagaaatgctcaaacaaaaccaaaacccaaaccgaaaaagctgaaaaaaagaaagcgacgaaaagtgaatattttgactggcatttgaatgctaattgaaggcggcggagaaccgcaaacgagttgttgctgtgggaagcgagcttgggctttgtgaagctgtgtgatatggtaattaatgaagatcgtttctctcatccgcagctagcaacatctgaggagcacaagcacgtgcagagtggaagggtcgccagctcaaaacgacaaatgaaaaccaaaaaccagaccaacatcatctgctccaactgccaatgctttagccactcgaatcggggaatagccatcaccgacgagaagaacgtcctgcggatccagagctacacctacaagtgcttgaaccacaatccgcgacctcggatattccgctgatagtgatagtggactctggctgcagagagaagaagaccctagcctgaccacaccagaccagcatcgcaatcagaagcagcagtttaagaaaatctggtttggctccagctccagctccagcgatccaatccgctctgatacgatacgatacgatacgattcgattcggtactatacgatccgcggacgagcctcctgctttggtgcatttccagtttggcggctgctccactttcgtggctccataaacaaagagccgggcgaaaactggttattttctcactgcgatcgaagctgcagctaccaactgcaatcgactgcgacctctgattccgaatccgagcacacgtcgcatccacatccaactcgactcgatccctccgccagactcatgtactacgccgtcgattactacgcggatatgggacaaatctctcaagatgtaagttcatgtggtttagatgtaagtagttatcctatccaactctttctgggaaagattagcagagtgtctccatcaaattcagagccgagtgtttggttttctaacccaaatggcgcttagttgagttaaagcttatgttaaccacatatcgcagcattattaagcgaatttgtgattaactcaagctcgtgcacttagaacctgattgacagcatattatgtttcaagtggcaactgttgaatgatatgatgtgattattaaactgagattttaatcaacaacgatgccaacgagactcggtgcgtaatatttttgcctggtcagtcaaaaatgattttcactctatacgtacgctgaaatgtaatacgtgcttttgtgttttcgaatggcgcacattttccacagcttcgtaattaacttttgccagagtaggaaaacttaaaaccgcagtgcaaatatgaagggatgttatttgaaaaatgcgtgcttttgtttgaaattctttttgcagacatgctgataaaattataaaaatgggaaatgcaggaaatgtggaaaatgcagggaaaacaacaatcagttgctgggaatgtgagtaggtggtaggtaggttggtaaccgaagtgagttgccaactttataatgcgcagtgagtgtgcagaaaggactgggcactttttgcgaaagaccccatcgataagaactgataagcctgcgatatttctcacatggatctgtgtgtagacatagacccggtagagctatgaaatagataacgccaagctggcgactctggcactttgttttcatggcgaactcgattgccgaactaggtcagctaatcagcgaaatagatgcaaatgtcgagtaattgcgactcggaatgaattcaattagagtagctgaaaagtgaacaaaccgcttgattagccgcgaaaacaatgcgtattagcaactacatatttgaagttaatcaagagcaagagttaagcccatcaaaggaagccataggatctctttgtggcctttaaaggtcgaacaacctgctggctgggactgcactttaatcaggcactgcactgcactggtgaatcaaagtggaaataataataataataataataatttcaattatcatgcccgatactcaatgacagcgaacgtaaacagcccgcggccatcagccatctgcgccacgacaggaattttatttacgcaatgaaaatataaattgtataaaaatacacaatttgtggtgtgcgcgggtgttggggggagggccaagtgggtgggtgtgggtgtgggtgtgggtgtgggtggtgcttgggccagtcactcagctagcacccgaatatcagaacaaacagatgtgcgccattcgcacgctggcagtagtccaaaaaggctttcgcctcgttccgagtggcaaaggggcgacttgattgagctgattgagtgattgactggctgggcgagtgattgagattgagatcgcgcacgaatgcagcaatgcactttgatgatattcccctgtggcccaattccacagccggaagttggaatcaaaaaccacggcctttagccttaaaagttatgtcaactttatatcgaatttaaagctaatttaatatatttgctagatagtattttgcacataaatcgctggcacgagtctataaatgtccgcaaactattcgctaaaattaggcatttaaatttagagttctgagaattttaggcttttgtttgcgagttcattcacccatggtacatatattagctgaacaatctgtgcgtttcgcattccttgcaatattgttcaaagggtttcccatcgcagggcgttatctcttggagtcgggcaactataccatataaattaattggcacaaagacacaatgcgcagacaaacagacacacagagctcataatttgtcatgattgtttgccatttgccatttgccgcttagcagttggccgtgttgttgcactttatcagcagacaaagtgtcgcttcgagtgccagacagcttttatttttttattttttacttagctacccgaggttggaataacacgtaccgccgcctcccacgcgaaccgagaaaaacacacgcacaagcgatttaagtacacacttatgtacatacatatatgtatgtgtactaaggtgggatatccagggatatcttatccatatatcttatatctatgccagcaagtcttgaacttcaatgtgagtacaggagtatcttgagatatttgcacccatttcaatattcagtcacatataaatcagccgatgcctggttgatagttgcggattaattacgtatgccccacagtaagtgcagttcgcaacaaaaaaaaaaaacacatcacccatactggcacgttcatggatgggcgagtgtgtgtgtgtgtcacgaactacagaaaaatagtttataacgtctagacaagtcactttatctacgcacacagccaagcacctggttttgtgagcagtgtaagtgagcagtcctcgagtcactcggcacacaagttgagctcaggtgctcaggtgataagctacatatatggcggctatattccgatctgctccatctggtggagtatagtaattgacccatttggaggagcttaagcaggcagcctccattagtccacacttttacacttcacttccatagttctgaagaacttgtgtccactttctttacacacctactaactagttatgctaatcagccatggtaaagctactgtgatcgatctttcaagtgtttatttattgttatcaacctgtattggccacattctaactcttaactgaaaccattcttccagctgcatttgcaatgaatatgaaagaacaagctgaaagcgtatgtagcgaattcagctttttccgagtttcgtggagcgtattttcaggcttattattttattgtattttccacgcctcgcactttcgtatttcatagattttgtttgctgtcattgttttcagtttgcatttctataacacctgacgttttttccactttacttgtttactcgcctattgtttggtgcccccctatctggccgtatctagccgtctctttcggcgcactgctgccgtctcgctcgctggcattctaccatttatgctaatttatttgcctgtttaccagcttttgttttaatctgtttggggccgtgttgacactcaccgcgttctgtgttttgtgttttgtattttgtgttttgtgttttgtgttctgcgggaagcagaagacaatgagtttgcagactcatttgggtggagctggaactacagttaatttattgttattcccgcgtctaattatgctaattaattaatttggcttactttgcgctggccaagtgcggaggaaatcagaattagtttacagcaattaattggccgcgattaacataagcccaagagcgtaaagagctgcgttcgtttgtgcatccggcagatacaaattgccagttggcagttgccagtcgcaccgtacagtgagcacttcgcacacctcccacttctcacgccccactgcaggcattatctttgatttaatcgccacgctccatgatctcgcacgttaacagttggcgcggaaagtcttcggccggcagcggattgattggggccactggcccccatgttttgcttttcggcggctgaaaacatcccgttctcactcgtttttatgcgccttcatgattcatgctgaagtgtatccgtttccggtgattttgagcgggtggtttgtagtcttacaaagtcgcagaagcagaagaagtacaagtgaaagaagatggatcgtgctcttgcagtcttcaattagcctaatttataatcaaggtggttgggttcttaaagtataactgatattttatgtatctcatatctttagttcacaaatgtgtcttgttacatatgcatgcaataattgaagtaatgctgcattctgtttactccacacctacatcgcacccaaaactaaagaccatgaccacgtcttgaggtcagagtgccttgattaacacacttttgagcctacgagtgggtggttttggtagatgcacccacaggcacgggaggcacgattcaattatcacgtatacgccatggcagacgaacaggtttttggctgagacagtggagggaagtgcggctggaaaggctatggaaaggggatggaaaggcagaagcagggaaaagctgcgtgccaatgctacacaccgcagactgtagtgtgtgtgtgtgtgattgtgtgcatggggggctcagaaatggatatgcactataagtgtacatgcccattaaacttggcctaagctgcgctcaaagccgctggctgccggagtggactgggattgaaactggaactaaaattgaaactgaaactgggatcgggtcgctcgtcggcagtcggtggtcggtggttggtggtcggcggttggcaatcggtagtgtgtcacagaaactagtttttgttttccaaacgggtttgcccgccagcgtgggtgtgagtgtgtgccaatttgtgtatttatggattcacaaagagaacccataatgatggaaatgtcaacgcagtgccatttgcatatctcggcgactcacccttttaattagccagtgtaactggacagatttaaattggccagcgccactcggtggacacaaagtttcggtttctcgatatgcatacgcataaatcactttgactaatggtgctactcttgtttacgcgtgttcgacatttgttaagtcttgtgtcccacgaggaggcagctaccacaagacagatctgcgacattcgaattaattaattacgccaagtgatggcatctaatgagctgcgataaccggcataagcggtccagttagccgcttatgaatatgaaactcacacgcgggcgtgtgggtgcatcccactcggcatccatcagctcatcacctcccacggtttgggttggattgcgatgtgagtgggtggcatctaaggttagagtcaaacctgatattcacaattagcatagagtttcgggtctgaggcggggccaggccaacaatcaattaggaatgtattaagttacctactttaatcggcagctcggtcgagtgcgttaagcatacgacgtggtggccagctgttatcggaagagcacatgccagctattattaatattttacggccgtgcagctggctgttcttcgccttttcgctgcccttttgtgctgctggtgcgataagccaaagccaagaaaatttctattagagaatggagcggaaaatctgctttacaatggtcaatggcctgactgcgtgaaaaggcttaagtctagtgcacctgcagatgcaaaaaggtcctgattgcagctaaaatctttattgaaaagggggctgcgagccacggtagccatggccaccagccagccattggtggcgggaagcgagtgccagaaatctggcagagctcggcagaacatcaagcaattgttgtacccgttggtccgagtttattaaattccgcatttcattatgagtgcattgcctcatagagagcttcatgcggctatgttggctttgggctcagacgctcggatggaagtactttggcacgcctgttgctgagagccaaagttgcgcagaacccatgttcatgccaactgtgcgtatacgtgatggtcgggcacaatcggtgcccaaaactgacaagtttggcaaaatgggagtctgcaagcggcatgaaagccaagtcatgcacaacattctgattcttgttctcacattatgatttctgctccgagcagggaggaagtttcgaaagttttcgcatggaatttaatttgcacatgcccgcttctttcacttttggcaaatggcatgcaacacgtctcgtatacgcaatgcgtttgctgtaaaattaatttgaatattaattaactctctctcgttacccagatataatttcccgagcactgaactgttctaaacagaaatatatttaatttaccacggcccctcctcattcacttgcttgtattttgatgggcggaatatgggtgattttaattagatttaatcctgcaaacatatataagataaatattgataaatgtattatctttggttatttcagtgtttcgctgcaacgcaaactggagcatccgactttgacatggacgagctcgatgacctggaccaggtgacccaagtgattggatatcatccccagttccacgatcacttcctggccacccagaacttcattatgaagggcgatggtccgctgcctaacgattacagatactacttggccataattgtgagtaagagctcagcatcaaactgaatgggggcgagtgaaatgcatacagacatgagctcagcgcactctattttccgtttgctattcccaacatttatttcgctgccaaactggcccaaaacaatagccattgattgggccaatgaagaacatggcctgctgtgaatgcgagcatacggctctaaacagcgaatcgggaatccgttgctgctggatcgcatttgcattgttctgtccgaccttttgttgggaaacccattcacagcacgtactgtgcatctggtgtgtggaaccttcaaactgcatttcgcgtattcgttgaaatcaaatccacctgagcccgaatgcacttttcaaatgaggcaaaacagggcacagagtctaattcttagatcgaatttgcaagagccaagtttcagtttctatctttcaatgacttaccttactaactcgttggcatatcaaaaagaataacaaagaattagtcactcgccatcataattaagatccattctaatcactttcggcaataagagtggggataaacgtgtaattaaaattgatttatgctttcattgcgcagtcgatgcacattcattttagattttcccagctgcaattgggagatcgaagtgctagaatagtgaggaaacgcattaatcaattatttcacaagttttccaattgttgttctgtgctattcggagcaaatgagttggcttcttggcccctgagtataatttatagcccaagttgtgcgtgtgcaataatcgtaaagccaataaaaagtatagtatttgctgcctgtgggtgacattttggccgacgttcgctgggttgaataatgaacacattacaattgggacagctttccacgggctgtttttcgcttctatttcacattttatttggcgggaaagtgcacccaagagtcgcatagagaacagcgcggattctggcactgcctttgtctagattcgagcctcggcgaatgtaaaattatttaagatttacgatggcctgtcagggcatgccatgatgccatgatgccacgattccgctgcctggctgcccaagtctccttaatgacaaacagctaaatgaaacataggagaccggtcgcaaacaatgggccttttgctctgaatgcccgaaaatgtgttgttttgggtcacaaacaacacaaacatcacaaaacagccacagccgcacacacgcaccgcgatcgaaataggtgtccacgtattcttggcacccaatcaagtggtggtggctcattcggaggcgatccctcccaggtcccgcgctctgggggattttcgattgtgggtcacgccgactaacaacgcgaagtgcgggaggttgggggccaaggttaggcgagaagatcaaaacaattacgtaatgcctagaaaaatgttacctgaaaccaataccaatactaatactctcacgccttcatttcgccaagcaaagcgttggagttcaggcgaataaaatcaagcttaagtctatatgtatcttattattataatccatattacttgcgattaaatgaaaacatatgcaactgccattagccagctattattcagtaaatcttaattaacacgacgcgaactgcaacttgcgacccggaataaatggtatctctgtttgtggtatctctaggctgctgcccgccatcagtgtccgtatctggtgaagcgctacgagaaggagttcatcaaccagggcggcgatagtgcctggctgggcggcctggactttatacccgccaaactacgtgccatatacgatatcaataaaatattagcccatcggccctggctgctgcgcaaggagcatatcgaggtgggtactccgccgagcggatttggctggggcaagcgtggaatgaaaactttgtgctcttacagcggctcaccaaggggaagaacagctggtcgctgtcggaggtggtgcacgccatggtcctgctctcgcacttccactcgctgtcctcctttgtgttctcctgcggcctcacacaaaagctggacgggctgtccagtcccaagctgaagagtccgcccgcagcagtggcggccctcgcacccaccattctcatcactcccacctcgccgacggagccgcagaaggggaagccagtgctggcggagatctcgctcaacaatgcaaatccggattacgacagccagaccgcagcgagcagtaatggaggagctccaccggactcggcaaatgcggttgcggatggacccgatgcaacgacccttaacggatatttgggtgagtacacacagagagaaatctgtggtgccaaaggaatctcaattgttgtaaattctaccatattggtataaactttggtgtactccctgctactccttgactaacttgattgattggcagccacggcgcagcagctgccgcagcagcacggcatcagtgtggagacgctaatggagcgcatgaaggtcctgtcccagaagcaggacgagtgcagcgaggcggagctgagcagccgcttccagaaggtggagcagcagacggcggagctggcggccgtgactccggaggcggctgtgggcgtgcccaccaacctgtcgcactacgtggacgatgccaacttcatttaccaggactttgcccggcgcggcaccgagagcatcaacacgtttcgcatccaggactactcttgggaggatcacggctactcgctagtggacgggtgagtgatgagcagcggctattgtcccatttgcgctgagcgtaggatttccattcactctccagattgtacaacgatgtgggcatcttcttggacgccaagtttcgggcggcctacaatctcacctactgcaccatgggcggcatcaagaatgtggacacgtccaagttccggcgggccatttggaactacatccagtgcatctacggcattcgccacgacgactacgactatggcgaagtgaaccaggtaagaaatcaattatgatggtcattcactttcaaagatgtctgcaacattgtgaaacaggcaactttatagtcgaatgccttgaagagcacttgtgccattgagttcttggccgttccaagtattttccatattttccaattaactttataaacattcctggaacacccagctcctggtgcgtcccctgaaaatgtttattaagacagcctgctgcttccccgagcgaatcaccaccaaggactacgatagtgtgctggtcgagctgcaggacagtgaaaaggtgagtggaatttccccagccattagtcgcctctatctgataactgtgatatccgcaggttcatgtgaatctgatgataatggaagcccgtaatcaggccgagttactctatgctctgcgcgagataatgcgctatatgacttgatctcattaagtgaataaacatacatacgtacgagtatatatatatacatacacgcccaaaaaccactcaccacacacatacccacacatgcataaaacattttgttattttgagagagcgcatcggaaattcggcgaatcggaaacggaaacggtatctgaaggatcgatcccagaggcaggaagagccgcgaaaatactgttttgaacacaacgaaaagatggagtaaatggagcgtgtgctaagctacatggatagcaattaatagccattcgatatcggtgtccattaaatgaatgtgaatcgtttactactcaattaccaatagtctgtgtctatggttagccaacacgccaattaatcacgtatgcagccacaatgcaagaatggaaaataattcccaaattgagctgaactcaaaagccaaaccttctgtctgtttccctttcgtgaatgtgcaagcaataatcactgtacatatgtattatgttttgtttaattattttagcgcaataaatacaactttattttaattaaaccacccatgttttttgttttactccttcatccgtttatgatctcttttttgtccctgattacaattattatcctgagtttagtgtttcggacagaaaacgatggtgattcaaaatggtcgagcttttgatggagagataataggtataaatgtctattttgatagtatttaaatcaactaatcaatgactgtaa

SEQ ID NO: 23666 - DNA, 2459 bp, DROSOPHILA
ccgcgttcagttgtccggctagaaaagcggaagaccgggaaatccagacgcgctacagacgcccgatatctgctcccactctcagcgcaagatcgcgggaaatcaggaagctccgaaaacatcggataaccgtttttatttttattcccctttgttttcgtgtcttaagtttcggagcccttcgccgatttccagcaattagttactacatcatatatgttctgtgttatcaaaaacgcgagcgaaagaagcgctctatctgcgattgtaaagacaaacaccacaagaaagtagctgtgtgcccctcgggcaaatgaaccgaaattaaaggagattacaaacatcgctatcaagcaaatgtagagactgttagtccggcgaacaaaggctagcaacatctgaggagcacaagcacgtgcagagtggaagggtcgccagctcaaaacgacaaatgaaaaccaaaaaccagaccaacatcatctgctccaactgccaatgctttagccactcgaatcggggaatagccatcaccgacgagaagaacgtcctgcggatccagagctacacctacaagtgcttgaaccacaatccgcgacctcggatattccgctgatagtgatagtggactctggctgcagagagaagaagaccctagcctgaccacaccagaccagcatcgcaatcagaagcagcagtttaagaaaatctggtttggctccagctccagctccagcgatccaatccgctctgatacgatacgatacgatacgattcgattcggtactatacgatccgcggacgagcctcctgctttggtgcatttccagtttggcggctgctccactttcgtggctccataaacaaagagccgggcgaaaactggttattttctcactgcgatcgaagctgcagctaccaactgcaatcgactgcgacctctgattccgaatccgagcacacgtcgcatccacatccaactcgactcgatccctccgccagactcatgtactacgccgtcgattactacgcggatatgggacaaatctctcaagattgtttcgctgcaacgcaaactggagcatccgactttgacatggacgagctcgatgacctggaccaggtgacccaagtgattggatatcatccccagttccacgatcacttcctggccacccagaacttcattatgaagggcgatggtccgctgcctaacgattacagatactacttggccataattgctgctgcccgccatcagtgtccgtatctggtgaagcgctacgagaaggagttcatcaaccagggcggcgatagtgcctggctgggcggcctggactttatacccgccaaactacgtgccatatacgatatcaataaaatattagcccatcggccctggctgctgcgcaaggagcatatcgagcggctcaccaaggggaagaacagctggtcgctgtcggaggtggtgcacgccatggtcctgctctcgcacttccactcgctgtcctcctttgtgttctcctgcggcctcacacaaaagctggacgggctgtccagtcccaagctgaagagtccgcccgcagcagtggcggccctcgcacccaccattctcatcactcccacctcgccgacggagccgcagaaggggaagccagtgctggcggagatctcgctcaacaatgcaaatccggattacgacagccagaccgcagcgagcagtaatggaggagctccaccggactcggcaaatgcggttgcggatggacccgatgcaacgacccttaacggatatttggccacggcgcagcagctgccgcagcagcacggcatcagtgtggagacgctaatggagcgcatgaaggtcctgtcccagaagcaggacgagtgcagcgaggcggagctgagcagccgcttccagaaggtggagcagcagacggcggagctggcggccgtgactccggaggcggctgtgggcgtgcccaccaacctgtcgcactacgtggacgatgccaacttcatttaccaggactttgcccggcgcggcaccgagagcatcaacacgtttcgcatccaggactactcttgggaggatcacggctactcgctagtggacggattgtacaacgatgtgggcatcttcttggacgccaagtttcgggcggcctacaatctcacctactgcaccatgggcggcatcaagaatgtggacacgtccaagttccggcgggccatttggaactacatccagtgcatctacggcattcgccacgacgactacgactatggcgaagtgaaccaggtaagaaatcaattatgatggtcattcactttcaaagatgtctgcaacattgtgaaacaggcaactttatagtcgaatgccttgaagagcacttgtgccattgagttcttggccgttccaagtattttccatattttccaattaactttataaacattcc

SEQ ID NO: 23667 - protein, 437 aa, DROSOPHILA
MYYAVDYYADMGQISQDCFAATQTGASDFDMDELDDLDQVTQVIGYHPQFHDHFLATQNFIMKGDGPLPNDYRYYLAIIAAARHQCPYLVKRYEKEFINQGGDSAWLGGLDFIPAKLRAIYDINKILAHRPWLLRKEHIERLTKGKNSWSLSEVVHAMVLLSHFHSLSSFVFSCGLTQKLDGLSSPKLKSPPAAVAALAPTILITPTSPTEPQKGKPVLAEISLNNANPDYDSQTAASSNGGAPPDSANAVADGPDATTLNGYLATAQQLPQQHGISVETLMERMKVLSQKQDECSEAELSSRFQKVEQQTAELAAVTPEAAVGVPTNLSHYVDDANFIYQDFARRGTESINTFRIQDYSWEDHGYSLVDGLYNDVGIFLDAKFRAAYNLTYCTMGGIKNVDTSKFRRAIWNYIQCIYGIRHDDYDYGEVNQVRNQL

SEQ ID NO: 23668 - DNA, 2555 bp, DROSOPHILA
cgacgactgccacaaccacggccccctccacgtccagcgacacgtcctcctcctccacgagctccgacagcgaggaggtggacaggctgaggcgcaggcttcgcaggctccggcggctgaggcgtcaggagaggcgccaggagattcgccgggagaggcagcaggaaaggcgccagcagagtcgtgctggaagaaggcgccaacgtaggggataaaccatcggcttaacccgatcgaacaatgaaatggtccaaattgaaaaataaatgcatacacaaaagcaacaatcgtagttatgacttggtaacttggcaccttaaaaacaagtgaaatcatttggatcgaattgttagtcaaacaaagaaattcaatattcggtttcatcttggaaaagaagaagaaggctacactatatactctaatgaagaatcctaagtaaatcattttccgatctagttagttgatcaagtggaactggtctaagtgcagacataattccagatgataacttaatcgattaggaacttgcaaatgaaagtgaaaaataggagtttgttctaagttttcttttagtgagaattcattctttatgtacaatatgccatcttaatctttatttaagcttagaggttatttaaatatggctttctgttcaaaaggcttaacaatacatattcatctatttaataaacaatgtaccgtgtttgcacacatgctaacaatacgttcagccagccaatccaaaaaaaaaccgttttgtttaattactaacgaattagaactttccacagccatcaacagctttcgcgcttacagagaagatagtctcgtctttttattgagtttaatctatttgtcttgacgagaacgtaaaatgtactctaaaacattcaaagcaaacacagattcgacaattaaagcgaatcaagtggatcatccctataaatactcggatttaaaccactatccacacagtactccatttagtgacaaactgagctgaagatgcgttgccaattcgttatcgcctttgggcttttggccctaatagcaactgcctacgccgattctccacctgcggcaggatccccacccgcgtcatctccaccggctggaaccccaacctcgccacctccagcgactggaacaccgccctcaccatccccagcgactggaacaccaccttcagcatccccagctgctggtacaccgacctcgccaactccagcgactggaacaccgtcctcgccagctactcctgatgcgcccgcttcctcgacatcaccagctacgcccacatcgcccagtgacagtggatccagcagcagccaggaagtgattaggctcaggcgtcggctgcgccggctgaggcgtcagctccgccgcgagaggcgtcaggccaaccagagtaatcagaatggaggtggtggtcaggggcgagtggttcgccgtgtacaccgtcaccgtcgtctattgtaaaattcacgaacatgttggctacgaatttgaaataaaattccagacagaaatgcaataaatctaaaaaaaacataaatgtattgaatggctttttaaattagaggaaccatcgctctttttgtaatgcatacattagtaaactaacttatatttgcccaacaaactttctaaacattgcaatgaatatttcgaatagaagcgttctaaacattgaaataaatattctgattaggaagttcgttgcacatatttaattcaaaatgaccgcgaaacggtgctgccagatgtctgaatttcgtgcactgcggagcggatcttctttctactaaggcaggaagggtcatactaacacctccacttctcaccaaaacaaaggttaccccgaaatttaatcaaaataaatcgaaatgccggtggattggttcggatatgtgtacgcagccacggtcgccgccggaggaatcatgggatacgccaaggcgggtaagtgaccagccccctgaccgtggtcatgtccgattgtgcaacgccctgcattccaggttccattccctcgctgggtgctggtctggccttcggagccctgctcggctatggcgcccacctcaactcccaggacacgcctcgtcccctgctccagttgggcacctccctgttcctggccgggctgatgggcgcccgctggaaccgatccggaaaactgatgcccgccggaatggtgtgcatgctatccgtggccgccttggtcaagaacctggccacctataatcgctacctaatgcccgccggcacaaaggccccttaggctaatttccggccacatgctggacttgccaggagattgccctaccttcattcttcattcgtattgaataggttttctacttttcggtgattggaactttggtaatgcgctgtgtcactttctaagatagtgattaggaactgtacttgctgcaaatatattttatcacctatgcttttaacttgtggacttctttgtactcaattgtaatacttggtcacatttaatagcatactttcaggcactttggtatgacagttcgcatagaagc

SEQ ID NO: 23669 - DNA, 555 bp, DROSOPHILA
tgaagatgcgttgccaattcgttatcgcctttgggcttttggccctaatagcaactgcctacgccgattctccacctgcggcaggatccccacccgcgtcatctccaccggctggaaccccaacctcgccacctccagcgactggaacaccgccctcaccatccccagcgactggaacaccaccttcagcatccccagctgctggtacaccgacctcgccaactccagcgactggaacaccgtcctcgccagctactcctgatgcgcccgcttcctcgacatcaccagctacgcccacatcgcccagtgacagtggatccagcagcagccaggaagtgattaggctcaggcgtcggctgcgccggctgaggcgtcagctccgccgcgagaggcgtcaggccaaccagagtaatcagaatggaggtggtggtcaggggcgagtggttcgccgtgtacaccgtcaccgtcgtctattgtaaaattcacgaacatgttggctacgaatttgaaataaaattccagacagaaatgcaataaatctaaaaaaaacataaa

SEQ ID NO: 23670 - protein, 157 aa, DROSOPHILA
MRCQFVIAFGLLALIATAYADSPPAAGSPPASSPPAGTPTSPPPATGTPPSPSPATGTPPSASPAAGTPTSPTPATGTPSSPATPDAPASSTSPATPTSPSDSGSSSSQEVIRLRRRLRRLRRQLRRERRQANQSNQNGGGGQGRVVRRVHRHRRLL

SEQ ID NO: 23671 - DNA, 2522 bp, DROSOPHILA
ggccaccgtgctgacctccaaaaataggtccttctgaagatgagcatatctcgggtcgcctgtgctgcgcagctgctcttctttgttacgatcgcggatcgaactgcgacccttaatggcaatcttgcactgggtctcctcctgaaggcgacgcagcgaattgcccttgggccccaggatcttgccagtgaagttgaactgcgcaagggtacggatttatttttcgaacggagaggacagctaattgtataaacccaccttgggatactgctttacgggcacgaagaccttttgggtaatcttcatcggcttctgcttgtacacgtctgcgtagaactcttttccgggaatacgaccagtgcagtagacacggtccacagctgcaatattgggattagtaccattaaaataccctgtaaaagggccaaattgattttaccctcgtcgattagcagtgcgcaaagtggaaagtccgcggacaatcgctggcgctcctcgtccaaatcggcgagaaacttttgggccacctcgttaagacgcggctggtgatcgtgggtgggtggctgtttctcagtaaactcgcttggggtttccatttttatcataacaatctttacagaaaattacaattaaaaatggtgtagactgaaaaacagtatgtacaccaatgaactaaaataatggcagagctgccaagcgtgtgaagttttcgggctgccaacttttttaattcaatagtgattgtttaaatgtcgattttttccactgtgtacaaaatgtcgtgtttgaaacacagaagtagtacaattactatagattattttaaaaagttaaatctgttagtaaggagcttcgccgagaagatagcggagctgccaccatttcgatttcatacatggtgcaatatcgatatttttggcggctgccttgatactcatctctaaaaatatggtatttggattgcattcgcttggtttgttttcaatttttatagtgcgcaatggccagcgaggaactatttgaggctgaattctcggaagaacaggacttggagcatcagcaggccatggagactgaggaggcggagctagcggaaacagaagagcctttggaaatcaccgaggaatcgccggataatcctgaggcagaatctacaacagaacaattgacagaaaaaccaggtaagttagatgcacttagatagaatttctcctatatggctcctttccttccagtgacgaatggcaacaaggcccctgctgataacgaagccaagatgacacaactgccgttggccaggatacggaacataatgaaactagatccggatctgcatatggccaacaatgaggccgtgttcatagtggcgaaggcagtggaactattcatagcctcgttgtcacgggaatcatatacctacacggcgcagtccaaaaagaaaaccatacaaaagagggacgtggatatggccatttctgctgtggacagtttgctattccttgatggagccatgaacttttgaacacccccacaaatgaaactggatttgtcgattatacttttatactttatttagggatattcagcggcaaacaaattcagttctaaacgtccttatggttttatgttaaaaataatatttaagttataaaacaattgttgattcgcaaagaaaaaaaaacaaaaaagaaatcataattataaacgacaacgtttaacgtttcacaatactctttgctattcggaatttgtaacgaagccggcatttggttaatttatttaactgctgaatagtgtggtttgttgtttgttaatcatactctgtccgcaggcgatacttactttgtcgttgggcacatacatttgtagtttatattttgctttttatgttggttttatctccattatcttatgaaacaatattttcaagcttagtctaaaattatgctttgataaattaattgttttgggggggttttcgcttgtgtttagttctcttctcgtattggctttaactagtattaggttgattgaagtatgtcttttgtttttacaatctttttgaggataaaatttgttgcattattggtttcttgttttaattttaaacacaatttgaatatcggacaacagttgcaataaaaatttacgttttttatttgattttcgtttatatattatatttaataggtgtgaatagttggattgttgacttcaaacattttgatatttcgttggaatatattttaatctttacgcttaacattgtttagttgtggttgttgttgttgttgtagttgttgttgaggttggtttcttggggttttggaaaatcgatgggttaacgtattttcggatatggagccgagcgatatcgcacgctttcacgagatcgggatccagtttcgtagtgagcagatgaatgtgatcccgagcccgaggtggttggtcgatatgacgatgatgaacgaccgttgcttggttttgctattttgaaaagaattttatttgttgtttagact

SEQ ID NO: 23672 - DNA, 468 bp, DROSOPHILA
atggccagcgaggaactatttgaggctgaattctcggaagaacaggacttggagcatcagcaggccatggagactgaggaggcggagctagcggaaacagaagagcctttggaaatcaccgaggaatcgccggataatcctgaggcagaatctacaacagaacaattgacagaaaaaccagtgacgaatggcaacaaggcccctgctgataacgaagccaagatgacacaactgccgttggccaggatacggaacataatgaaactagatccggatctgcatatggccaacaatgaggccgtgttcatagtggcgaaggcagtggaactattcatagcctcgttgtcacgggaatcatatacctacacggcgcagtccaaaaagaaaaccatacaaaagagggacgtggatatggccatttctgctgtggacagtttgctattccttgatggagccatgaacttttga

SEQ ID NO: 23673 - protein, 155 aa, DROSOPHILA
MASEELFEAEFSEEQDLEHQQAMETEEAELAETEEPLEITEESPDNPEAESTTEQLTEKPVTNGNKAPADNEAKMTQLPLARIRNIMKLDPDLHMANNEAVFIVAKAVELFIASLSRESYTYTAQSKKKTIQKRDVDMAISAVDSLLFLDGAMNF

SEQ ID NO: 23674 - DNA, 4316 bp, DROSOPHILA
ttgtgtgctattttaagaggaagagtgggtggtgtattttccattacaggttcttcatttctattctttcaggtcaaaataaaaacattctattttagtaatattgtcgcaatttgtaaagctttattcaaattttggcgccctagaaagccgttataaacttggtattttatgggtattttccaagtggattagtatattataagcgtgagttggcagcccagatgccaacaagtatatttcatttgttgtgtgtgctatataaaatatatatagtgacgtatttgggtggtccaaaccagccacttccattatttcaaagaaatcagtaatgcactctagtaattttccataacgtatcccagctgcgcagcattcgtttatctttggcagcgcagccgttcttgtaaacatcctaaagcctgacctaagcagatttgactgccctctttcaacgctacctaatcttaagaacccaagagcgaggctctcccgaaatacaaatattgttcaaatactgaggcttctcctcaatccaatttgcatttgatttttagtcttaagctgagatccaaagaataaagtcgtgaaactatttctcctaaaaactattttttatttcttggcgttgtccttagtcaactgacgggacattagttcgactcataaataaaacaacaattttactatattaattataacattctatttgatatatttttaaaaataattaaaagttcactttatcaattaagcaccccatacgatataaatcagtcattgaagcttaccaagcatacgtacgtacagagataatttgcgaaatacccgaacttagcagcaaatggagcactgtttaaactccgctttcgtaaagtaacggcttttggcgcccgagtggcgctgtcatcggaatcgcgattcgcaagcgaggcgacggttatagataatattcgcactgctggtcgctgaagtataacaaaacaaggagccaactggtcagaccgtcgaatgcgtattttcgactgcggacgatttcgagtcgctcggagttaacgttaactgttatttttagttaaaaattgcatccgatcagtcgggaacgcgagttgaggcccgcgactatgtggtgtttaaagacaggcatccgcaagataggaatctgaatcggaatctatatctgaaactgaatccggagattcggcccaagaactccagctccagatcgaaagtccacacacacgcacaccagcaccaatacccataccatacccatacccacggcgacatatgcacacaatcgcagtcggattcggtttattaacggtagttcagtgattgcgggaaagggacagcgagcgagcagcgaggataacgggaaaggatggcattgccgaagaaaattaaatgttttaagtatttggtttacagttatgtggtgctcctagcggtaagttgcattgctgtgcgcccaaacggggccacaactacatgcttgtcaaattacataagcctacattgtactcacactcgaatgtattgtatgtatgtacgtatttatgtatgttgattgtttgtgggtcgcgaagatttccagattttcatatttgcatatttcaaaagacatcaatgaaagagacacccaaatacacccttttgtctcgacaaacggagttaattagtttctgaaagtaagtcaattctacccatgtagataacactattgatacacacccgccagtgcatttctacatcagtaacatacatcgtacacaaatcatacatcgctggcaggataatgccttgcgttcgttctggtcccgacttgcggcgaccttgagctacttaaagctgcgctaagtacataggcacaagtatacacatgcgtgcacatggggctccttggcatgtgacgtcaaaagggagtaggccccattgccacagtatccatggtgtatactacgtggtgcagggcgcatcccgaatacacacggtgcagctgaggccgcgtccaaggacacccagagtgcggggccttgagatgaaaatcagcaggcagtgataagagcagcgcccgtaatcctcatccgtatccttatctctactcccttgcagctgactggagctgcgcagatcttcctgggcacatccctgctctggggtcactcggtctactatggaattgtgcagaacaagctgtgggctccggccgcgatcctgctttgcctgggacccgtcaccttcatcctctgctggatgggctgccaggccaccaatcaacgcaagcgatgcctgctgggaatggtaatggtcatgttaggcctacttcagttccatcgtaacccgtatcctttggattcacgcagtttgccgcccttttggttgcctgcatctgtgttcagttcatcatctgcggctggtcgctggccatgagggagaacctgcccacttccgtggagatcttcatcgacgactcctttgtcgagttcttagacaagttttcgcgcaccaaggtggataacctacatctgtggaataggatgcagtcgcaggtgagccaagagcgggctatgtaaatctagtggttttggggtatcctaacgtagagatggcgttccaattcatccccgttccctacccattagttgcaatgctgcggcgtcgacggacctctcgattaccgccgactttcgctgccctggtcctgctgctcgcgcccggagcacgcctacgagtcagcatgtgatacccactacaagcgcggatgcctggccgtcgtatcggagcagatcaggaaccgcctgctgatcaccgccttcggagctgccatcatagccatattccaggtgagtcccccccaatggattctctctcaactctcagttagttgaccaataataaattgaaaaccaattcgcacagagcctgggaatcttctgtgctgtccacctgaccattctgttcggcaagaacgacaacacccatcccatgaacatgaaccggaaaaagaagcagcagcagttcttgcccctgaccatacaggacaagaggcacgacatgccctcgcccatcaatctatccccttcagcacccgggcagcgggttttaaaaactgctctgccctcggccatgcacaaatgacagacgattagcttttaaggatgcaaaaatttatggaaactccaaagaaaaagtataaaaaaaatgttgtaaactgagatggaatgaatataactgtgaccctcaatgttacgttatggtaattttaaacaatttaacgttcgagaaaagaaacaacatttgaatttggattaactctccagtagtttaattaaagcttaaaaacaattggatctaacttgtttgtggccaggagttgtcgtgggtccacgggttgtccactagccgttgtgcgtgatagtcggcggcacatagaaggtgtctgctgccttgggcttcttctttttgccgaaccagcgcttgggatagtagaccttcttcttgtagatctggatgtcgatgtcgtcccggttctcgaagaaccacaggttctgccgcttcgcctccagttcgctgagggtcttctggatggtggccttacgctcctccacgctctgcgaatccagttgtcgctgcaccgctgcctcaaacttcttggcccactcctgatacgactcgccgtagtcggccagcagtttgggctcaaacttctgcacattggctttgacgctgttctccagtagcgattgaatggcattcgatttgctactcttctcaacggcttcctgcagggacttcagcagctcttcggatccctccagcttgaggctttcaactatgctctgtgcggctaaaagagtctccttgtgcagggcagctgagttcgaggccagaaagctggaggcctcgggcacttgtccggttaggacatagccaagtagggcaacgttctgcttcagctctttcaaggacccttcgccggagcccaatcgaaccatggcgcgacccagtttcttctcttcggtattttcgctggcgtcgtcggggtaattgcgaatgaacttcacgcgaactttttcctagcaaattcaggtatgattagtaaacttggtaaaatgccaaaatgaacaaaatcttaaatagctatttatgagtgaataaagtttccagccgcttagctgataattcagccactatcgaaaatcatcttaccacttcaacatttttggcaggaggttgaacttgagaggactcgaagggcttgaactccttggcgaaggaccagaaggactgtagggccagggactccagcaact

SEQ ID NO: 23675 - DNA, 1420 bp, DROSOPHILA
cagaccgtcgaatgcgtattttcgactgcggacgatttcgagtcgctcggagttaacgttaactgttatttttagttaaaaattgcatccgatcagtcgggaacgcgagttgaggcccgcgactatgtggtgtttaaagacaggcatccgcaagataggaatctgaatcggaatctatatctgaaactgaatccggagattcggcccaagaactccagctccagatcgaaagtccacacacacgcacaccagcaccaatacccataccatacccatacccacggcgacatatgcacacaatcgcagtcggattcggtttattaacggtagttcagtgattgcgggaaagggacagcgagcgagcagcgaggataacgggaaaggatggcattgccgaagaaaattaaatgttttaagtatttggtttacagttatgtggtgctcctagcgctgactggagctgcgcagatcttcctgggcacatccctgctctggggtcactcggtctactatggaattgtgcagaacaagctgtgggctccggccgcgatcctgctttgcctgggacccgtcaccttcatcctctgctggatgggctgccaggccaccaatcaacgcaagcgatgcctgctgggaatgtttgccgcccttttggttgcctgcatctgtgttcagttcatcatctgcggctggtcgctggccatgagggagaacctgcccacttccgtggagatcttcatcgacgactcctttgtcgagttcttagacaagttttcgcgcaccaaggtggataacctacatctgtggaataggatgcagtcgcagttgcaatgctgcggcgtcgacggacctctcgattaccgccgactttcgctgccctggtcctgctgctcgcgcccggagcacgcctacgagtcagcatgtgatacccactacaagcgcggatgcctggccgtcgtatcggagcagatcaggaaccgcctgctgatcaccgccttcggagctgccatcatagccatattccagagcctgggaatcttctgtgctgtccacctgaccattctgttcggcaagaacgacaacacccatcccatgaacatgaaccggaaaaagaagcagcagcagttcttgcccctgaccatacaggacaagaggcacgacatgccctcgcccatcaatctatccccttcagcacccgggcagcgggttttaaaaactgctctgccctcggccatgcacaaatgacagacgattagcttttaaggatgcaaaaatttatggaaactccaaagaaaaagtataaaaaaaatgttgtaaactgagatggaatgaatataactgtgaccctcaatgttacgttatggtaattttaaacaatttaacgttcgagaaaagaaacaacatttgaatttggattaac

SEQ ID NO: 23676 - protein, 286 aa, DROSOPHILA
MALPKKIKCFKYLVYSYVVLLALTGAAQIFLGTSLLWGHSVYYGIVQNKLWAPAAILLCLGPVTFILCWMGCQATNQRKRCLLGMFAALLVACICVQFIICGWSLAMRENLPTSVEIFIDDSFVEFLDKFSRTKVDNLHLWNRMQSQLQCCGVDGPLDYRRLSLPWSCCSRPEHAYESACDTHYKRGCLAVVSEQIRNRLLITAFGAAIIAIFQSLGIFCAVHLTILFGKNDNTHPMNMNRKKKQQQFLPLTIQDKRHDMPSPINLSPSAPGQRVLKTALPSAMHK

SEQ ID NO: 23677 - DNA, 8208 bp, DROSOPHILA
ccactgtcgcgagctcccagtgcctggccggtgagttggcccccgaattgctgtcaatcagtcagaaattcgccacttaccttcggttagaacagacgcacgatgagcaccgccacgaaaatgtttaaaaaggaatgctgcgctttggcggtgaggggtccattttctttcgaaacgtgctatttcatgacaggctgtggtcacactaccttcccagccgagacgcaaaccctcccagtgcaacaatatttttaatttttttttttaatttttagataataatttgaatgttctatttacaagttgtactcgcatagctagttaacctgcacatttaaaattcatttatttgttaaacaacaagcaaagcctcacctttattgcaccagatcagtaattagtttaatcgttgtatgctaactaatttattaaatttaatattttttaacaaactgaactttattttcgaaatatagcggtaaattttaagaatcgagatgcttgtgatcctgaattgcctatcgatactatcggctaaaacaaaccaaataaaacagctgtggcttaagttataactatatttaaaataacttcgctttaaaataaaagcctaagttggaaaaatataaacattctgaaacgctcctaacaaatcggatttcttataagacgtcaagcaagagatttggatatgctcgcccaactatcggctaacttagtaactactgaattctaagcaatttaaggatttttgccaaataaaaacacaggatcaatgttattacgtttaatccgttcccattaacgggtttattgacttctttagcaaaaaaaaaaaaaaaaaaaaaaaaatacgttgcatgaatgtactgtgcaaatttggaaattataccaaaatgcgccgttctgcaaattaaaaatatttttagggacccaatatatatatgtatatatgcatatgaatataatatgtatttacatacgtacacccacatcggcgcacatcagatgcccatagcccatatagccaattagactcttttcactgccttgtaaacttagcgcggaatcagtaattttatgcgttcacggacgccaaggcggaatcatccataagatggtatcatgggtgctaattgcaataaacatatcttgggggacgtgttttccaaaatacaatcgccactcggcgtcccctatgcgttacatttgatttcaattggacttttcattaatactacgctttcccccactcgcgattccaaagtatatacggtggaaaatcattttgtattactcatgcgcctttaatatgatagttttattttattcgtacaattgaaaagttcacccacatcgggcagcaggagtcgaagcccccaaaagtaaacacaattctacaaaggacgtttccgttggctctgcccagcacaagtgcatcggatcgcatcacattggatcggatcggatcgtcggtgaaggcgaattccaggcgcttgcccaagtaaatcgaatcgagtgaatccgctgtcccccaaaagcattcccgcacgagtgtccggatgtccagtggctggcctgggcgggcacatcctcgggttagataacaccgtccagtccatcctgttccgccaccaccaccacctctgcgtatgtacatatgtacatgcgtgcgtatgtgcgtgtttggatgtacgtatctgcatgcacctctttgtgttccacgtacatagccccgtatctgcactaatctatctgccccctgttgtgtgtacgcggctgcgacggcccaatcgatgggaacagatttgtgcacttatcagcgcgcgtgtaatggcctccacctgggccagctgcctcgtctgggttcgggatgagcccgatctcgctgagagcgccacacacatgctcgcctatcaattcgtcgctgcgggtgggggctggaatcacggtggcagggtcaggaaaccgccaaaaccgttcccactcgacgtctggcacatcgcagcgcatcttgtgtgtcccaagtcgtgccttatgtaaccaagccggtgacataacaccgctgaggcatactaaatggcactaaatggtcgttatcttaagctcgccgctcacagctcgcggcgagtgcggagcgattagcgccacagatcggaaacagcctttatctctgcccgaaagtggagcatacatcgcaggtgcagtggcccatttcggccagacacccaccaagttcgatggtcatgtgatagcggactactaatctcatgcaaatagtgcgactcactagataccttcgatcacgggttatcacaccagttgaggtgcggcagtaatgatgggggcggactaaccgtcttagttatttggtgggctttgcaattcggaacagaaatgttatccttatcttgggagcttatgtgaattcggaaccagccgcactggactagcgatcgtcgggaatgcttttgatcgctaattcctagccgtgccctcggcagggtctccatgttagcaacgacgatactaatgtcattcccatttcagagtgccttacatccacaaatatgccagatagatttcaagttacaaaggctgacgaggacaccgcgttggactacaaccaggatgagtctgcgagcggcaagctactgggggacatccacgacgaaaccctaggtgagaactatgggtcgtacgatggtaaggatgttttcatttttatttgtgccactattattactttagttttactattaactataagagctcgtttcttaatatatacttatacatacttagataagatgtatacatacacaagaaccattaacactgaagagattgtgtgcaatttcatctggtccttgctgagtttcgtcccatcagcacatttcgcctgctcacccccaggcacacgcatttcccctcccatcgagtgactactgtatgcccagatagagcttacggccctgcaatcctatcctgtgctgccccagttgccccagtccgaatccaggatgtcctggtgacacatttcgcggctgctgtaagccaaagctcgtagtacctgacgaaagctcccagatagagagagagaaagagagagagagagagagtgagagattgagggcggcgcagctttctcgcaatcccttccagcgaacgtcggatgctgggtgagagtggctggctggctggcgggcaggtcctggccaaggcagtgggctcagtggccccactgagctgtgggccaccgaatggaaatgtacacctgcaacgaggcgctctccattctcccagcacagctcagcttagctcagctcagcatcgctctcgatttcgctctcctgcgagagtgtgtgtgtattaaaaatgtgtgtagacaaaagctttcgatttcatctcaattgaacgctcagggtcctgggcaacataatttttattcggccgaataccaacagttttcttagtttttctattaatccgaacgaaaagtagcatacatctgagcgttttcgctcgcctaaaataactttagaaggagtcttctttcgcataatacaaaaaacctaaaaaaaaatacgaaaaacgggaaaacatgagaaaccagttctttttgagcacctttaacaaataacatactttaaacaatcgacgaaattctaacaataatcaaatacatgaatacaagtgcgttcaaccagaaagtgtgtccaaattccctcccggagaccccagatccgggcactcggtgtcgaggaggattaccccgcattcccatagaaaggcctcatttcgtaaccattttcagctgcattccgcactttcggtgcatttagccagctcgagagccgctttacggcgaaaaggacgactttacggcatttatttaccgccccacgacgacggcctgaaaatccttgacctaaattaatcggttacatattttttttttttctgtccgagctggctcaactttcgcagcagcatccccgcccgccctgcctgccggacgcaatttttgatccacctcccatcatacctccacctccgagttcttggggcatttcccgattaggagctcccttccgaaaccaaacccaaatctcgagtatataggcacacgtccgcagacatgtgaatatatacaccgcagcggccacgccttttgggttatataatcccaatgcgtggagctccgtctgaagaaggaccatgcccacttagttcttagttcttgaccacgttctcctctagtgttacctaattttaagtgaacatagtgcaatctaaagcaagggtttgaaaccaaacaaccaacgttaacatgcaaagtaacagtgcaaaagatgattcggatgaaatggaaataataccatccgaacacaatggtacagttcacgaaaccaaaaatgaaggtatgcaggggataatatcaattatatagtatatatgtacatatatagtgttcactactagtgcttagtagcttaattacataacgtaagatatccgaactctattcaatcctgtgcatccacagactcaggtgatatccacagggcggaggagaaccagaagtccagcatcgacccaaatctatatctgtacgacgatgatttggagaccaggccccatatatcaacgttcatttcatcaattgccaattatgagaacacgataccagcggccaccgatcccgatgcaaagccggcagctccatcggctcgaatgggtatgttcgccgcgcattaattaacttgcttgttccatctacccccatattgaaaggcatgtgcacaatggaatcgcagcaaacaacaaagctgtggaggaatgattgctgtaatcccctcaaagtgtttcagccttcactgtgcgggcgaatattatagagctgttcgaaagtatgcaacagtgtgcagtagtgtggcacaatcgaagggaatcgctcccgcgattgagtgcatactttcgggcacctgcctaaatggtttcattaaactgatgaccccaagcatcaatctctaacgctcgtttcaatgtctcataaggtaccctaattggagtgttcttgccatgcattcaaaacatctttggtgtcatattgttcattcggttaacatgggttgttggaacggctggcgccgtgtgtggattcctgattgttctgacctgctgctgtgtggtaagagcgtcctgctgctgagccctcccccatttggcctcactccaaactcctctttgcagaccatgctaaccgcgatctcgatgtcggccattgcaacgaacggggtggttccggcgggcgggagttacttcatgatatcacggtaattacaatggcattggtaggaggtagtagtaactctaatggtgccacgattaacatcaacagatccctgggccctgaattcggcggagcggtgggaatgttgttctatacgggcaccacgctagcagcggcgatgtacatcgttggtgccgtggaaatcgtattggtgagttaagagcgcccactcccaggcaccaatcccaggcgcagttccactcgaaagtgccattacttaagcactcattaattattcattgcagacatacatggcgccgtgggcatcgatatttggggacttcaccaaggacgctgacgcgatgtacaacaatttcagggtctacggcactttgctgctcatctttatgggtgagttaagcctgtggcccactagtgaggagcaaacattaatgtcccgccactaaatcaaggtctcattgtgttcctgggcgtgaaattcgtcaataagttcgcgacggtggccctggcctgcgtcatcctttcgataatagcggtgtatgtgggaatatttgacaatatccatggcaacgaaaagctatagtaagtatgcgccaagtacgtgccccctgagcggccatctaatctccgcccgattgcagcatgtgtgttctgggaaaacgactcttgaaggatatcccgctggagaattgcacaaaggaagactccttcttacgcgacatatactgcccagatggtaaatgcgaggaatactacctgggtaagatcccttcatacatgcagagtgttccataccgaaactacaatgccttatcctccatagccaataacgtgaccaaagtcaagggcatcaagggtttggccagtggcgtgttctacgacaacatcttcccttcgttcctggagaagggccagttcatatcctacggcaagagtgcaattgacattgagaacactagtggagagtcatacaaccagatcatggccgacattaccacgtcgttcacccttcttatcggcatcttcttcccatcggtcacaggttagtagcatctcgcagacagaactattcagatattcaagccaatctacattaggcatcatggctggatccaatcgatcgggcgacctggctgacgcccagaagagcatacccatcggaacgatatgtgccattctgaccaccagcacagtctacttgtccagcgttatgttcttcgccggcacagtggacaatctcctgttgagggacaagtgagtagcatagtgattctctgactctgccatggcttatcatcatccaactattccagattcggtcagtctattggtggcaagctggtggtggccaatattgcctggccaaatcagtgggtcattctgattggctccttcctctccaccttgggcgctggtctgcagagtttgactggagcaccccgactgctgcaggcgattgcgagggatgagatcatccccttcctggctccatttgccaagtcttcgaagcgtggcgaacccacccgtgcgctgctcctgaccattgtcatttgccagtgcggcatcctgttgggtaagcatcggatcgtatcatattgtatgtgctgtgaatataatatctataccaaatacaggcaacgtggacttgctggctcctctgctgtccatgttcttcctcatgtgctacggctttgtcaacctggcctgcgctgtgcaaaccctgctgaggactcccaactggagaccgcgcttcaagttctaccactggagcttgtcgctcatcggcctgacgctgtgcatatcagtcatgatcatgacttcctggtatttcgcactgattgctatgggaatggccatcattatctacaaatacatagagtaccgcgggtgagttaatcacagatcatattgtaatgatgaactccaattaagaacacaagtccgttttaagtttaaggcagccgtcgggctgacatatatttattcaatttcttcttttgattttagagtaggcagaaatggttctgtcagctcaacgtctacagagtctctccgattttacagttttttatatatttggacttaggctaatccgcgtagctgcgctgccgggtacgccagcagcggagcggcgttcttatgtatatcttatatatctaggcttatcgggagagcgagatatgtatgtacgtatgtaatatgtatttggtcggcgtgtgaatgctgaccatgcacttatactttttgccttcgattgggcaatgcacttatactttgtggccttcgagtgggtgatcatgttacatccgccctggcctaactgcgtgcataaacataaacataaacatagcaacaaagtgctgccataagttaatatgctattttatttaattgttcttaatattgcataggcaccatactacatctccctcctttttgaaaaataacggtaacctagtgaagttattttgattattaaatgcaaattattttatttttatttttattttgtttgtgtttttgtttgaacaacaatagttgattttataatgcaaagataaaaatatacgtagtgtatggaaaatttgtataaatgattaaggaaaatataagtttaaattcaatcatgaatgaaatttctttaatctatctttatgaactatttgttttttgtttttattagtaagtagcgtaatattgttattatctcctatgctttctatcttatagggccccgtatatttaaagtctaatttatgacctacctcatttcttagtaaaactttatctcctacttctaattctatgtcttttacttttaagtcataattttctttatttttttctttgtgtgcttcaagaagttttcctgctcgagcatatgctacctc

SEQ ID NO: 23678 - DNA, 2420 bp, DROSOPHILA
cacatcagatgcccatagcccatatagccaattagactcttttcactgccttgtaaacttagcgcggaatcagtaattttatgcgttcacggacgccaaggcggaatcatccataagatggtatcatgggtgctaattgcaataaacatatcttgggggacgtgttttccaaaatacaatcgccactcggcgtcccctatgcgttacatttgatttcaattggacttttcattaatactacgctttcccccactcgcgattccaaagtatatacggtggaaaatcattttgtattactcatgcgcctttaatatgatagttttattttattcgtacaattgaaaagttcacccacatcgggcagcaggagtcgaagcccccaaaagtaaacacaattctacaaaggacgtttccgttggctctgcccagcacaagtgcatcggatcgcatcacattggatcggatcggatcgtcggtgaaggcgaattccaggcgcttgcccaaagtgccttacatccacaaatatgccagatagatttcaagttacaaaggctgacgaggacaccgcgttggactacaaccaggatgagtctgcgagcggcaagctactgggggacatccacgacgaaaccctaggtgagaactatgggtcgtacgatgactcaggtgatatccacagggcggaggagaaccagaagtccagcatcgacccaaatctatatctgtacgacgatgatttggagaccaggccccatatatcaacgttcatttcatcaattgccaattatgagaacacgataccagcggccaccgatcccgatgcaaagccggcagctccatcggctcgaatgggtaccctaattggagtgttcttgccatgcattcaaaacatctttggtgtcatattgttcattcggttaacatgggttgttggaacggctggcgccgtgtgtggattcctgattgttctgacctgctgctgtgtgaccatgctaaccgcgatctcgatgtcggccattgcaacgaacggggtggttccggcgggcgggagttacttcatgatatcacgatccctgggccctgaattcggcggagcggtgggaatgttgttctatacgggcaccacgctagcagcggcgatgtacatcgttggtgccgtggaaatcgtattgacatacatggcgccgtgggcatcgatatttggggacttcaccaaggacgctgacgcgatgtacaacaatttcagggtctacggcactttgctgctcatctttatgggtctcattgtgttcctgggcgtgaaattcgtcaataagttcgcgacggtggccctggcctgcgtcatcctttcgataatagcggtgtatgtgggaatatttgacaatatccatggcaacgaaaagctatacatgtgtgttctgggaaaacgactcttgaaggatatcccgctggagaattgcacaaaggaagactccttcttacgcgacatatactgcccagatggtaaatgcgaggaatactacctggccaataacgtgaccaaagtcaagggcatcaagggtttggccagtggcgtgttctacgacaacatcttcccttcgttcctggagaagggccagttcatatcctacggcaagagtgcaattgacattgagaacactagtggagagtcatacaaccagatcatggccgacattaccacgtcgttcacccttcttatcggcatcttcttcccatcggtcacaggcatcatggctggatccaatcgatcgggcgacctggctgacgcccagaagagcatacccatcggaacgatatgtgccattctgaccaccagcacagtctacttgtccagcgttatgttcttcgccggcacagtggacaatctcctgttgagggacaaattcggtcagtctattggtggcaagctggtggtggccaatattgcctggccaaatcagtgggtcattctgattggctccttcctctccaccttgggcgctggtctgcagagtttgactggagcaccccgactgctgcaggcgattgcgagggatgagatcatccccttcctggctccatttgccaagtcttcgaagcgtggcgaacccacccgtgcgctgctcctgaccattgtcatttgccagtgcggcatcctgttgggcaacgtggacttgctggctcctctgctgtccatgttcttcctcatgtgctacggctttgtcaacctggcctgcgctgtgcaaaccctgctgaggactcccaactggagaccgcgcttcaagttctaccactggagcttgtcgctcatcggcctgacgctgtgcatatcagtcatgatcatgacttcctggtatttcgcactgattgctatgggaatggccatcattatctacaaatacatagagtaccgcgggtga

SEQ ID NO: 23679 - protein, 631 aa, DROSOPHILA
MPDRFQVTKADEDTALDYNQDESASGKLLGDIHDETLGENYGSYDDSGDIHRAEENQKSSIDPNLYLYDDDLETRPHISTFISSIANYENTIPAATDPDAKPAAPSARMGTLIGVFLPCIQNIFGVILFIRLTWVVGTAGAVCGFLIVLTCCCVTMLTAISMSAIATNGVVPAGGSYFMISRSLGPEFGGAVGMLFYTGTTLAAAMYIVGAVEIVLTYMAPWASIFGDFTKDADAMYNNFRVYGTLLLIFMGLIVFLGVKFVNKFATVALACVILSIIAVYVGIFDNIHGNEKLYMCVLGKRLLKDIPLENCTKEDSFLRDIYCPDGKCEEYYLANNVTKVKGIKGLASGVFYDNIFPSFLEKGQFISYGKSAIDIENTSGESYNQIMADITTSFTLLIGIFFPSVTGIMAGSNRSGDLADAQKSIPIGTICAILTTSTVYLSSVMFFAGTVDNLLLRDKFGQSIGGKLVVANIAWPNQWVILIGSFLSTLGAGLQSLTGAPRLLQAIARDEIIPFLAPFAKSSKRGEPTRALLLTIVICQCGILLGNVDLLAPLLSMFFLMCYGFVNLACAVQTLLRTPNWRPRFKFYHWSLSLIGLTLCISVMIMTSWYFALIAMGMAIIIYKYIEYRG

SEQ ID NO: 23680 - DNA, 4708 bp, DROSOPHILA
cgactggttttgtggtggcgttctgatcagcgagcggttcgtcttaaccgcagctcactgcctggaatcggaaaggtaagcagaggtttttccctgctcaagttaggaataaatatctcatttttataggggagaggtgaatgttgtgcgattgggcgaactcgacttcgattccttggatgaggatgcggcgcccagagactatatggttgcagggtatatagcccatccgggctacgaagatccgcagttctaccatgatataggtcttgtcaaactgacggaggccgtggtctttgacctatataagcatccagcctgtctgccgttccaggatgaacgctcttccgactccttcatagccgttgggtggggaagcactggcctggcgctgaagccatccgcccagctgctgaaggtgaagttgcagcgctacggaaattgggtaagtaaattggcatgggatattataaatccccatggataatccacattaataaatatattatttccttataggtgtgcaagaaactgcttacccggcaggtggaggagttccctcgaggattcgatggaaacaaccagctctgtgttggttcggagatggcccaggacacctgtaacggcgactcaggaggacctttgctaatgtaccatcgggaatatccctgtatgtacgtagttgtgggaatcacgtcggccggtttgtcctgtgggtcaccaggaatacccggaatctacactcgcgtctatccttatttaggctggatagcccgaactttggccacgttttaaattacatctggatctgtaaatttatataaattttttactaaatacttaaaaaattaaatttaaaagcatttaacagtccgattaatttagaatcgctgctaagtggaagcgagtcattcctacgaaatcgatagaccgaacatatcgatgcagtcatcgatagttgtttacctttttttcccaaaaaaaagaaacatttacaaaacaaaagtcgtcgctggatttggattgtaaattaccaatgaccagaggtctgaagccgcatggcgaatacgatgtaagcggacatcctgcgcaggattccacatcacaatttccccttcctggctgcggcgcattttattttgtccccgcataattgccaattgtgccggatcatggagaaggatctgggtgaggaaaaggaccaggatcaggagcagaacactgagatggagcccaagcaggagatggacgtggcgcagtcttacataacgcgggccaagatgaatcctgccaagaaggataacgagaagcgacgacgcaaggatgccatgcgaagggtaattagtgcgactgtgtgtgtgtttttacgctggcagagcttgttccaatttagattgtttataaattacaaagttcatgtcaaataccaatctttgattatattttagtgtccaaaagatcaaaccccctaagttattataaaataaaccacggtctatatattaagccatgtatgtacgcctatcaagccaatgctaatctatgaaaatgttccaggtctcgatgatactgcgaaaatgcgactccatgcgcacgacggaagatcgacagtttttggagaaacacccggacatggtgaagacgaccaagaagcgcaaggagcgggtagagatatacaaggagcgggttgtggaacgcgaggatgcgccgcacgtgatcgaggcgaaggtggagcagttggccaacatcatttcgcaggctaagcatctagtttgctacacgggagccggtataagcacggcagccctgattccggactatcgcggtagccagggaatatggacactgctccaaaagggtcaggacatcggcgagcatgatctatccagcgcgaatcccacctacacgcacatggcactttatgagctgcatcgccgcagattgctgcatcatgtggtctcccagaattgtgatggcctgcacttgcgatccggattaccgagaaattcgttgtccgaaatccatggaaacatgtacgtggaggtgtgcaagaactgtcgaccgaacagcgtttactggcgccagttcgacaccacggagatgactgcccgctattgccacaagacccaccgcctatgccatcgctgctcggagcctttgtacgacaccattgtgcacttcggagagcgggggaacgtcaagtggccattgaactgggcgggagccactgccaatgcgcagcgagcggatgtgattctctgcttgggctccagtctcaaggtactcaagaagtacacttggctttggcagatggaccggcctgcccgccagcgagcaaagatctgtgtggtcaacttgcagtggacgcccaaggatgcgattgctagcataaagatcaatgggaaatgcgatcaggtgatggcccaattgatgcatctactccacattccagttcccgtttacacgaaagagaaggatccgattttcgcacatgcttcgcttctgatgcccgaggaactgcacacgcttacacaaccattgctgaagaatgccgacgaggaggaggccttcaccactaccactgaggaaacgcaagactcgactatctccagcgagagctgtagctttaactacagtgatcttcccatcggcaaaggaccccgcattcgcacacccatcaaaaatggtcgaagagttaagactaacctggagctccgacagaaattcaagacgctcaatggccaggacgaggaaattaaggtggagcatgtgaaaacaaatggggaggttaaaacagagaaggacttaatcacgctggagtcgtccattaaaatagagactgaagttaagctggagaaattagagtgctcggacaccaattttcagcaggagttgaaacttttggagctgctaccaaagctagaaccactttcgctcaaagaagagacggaggaaacgccgagcaatggttttccagagctgccaaaactagtcgccatacaaaaaactcatgcggaatgtttgtccgcggtcccaactgaatcaagactaaagccgcttcagctgccaccgctggtgcccattggagcaccactgtccacaccctttgttgagcccaaattggtcctgccacctgcctctcagtcgtccagcatacagataaagagcgagggcgatggtgattccagcacagagaacgataacgaagaggaggaggaaagcgagctggcccagatggatttgttgaggcaaaacaacgatgaggagctgcttcgccaattacccacgtggtacgatgccaagtacgcgtattctggtctgcatagcatcctgatcccaccaccagcggatctcaatatttggaactcgcaggtggtgccgaactttgcgatgaacagatccgctgccagttgtttcttctgctttgatcggtatgcggagctggagtgccagttttaccggcgttggaacctcagtcagcgcaaacacaagaaacgggccagaagcggtcggttcgtggtctgcgagtgctgtccaacttccgacgacgacgatgactacgatgagaatatatccttggcacacatagcagcggcggaaacggcaaagcgaagacagcagctgagcacgagttttccacggaagttggcgcgaacccaggcaggatggtatggcaagggctataagaaaggtcggaagagacggtagattcccatttatgtacggccgtgattcctccctaagataagaaggtgaaatgattacccttgagtcaatggctttttggaaacgtttgatcttatacttgatatgaaggagctagctgtttcttttctacggaaaagatcgacctgccctcaccgagacatatgctcgcttcaatagtattttagctataggtttataagtcatagatgatagtggcagctagaatagaatagggttccttttatttagacgtgttttttaaaatgctctatttgtcagtctttgattatattaataggtcagcccgtttttgtctattttcgatatttagtttaattttaatgggtttgattgtatgtcacaattgtgtaactcttgtcctggtattttggtgcacttgctgcagaaatcatttgaccttgtttttaattattaatataggtttttacttttagaacgctaacctaacatccgcccctctacacacgtaagttaaataaagaaaataagcattatggtataatgaaatgcattcgatttttattcgcccttcagttgcagtaaccagttaaaaataaaactgcaatagattcgctttcattatgtgtagaaccaaatttattcattaacttaaacataaagtattgctattttagttatagttttgcgatcccgtgtgagtgtttgtgtgtgattaggcattccatgctgggagcgagcggagacgaagaattggcttccccatcaatcttcaggaggtgtgtgagtctcacgtggaacattgcaaaatacccaagaatcaacagaagaccaggcaacggaaacaaacaagggataactacacacatagaaaacagcaggttgattagattaacgctatcgatcgatatactcgggggcagggcgtgggcgtgggttcggaatttccagggtgcatgtagcgcacaaaacataatatctagagctacgcagagcagccagtgggccaatataaaaatac

SEQ ID NO: 23681 - DNA, 2488 bp, DROSOPHILA
caaaagtcgtcgctggatttggattgtaaattaccaatgaccagaggtctgaagccgcatggcgaatacgatgtaagcggacatcctgcgcaggattccacatcacaatttccccttcctggctgcggcgcattttattttgtccccgcataattgccaattgtgccggatcatggagaaggatctgggtgaggaaaaggaccaggatcaggagcagaacactgagatggagcccaagcaggagatggacgtggcgcagtcttacataacgcgggccaagatgaatcctgccaagaaggataacgagaagcgacgacgcaaggatgccatgcgaagggtctcgatgatactgcgaaaatgcgactccatgcgcacgacggaagatcgacagtttttggagaaacacccggacatggtgaagacgaccaagaagcgcaaggagcgggtagagatatacaaggagcgggttgtggaacgcgaggatgcgccgcacgtgatcgaggcgaaggtggagcagttggccaacatcatttcgcaggctaagcatctagtttgctacacgggagccggtataagcacggcagccctgattccggactatcgcggtagccagggaatatggacactgctccaaaagggtcaggacatcggcgagcatgatctatccagcgcgaatcccacctacacgcacatggcactttatgagctgcatcgccgcagattgctgcatcatgtggtctcccagaattgtgatggcctgcacttgcgatccggattaccgagaaattcgttgtccgaaatccatggaaacatgtacgtggaggtgtgcaagaactgtcgaccgaacagcgtttactggcgccagttcgacaccacggagatgactgcccgctattgccacaagacccaccgcctatgccatcgctgctcggagcctttgtacgacaccattgtgcacttcggagagcgggggaacgtcaagtggccattgaactgggcgggagccactgccaatgcgcagcgagcggatgtgattctctgcttgggctccagtctcaaggtactcaagaagtacacttggctttggcagatggaccggcctgcccgccagcgagcaaagatctgtgtggtcaacttgcagtggacgcccaaggatgcgattgctagcataaagatcaatgggaaatgcgatcaggtgatggcccaattgatgcatctactccacattccagttcccgtttacacgaaagagaaggatccgattttcgcacatgcttcgcttctgatgcccgaggaactgcacacgcttacacaaccattgctgaagaatgccgacgaggaggaggccttcaccactaccactgaggaaacgcaagactcgactatctccagcgagagctgtagctttaactacagtgatcttcccatcggcaaaggaccccgcattcgcacacccatcaaaaatggtcgaagagttaagactaacctggagctccgacagaaattcaagacgctcaatggccaggacgaggaaattaaggtggagcatgtgaaaacaaatggggaggttaaaacagagaaggacttaatcacgctggagtcgtccattaaaatagagactgaagttaagctggagaaattagagtgctcggacaccaattttcagcaggagttgaaacttttggagctgctaccaaagctagaaccactttcgctcaaagaagagacggaggaaacgccgagcaatggttttccagagctgccaaaactagtcgccatacaaaaaactcatgcggaatgtttgtccgcggtcccaactgaatcaagactaaagccgcttcagctgccaccgctggtgcccattggagcaccactgtccacaccctttgttgagcccaaattggtcctgccacctgcctctcagtcgtccagcatacagataaagagcgagggcgatggtgattccagcacagagaacgataacgaagaggaggaggaaagcgagctggcccagatggatttgttgaggcaaaacaacgatgaggagctgcttcgccaattacccacgtggtacgatgccaagtacgcgtattctggtctgcatagcatcctgatcccaccaccagcggatctcaatatttggaactcgcaggtggtgccgaactttgcgatgaacagatccgctgccagttgtttcttctgctttgatcggtatgcggagctggagtgccagttttaccggcgttggaacctcagtcagcgcaaacacaagaaacgggccagaagcggtcggttcgtggtctgcgagtgctgtccaacttccgacgacgacgatgactacgatgagaatatatccttggcacacatagcagcggcggaaacggcaaagcgaagacagcagctgagcacgagttttccacggaagttggcgcgaacccaggcaggatggtatggcaagggctataagaaaggtcggaagagacggtag

SEQ ID NO: 23682 - protein, 771 aa, DROSOPHILA [sequence omitted]

SEQ ID NO: 23683 - DNA, 4200 bp, DROSOPHILA
gatgttggcgtggagtacggagcacaattgtcggtggcgatcgttgtttgggtttctgttccttagcactccttggggatggcggtgaatatacgttaggttgctataggcgtcatagtttaggatccttcgtacgcttcgctggggaactactgcctttactgatgggtgagtctgaagcctttctataataaactctgatgatgattcataaccgtcgcaaactcgtaagatatcaaaatcacttggatattgccaagccaaatttagacggggaacaattctccagttcgttacctaaaaatggaaagggatataaaagagcttgtgaaaagtgtttaaaactttaaaaaggtacttttctgtcagaaaagatgcgtttgtgtctttcaaaagaagcaggctcaatccgtttgaaataaacaggagaatagacatttaaggtataaatataaccatttgaatacaaacttacgtttgaaccaagaagttttgctgcgatgtaggattctcggaccggggcaaagtattttgaatggaagtgaacgatgaactcatttggaacaacggctgttttaaaggcgtcgaggctgcaaattgcgcttattataaataagaaagtaaacacattcatttaactttgcgaaaggaataatttttacgaaaagttcaacaggcttcgtctgtgtagaaaaataaataaacaaaccgtaatcagctgttagcatgaacgaaaacgtttatatgaaaaataccatgaaattcggaaatgggagatactaacctgtaaacgtgtaagaaataagattcatttcaaaaacttatatttttaccccatagaatattaatgcaacaacattcagttacttttaacaaaaaaaaaaaaacgtttacgttagtttagttcgaacatgttttgtatgtttggtgtatcagcaatgtttattcccacattcctgcacattgaagttctggtcacactgcgtctcgtccggcaaagtttttaatcaagtttaagtaagatatgaaaagctaattaaaatagatcaggaactgcgaaccagcggagtctctgcatttcaacaataagtgatttataattcctttgcaaaagaaatgcgaatagttaactggggcgttcagtagtaggttttacaccttagaaaaaattattgcaattcggttatacttaaagcggcatattcacaggtaccgaaaacacaaagtctaggcgccaaaattgccgtattttctattttttagggcacttcaattcaagttgtacagtcaattcacttgccatttgccttcgggtaatgtattgagttgtccaacatcatagaactactcactactctttatttaaatttattcggaacccattttaattgcatttgaaaagtatattcgcctacgaatacctgctaaccaatatttctatcctacaaataacttgcatgaaaactccacataagaactgataacaccagcgaagcaatataatcatcggctagctgctagctcgatttatcatatactaataagttaatcaaacagaagcatttactttaaagaagatctaaatatgaaatgtaaagagttatcaacaacgagttagttatattaatggaactttgtcgaaaggcttcattcataaatttgcgtatttttcaatcgcagattgaggccctatcatggaggagctgtgcaacaattccggacactcggctacttccagcagtggcagcaactcgtcgatatcggccaaaaccgcgctaagtgaatgctctgctgcttggataaattacttgagcgccttgaacaacctatgtactgccggctccaaattggcgcactctattgcagttttggaacagtggtcgttgagcgaaaagccgttgttcaataattatacaacgacttatttaaccaattcatggaacgacttggcaaggtaaggcaattgacctatttacatacttaagatatacttaaagatatttgtctacactagagcaacaaccgtggccacaggaacagtcaagacccacatgctggccttgctgcaggatttcgtcaccatatcatccatggaccagacctccagtaccgacttggatcaaaagcggctcagggagcacaacgaactgattgtgttagagaatgcacaggctgtaatcaacattcagcaccagttctgtgcagccagctatgatgccttttcgtccctaacttgctgctttgtttgccaatcgccagttggatttccacatgaacaggactgcagtgttatgaagcagcggtacatcacgattaattatccaatttgaacttaacaattaattttttcattttttgaaagcaatcaatacgaccaacgatctcaaacaccttcgcccaatttatgtgggccgagtacaaagatggattcatccaggggaaactcattaactgatcaacgcccaattgccactgcaatttcagaaacaggttgctttagatattcgaacttttatgtccttatataaaaggcaatttcctttcacttaagccgaccagcccagaggtccctcgcctcaactgaacttttgcgatgccaatcctatgcaggccattttcgagcatacacgaggtcccttgccaaaccccggccaattactgtccatgaagattccatttcaccggaacgtcaagtcgtccttaagttttccattatttcccctgaacggtcagcgtcgatggtcggaagcagctgctgccgaggtgatcgatggcatctccacggatcccgaaagccaaatgaggaggtggtcaatgccatgggaagcatctaagactgataggaacactgtcacatggaaccaaaccaggataatgccaatgaacactttgaaaacctcttgctacaagatgtctagctcggaacgatatacttcccactccggtattccctcaaatcattataatttcattttaaaatctaaaacctatttgctgcagatggaaactggcccctggcttcaaccagtcaagatgggctgttagaagctattcaactactatccatcaaacccaccaccgtcccacaaatgagtactcagccctcaattttgtcgacttctccggatggagcatcacttgactaaatttcatctaaactgaaacgaaaataaaaataaatatcaagcatattatacattaaaataatctcaaccactcaattaatttctttattttctgggtttatagaggttattgcgcgacgttggatataaaacacaccacttgggggccaaagaacccgtatccacaaaaatatgttatctactagtaaaatgatttattcgtgctttttaagtttgttatgtataatgccattcattattagtaggtagatcttacacgcttaatttaaagtaaatcttttttatcgaaattataacactaatgagatattctctatttcttacgattaagaacacttataattaaaataaaagatactttatgtttatcattatgtccataatacgttccaaattttacggatattgcgcacatacttgtacgtataaacttacaaaataattattaatataattactactttcaatatatcccggtttaaaagattaattttgtatcatacatttgttttattttttgttaattttattaagactattaatatgttaatgtttgattatgtatctaaggatttctctaataatatggagttttagtattcgtttaagatgtgttagtttaaactaatagaggaatcgtcctacatcttctttaaacttagaaattatttaactaaactctttaattcaggaaaagtgaagacagcaatcatacatttaaaaagtgaattaaaatattttttgttaaacaatattgcacaatattatatatgaatatattttctgtttgtaaatttaattataattaacataaacaatcccactacacagactaatttaagaaactgaggaagtttctcttccagaccgatggttcttattacataattatttaaagttctatatttaatttttaagttccttttattctacaatcgttgaacgatattgcaatatgtatttatgtattttatgattacaggagggtatatactgtattccttaaagtttctatatgaagttggtaagcttttttcagctttgaattttaatg

SEQ ID NO: 23684 - DNA, 1420 bp, DROSOPHILA
tttttaatcaagtttaagtaagatatgaaaagctaattaaaatagatcaggaactgcgaaccagcggagtctctgcatttcaacaataagtgatttataattcctttgcaaaagaaatgcgaatagttaactggggcgttcagtagtaggttttacaccttagaaaaaattattgcaattcggttatacttaaagcggcatattcacagattgaggccctatcatggaggagctgtgcaacaattccggacactcggctacttccagcagtggcagcaactcgtcgatatcggccaaaaccgcgctaagtgaatgctctgctgcttggataaattacttgagcgccttgaacaacctatgtactgccggctccaaattggcgcactctattgcagttttggaacagtggtcgttgagcgaaaagccgttgttcaataattatacaacgacttatttaaccaattcatggaacgacttggcaagagcaacaaccgtggccacaggaacagtcaagacccacatgctggccttgctgcaggatttcgtcaccatatcatccatggaccagacctccagtaccgacttggatcaaaagcggctcagggagcacaacgaactgattgtgttagagaatgcacaggctgtaatcaacattcagcaccagttctgtgcagccagctatgatgccttttcgtccctaacttgctgctttgtttgccaatcgccagttggatttccacatgaacaggactgcagtgttatgaagcagcgccgaccagcccagaggtccctcgcctcaactgaacttttgcgatgccaatcctatgcaggccattttcgagcatacacgaggtcccttgccaaaccccggccaattactgtccatgaagattccatttcaccggaacgtcaagtcgtccttaagttttccattatttcccctgaacggtcagcgtcgatggtcggaagcagctgctgccgaggtgatcgatggcatctccacggatcccgaaagccaaatgaggaggtggtcaatgccatgggaagcatctaagactgataggaacactgtcacatggaaccaaaccaggataatgccaatgaacactttgaaaacctcttgctacaagatgtctagctcggaacgatatacttcccactccggtattccctcaaatcattataatttcattttaaaatctaaaacctatttgctgcagatggaaactggcccctggcttcaaccagtcaagatgggctgttagaagctattcaactactatccatcaaacccaccaccgtcccacaaatgagtactcagccctcaattttgtcgacttctccggatggagcatcacttgactaaatttcatctaaactgaaacgaaaataaaaataaatatcaagcatattatacatt

SEQ ID NO: 23685 - protein, 276 aa, DROSOPHILA
MEELCNNSGHSATSSSGSNSSISAKTALSECSAAWINYLSALNNLCTAGSKLAHSIAVLEQWSLSEKPLFNNYTTTYLTNSWNDLARATTVATGTVKTHMLALLQDFVTISSMDQTSSTDLDQKRLREHNELIVLENAQAVINIQHQFCAASYDAFSSLTCCFVCQSPVGFPHEQDCSVMKQRRPAQRSLASTELLRCQSYAGHFRAYTRSLAKPRPITVHEDSISPERQVVLKFSIISPERSASMVGSSCCRGDRWHLHGSRKPNEEVVNAMGSI

SEQ ID NO: 23686 - DNA, 6029 bp, DROSOPHILA
cgaaccctggccaggaaggggtttgcggtgtggatgagcatggcgagcgcacttacaccgacaaggatggcgtcgagttcttttgggatgcaaccaagagtgcttggttccccaagatcgatgatgatttcatggctcgctaccaaatgaactatggatttattgacaacacatcagcgggggagaaagagaaggctgaaaaggaggcggctgaggccaagagaaaggaggaggaactcaagcgtatgacggcagaggcggaagctgctatgtctagagacaatccagcatccagcgctgcagtgcccactggcaagcgaaaggcccaggagcccccaagtacgcggtattcgacatttagattaatttcctacgatttctaatgataaccttcttttagaatggttcgaaatggatccattgcagaacaccaaggtgtatgtctccaatttgcccctggacattactatggatgagtttgccgatctgatgggcaagtgtggcatggtaatgagagatccgcagacgcagaaattcaagctgaaactatatgccgaaaaggatggacaaatcaagggcgatggcttgtgtgattacatcaaggtaagtgttaaattaaaactctgtattcgatctctttgttttgtgttttttcaaactttatttattattttactttgtttgcttcttaactagaatttatcttgcataaatattatatggtaattttatcatatgtgttcgtattacatttgtgtactgctttcctctttcgtgatttctttgctaacgtttcgctgactatttagttttattcgcttttcatttctccgtgtgtagagtaataatattttaaattggttagtttactattaaaatgcatttacttggctgtaaaattgcttttcatttcgatttcattcccgtccttgccagctttcaatttcaacattaaacgaaacaaaatgtacttcgaggtttttttctttttttttgttttgcctttcgcgtttgaggtattaaaaaatacataaaaatttacatttaaacatactttagttattacatacatctttgtaaaatatagttttgtaatctagaagttaggaaatggtcggtgaccatccgatgatgttatcaaaagattattagtagtaaattattgcttcgctgtgcccgattcgaggacaccataggcaaacccagtgtggggaggcatgggacttggacactgctggactttgacccaaaggagttttccattcaatcttacgctttactcactataaatatatccgtggttctgtgcttgagtttaaaaaattgattttgcgtctgtgtggggtttattggttctaaaattgattgctaacttctagttcggttattaaggaaacatgcgtgactggttgccgtgtgtttacggtgtgtcctgtgtgctgcgtgagtatgtggcgtgtccatatcctagacctatatatagtatatctttactgtacagtactaaaatagctagcgaagcgcatggagattgggtttcctgctcgatcgaaatgcaattaattaaccgacaaaatctgcttcgcagcgatgttcctccattcttccttctcttctgataaataatacttttgcgtgttcatcttgtggtttgttttaattaaagcacaaagaaaacaatcgaaaagggatcgactgggcaacggtgcgtatgtggaaccaattgtgatcgatatgtatcggttagtattggttagtgcgtggcgatttgactgccgcctggacttctactcgttgtcatccaatcgcatggcttgctgtatcctcttcagttcctttgcccgctggtcacgttcctttttctccttcagctgcttgcgccgtttgcgcatctcgataaacttcttctggtcctcgggactcagcgccgagattcgagtcacatactcacgcctcttctcctccaacttagccttgacttcctcgtcggccttctttttggccgcctccacgcgtcgcttctgctcggcggccttggcctcttcggcagcccgttcctcggcctccttggctttacgcgcctcttctgcctgtcgcatttcatcttctagtcgctgcttaactttgcgttcctcttcagccacttccttgcgcagcatttcctcctcctcagctagttttttctccgcagcctcgcggagtgctatttcccgctcgcgctggagcttctgctcctcgcgccgctggttctcctcgtgcaggcgctttagttccttctcctcgaagcggcgagcctcctcaagcctctccagttccaggcgcttttcctcctcctcctgctcgcgtcgaatctgctcctgccgctcgtcctcctgtttcttaagctgctcttgcagcttcagctcctcaagtcgcttggcttcatgggcctcggcaagttgcttctcccgctcggtattggccagccttatgcgctcggcatacagatcatgcagtcgcttctcttcagccagacgcttggcatggttttggcgatcctgttcctcctgttcttcgcgctgtttgcggcgctgctcttcgcgctctcgtcgctgttgtgcctccagttcgcgttgtttttggatgcgctccagtcgtagcttctctgcctcctcgtccgctgcgtgctggcggtctgcttcagcctgccgttgcttcaggagctcgagctcgtgctcacgcttttgctgctggtaatcccgttcctgcttttctcgctcctgcttggctttaagttcgcgaagttgctgttcctggttttccttgagctctttctgatgcgttctggcctgctcttcctcttgtttaagtctatcctgctcctctctgtccttttgttcctgttcatcgcgttgcttttgctgttcttcccttagttttttttcctgttcatttcttagtttctgttcgtgctcgtccgtttgattcttatccaaatcctcaccagatctctgacggagttcatctatcacttggggcttcacttgggggttcacttggggtttgggttcatcgtgatgcaatcgctgcctgcgctgctgttcctcccgctgcaatcgctggcgttcctccttaaggcgacgttgcctttcgcgcttttgctccctagccaacttctggcgttcctgccgacgcagctgtcggcgacgttccctttcccgttgacgttgcaatttacgatcgtactgagtcatctgctgaggcgtgggtgagggagccaggacatcattagactggctaaccgattgcgtagtagttggcgcaacagtagaagtacgaggacgattcctttggcgttgctgtgctggctggtagttcacatcattgggatgttgattctgattcttgatctgacggtttctgtggttgttgcgacgattgttattgcgtcgacggtcgggaataatcatctcttcgtcactgtcctcggccttgacacgcctgtggtacctagaagaaacatttactagttagtttgtttctatttcaggtggagagtgtcaatctggcgctgaaaattttagacgagtacaatctgcgtggccacaagattcgtgtccagagggctcagttccaaatgcgtggagaatacaatcccgctctgaagcccaaacgcaagaagaaggacaaagagaaattgcaaaagatgaaggaaaagtaagtaatacaaaatgaatgttgtattaaaagataacgacattcattatattcattaatattttcaggttatttgattggcgtccagataaattgcgtggcgaacggtcaaagaatgagaaaaccgtcatcattaaaaacctcttcaccccagaactctttgagaaggaagtggagctcatattggagtaccaaaacaatctgcgtgaggagtgcagcaaatgcgggatggtccgtaaagtggttatctatgatgtaagaaaacaaagtttctagaaatgttctctaaaaaagttcccattgcagcgccatcctgatggtgtagcccagatcaacatggcctcgccggaggaagctgacctcgtcattcaaatgatgcaggggcgttattttggacagcggcaactaagtgcggaggcctgggatggcaagaccaaatacaagtaagtttcaaaatgagatagtctaaagaaatagttgctaattcttccttaatgtcttagaattgaggaatcagctgtcgaggcgcatgaacggctttccaaatgggatgaattcttggcagaagaagaaaccgataaaaaagcttccgaggatatgaaggaggaggacgttgactcgcccgaaaaccagcttttgccaggagacgccaccccttagttttcatttacctgcgatcgttttcacgcggttcaagaatctccaggaccacctcgttggcctgctcgttcggataggtggcgttccagcggttgtagatcttgtagcgattggggccgctcacctttggcatcttgtgctgacatatgaagcgcagcttatccgagcagggccgcgccgaccagcggtacttgaggcttggatcgtagatggcacagttattatcaagcggttggctgttggagataagttgcacatagctagaattgttgcttaagcgttaaatcaatctacggaaataaagaaagaaaggaaagagcatctgagagatcacttacgcggaatcagtgcggctgaaggagtcggtggacagattgcgaccactcatgctccactgccatcggttgttgtggtggtcataggtggctcctagccagataggatcattttctaaagttgaaaagcaggttttatttaactattcagggttagatctccggtagcgattcaaaatatatggatctactcaccgcctgatagggcatcctgtttctgaaggaaaagtctcagcttgcggtcggcgtgtttacccggctctgtaagattggcgtttttgtccttgcagaagaagtgcgcctccagccaactgctgcgctgatcgaccagcgagtagcaatcggtgcccacgcgatggaatttcggtggacacaaggcgtatacacggcgctttggcctggaagttggagctgctgtatcctgactgtgagcaggcgaggggccttcgaagttgatttcggcgcgagctgcacttccgtggaactccaccgcaattgtgtgagcaactgtgggcatgacagaaataatcaataaatcatcgaaagagctggatgcgaaagaactcacataaagctaagataaatacttgacagcaccacattttatggctgccacacatcctgttgcctgccgcttgatgattgttgatgcagtgtatttttttccccgacttgcgagggtaagatgaagctggttgtattatgctctgtattatgttcgctatggccacttcttacatcgctttaccggatgacgggctggaaaaatgggtttgaaatgaaaacaaacgatgaacattcgttaatctctcaactcgtctgcatatcataattttatttcaccaaatgtttgttttatgcaaatatatgtcggagaagcctctaacaagtgtatccgttgatggatggacacacaaacgcctccacgccagcgaaaacaaattgagtcgacgaacatgtattcgaacagatttattttatttatcggtccccattcataaacagcttttgcccacgaaactggtcatcgtcgactttgggttggttggttgggttgatgcagtgtccactcatcgagtggctcatttggccggtcattgtgtggcgtttcaattagcactttcataactttaaccacctcgtcaagtggcagacaacccggtcaaaagccgtcactgtagctgccactgccactggggcttgttattgcattctattttcaatttgttgacactccaagtgcctccgccgagtgtgtgaatggtgtgtgtgccggttgcagtgacccacttttccaccactaaataaacgacttgaaatgccgctaacttgccgggt

SEQ ID NO: 23687 - DNA, 2969 bp, DROSOPHILA
ctactcgctggtcgatcagcgcagcagttggctggaggcgcacttcttctgcaaggacaaaaacgccaatcttacagagccgggtaaacacgccgaccgcaagctgagacttttccttcagaaacaggatgccctatcaggcgaaaatgatcctatctggctaggagccacctatgaccaccacaacaaccgatggcagtggagcatgagtggtcgcaatctgtccaccgactccttcagccgcactgattccgcccaaccgcttgataataactgtgccatctacgatccaagcctcaagtaccgctggtcggcgcggccctgctcggataagctgcgcttcatatgtcagcacaagatgccaaaggtgagcggccccaatcgctacaagatctacaaccgctggaacgccacctatccgaacgagcaggccaacgaggtggtcctggagattcttgaaccgcgtgaaaacgatcgcaggtaccacaggcgtgtcaaggccgaggacagtgacgaagagatgattattcccgaccgtcgacgcaataacaatcgtcgcaacaaccacagaaaccgtcagatcaagaatcagaatcaacatcccaatgatgtgaactaccagccagcacagcaacgccaaaggaatcgtcctcgtacttctactgttgcgccaactactacgcaatcggttagccagtctaatgatgtcctggctccctcacccacgcctcagcagatgactcagtacgatcgtaaattgcaacgtcaacgggaaagggaacgtcgccgacagctgcgtcggcaggaacgccagaagttggctagggagcaaaagcgcgaaaggcaacgtcgccttaaggaggaacgccagcgattgcagcgggaggaacagcagcgcaggcagcgattgcatcacgatgaacccaaaccccaagtgaacccccaagtgaagccccaagtgatagatgaactccgtcagagatctggtgaggatttggataagaatcaaacggacgagcacgaacagaaactaagaaatgaacaggaaaaaaaactaagggaagaacagcaaaagcaacgcgatgaacaggaacaaaaggacagagaggagcaggatagacttaaacaagaggaagagcaggccagaacgcatcagaaagagctcaaggaaaaccaggaacagcaacttcgcgaacttaaagccaagcaggagcgagaaaagcaggaacgggattaccagcagcaaaagcgtgagcacgagctcgagctcctgaagcaacggcaggctgaagcagaccgccagcacgcagcggacgaggaggcagagaagctacgactggagcgcatccaaaaacaacgcgaactggaggcacaacagcgacgagagcgcgaagagcagcgccgcaaacagcgcgaagaacaggaggaacaggatcgccaaaaccatgccaagcgtctggctgaagagaagcgactgcatgatctgtatgccgagcgcataaggctggccaataccgagcgggagaagcaacttgccgaggcccatgaagccaagcgacttgaggagctgaagctgcaagagcagcttaagaaacaggaggacgagcggcaggagcagattcgacgcgagcaggaggaggaggaaaagcgcctggaactggagaggcttgaggaggctcgccgcttcgaggagaaggaactaaagcgcctgcacgaggagaaccagcggcgcgaggagcagaagctccagcgcgagcgggaaatagcactccgcgaggctgcggagaaaaaactagctgaggaggaggaaatgctgcgcaaggaagtggctgaagaggaacgcaaagttaagcagcgactagaagatgaaatgcgacaggcagaagaggcgcgtaaagccaaggaggccgaggaacgggctgccgaagaggccaaggccgccgagcagaagcgacgcgtggaggcggccaaaaagaaggccgacgaggaagtcaaggctaagttggaggagaagaggcgtgagtatgtgactcgaatctcggcgctgagtcccgaggaccagaagaagtttatcgagatgcgcaaacggcgcaagcagctgaaggagaaaaaggaacgtgaccagcgggcaaaggaactgaagaggatacagcaagccatgcgattggatgacaacgagtagaagtccaggcggcagtcaaatcgccacgcactaaccaatactaaccgatacatatcgatcacaattggttccacatacgcaccgttgcccagtcgatcccttttcgattgttttctttgtgctttaattaaaacaaaccacaagatgaacacgcaaaagtattatttatcagaagagaaggaagaatggaggaacatcgctgcgaagcagattttgtcggttaattaattgcatttcgatcgagcaggaaacccaatctccatgcgcttcgctagctattttagtactgtacagtaaagatatactatatataggtctaggatatggacacgccacatactcacgcagcacacaggacacaccgtaaacacacggcaaccagtcacgcatgtttccttaataaccgaactagaagttagcaatcaattttagaaccaataaaccccacacagacgcaaaatcaattttttaaactcaagcacagaaccacggatatatttatagtgagtaaagcgtaagattgaatggaaaactcctttgggtcaaagtccagcagtgtccaagtcccatgcctccccacactgggtttgcctatggtgtcctcgaatcgggcacagcgaagcaataatttactactaataatcttttgataacatcatcggatggtcaccgaccatttcctaacttctagattacaaaactatattttacaaagatgtatgtaataactaaagtatgtttaaatgtaaatttttatgtattttttaatacctcaaacgcgaaaggc

SEQ ID NO: 23688 - protein, 658 aa, DROSOPHILA
MSGRNLSTDSFSRTDSAQPLDNNCAIYDPSLKYRWSARPCSDKLRFICQHKMPKVSGPNRYKIYNRWNATYPNEQANEVVLEILEPRENDRRYHRRVKAEDSDEEMIIPDRRRNNNRRNNHRNRQIKNQNQHPNDVNYQPAQQRQRNRPRTSTVAPTTTQSVSQSNDVLAPSPTPQQMTQYDRKLQRQRERERRRQLRRQERQKLAREQKRERQRRLKEERQRLQREEQQRRQRLHHDEPKPQVNPQVKPQVIDELRQRSGEDLDKNQTDEHEQKLRNEQEKKLREEQQKQRDEQEQKDREEQDRLKQEEEQARTHQKELKENQEQQLRELKAKQEREKQERDYQQQKREHELELLKQRQAEADRQHAADEEAEKLRLERIQKQRELEAQQRREREEQRRKQREEQEEQDRQNHAKRLAEEKRLHDLYAERIRLANTEREKQLAEAHEAKRLEELKLQEQLKKQEDERQEQIRREQEEEEKRLELERLEEARRFEEKELKRLHEENQRREEQKLQREREIALREAAEKKLAEEEEMLRKEVAEEERKVKQRLEDEMRQAEEARKAKEAEERAAEEAKAAEQKRRVEAAKKKADEEVKAKLEEKRREYVTRISALSPEDQKKFIEMRKRRKQLKEKKERDQRAKELKRIQQAMRLDDNE

SEQ ID NO: 23689 - DNA, 3831 bp, DROSOPHILA
gaacagatcaactttgtcaggaaacagagcactgaacacaaagccattgatggagctcatcgagtgggccaatatagagatcttgtcccagttgtactcctccattagtcggcgagtgatcagcacgaggtcaatggagtggtaggaagtgccaggtggcagccaggaggacaacccatgtcctggtgcatcgatgcttaggaaagagaggtgggacggcaggagaggagccaaagtatcgaaggtaccggcattatcctgccagccatgcatgccaacaatgggtcgtacgtgcttcggtccataccatttgcccgagatgtgaccccatggaactggtatgctgatttcatcgaactgcgaagagaaagccaaggtgattattaaatgaaaaccaaaaggattctaccacctacatgtttgttgaggattttgaagggctttgtgggcccactgctggagtttcttacatttggcaactgttttagcaggaacagacctctggacaccttcatttcaaggtaagatattttctacttcctctgagtaatgtcacgttcttcttcctcgatcaatagaatgatactgatgttctggctttgatttcaccacacatggatggtcggcggcgatgccaggtgaactttgatcttgatacgtaatatctgagaaaactatgtttcagcaaggtttttaatcttgtcattcgctggcggctgctggctacgaacaacactggtccaaaactcgcttggtatgttttacaacactatatcttcgtttatatgtcgacatttcgagataagttcacaatacataagtttgttgtaagttagttgtcatcatttatttatgaaatcaaaggctgatgatttaagtcatatctttccaacatacactaataaaattcatttaaaacattaaatgtaaacttcgtgttatatccgccgcataaacaatgccgcccatgtgcaagtttagtgaacagctgtagtaagtgtttatttttcgttcgctcgatgctttcacctgtttgttgggcgcattggtaataaaattattcgaatgaaatcaattctgtattaattaggagggagcacaagtatattaaacaaattgcaaaaaaatctgtgacacaaagacaacgtgagttatattgattcattaaagcgatcaccatgacctttgaatctaatgaagcatcggcatcgattcggatattatattatatattatattggattaattgttatgatttctctttaatgtttactttcgtattttctaagtatgtatgtttccccgcctgtttgccttaactaatcgcagtgctaatctccacaggtcgttactgataagggccgaaatcggctaaactttggaattggtgctcattcgctttttggccactttcgagcgcagaaatggacacggacgacaactcaagtggcactattaccggcagtgatcttggccagcgttatcggcatgcaggcgacttaactggcgaagccccaaccagacccgtaagtgtactttgaaccacttcactgcattttcacagacttccagggggttacatttatttcaccgtacagcgtgcaaacatatggtgctctaaaaaatacgtatgtatattctttatcaacgttgataatatattaatccgtaatattgaatattctgtaccttaaattagatgtttcctaatgtactcgtatatgtaggtgtcataccgattctgtagatttttatatatatgtggatctttgtttccaaaaatgaaataacatgcaattcgaagatagtagctaatgatggtgataaggaagaaaaatcttacgttaatagtgccttgtatgtatttttgtatttctttaccgtagttcgccgagatcagcattacggttccatgggggcacatatccggcaagtggtacggtccgcagaacgtccaaccaattttaggactgcacgggtggcaggataatgcgggaacctttgatcgcctgatgccgctgctgtcgccggacgtggcattcctcgcgatcgatcttcctggtcacgggctatcgtcccgactgcctgatggctgctactacaactccgtggataatctgtatgtgatccgcctgatcatgaagcagtacaagtgggagaaagtgtccctggttggacactcaatgtcgtccattatttgctttgttttcgccgcggtctttccggacaaggtggacatgatcattgggattgatgccctgaaacctcatcagcgtccgtatccgtcggttattaggaccatggaaacccgtttggacgagttcttgcgtgaagacgaaaggaaccggagtaagaacgagccgccgagctacacctacgatgaacttattgagagggtctatatcggcaccttccattcggtgaacaaggagcactgcaagcatttaatggctcgcaacatcggcaagtcggagaagtacccggacaagtacttcttctgccgcgataggcgtctcaagttttacaactatgccatcgggtcccaggagctgtgtgtggaaatggccaatcggattacatgtccttacttgttcatcaaggccgcccagtcctcgtatttcgaggacaagaagtactacgacgaggtgctggatgtgctgttgaagaagccgaactttgagtacctggaggttaatggctcgcaccatgtgcacatgaacgatccagaggccatcattgcaccggtcaacaactttatccagcgcttcggaccggcggcagcggctgcatcccgccagaaggccaaggaggcgaaggagagcaagctttaggccaacggtgtggtaaatagagcttatttattgtagtacagattgtacaggtttttatacttaattgtttatgctatgtgatcgcggcagaggactcggctctgctataaatacacaatgtacataagccgaggggtttttcgactgcgcttaatggggaagtcgtgaaggataccaagaaactggttatgtacaagcttaacccttttgtattgcgcccaaattgtatatttcaaaactttataatttatttcagctcgagcatcaataatttcgcttttttgaattgatatataaagaagagcttaccattttattatcgtttaaatattttttcgtcttacaatattcattatctctaaagcacttatttgatatttataacagaaacacctttaaataatacagatcaaatattattttatgcgtatatacaaatgttattgtaattagttttttagcttttaatactttttaatgctattaatatgcagcgtttgtgtgttcattataaatgtttcactgtaattgggcttatttattgtatgaagtgcccatttacagaagtaacttgtcttccgatcaccggcagatgacctacatcttcttcacgagtagaatccaagcagcgaaagtgttaataacccgcaaacctgttcccgaaatcccagccgtctgttacatcattctctagactctttcttggcaacatgatcgttttcaattgtcggtgtccacgctggaggtcagtctcggttggatttacatggaaatgattgtttactggatatatattttttaaaaataactgagctgaggcaacagggaaaaaagccaagtgagttgatgaccatgccagcttccacatttgtctgtgctcatgttcgtctggtgttgcttatgctgaattttttcttttgccttggttagttcctgggtctggtttgcagtgtgataaatgattttggacagcagtttaatttgtcttaatatggtaaca

SEQ ID NO: 23690 - DNA, 1273 bp, DROSOPHILA
tttatttttcgttcgctcgatgctttcacctgtttgttgggcgcattggtaataaaattattcgaatgaaatcaattctgtattaattaggagggagcacaagtatattaaacaaattgcaaaaaaatctgtgacacaaagacaacgtcgttactgataagggccgaaatcggctaaactttggaattggtgctcattcgctttttggccactttcgagcgcagaaatggacacggacgacaactcaagtggcactattaccggcagtgatcttggccagcgttatcggcatgcaggcgacttaactggcgaagccccaaccagacccttcgccgagatcagcattacggttccatgggggcacatatccggcaagtggtacggtccgcagaacgtccaaccaattttaggactgcacgggtggcaggataatgcgggaacctttgatcgcctgatgccgctgctgtcgccggacgtggcattcctcgcgatcgatcttcctggtcacgggctatcgtcccgactgcctgatggctgctactacaactccgtggataatctgtatgtgatccgcctgatcatgaagcagtacaagtgggagaaagtgtccctggttggacactcaatgtcgtccattatttgctttgttttcgccgcggtctttccggacaaggtggacatgatcattgggattgatgccctgaaacctcatcagcgtccgtatccgtcggttattaggaccatggaaacccgtttggacgagttcttgcgtgaagacgaaaggaaccggagtaagaacgagccgccgagctacacctacgatgaacttattgagagggtctatatcggcaccttccattcggtgaacaaggagcactgcaagcatttaatggctcgcaacatcggcaagtcggagaagtacccggacaagtacttcttctgccgcgataggcgtctcaagttttacaactatgccatcgggtcccaggagctgtgtgtggaaatggccaatcggattacatgtccttacttgttcatcaaggccgcccagtcctcgtatttcgaggacaagaagtactacgacgaggtgctggatgtgctgttgaagaagccgaactttgagtacctggaggttaatggctcgcaccatgtgcacatgaacgatccagaggccatcattgcaccggtcaacaactttatccagcgcttcggaccggcggcagcggctgcatcccgccagaaggccaaggaggcgaaggagagcaagctttag

SEQ ID NO: 23691 - protein, 348 aa, DROSOPHILA
MDTDDNSSGTITGSDLGQRYRHAGDLTGEAPTRPFAEISITVPWGHISGKWYGPQNVQPILGLHGWQDNAGTFDRLMPLLSPDVAFLAIDLPGHGLSSRLPDGCYYNSVDNLYVIRLIMKQYKWEKVSLVGHSMSSIICFVFAAVFPDKVDMIIGIDALKPHQRPYPSVIRTMETRLDEFLREDERNRSKNEPPSYTYDELIERVYIGTFHSVNKEHCKHLMARNIGKSEKYPDKYFFCRDRRLKFYNYAIGSQELCVEMANRITCPYLFIKAAQSSYFEDKKYYDEVLDVLLKKPNFEYLEVNGSHHVHMNDPEAIIAPVNNFIQRFGPAAAAASRQKAKEAKESKL

SEQ ID NO: 23692 - DNA, 3757 bp, DROSOPHILA
tagagatcttgtcccagttgtactcctccattagtcggcgagtgatcagcacgaggtcaatggagtggtaggaagtgccaggtggcagccaggaggacaacccatgtcctggtgcatcgatgcttaggaaagagaggtgggacggcaggagaggagccaaagtatcgaaggtaccggcattatcctgccagccatgcatgccaacaatgggtcgtacgtgcttcggtccataccatttgcccgagatgtgaccccatggaactggtatgctgatttcatcgaactgcgaagagaaagccaaggtgattattaaatgaaaaccaaaaggattctaccacctacatgtttgttgaggattttgaagggctttgtgggcccactgctggagtttcttacatttggcaactgttttagcaggaacagacctctggacaccttcatttcaaggtaagatattttctacttcctctgagtaatgtcacgttcttcttcctcgatcaatagaatgatactgatgttctggctttgatttcaccacacatggatggtcggcggcgatgccaggtgaactttgatcttgatacgtaatatctgagaaaactatgtttcagcaaggtttttaatcttgtcattcgctggcggctgctggctacgaacaacactggtccaaaactcgcttggtatgttttacaacactatatcttcgtttatatgtcgacatttcgagataagttcacaatacataagtttgttgtaagttagttgtcatcatttatttatgaaatcaaaggctgatgatttaagtcatatctttccaacatacactaataaaattcatttaaaacattaaatgtaaacttcgtgttatatccgccgcataaacaatgccgcccatgtgcaagtttagtgaacagctgtagtaagtgtttatttttcgttcgctcgatgctttcacctgtttgttgggcgcattggtaataaaattattcgaatgaaatcaattctgtattaattaggagggagcacaagtatattaaacaaattgcaaaaaaatctgtgacacaaagacaacgtgagttatattgattcattaaagcgatcaccatgacctttgaatctaatgaagcatcggcatcgattcggatattatattatatattatattggattaattgttatgatttctctttaatgtttactttcgtattttctaagtatgtatgtttccccgcctgtttgccttaactaatcgcagtgctaatctccacaggtcgttactgataagggccgaaatcggctaaactttggaattggtgctcattcgctttttggccactttcgagcgcagaaatggacacggacgacaactcaagtggcactattaccggcagtgatcttggccagcgttatcggcatgcaggcgacttaactggcgaagccccaaccagacccgtaagtgtactttgaaccacttcactgcattttcacagacttccagggggttacatttatttcaccgtacagcgtgcaaacatatggtgctctaaaaaatacgtatgtatattctttatcaacgttgataatatattaatccgtaatattgaatattctgtaccttaaattagatgtttcctaatgtactcgtatatgtaggtgtcataccgattctgtagatttttatatatatgtggatctttgtttccaaaaatgaaataacatgcaattcgaagatagtagctaatgatggtgataaggaagaaaaatcttacgttaatagtgccttgtatgtatttttgtatttctttaccgtagttcgccgagatcagcattacggttccatgggggcacatatccggcaagtggtacggtccgcagaacgtccaaccaattttaggactgcacgggtggcaggataatgcgggaacctttgatcgcctgatgccgctgctgtcgccggacgtggcattcctcgcgatcgatcttcctggtcacgggctatcgtcccgactgcctgatggctgctactacaactccgtggataatctgtatgtgatccgcctgatcatgaagcagtacaagtgggagaaagtgtccctggttggacactcaatgtcgtccattatttgctttgttttcgccgcggtctttccggacaaggtggacatgatcattgggattgatgccctgaaacctcatcagcgtccgtatccgtcggttattaggaccatggaaacccgtttggacgagttcttgcgtgaagacgaaaggaaccggagtaagaacgagccgccgagctacacctacgatgaacttattgagagggtctatatcggcaccttccattcggtgaacaaggagcactgcaagcatttaatggctcgcaacatcggcaagtcggagaagtacccggacaagtacttcttctgccgcgataggcgtctcaagttttacaactatgccatcgggtcccaggagctgtgtgtggaaatggccaatcggattacatgtccttacttgttcatcaaggccgcccagtcctcgtatttcgaggacaagaagtactacgacgaggtgctggatgtgctgttgaagaagccgaactttgagtacctggaggttaatggctcgcaccatgtgcacatgaacgatccagaggccatcattgcaccggtcaacaactttatccagcgcttcggaccggcggcagcggctgcatcccgccagaaggccaaggaggcgaaggagagcaagctttaggccaacggtgtggtaaatagagcttatttattgtagtacagattgtacaggtttttatacttaattgtttatgctatgtgatcgcggcagaggactcggctctgctataaatacacaatgtacataagccgaggggtttttcgactgcgcttaatggggaagtcgtgaaggataccaagaaactggttatgtacaagcttaacccttttgtattgcgcccaaattgtatatttcaaaactttataatttatttcagctcgagcatcaataatttcgcttttttgaattgatatataaagaagagcttaccattttattatcgtttaaatattttttcgtcttacaatattcattatctctaaagcacttatttgatatttataacagaaacacctttaaataatacagatcaaatattattttatgcgtatatacaaatgttattgtaattagttttttagcttttaatactttttaatgctattaatatgcagcgtttgtgtgttcattataaatgtttcactgtaattgggcttatttattgtatgaagtgcccatttacagaagtaacttgtcttccgatcaccggcagatgacctacatcttcttcacgagtagaatccaagcagcgaaagtgttaataacccgcaaacctgttcccgaaatcccagccgtctgttacatcattctctagactctttcttggcaacatgatcgttttcaattgtcggtgtccacgctggaggtcagtctcggttggatttacatggaaatgattgtttactggatatatattttttaaaaataactgagctgaggcaacagggaaaaaagccaagtgagttgatgaccatgccagcttccacatttgtctgtgctcatgttcgtctggtgttgcttatgctgaattttttcttttgccttggttagttcctgggtctggtttgcagtgtgataaatgattttggacagcagtttaatttgtcttaatatggtaaca

SEQ ID NO: 23693 - DNA, 1229 bp, DROSOPHILA
attctgtattaattaggagggagcacaagtatattaaacaaattgcaaaaaaatctgtgacacaaagacaacgtcgttactgataagggccgaaatcggctaaactttggaattggtgctcattcgctttttggccactttcgagcgcagaaatggacacggacgacaactcaagtggcactattaccggcagtgatcttggccagcgttatcggcatgcaggcgacttaactggcgaagccccaaccagaccccgtgcaaacatatggtgctctaaaaaatacttcgccgagatcagcattacggttccatgggggcacatatccggcaagtggtacggtccgcagaacgtccaaccaattttaggactgcacgggtggcaggataatgcgggaacctttgatcgcctgatgccgctgctgtcgccggacgtggcattcctcgcgatcgatcttcctggtcacgggctatcgtcccgactgcctgatggctgctactacaactccgtggataatctgtatgtgatccgcctgatcatgaagcagtacaagtgggagaaagtgtccctggttggacactcaatgtcgtccattatttgctttgttttcgccgcggtctttccggacaaggtggacatgatcattgggattgatgccctgaaacctcatcagcgtccgtatccgtcggttattaggaccatggaaacccgtttggacgagttcttgcgtgaagacgaaaggaaccggagtaagaacgagccgccgagctacacctacgatgaacttattgagagggtctatatcggcaccttccattcggtgaacaaggagcactgcaagcatttaatggctcgcaacatcggcaagtcggagaagtacccggacaagtacttcttctgccgcgataggcgtctcaagttttacaactatgccatcgggtcccaggagctgtgtgtggaaatggccaatcggattacatgtccttacttgttcatcaaggccgcccagtcctcgtatttcgaggacaagaagtactacgacgaggtgctggatgtgctgttgaagaagccgaactttgagtacctggaggttaatggctcgcaccatgtgcacatgaacgatccagaggccatcattgcaccggtcaacaactttatccagcgcttcggaccggcggcagcggctgcatcccgccagaaggccaaggaggcgaaggagagcaagctttag

SEQ ID NO: 23694 - protein, 358 aa, DROSOPHILA
MDTDDNSSGTITGSDLGQRYRHAGDLTGEAPTRPRANIWCSKKYFAEISITVPWGHISGKWYGPQNVQPILGLHGWQDNAGTFDRLMPLLSPDVAFLAIDLPGHGLSSRLPDGCYYNSVDNLYVIRLIMKQYKWEKVSLVGHSMSSIICFVFAAVFPDKVDMIIGIDALKPHQRPYPSVIRTMETRLDEFLREDERNRSKNEPPSYTYDELIERVYIGTFHSVNKEHCKHLMARNIGKSEKYPDKYFFCRDRRLKFYNYAIGSQELCVEMANRITCPYLFIKAAQSSYFEDKKYYDEVLDVLLKKPNFEYLEVNGSHHVHMNDPEAIIAPVNNFIQRFGPAAAAASRQKAKEAKESKL

SEQ ID NO: 23695 - DNA, 3220 bp, DROSOPHILA
cgcgccggacttttcccgttaatgtgtcacacgcactttataagcgattgttgttgccggagctgaagggggaggaaatgggggcggtgttggcgtctggaaaagttgacgacgccgtcgacgcccatggcgcaattattatgattattaggtacagctgcacttgcccagcggctgccacatataaacaaaaattgtaatttacctcagcgctgaagcacactcagagaaaatatttctaaatcactttttgaacaacagtccggtgtaatcgagtgtgtccagtcgaaatgtaattaaacaatttaatgttgttaactacattcttctagtccccgttccgactttacatcaatagaaacattttctttccgtgcactgaaaactgctcccaagcttggctgctgttgtccattagggtggacctgaacttttgtccgcttttgaccgttcgttctggatgctgtgcatcgccttgggggtcacgcgttaataatcgcgctgaatgacttcataatgaaaatattaaaggtgtttgttgccattcttgttgttgctgctagccgccggccaggatcaggataagtatatacatatacatacaaggagcacccgcaggactcgctctcacacaaaaggcgcaaagtttatgtttatgtcatgctctcgaatgccaacgaaggggtgagagaagggactttttcttgggtataatttaataataatgctccttttttcattaaatgtaagtgcaccatgggcagaagctgcctcaagtggcaggttgaaatgagccaagggggaggtgggataatgttgaactcagtgctgggcattcaagaagacccattcagaaggtgtaatatatcaaatgcttgattaatcggcattggtggtatgaatcagaaatattcagaaacacatttattgataaggtgagttcacaactacctttccttattaaaatctatttatgcttgtgtatggagagagcataaacttaaggtcgtatattctgcgtgatccacgtttcgtaagaaagaacatttgtgtagacagctggccagaatcgtgagccgcagttcaggccaaaggacacaatgcccccaaggacccaaacgccctcgtggaatgccatcagtggtccgccggagtccccatcgcagctatcaccccgacttctaccttcggcgcacaagtgggagtcacccaggaccactatgctagcatacttgcgacgacacaggccaggctccacgtacgttaccctcaatttcatcttgacgggactgctttcgctggtaagggttctaccccatcctgccacggtaaacgcctggccggattgccagttttgcagacccacagtcgagggcaagcaaacaggtcgaatgctgggcgaataggcaacctctctcgccaaacggatcagagcaatgtcgttccaaaacaatcgggtaccgaagctttcatgtatgcggatctcctcgaccgcgatttgcacaggttccggtaggcaccttccattgaggcaatccaccacggcactggtgttatgctcgcccaatctcacagagactctgaaagagctaagtgttaataataaaaaaaaaaccatagcaacaagtataaggccgtttacacatctcctttgcgggccctagtagcagccgacacgcagtgagccgctgttacaacatatcgattattgatcagtgatcccgcgcagtatgttctcaattgttgtccatcatgaggacggtactctaacagcaccatccaggcgaattcagtgagaacggtttcgttgcctttcgtgatctggttgtacgctatatcgcccccacagatggaccgatcgggaagcaaagtggaatgtatcacttcgtcgttaggtctagcacgcgtcgtgttgtagtccgtatccggagtgcagcagacgaatggcagatcgctctggtcagatacgaggcaacgggattctcggatgaaccgcatctcggagtctgtaggattactcttcgccagcacggaattcagtggcacacacaaggggatgttcacgcaatatccagtccgctggttgggattccggcaactcacgtctgtaagtgatctggtttcctatttgggtactaatttccgctttgtgcacttacactgtccatgggccgtgcggataatcaataagcacagcaaaacggctgcgatcaccttcattgcgcttgcgactgaattccgtaagcctcgactacgatctgtttaatgatcacaatttggcagtctttcttaattttaaatagaattgattttagcttcagtgcgattatttctcttatcttgtcagcaagtcaaagattagagattaagcgagggaaaaaacatagatttgtccgttggaaaccattataataaatggctcgaatgaataaaaaagctatacaagataacattgcacattggcaattaaaaattgcttgaatatagctctgaaatcaatatgtatacatatgtcccgaaataaaccacttgccattctcgacgaatagtcaatagtcgggatatcagcaatccgattgtgtttgcactttcgacagccgatcccaagaaacaattaatgccggcaaaggacgagggtaaaggatacaggaccacagactcggtggaccacaagtaatattttaaatgtagtttcgggctaattgtcatgccatcgacggcgtcttatcggacggtagcaaaacaatttggacaaatttatgcaacacaaacggactgagagcccctttggggcaaaggggcacgaaggacacacaggacatgcaggatgcccagatggacagataagtcaaaaatgctgccattaaaatgctggcatttgcaagtctatctggtatcgacagggtctcgcaaaagttacgaaaggaggtgagcggaaatctagccgtgttggtcattaatgaacatgggccagtgtccccgtacagtggagtccattaaaaaggactaaatggcaattaagcactggagtcaaacggcagaatcggagtcgcaatcagaggctgaggcaattaagcctcccctttcgctgcaaggacactgggcaattaagccggaccaaagttggccaatcccttggagtcgaccttatccttttcacctatctctctggccgaggaaaacttaaatgagttttccgagagcagagagagagacagtg

SEQ ID NO: 23696 - DNA, 1113 bp, DROSOPHILA
atgaaggtgatcgcagccgttttgctgtgcttattgattatccgcacggcccatggacagtacgtgagttgccggaatcccaaccagcggactggatattgcgtgaacatccccttgtgtgtgccactgaattccgtgctggcgaagagtaatcctacagactccgagatgcggttcatccgagaatcccgttgcctcgtatctgaccagagcgatctgccattcgtctgctgcactccggatacggactacaacacgacgcgtgctagacctaacgacgaagtgatacattccactttgcttcccgatcggtccatctgtgggggcgatatagcgtacaaccagatcacgaaaggcaacgaaaccgttctcactgaattcgcctggatggtgctgttagagtaccgtcctcatgatggacaacaattgagaacatactgcgcgggatcactgatcaataatcgatatgttgtaacagcggctcactgcgtgtcggctgctactagggcccgcaaaggagatgtctctttcagagtctctgtgagattgggcgagcataacaccagtgccgtggtggattgcctcaatggaaggtgcctaccggaacctgtgcaaatcgcggtcgaggagatccgcatacatgaaagcttcggtacccgattgttttggaacgacattgctctgatccgtttggcgagagaggttgcctattcgcccagcattcgacctgtttgcttgccctcgactgtgggtctgcaaaactggcaatccggccaggcgtttaccgtggcaggatggggtagaacccttaccagcgaaagcagtcccgtcaagatgaaattgagggtaacgtacgtggagcctggcctgtgtcgtcgcaagtatgctagcatagtggtcctgggtgactcccacttgtgcgccgaaggtagaagtcggggtgatagctgcgatggggactccggcggaccactgatggcattccacgagggcgtttgggtccttgggggcattgtgtcctttggcctgaactgcggctcacgattctggccagctgtctacacaaatgttctttcttacgaaacgtggatcacgcagaatatacgaccttaa

SEQ ID NO: 23697 - protein, 370 aa, DROSOPHILA
MKVIAAVLLCLLIIRTAHGQYVSCRNPNQRTGYCVNIPLCVPLNSVLAKSNPTDSEMRFIRESRCLVSDQSDLPFVCCTPDTDYNTTRARPNDEVIHSTLLPDRSICGGDIAYNQITKGNETVLTEFAWMVLLEYRPHDGQQLRTYCAGSLINNRYVVTAAHCVSAATRARKGDVSFRVSVRLGEHNTSAVVDCLNGRCLPEPVQIAVEEIRIHESFGTRLFWNDIALIRLAREVAYSPSIRPVCLPSTVGLQNWQSGQAFTVAGWGRTLTSESSPVKMKLRVTYVEPGLCRRKYASIVVLGDSHLCAEGRSRGDSCDGDSGGPLMAFHEGVWVLGGIVSFGLNCGSRFWPAVYTNVLSYETWITQNIRP

SEQ ID NO: 23698 - DNA, 2605 bp, DROSOPHILA
accgccagatggcccagttccggaaaagtgaacctgctctaagctcctacctcagccagcggagagaagtggtctatgtggatgcgtcaccttgtttcgagcaggtcaagtgcgggatcatctcggagctcaccaaaactccctatgtgctgggtaaaaaatacggcgaggcaaatgccaaaatctgaatttgattccagccactctgcatccaaattgagtaacaatgtgttcttggagtcctttctgtgattactctcgttattattattatttgctcaagtgtctgtcgttgtttgtgttattattgccttgcttttttggggtcaggcctatcagacttctgaccgaaacccccattcccatccaacgaaaaaatattgcgacgttttcgtttaggtaaacagtagaagcaaaagagaaacgtgtggctagatatgccgactataggatacccatcaagaacattttccagcgaatacggtataactagttccgcttaatatttctttttcaaccaaaaactggtaaacaaatccccaccaagcaaatcaccatccacgccttgaaaacgctgagtagcaaaaagtgattttctatttgaatttccaccactgaaaaatgtgaacagaaaaacaataaaacgcaggaaaaaatgagaggagaataagagaaaaaacaaatgattttatgaccacaacttaagtgctcaatttttaattgtttgacgatgctgataagacccgtggaggaaagctgccgagggcggggagactttttaatggcacccaaaagttcaatcaaagttttatacattttcattctgcccgaggcatccgggggttcaaattagtcgccagcaggttgatgattattggagtaaatatctttattccttgaggttttccccagtgggccgtaagccggctcacttataattaaaaaaaacgcaccaaatcgttaacagaaaataaatgcattcgccacaatcaggggagcagccaatatagctccttgtattttaagaaacttgcacatcatttaaacatcacggtaatttattttatttgggaaaaaaggtatatttcactatttaatttagtgctcatgcagcgtgggcacaaatcagcgcaccaccttaatgtcgatggtgaagcagcagcgcttctgggagacgggatccttcagagcccaacggatggtgtacggactcaggggaaacttggcctcgatgggcaccagggtggtgtaggtctgtttcactccggatctcacggggcagggtgtgtacttgcaggcggcgctgtccaaggtgagcaggggcagctccacattctcgctcttggcccagcccaagctggctaccagggtgtcggcatcgaagttcggcgtgaagtcgaagctcatctcactgttgtgcttccggcggatattgcaagccgcattgttgagggcctccggacatggcgagactctcacctgctggatcgtacaggtgtctacgctatccggacatggttcgaagttgaccacctcggcggaagcggatgacgagatcaggacgatggcgatggcgacagcctgcagcgagctaggacgcaacatgatggatcgaaagccagacacggaatgcaggcacttctacttcggactcggactcaaagccgggcttatctacgtacccgtttgacccgtgaactgggtcacatctgtggctccaggcgtgctgattagattcgagctccttatcgcaatgtacttagaattgtaagggtgtcgcagacggcactttacgtttttgtaaaattctgatcaaatattaaaaaagttatggctgttcccacatttttagtagagtatttatattttcaactagaagaaattaggtaaccccgcatattttattggcatactctacctaattagtcatttcaaagtgttaattggcactcatatcagcagcattccttgttctgctgacatattcaaggtgaaatgagtccaattactgggtatacagattataaacaggtgccgctaattacaccaaaccaaactatcgtatcgacccacttgtaaatcactttaatttcgaagatatttaagatatatattaatccaaatattaagtggagcatccattacggagtgcaccttgctagcgcaccaccttgatgtcgatggtgaagcagcaacgtttctgggaaaccggatccttcagggcccaacggatggtgtatggactcagcgggaacctggcgtcggcgggcatgttgttggtgtaggtctgggtgactccggatctcacggggcaggtggtgtacttgcaggcctcctggtccatggtaagcaggggcagctccacgttctcgctcttggcccagcccaagctggccaccagggtgtccgcatcgaagtggggcgtaaagtcgaagctcatcgtgaagcggtgcctccggcgaatgtggcatgcggcattggcattggcttccggacagggcgtcacccgcacctgactaatcgagcaggagtccacactatcttcgcaagtctgaaagttgactatctcagcggagacggatgacaacaccagagcaaaggcgac

SEQ ID NO: 23699 - DNA, 605 bp, DROSOPHILA
atgttgcgtcctagctcgctgcaggctgtcgccatcgccatcgtcctgatctcgtcatccgcttccgccgaggtggtcaacttcgaaccatgtccggatagcgtagacacctgtacgatccagcaggtgagagtctcgccatgtccggaggccctcaacaatgcggcttgcaatatccgccggaagcacaacagtgagatgagcttcgacttcacgccgaacttcgatgccgacaccctggtagccagcttgggctgggccaagagcgagaatgtggagctgcccctgctcaccttggacagcgccgcctgcaagtacacaccctgccccgtgagatccggagtgaaacagacctacaccaccctggtgcccatcgaggccaagtttcccctgagtccgtacaccatccgttgggctctgaaggatcccgtctcccagaagcgctgctgcttcaccatcgacattaaggtggtgcgctgatttgtgcccacgctgcatgagcactaaattaaatagtgaaatataccttttttcccaaataaaataaattaccgtgatgtttaaatgatgtgcaagtttcttaaaatacaaggagctatattggc

SEQ ID NO: 23700 - protein, 159 aa, DROSOPHILA
MLRPSSLQAVAIAIVLISSSASAEVVNFEPCPDSVDTCTIQQVRVSPCPEALNNAACNIRRKHNSEMSFDFTPNFDADTLVASLGWAKSENVELPLLTLDSAACKYTPCPVRSGVKQTYTTLVPIEAKFPLSPYTIRWALKDPVSQKRCCFTIDIKVVR

SEQ ID NO: 23701 - DNA, 2474 bp, DROSOPHILA
gcagcgcttctgggagacgggatccttcagagcccaacggatggtgtacggactcaggggaaacttggcctcgatgggcaccagggtggtgtaggtctgtttcactccggatctcacggggcagggtgtgtacttgcaggcggcgctgtccaaggtgagcaggggcagctccacattctcgctcttggcccagcccaagctggctaccagggtgtcggcatcgaagttcggcgtgaagtcgaagctcatctcactgttgtgcttccggcggatattgcaagccgcattgttgagggcctccggacatggcgagactctcacctgctggatcgtacaggtgtctacgctatccggacatggttcgaagttgaccacctcggcggaagcggatgacgagatcaggacgatggcgatggcgacagcctgcagcgagctaggacgcaacatgatggatcgaaagccagacacggaatgcaggcacttctacttcggactcggactcaaagccgggcttatctacgtacccgtttgacccgtgaactgggtcacatctgtggctccaggcgtgctgattagattcgagctccttatcgcaatgtacttagaattgtaagggtgtcgcagacggcactttacgtttttgtaaaattctgatcaaatattaaaaaagttatggctgttcccacatttttagtagagtatttatattttcaactagaagaaattaggtaaccccgcatattttattggcatactctacctaattagtcatttcaaagtgttaattggcactcatatcagcagcattccttgttctgctgacatattcaaggtgaaatgagtccaattactgggtatacagattataaacaggtgccgctaattacaccaaaccaaactatcgtatcgacccacttgtaaatcactttaatttcgaagatatttaagatatatattaatccaaatattaagtggagcatccattacggagtgcaccttgctagcgcaccaccttgatgtcgatggtgaagcagcaacgtttctgggaaaccggatccttcagggcccaacggatggtgtatggactcagcgggaacctggcgtcggcgggcatgttgttggtgtaggtctgggtgactccggatctcacggggcaggtggtgtacttgcaggcctcctggtccatggtaagcaggggcagctccacgttctcgctcttggcccagcccaagctggccaccagggtgtccgcatcgaagtggggcgtaaagtcgaagctcatcgtgaagcggtgcctccggcgaatgtggcatgcggcattggcattggcttccggacagggcgtcacccgcacctgactaatcgagcaggagtccacactatcttcgcaagtctgaaagttgactatctcagcggagacggatgacaacaccagagcaaaggcgacaggcaggagcgaactcagacgcaacatgatggatcgaaagtcggacgcggaatgcacgtagtggctaaagtctattggattgtggcgatagaatgctatactctagagaatggagcatgccaatgtttcttacgtaattcaaattattcaaaatagtttctaacaccggatgacgttcgtattaaaacgtcacaaaattgaagcaaacaaaaattgtaatatacccaaattcccaaagtttattaaaggcggatggattaaacccaatagttagagtagaaaagcaaaattttcaaaaatttcgagttcttaaatagctcttatcaacagccgggaactaagtgttatcaccaggcagcgaatgtcggaaaatatagagtataattaattgttttataatggaattccacttagtaccgccgacaagcactagtcagcctggaatctgagcccaacggaagagttgaatataaagcaaatgacagtcgcatccaggacaaatgaagtccagttgaggttgtcaatgcccgtgtcgcagatctaaggcatctgccgggcacaaaaccaattgatttcggcaccccgcgccatatgacaaataaatcgtcacacttttcagtgtcagcaccccgagatggaaaccgacagttgtcagtcagggaagccccgagatgtgaaaatgcaggagtgctccacgctgcgactctgaaactcgagacgaatcccgcgggtccaaggatgaggtcccgtcgcgagatgtacatatgcatcgaactatttgactatcgaactgggagctgtcaataggaggcagcacgacaattgcacggctcatttgcgggaatgcatgtcaacaatcaggggcaacaaacaacaggcgaggcgattgacaacctgacaccccaaggcagtccaaccccaaggtacactgcgcgaaattaccagggctaactgaggtacaatgatccaattaaaaagcaattgcaaaccaattagatgtgggatgtggaatcagaccttgagcttc

SEQ ID NO: 23702 - DNA, 474 bp, DROSOPHILA
atgttgcgtctgagttcgctcctgcctgtcgcctttgctctggtgttgtcatccgtctccgctgagatagtcaactttcagacttgcgaagatagtgtggactcctgctcgattagtcaggtgcgggtgacgccctgtccggaagccaatgccaatgccgcatgccacattcgccggaggcaccgcttcacgatgagcttcgactttacgccccacttcgatgcggacaccctggtggccagcttgggctgggccaagagcgagaacgtggagctgcccctgcttaccatggaccaggaggcctgcaagtacaccacctgccccgtgagatccggagtcacccagacctacaccaacaacatgcccgccgacgccaggttcccgctgagtccatacaccatccgttgggccctgaaggatccggtttcccagaaacgttgctgcttcaccatcgacatcaaggtggtgcgctag

SEQ ID NO: 23703 - protein, 157 aa, DROSOPHILA
MLRLSSLLPVAFALVLSSVSAEIVNFQTCEDSVDSCSISQVRVTPCPEANANAACHIRRRHRFTMSFDFTPHFDADTLVASLGWAKSENVELPLLTMDQEACKYTTCPVRSGVTQTYTNNMPADARFPLSPYTIRWALKDPVSQKRCCFTIDIKVVR

SEQ ID NO: 23704 - DNA, 11758 bp, DROSOPHILA
aataactataggtataccacctcttaagtttattttcccatgatcttcatcccatttcttttgattatttctttaagctatgtggacgacaagacggtggtcaaggatggcaatctgatcaccagtcgaggtcctggcaccgcctacgagttcgccctcaaaatcgccgaggagctggcgggcaaggagaaagtccaggaggtggccaagggtcttcttgtggcctacaactaacatatttacacttatttatgaaaacagattgtttcaagagcaactcatgcaaacaacaactgaattaaaataaaattattcaagacagaagttgtgattcaattttatatttgctatttgaaagaagtttaaatggagagctaggaaatggcatgttgttaaagatatattaaagaaatttatttaagtgaatttaaatgtcattatttgaagcaaacggttttcatttaattagttttgagcgaagtataattctatcataatgaatcaactgaactgcgttaaaataaattgttcaatgggctttaatttaatttgtcatgaaatataaatgcatatatggcatgaaaaaagaaacatctatattatttcatttggttatgactggactataaatgaaattaaaaatgcatatattaaaatgggatgtgaagccaaatggaagtattgctgacgatatatttacaaaatagtacattattaatatatttagttatattcaatatttacattgattaaacattctgctgcatttaattgtaaaattttaaaaatagctgaaagtaatggcctacggtggaatacccctactgggttggagtccctgcacaccacaacccgtgccgcgaaccgtggttgccgtctccgctcgcgccaaaagggactaagtatttcgtcgctagccgccgctggtcccactctcgcagccgcagcgaacggttgttgtggttgttgtagttgtagtgggagttcgtcggcgtgtttgcgtttcgctcgctcgtttggcgatttgctgggattatatttgcccgtttattttgtggcaaaagcgcatttaattcgaaggaagtgagtagtgagtggcgaaaagcggagacgcactgccgcgctggaaaggcggagtgaattgagtgcatgcgaatgcgtgtggagagcaaatcgaagtgcaagtgcgtgccagcgaataagaagaagtgcgaagccgaaaaggaagcgaagcaaggtgggcagtgaaaagtgcaacgaaaaacggcagaggaaactgcaataaatcaacaaaaaaaaaaaggaaaatattctacgtgacgcgaaattaaatgcgctcgctccttctcgctcgcacgcgcgccccgtctcttactctttgttgaaatttaactgcgagcagaacagggtcaaaaaaaaaaaaaaaataaataaaataaaaaacacgtcgagaaatactcgtgtatatagagttctaggtaattcctaccttccgtttttcgcggttaacgcgcgtgattcataaacccgtcttcaagatacgaaaccaaaaacagaaaacacagcgtgcattgaacctgctggaagcgctggccaccaggaatcgcttcaatcatggaaaacaacagtaagttcgctcctgcagccagtatgcccgcataaaggaagggcatttgagccgtaacacgatctatctagcagtagatagtaagtaaaaaggatttcatttcgaaaactaaagatcaactaaactgcaccgatacaatgtgaagatcttagagataaatgcttatatgccagctcgattttatcgtagattcctagaactcatcacaagacctttctcttctcttcacacctttaaagaagagtaccccgcgttcaactacccaaaactgcagtttcttttccattttgttgttttttttctgtcctatttttcggggtgggtcccgcctgtttttgccgtctgcctttgctcgccacattcgcattttgtgcgcccgaaaaactcttcttgtttttgttgcttttcggggtgggtgtgtcatcttagcccaaggacacttggttttccattttcctcttgactcgaatctaataccctggatatacgtctgactgactaacggtgttgtgttaaagccctgttgtttttaacactctgtgaccacgatttttacagcaataaaccaaaagttggacaacaaacaaacaaatataacatgggctaaaacaaaacactttgtatgagaaccggttttagtggccgaagaaaaggcatttgaaatagaatttctgcgttttgatgacttcatgccgccatcaatttcattttccccctgaaaacttttcaaattcacaatgggaactggagaacaaatgttctgcgatgcaaattagtggatattttccatctcgcccgggtcagctaaaaaaagcctctgattcaggccgaaatccgatgaaaatattgcggttttttagcattttaattaactcttttgtacggacctttgaatgagggccaattaagtgtttcggccatccaactattcatataaaagggatttacaaagatataaagtaatgttttgctttcgttttttagtgttacctgtttaaaaattttgaagctacttgctaattgcaaattgatttgtttacccttgaaacccgttgtaaatctgaatatagaaagcttactttgactcctcttttgtgttttccaagcttatctggtgtattccactcgtctatgggttttccgaccctttgctgaccctttggctactgttcagttggttccatggagagataatccgggatcgataggcactactcgtactaaggggctgctcagtccagacaatattaataaatcttaatgtgcgtttcaaccttgtggtggcttctttgtggatggagcccaagattgagaagccctcgcctctgcgatgttgccttctgataatggaggctgattgaaagaccgcgcctcaaaaataaaaaaatatgcaccgcacccgcagccgtttcactaatgatttctgatttctgatttcttttgatgaacaatttccatgggacggcggacaatggaaaggccagctctctgtgtacccatctactacatttgcatcccaaacaaagctgctttcttccgctgctttaagtgattccgagcggcgtttatgtaacgccaacacaaaactcaaaacatggaaaacagaagacagaaaacagaaaaccggcaacaatggcaatcaatggtcaacgcaaatgaatcgccaaatgaaaacattttatcagatttcttatttgccacattttgctcggcctttatcttatcatatcatcatatcatatccacgtctaaggggttccagcactcctcgcgccaaagctttcctgacaatttaataaattgcccatgccacgcctgcatttttatattccgtaattgactttggtgtgggctggaaatgggagtgggaccacgccctcacctggcccattaccaccagccacttcgcatagaactctttctctggccactaatcccttatgttctccactttgccagacctgatggatcgctcatgagtcacttgggattcgcagaattgctcatgacaataccgcgaattaaggacatgaggaaatactctatctcaacttagtgaatcatttgattttcgatatgaatatgtgtccaaatttgatgttttaccatcacaagaacgccatttctgtacacttgtttaaacaaaatcatttttaatatgaatttggccggatatgctctgctaagagtgctaatcaactaagtaaaaactggcaacgaaagtacatcgtttttgttttgaattatttctcgtttgcagcgaacagaaccgctttattgatatgcaaataatgtacttttcgcgtttttttacttttttgtttttgtttttatttttatttttatttgtatttgtgtatttcattttttgctggtcgagtgcattcaacagttgtgactgcggtgactcagactcgaattcgaatggcaatattgtgttttagctggctttttcgcctatcttatcgtcgttcctcagacttttgctggcctcgcttatcaaaaaggggaagggtgtaatagaaaaccagagatatgagttctcttgctcttgctcaattcctaatatatgcttccgtccctgacttcgggattccattgaaactatcaaaaaatgtaagccaagtgtatgaaatgtttgttctgcgatctggaaatcaacttgaattgccttgggcctctttccatttatctttatgtttggagcgaaaatatgcgggttccactcatcgtttaaactataaagcattccatatcaatgaactgataagaccccaatgaactccaaggcctcgtttctaatggcccttcgagtggattaagtgcattggcttcccaaacaatccaagtatcttgctttgtttgcagttcttgagtaaatactaaaccaccaatgatcttcactgtagtttaaataaagatttgaaaaatgaacccaaaactcctcggaaaagccgcttcaatcagctggactctcttgacctccagctgctcgtttccatttattttccccatttcatttggttaatgcacaactcatcagctgcaattgccgatagatggatggatggatggatggtcgctctgctcctaaacactttccatcgtaaactccacggaatcaaccagcgatcgccgccacatattgccacacaaatcacatgggcggtggggaaacccggaaaaggggggcgggggcacgacttttcaattgaaacctgcgctgttcagcttttccatgcttcggttgccgcgctcaattgaaatggaaatgcattcaaatgatggtcaagtggtaagagggtttacactggaggagaatttctgaagagcgaaatctttggaagaactttcgtaatatttgaagatgatataataaagggggtttagtactttgaatgatgcttttccaaacaagaaattttgtttcaattatcattattttttttagattttggttgggtttcttttaacacaatcttgaaatttttccagtgtttacaaatggccacgcgtgtcaatgacgacacctccgacaatgacttaatcgaacccgaatgttaatgccactctttgtttatcgctttgcagttttcgactgtagcgataagggtcgtttccctgccttatcattggtttttggcattatgaaagcattgattcataaaatgtttacggagagtttactgcatgtatggggtcttaattaccccgcagcagggatatctttctgtgtgcatcccccaattaaaagcaattgaaatgcaactcgcatttggcgacaaacgaattagattgctgcctctgcttttcacacgcaatgtgcggccttgaacttgagcaattgctttcatttcagtgtttcagggctcgcaaagctcataagtcaaggtcacctgggtgggctgggctcatcaaggacgtgtgtgtttgctttgaggacgacaaaagtggtgggcaatggaaaagtgaaaagtgggctcctgggggacagacatttgtgtcgctttcttgtgtgctctggaattgattttgaagcttgaagttcctgacttgcattccaagtaattataataagggtgggcaaatgacctaagacctttacaaattggcagcagctgctcagacagaagggtgtttttctttatgttcagtcatgcacgattcaaaagcaatgattctgagaatttcatgcaccgagattttcggtggatcttggaatcaaaaatcgtataccttacatcgagttcatgcggctatcaaatattgtataaaattattggttcatactgtgccatgctgattaaatacttcgcaatcaatatcccggccctctgtgtctgccccgtagcacttaaaccccctcgttggcccaagaaggaggaataaaacttttaaccaggtcatgccagtttccagttggaagcccgcccccaatgaaaagaggcagtcagacaggtcagctccattaactcactatatctgcactcacttatgcatgtggataaccccttttttggcttctcccctcttaagaccgctgaaacccgtggacttgcatatttaaaagtcgaactcacgcaaaggcaatttaccgtttacggttcatggcatctctcccccaccaaccacatcgcacctttgaaatgaatgcactgggaaaaaaatgttgattcaaaattttgtacatcatctttatgccttgtgtttctatgtttatagattctggtttaatgtcagtttagtagtacaaagattaaacaaaaaatttatatctttgtaatatccagtgatttttctctgtgccaaagacaagccaagcaaaaccgaatttcaaaggcagccaaaaccgatagttaaaccaattagcatgttcttgtttgctcacctcaaacggagggatgggttcggagggggtggtgtcaactggaggggggaggtgtttgttgaaggtgtttattttgaacggaactttggggactcttgccgcacctttggccgccaacaaataagtgcagctgctcatctgaaccggttacaggttatattttacatattatatgtggagctcaaccgtttcggtaatctctcggatgcatcagttgaactttatgcataatggggggagaatgcggatgaggggcagggaaggagctgcagtgtcggagagccagctgaaaagtactgtattgcttatttgaatgtaaagtgtgtgggtataccagattgtaaaaaaaaaagtacaacctttatagggtatacaaaaatcgtagtttgcctgtttaataacacctcgtaccttcagctgttttcgagccatatttttaactatccagtaagcgatttgcatatctttatggccgacatgatgtgctgtttgacattgggggaagctgacttcccaacaaaacccgatatcgtaatgatcggagatatgtgtgtccaagttgcaaggcaacaaatgaatgcacccaaacacccacatgtccgtgacgaccagcacgccctctggcggcgacagatggcggctgtggctgtcatgcgattttctccgcttttgacacatttacacatttggttttcccattcggctctcggctctttcatcaggcttttctcacgactatgctgcgcgtttcctcgctttccaccacttggcgcccgattttcaccatttttgttacacagcaaaaaattggactaattttgtatcatttaacctatttaaagcaaaaatgggagtttcggcaaaaactcgtcgtatttgggtccagcataaggatacctaaaaaccctgcctagtttcatggtttataagcagttttcacattaataaattgtatgccaattttaatttcttttcctcgccgtgcaggttttccagacgcgtctcatttcgctgctgcataccgcccattctaggccctctttcaacgctctcctccattctttccactcattcagcgcgctttgcggtcgcttattattgttattcaagcgtacacagcatatgagcgaaaacaaagaggaaagcggcagcaaatcgccagagaggaagatgaaaaactttgaaaaacaaaaaccgcattaaaggttcatttggctgtcgctttgtttgccttttacagtcgcgtaggttaaacagtgtggctgaggcacagtatctgagatactcaaatacttggccattcagatactcagatactcagcctagacacaaattggctcttggtggcgatgcaaccgtgacacgatgtgtcgatgaataattgtcattgcatttatcaaatatgtcatttcattgatttctgcatttattattatactccaatcatttgttgtaaccattttaaattctaatttaaattcagctttctaagaatgttcggattactttttaagcatctaactctcaaacgaattagtcacatttaaatgtagtgtttacctggtattgcatcagaatctaagtgccatacccagttagttgtcttttgcttttcaagcttttccccaatctctttgatgcttccgtccgactgtccgaccatttttttttttttttgttattgcggtgcgtggctgcagcacttttgccacttcatcaccggatctcgatctcagacgggctcggtgactttaactggagtgaaattactactatgcgctgttgacgaaactgctttggataacgattggcaggcacttcagtgttggtggccccatcccaacccccccaaaatccccccgaaacgcctgtcagtgaaagaaatgttaagagctgatttgaaacgagcggaaaatggaaagcacttcgagccgccttaatgccatcaagcgatcaactccaattgctggttttacgcccattaaacgttggccaaccgatgacaatttttagttttccttcgcacattactcatcgagttctgatgagttggttggaattagacggcaaattcccctctatgaactgacccatatataaagtgtcgatctaaatgacatcacgtagcacaggaatttattatcatgtttgtttatttgtggccctcttcggtttctacttccctcttctaagccaataagtgtttccaatgcatttaggtttactgaagagacttcgatactcttaccattcagtataccaagttatttacatagctgagtatttcgtttgccatcagggtatttccatcactcacacaacccatcaaaaattggacacggcatccaaacactcgagaaaagcaagaaacatataaaaactgagtcaatcgtgcgggggcagcaacctccaaaagccaaataagtttagcattgcggctatttaagttttttttattttttttttaatttacattttcaagctgtcgccttgtgcggctagtggtaaatatagtttctaagactgatttctaataaagtgtcagtcagtcatggtctcattgttttcgacatgcgtcatgacaaattgtgttctgttcgctttagctgatgattaagtttgttaatgcggttagtttaatggaaattgaaagtatgaacttgtcttaaaaaaccaaccatttacccatctttttcctttcagtctgtgcaatagtcgaatatgagtacgcggccaaggagccggacgagctggatctccagaaaggtgccattatccatcggatcaagcagatgcccggcggctggtggcagggcaccctgaaggcctccggcgtaacggggatgtttccggataactttgtgcgcgtgctggagtccggagtcagtagcaatggcaacggaaccactggcagtggcgaccacatcgaggtgggcaccgctgtgcagctgaggttcgttcacttagaccacttgcaaatgacgcaatagctgattttacatgctgtttcgcttctccaaattcagggacaaatccgcgacatcgaatcgccgctgcaaagtcatctatagctacacacaagtcaacgacgacgaactgacgttggccgtgggtgatgtcattgaattcctaggggaggtgcgtacacgccgggtaacggggggaatgcggggttgctttctacccccatttaacctattgggccaatagaaattgaaattcgttgcgcactgagagaaagaatcgtcctaatcttattaacaagttccaaagctcttgattgtttggtaacttttggttttgacataaaataaccaacatatattttttttattttacgatttaaatgtaaatgtagatttgacgcttgtaagaacattcggtattttctcgcagtgcagtacatttggtttcagtctgttcatttcactcaattctgcttcactctgttttctcatttaggtcgaggaaggctggtggcgcggtcgtctgcgcagcaaagtcggcgtcttcccatcgaactttgtgcaacatatcgagccgtctcccgttttggcctccaaacggccaccgacaattggcgccaccgtgaccacatcggcgctgacgtccaaggcggccaatgtggccaatgtggcagccacagccacagtaccaaccggcggagcagtgcctcctgcgtccaccagcatctccacctccacaactaagcaggcaacgaagagcagggcaactgcagcagcagcagcatctgctccagcggagccggcggccatagtttcgggatcgggagcagcagctggtggaggagcagcggcagcagtgcccatgttgccacccaagccgcagcgggagttctgccgggtggagttcccctacgccccgcagaacgacgatgaactggagctgaaggtggacgacataatcgcagttatcagcacggaactgcccgataagggctggtggaaaggagaaatccgcggcaaagtgggcgtctttcccgacaattttgtcaaaatgctggcaccttcggaaggtgagttttcaccaaggatttgcaaccgcttcaccgattttctctctcaatcacatcgcatttttgatttcggtctgtcaagtttgttgtcatcaagtctccacctctcatcaatgcattttcccccctcttaattggcggcaatttcccaacgcatcggctgtaaagcgcaagtcgttagacttcgaaattgttgtcgtgacgtagcggggatcaaagtcaataaacgtttgttgttcgtttggtaattgaattaattaaaagaaaagacaccagccagccactccctccccgacttccttcactcgctgcatatctttcggatcgttggttttcaacgtctgtgcaaaatttgtagatgacttaattgcctccggcgcatatgaatcagataaactttattgccgatgcgtaatggcattatattgtatttgagcaaggatttgtgtacggagcttttgataggcgcgccgtaaattggttgactaatgcttggttttaaaggttttaacaagttttttttttaatggtaaacaatgtagctagtgggccagagagatcattaaagtccgggaaactactttctttgtaaatatattagtaagtagtcgcaatggaggtatctagtgtaggaaattttccatatagatatagtctagccaaagacactagaataacaagatgcgtaacgccatacgattttttggcacacaattttttggccgtggctctagaggtggctccaggctctctcgaatttttgttagagagcgagagagcgaagagcgctacagcgaaccgctcttttctacgcatacagtgatagcagacaactttatgtgtgcacacgtatgctcatgcattgtaaatttgacaaaatatgcccttcaccgtagaagttcttagactttaaatctatattatttttgatcaattggcaccatgcggaaaattcttgttttgcattgccttaacgttattattatttgaaaatagattagaaatagccaaatctatgtacataatatcacaaaaataaatttcaaaaatgactttatataagaatatttgtcattagagtattcatcttgcggcgtgtgaaaaattaataaggcaatgattgttgagtgcttgtgtccgcacttcgtgcctcaagatatgaccaaaacaaagacactagaataattctacagtctttgatgtgact

SEQ ID NO: 23705 - DNA, 1673 bp, DROSOPHILA
cgtttcgctcgctcgtttggcgatttgctgggattatatttgcccgtttattttgtggcaaaagcgcatttaattcgaaggaagtgagtagtgagtggcgaaaagcggagacgcactgccgcgctggaaaggcggagtgaattgagtgcatgcgaatgcgtgtggagagcaaatcgaagtgcaagtgcgtgccagcgaataagaagaagtgcgaagccgaaaaggaagcgaagcaaggtgggcagtgaaaagtgcaacgaaaaacggcagaggaaactgcaataaatcaacaaaaaaaaaaaggaaaatattctacgtgacgcgaaattaaatgcgctcgctccttctcgctcgcacgcgcgccccgtctcttactctttgttgaaatttaactgcgagcagaacagggtcaaaaaaaaaaaaaaaataaataaaataaaaaacacgtcgagaaatactcgtgtatatagagttctaggtaattcctaccttccgtttttcgcggttaacgcgcgtgattcataaacccgtcttcaagatacgaaaccaaaaacagaaaacacagcgtgcattgaacctgctggaagcgctggccaccaggaatcgcttcaatcatggaaaacaacatctgtgcaatagtcgaatatgagtacgcggccaaggagccggacgagctggatctccagaaaggtgccattatccatcggatcaagcagatgcccggcggctggtggcagggcaccctgaaggcctccggcgtaacggggatgtttccggataactttgtgcgcgtgctggagtccggagtcagtagcaatggcaacggaaccactggcagtggcgaccacatcgaggtgggcaccgctgtgcagctgagggacaaatccgcgacatcgaatcgccgctgcaaagtcatctatagctacacacaagtcaacgacgacgaactgacgttggccgtgggtgatgtcattgaattcctaggggaggtcgaggaaggctggtggcgcggtcgtctgcgcagcaaagtcggcgtcttcccatcgaactttgtgcaacatatcgagccgtctcccgttttggcctccaaacggccaccgacaattggcgccaccgtgaccacatcggcgctgacgtccaaggcggccaatgtggccaatgtggcagccacagccacagtaccaaccggcggagcagtgcctcctgcgtccaccagcatctccacctccacaactaagcaggcaacgaagagcagggcaactgcagcagcagcagcatctgctccagcggagccggcggccatagtttcgggatcgggagcagcagctggtggaggagcagcggcagcagtgcccatgttgccacccaagccgcagcgggagttctgccgggtggagttcccctacgccccgcagaacgacgatgaactggagctgaaggtggacgacataatcgcagttatcagcacggaactgcccgataagggctggtggaaaggagaaatccgcggcaaagtgggcgtctttcccgacaattttgtcaaaatgctggcaccttcggaagtctccacctctcatcaatgcattttcccccctcttaattggcggcaatttcccaacgcatcggctgtaaagcgcaagtcgttagacttcgaaattgttgtcgtgacgtag

SEQ ID NO: 23706 - protein, 352 aa, DROSOPHILA
MENNICAIVEYEYAAKEPDELDLQKGAIIHRIKQMPGGWWQGTLKASGVTGMFPDNFVRVLESGVSSNGNGTTGSGDHIEVGTAVQLRDKSATSNRRCKVIYSYTQVNDDELTLAVGDVIEFLGEVEEGWWRGRLRSKVGVFPSNFVQHIEPSPVLASKRPPTIGATVTTSALTSKAANVANVAATATVPTGGAVPPASTSISTSTTKQATKSRATAAAAASAPAEPAAIVSGSGAAAGGGAAAAVPMLPPKPQREFCRVEFPYAPQNDDELELKVDDIIAVISTELPDKGWWKGEIRGKVGVFPDNFVKMLAPSEVSTSHQCIFPPLNWRQFPNASAVKRKSLDFEIVVVT

SEQ ID NO: 23707 - DNA, 7924 bp, DROSOPHILA
tttggggggcgagcttaaatgaccttgaagacgggcaaactttttcgcctacaaagcaacgtgctgatttcgcccacttcatttgctcatcatcaagtcaatcaagttttaatgatgccacaataaaccccgcatcgcccgctgaataatttaagaaatgtccacggggcgttattattttctgggagttgtgttgtttgtccatcgcccaatattgcggcatacttatgagctctggaggataaatctgaaattttaattgcttgccattttctttaagtgtccagcaataactggaaatttatgggattcttaatgaacgagtacagattgctgaacatgcttcggtttcgcacagttttatttattgaaaaatacattgggtttttctttggtttttcatttggtaaatagttttgcatttgtcctggggcttacacatatgttgttaatgatatgatttccatttatggagtttcgtattcgactagctcattatacacacacatacatagatatacatttacatttatatttataacttggtttttagacccccagcggggtctcttgtagttgaactctaaaagtacagacaacacacagtccacaagtattttatatcttgtcctggcgtctctttttgtttttgtttatcggttttttggttttttggtttttgctattgggtcctggccaacagttttcattgtttggcttgcggctttgcgttcggccggattggggtttaattcattttcattagggtgacaagcggtccgccccgtgtgtcaatcttcatcaaaagatgagcgcccaattccaagttggatgtcctcccaagttcatccctttcacttggcgccgcaggatattccgcccagcattaatgggaatggacggctggctacttttcggctgggttgattcaaatccagtcctgcaccctcgtcttcccttcagtcactgccatccttcggctcggcccggtgtccggtatttacaacagcctctccagatcctcgctctccgcgtcgctgataaaggagtcggtgtccgtgaaataatcgtcgtcgcacctgttccggcgacaacagaccctgcgaccaatctcctcgtcgctccagtgctcaaattcctccttgtggtgctccagcagcattagcgacgggaacaaactatcgcagccactgcaactggtggcgggcaggtcggaaagtcgccaggaaggcccgcaaaaaagggagagaaaagcacggaagaaaggcgagaagtagatgaaaagcgagagctagcttaattaagtgcatttcccttacccgaagtgtcgcttcttctgctggtgcgatgccaactggcggtgacaatggaaagctcggtcgcacacgttgcaggtgagtgattcgtctgaaaattgggtaactataaagcaggctacggaaacagttttcctctgatgtggaaacattttgggcatgcacgtgttgcacaaaagtaaaatatgatagtttcaagttcagtaaatgaacttattaagagtatttccaattaagtaaattaaattatattaaagtcccatcgttcatacaaagactgtccgccgatccgaggcaatactgttcctcatccgcctgcatcgcctgcattatcgctgggcttttgtggaccacccaactcacccaactcaccgtagtcatcatcgtcatccgccatggccagcgcatgcagacgacttattgtgttttcgttaatctccttcgatgttgacgtgctgcctgcgccgaggtcctttgatgttttggctttcgcctggcacaatcccagctcgcagagggcgctctccacctcgtagttgccctggcaatcggcatccatgcagggcaggagtgacaggttcccgtttccactcccgttaccgttcccattgccgttcccacagcctgccgctcctgtggatcctaagcctgaacccgagcccccgttgacattgacgttgccattggcttctcctggtacctgactgctacagccggcagtggcggagttcgctgccagcatttcaaagtcgtctagctcatcgaacggatcatcgattttgtggccaagtgagacggcatcgtcggcctcggcactcagtcgtccatatgccttccgtgggggcctcttcacatatttgtctgccataaaatgaggtggaaaatgcatgaaaaactttgctaaataaaagcctgttcgtattgataaaacattctgtggaaaatgtagcgaaagtccttaggggttcgttttttgcacgagctttatggacatacttttgcttttaagctggtttctattcatggttcaacatggtttttgttaatagagctaaagtaaaaaaaaactgatatgattgtttgtttatacacatttttaagcttgtcttaaattttcattttgttttagacctaagcggtttgtttatttatttagcgcattttcatttcaataataatggaatatagaatggtttttatagtctgaatgtaatctctaactgaatgaaaacgtaatattttatatgtttttccagtacccgggaaaaagaacaaatcaaacgcaatcgctttctgattgcttttgaattgcttgtgctgtcgggagggttctggtcatatttttactgtaacgcgttagtttttccagtgcataacttttgtttccgctttgtgtggcaagtttctttgttattgctgagcgtggaaattgagaaatgttcctcaatgcatcaggcaatttatggaggcttttgtgccgcttttgatatttgcagaaggacctgccgttgagacaaaaagtttccgctcttctttatatttgcctgcatgtcctcgacgtcccgaagtgataaaatgagatttattgtcggctctgtttgtgtactgtgtgattgtgattggggaaaggacaataaatatagtggctggcggtgagatttggtaagcctttatttacggtcccaaaaatagatggtgtgctgacttggccccgtatttttatggcgcactagccattcgagctcccattagcagctcattatgtgggcttgtctttgtgcgggctttaattgcaatcgagttcaacagtgcgtatacgtgacgacacgaaattggcaattcgtacggcttaatcgtatttaaatgttcaaataaactaaagtcgaagtgctcaagcacgtttctatagcaaagtctttaatttttgcggtattttgatttccttaattcccgaccagaaaattaattcaaaatgatttaatggattaacaaattaaataaaatacatttcatttgaatgaattctatatagtcattgaaatggtgtctagaacattcaaacgccttgtgacgactatattatttacccacaaataaaaaaccattaaaagctcgtattgttgaggcagcccaggaaaaaacgtccatgaatattaaaagtgggtcgagaaatggaaataaaaaacgcatatggggagaaaacattcgcagaatatgacggacggagtgaaaaactggtggaaagccagccgagattggtgtcgaagaggcgccagaccgtgaggagaactaaaactcaattttatcgccaaatcgtggaccgcagagcggcaaacatttaccgcgatgttttctggtctgggacttggatggaaatttatgaccaagggctttaagtttggccccggactcgtaatctcaaaagataaaagtttctctcgattttactttagaattacagcacaaattattacaaatgatgccgcccgccggcaagaaaatataaatcatggctcggaaaagctggaaaagcgtacagtgcagacaggaccggcgatattaatacgccagataaatgcctaataattcttctcatgctgcgtttaggatacacactcggtttcgatgcctgcccgaatggcaaccataatttatgatacattttgtttgccccgttgtaacttttattatttctgatgtctgaccaaacacacgaactaatgatgccggcagccaaagtgagccacatctgatggccagggagcagagcatagaaaaccaaagcaaacagaactggaaaaaaaaaccgaaaatcaaaacagatatcctgcaggaccttcgactaattggcagcagaaacagctgtgtccaaaataataatgtgaaaattcgataaatagtttaaaggcagtggggaaaatgtggtattccaccattacttattatttttatttatcaacttcctcttaccacttgcaaataaataaattcgttcaaaaatccctgcatggttgtattatgtgaaaataatttcatttagattcctccatcgcttgtaatttgagaaaatccgctgccaataaacaagtcctttccctagttctccccattaatcatcatttgtacgataatatctgtatgtggacaccagacatggagccataacaacatgcctagactaattgccattgcttgttttacaattctccaaattgaatgcacaaacgcattattatcaatgacaaatggctgtcataattatcggttaataccgcggccatatgttgcccagaatttgcataacgcacataaatctcggccacgcccccttttccgccttgtgggcgaacaacagtacatatgttgacaaaagcttaagggcgtcgtcttgtttttgctgtcacttgtgcgagttggcaaattaaattttgtacgattaaatttcgcgcctgccaccggtgattggaaaaattgtcgttgctattaatgtcataaatgtttgcgaatttgcaaagtgagtaatggcaatttgcgatgtgtgaaaaaagctttcaattattgtcctgacattaaggacattgtttacgtatccattttaatgcatttatctgtggaaattcattaaatattacttgtttttcttcgccaaggcgagaattgtagataaggttgtgaaaagtggatggcttaggcagaagtcaacttgtttttcttcttggcaacatctgctggcagtagtaaatcaaatgccagaagccccttaagtaactttatatgccacagctgtttcgtaaagtaaacagcagatttatatactcttcatttttcaaacataattattcggacaaataatcgaaagtttccaatttgccaaaagcaaattcaatcagggaaaatcaatactgccaaaaactatcccgttcgccacaaaaacaaaggaagttggtaaacataatttaaaatttctgattaacattttgattgcattttacccatgctgacttttaatttgcttcgtgaacatacgctaattattttataataacaaccggattgagaatcagaataaagccgcaatttatttatagtcgcttattattgccatttgggttgttatatattcatgtgattcaggtctgagcacccaatacaatattttattgatcgatgcttaaaataaaagtacaccaactttaaatttgcgcgtcagaatcaacaaaggcaactaaaaatttcaattaccagccatcagcgaaatccccccccgaaccatcctttattttcccccagcaattttcttggagggtgcgagacttagcgcttagacaaaagcatcttggggccgaaagcccaaagtgttttcttttcgacagtcacatccgcaccacgttttcttcgtcgctcacacgtgcaggtcctcattattgcgtgggttgtaggatctggatgttatttactttgcctcgtttcccccagttgctaccccacaccccctttccaaaatgttttcccacttttccatacggcacagataaaggcaaacaataggagtgtgcaggcaagtagaatatacatttattcgggccctatactcaccaagtcatttcgggaattttaattaacttgtttagataacgagcgagtgtttggcttatgaatgaaacgcaggcctgaattgatacatgtctggcatggcaaatcaagaaaacggtgaaatgcacctatgaagttgaagggaaattgacttgttgaaattcctgtttggaaaatgtgagaagccaagattgccattttgatccagttggttttagtcgacagcaataatcttttctatcaagatttagtggcttagtctatgatctgcttaattttcatggaagtcatgttgttatttaattgattacaggaatgaagcgagctgacaattgcaagtcaatcaattttaagtgtttggagttacgtttcaggcaaccagagtgcaaagtaatatatatatagaattctcgtttgaaatatttcaaattacaaattagtagatatctataggatatactaaagatactcaacagatccttaggctcctttccacgtttaccaaccagtaaactcaccaacttgatatcagtactgcactactatttatggttgatttacgcacaagtttgcgacttaacccgattagttcgctaattattgataaattatcctaattgagtccgcccgacttttgcagccaactggactaattgattgcccaggtgtgggaactaaccttgtgtgctgttgttgtgattaccgccgtttgagttgctcttggaaaagctgcagttgttgttgaaggagttgaagaagttggcggcaccggtgcgccgtaaaatccaaaacatggttgcaggtgtgcagcagtgcaggagtgcggtatcctgattaatgggctgtcggaaaaatccagttgatatgctgcagcgccctgaagtaggcaacgaattatgccaactgccttttcaccgacggcattttcacgcgacgcgttcttgcgctgataagcgggctacggaaaatgaggcgaggacgcgacggaaaagcccggaaaaactggcgaccgtatcgtgtggaagtcttcatcaaactaaatcgacttcgtttgcgctctcggattttataccgcacgaaggaaaatgagagcgaaaatttccgtgttaccacgagagctctctccgtctacgtgataacgtaaggacttacgttttcccactgctcttttgctcttttgacgtctgttgttgggaaaaccaacgcttggcaaaggctaaacttgaccttcgtcaacacttgcatgtcgtttggcccgctggcagcccataattcgttttgtttaataaacgattacgtatgcgccgtgtggacgagcctcaactgtcttgcgacttcgggcactaaaacgtccatcaatcatcgccaccggaagtggtcgccactttgttgtccttgtttaaagttttatatgcttcttatcgggctgttcaattagacagtgtcttttactactttgcgcatcgggagaaaatcgtacaaaaaagtttaacagtatataaaatatatgcatgcacctttttttctatctcttccactttgcgattgcttttaacgatttttctggtacaaatttccgttctttgtgcatatttatttgacactttcccatcagtgtttgtgacgtggaaacgggcggaaatgcggaacggttaacagctggcagcacatgcatccgcatcaaagttttcccctgatggttaacgctgtggcaaaaacaaagacatctccattaggttggcgtgttcgagggtttcaagtgcaagtgcaaagttcatgtcctgcgaattcgtttatggtgcacgcgcggcggcattaaagcgttttccgagcaccctcgacttaaatgccgcacaacaaatggttttccgcagacaagactgtgatttgatgactcggtttcggttcgccgatttctgctgctcgagcggggttaagttaacccgatactgattgccggggcttggatgtggccgccacgagggcaggagtcgcccacacacacacacacacac

SEQ ID NO: 23708 - DNA, 1118 bp, DROSOPHILA
atacggtcgccagtttttccgggcttttccgtcgcgtcctcgcctcattttccgtagcccgcttatcagcgcaagaacgcgtcgcgtgaaaatgccgtcggtgaaaaggcagttggcataattcgttgcctacttcagggcgctgcagcatatcaactggatttttccgacagcccattaatcaggataccgcactcctgcactgctgcacacctgcaaccatgttttggattttacggcgcaccggtgccgccaacttcttcaactccttcaacaacaactgcagcttttccaagagcaactcaaacggcggtaatcacaacaacagcacacaagacaaatatgtgaagaggcccccacggaaggcatatggacgactgagtgccgaggccgacgatgccgtctcacttggccacaaaatcgatgatccgttcgatgagctagacgactttgaaatgctggcagcgaactccgccactgccggctgtagcagtcaggtaccaggagaagccaatggcaacgtcaatgtcaacgggggctcgggttcaggcttaggatccacaggagcggcaggctgtgggaacggcaatgggaacggtaacgggagtggaaacgggaacctgtcactcctgccctgcatggatgccgattgccagggcaactacgaggtggagagcgccctctgcgagctgggattgtgccaggcgaaagccaaaacatcaaaggacctcggcgcaggcagcacgtcaacatcgaaggagattaacgaaaacacaataagtcgtctgcatgcgctggccatggcggatgacgatgatgactacggtgagttggacgaatcactcacctgcaacgtgtgcgaccgagctttccattgtcaccgccagttggcatcgcaccagcagaagaagcgacacttcggttgcagtggctgcgatagtttgttcccgtcgctaatgctgctggagcaccacaaggaggaatttgagcactggagcgacgaggagattggtcgcagggtctgttgtcgccggaacaggtgcgacgacgattatttcacggacaccgactcctttatcagcgacgcggagagcgaggatctggagaggctgttgtaa

SEQ ID NO: 23709 - protein, 298 aa, DROSOPHILA
MFWILRRTGAANFFNSFNNNCSFSKSNSNGGNHNNSTQDKYVKRPPRKAYGRLSAEADDAVSLGHKIDDPFDELDDFEMLAANSATAGCSSQVPGEANGNVNVNGGSGSGLGSTGAAGCGNGNGNGNGSGNGNLSLLPCMDADCQGNYEVESALCELGLCQAKAKTSKDLGAGSTSTSKEINENTISRLHALAMADDDDDYGELDESLTCNVCDRAFHCHRQLASHQQKKRHFGCSGCDSLFPSLMLLEHHKEEFEHWSDEEIGRRVCCRRNRCDDDYFTDTDSFISDAESEDLERLL

SEQ ID NO: 23710 - DNA, 4391 bp, DROSOPHILA
agtggaaatttcgaaattgaaatggaccctttccgccgaaaaatcgattgattttcaatttcccctctgcgctttcttgttttgctaagtttgaaagttatttgctttaactcatgctgaaagaaaatatcagttgactagccgctttttaaccttttattcgaattttatccttagttgttgcacaaaagagtctatgtgcttagttgatgatatcagtcgatatctctttaattggccaataactgctgaatatgtggcagcacaatatagttacgaaagtaatcggcttaagagcccacactgcgatgtgcattttagtgcattaaaaggacttgcaatgcactactgtctaatccagattacgacgacagccaatggctttaagcgcaagtattttaaaactgaattgtgagccgtgattccagctggagttaaataggaaaactgttgggcttaaagcagctgtagtggcaaataccaatcgagcatggcttcaaatcacgttcatttcgttccacatgacatgacatcatggcaatggtatcaaagtgcacacttgtagacacagaagcctcgggtttgcttaaatttttatggcctcaacacttaccaggtgcacagcttttcttgccagctactggatgttcagtagcagggaaatcgacagctggaagctcgagtatcaagaaaattgagaatgaatggaaaatgggttaccactctctttgttgcagacaaatttctccttttaattgaaggcaaaaagggatatatatttttaaatagttggcttctgacagagacttacatgcgaaaataaaaaatttagtattaattaaatcgactcgctgggaagtattgtcttattttatattagaatttttaaattttaatttagggacctatacataatggcaatcaattagcataaaatataacgttattaatacattggtcctggacctttgttcgtcggggaatacgtattttagtatatctactgatgtgatctgctgttgtagttggtggatgaggtggtcatcgactggagctcagtggtgcgcttttggacatccagctccatcttggtggggcaaatcagacccacccacagccgacggttcgtggagtccaagaggacaaagtaaatgaacatcacaaatccctgcatagtggccgtgatgcagaagaggtatgaaaaagccacacctgcctgcatgaaggcgaatattccaaagatccaggtaagacccagcaaaaagaagagcattatggagagtcggatctgcttaaccaccattttcttttcgtttttatggatgctctggctcaaagagtgcgagatgctgtagaaaacatacacgaatatcaccaagttgcacacagtaatcaaggtcacagggagcaccaccccaaaaatgagaccatagcccgatggatagcagatgccagtgtccgtggaaagttgggcagccgaggggacgtacgaatcgggatctataagggccaccagcagggtggggaccaagggcagtagccaggccacaatggcggccttcaggatatagcgaggtggtctctcgattccgataactgtgacgtaacgctggaactgcaggaaggcgatgattagcatccaactgaagagaaccagaatggagtactgcatggcagcgcccagagccacacagcgaactgtgtttccattcacaacaagcgcttcggatacatcatctgtattgagaaacacgaagagcatcatctggagacacatagccaggcaaaggtgcagtaagaccttcgtggaggcctgactgcgccagcttttgaagagtgcggcagtgaggaatattcccagtatacccaaaagggaaagactgcagcccactatcgagataatgtccagcactttctcattaatcggagtaattagaatctcctcgccaaggtcgttggctcgatagcttccacccaccaggaatgcaaactgtgtgaggtggttagtgtggcactcgatgatggcatccttcaagaggtccgaactgctttcagtgcttactccctcagttgaccaggtttcatagttccaatatccgcatccactcccaatgctaaaggcctttgaatccggattgcgaagattttcattacgcagaagaaagggcagtggcagagagagataattgcctatttaatggaagggtattcaaattagttcgagtattcgaaaacaaattttcatgcgtttcttacttctcagtcctggtattgaaatggagattactttgctgcgcggcttacgagtgcgttgcaatgaggtttccacgaacagagcatcgtgggcatagactttaaagatgagataggttgctcccctgcttttcacttgccgccagagattctccggcaaaaatgcagctgtctccagattagattcctccttgaccttagccaagtcttcggagaatcgaatgaagcggtaccagaagccactggcggaagtctttcgttgatcccctggcgcagagaatatagctaatccagttatgcgatcgcattcggggttggcgaagaacacgctgatattgccggtaatcagagcttggacaccgatatctgagaagttgtacgtttccactccagtagtggccgtttctgcttcatcactggtcggcttggccaccaccttgccgcatctgtccttgggaaccagttgctccggaagagcatccatgtagctttcgaactggctgagcagggaattggtagcgttgagctgagctgataatctaagaaccttactgtcgcaggacattatctccttgcagacactgaccaagtccacactgaccgtggcatccttgtcctgctgcatcagggcgccgaacatttgtccggtcatgtgaacatcggcgggtagaagattcccacctctctgtcggaacatgttcctcattatgccagtcatctcacgacgcccctgggtgtcattggtgcgcctcctgccctcgagaacgtcgtcatgcaggctattcaagtcaccgctgatcgtgtgctccctgaatcgcctcaaacacaccacgggatcccagtgttcggtggactcccagttggctcggttgtccttcactctgcactccctggtgaccggcattccgtttcgcagaaggcaaacatcgtgcagggtggcacgttcgccgattctagcccgtttccacttgttctggtgaggtgtttgatcgtggttacgcgttatgtagtcgtgctgaaactcctccggctcgcagaacatggacgtacagtaaaccagatgtgtttgcataagttcgtccgatgaattacgttcctctccatcacagtactgaaacgttccgtttctcaagcacatttgattttcctttgggcaggcggaataaatcggcgaaaccaaggccaagaccacaaagagcccagcacaccagttgaaattcatggcgatgaatcaggtgccacagctgtttgcagctctccgaaaatgtttacaaattctttggcagatagtacttttcacgtccgacgttcttgaaatatcgcggcacactgagctgtctgtcgatcgattagatttctgtagaccccttcttcatggtgtttgctatcagttgccaccacgagcgctaatcgacccccgttttttgtatatctacacactactcacaaaaagacctcaagtctgcggcatttgatacaatttacattgtgattaacacgaccacggcaattgaaggcgaatccgacggaaccctttgaggcagggaagtaacaccaaacttgtgacgtcgtctttatttgtgcaaatagcgatttcacgcctttttaccggtcttggtacttaaaatgctctggctgattcattttttacgcgcttgaattgccagataagaagttcttaccaggaaacacggctgtacatgggctatttatacatcaatgatacaaaaataatgttaaaaaaaatttaaaaactttaaaaactagttttatttgcatccgttcaagaaagagattttttttagatttgtttgatcaattcattgctatggcttctaataaatgtgaaatgtgaaacaccttcacataaaaaagtatttacgcaattcactcaagcaaaacagatcctttgtccttgaaaaaagttatgaaatgcaaagcacttcaccttggttgcataaagtgcgattttcattttgacaggctacgcgttttcaaagactcagccttcgattataatccacctgtactcacttcattgtaagccagtttttgggccaaaaagtaatttttacagccgacttcgcagcacgtagactgcgtgtgctagcggaaattgttagcttgttgacacgttt

SEQ ID NO: 23711 - DNA, 2325 bp, DROSOPHILA
atgtgcttgagaaacggaacgtttcagtactgtgatggagaggaacgtaattcatcggacgaacttatgcaaacacatctggtttactgtacgtccatgttctgcgagccggaggagtttcagcacgactacataacgcgtaaccacgatcaaacacctcaccagaacaagtggaaacgggctagaatcggcgaacgtgccaccctgcacgatgtttgccttctgcgaaacggaatgccggtcaccagggagtgcagagtgaaggacaaccgagccaactgggagtccaccgaacactgggatcccgtggtgtgtttgaggcgattcagggagcacacgatcagcggtgacttgaatagcctgcatgacgacgttctcgagggcaggaggcgcaccaatgacacccaggggcgtcgtgagatgactggcataatgaggaacatgttccgacagagaggtgggaatcttctacccgccgatgttcacatgaccggacaaatgttcggcgccctgatgcagcaggacaaggatgccacggtcagtgtggacttggtcagtgtctgcaaggagataatgtcctgcgacagtaaggttcttagattatcagctcagctcaacgctaccaattccctgctcagccagttcgaaagctacatggatgctcttccggagcaactggttcccaaggacagatgcggcaaggtggtggccaagccgaccagtgatgaagcagaaacggccactactggagtggaaacgtacaacttctcagatatcggtgtccaagctctgattaccggcaatatcagcgtgttcttcgccaaccccgaatgcgatcgcataactggattagctatattctctgcgccaggggatcaacgaaagacttccgccagtggcttctggtaccgcttcattcgattctccgaagacttggctaaggtcaaggaggaatctaatctggagacagctgcatttttgccggagaatctctggcggcaagtgaaaagcaggggagcaacctatctcatctttaaagtctatgcccacgatgctctgttcgtggaaacctcattgcaacgcactcgtaagccgcgcagcaaagtaatctccatttcaataccaggactgagaagcaattatctctctctgccactgccctttcttctgcgtaatgaaaatcttcgcaatccggattcaaaggcctttagcattgggagtggatgcggatattggaactatgaaacctggtcaactgagggagtaagcactgaaagcagttcggacctcttgaaggatgccatcatcgagtgccacactaaccacctcacacagtttgcattcctggtgggtggaagctatcgagccaacgaccttggcgaggagattctaattactccgattaatgagaaagtgctggacattatctcgatagtgggctgcagtctttcccttttgggtatactgggaatattcctcactgccgcactcttcaaaagctggcgcagtcaggcctccacgaaggtcttactgcacctttgcctggctatgtgtctccagatgatgctcttcgtgtttctcaatacagatgatgtatccgaagcgcttgttgtgaatggaaacacagttcgctgtgtggctctgggcgctgccatgcagtactccattctggttctcttcagttggatgctaatcatcgccttcctgcagttccagcgttacgtcacagttatcggaatcgagagaccacctcgctatatcctgaaggccgccattgtggcctggctactgcccttggtccccaccctgctggtggcccttatagatcccgattcgtacgtcccctcggctgcccaactttccacggacactggcatctgctatccatcgggctatggtctcatttttggggtggtgctccctgtgaccttgattactgtgtgcaacttggtgatattcgtgtatgttttctacagcatctcgcactctttgagccagagcatccataaaaacgaaaagaaaatggtggttaagcagatccgactctccataatgctcttctttttgctgggtcttacctggatctttggaatattcgccttcatgcaggcaggtgtggctttttcatacctcttctgcatcacggccactatgcagggatttgtgatgttcatttactttgtcctcttggactccacgaaccgtcggctgtgggtgggtctgatttgccccaccaagatggagctggatgtccaaaagcgcaccactgagctccagtcgatgaccacctcatccaccaactacaacagcagatcacatcagtag

SEQ ID NO: 23712 - protein, 774 aa, DROSOPHILA
MCLRNGTFQYCDGEERNSSDELMQTHLVYCTSMFCEPEEFQHDYITRNHDQTPHQNKWKRARIGERATLHDVCLLRNGMPVTRECRVKDNRANWESTEHWDPVVCLRRFREHTISGDLNSLHDDVLEGRRRTNDTQGRREMTGIMRNMFRQRGGNLLPADVHMTGQMFGALMQQDKDATVSVDLVSVCKEIMSCDSKVLRLSAQLNATNSLLSQFESYMDALPEQLVPKDRCGKVVAKPTSDEAETATTGVETYNFSDIGVQALITGNISVFFANPECDRITGLAIFSAPGDQRKTSASGFWYRFIRFSEDLAKVKEESNLETAAFLPENLWRQVKSRGATYLIFKVYAHDALFVETSLQRTRKPRSKVISISIPGLRSNYLSLPLPFLLRNENLRNPDSKAFSIGSGCGYWNYETWSTEGVSTESSSDLLKDAIIECHTNHLTQFAFLVGGSYRANDLGEEILITPINEKVLDIISIVGCSLSLLGILGIFLTAALFKSWRSQASTKVLLHLCLAMCLQMMLFVFLNTDDVSEALVVNGNTVRCVALGAAMQYSILVLFSWMLIIAFLQFQRYVTVIGIERPPRYILKAAIVAWLLPLVPTLLVALIDPDSYVPSAAQLSTDTGICYPSGYGLIFGVVLPVTLITVCNLVIFVYVFYSISHSLSQSIHKNEKKMVVKQIRLSIMLFFLLGLTWIFGIFAFMQAGVAFSYLFCITATMQGFVMFIYFVLLDSTNRRLWVGLICPTKMELDVQKRTTELQSMTTSSTNYNSRSHQ

SEQ ID NO: 23713 - DNA, 8920 bp, DROSOPHILA
tgcgtgtgtgtgagagtgtgtgtatctagcctgcgtaaaaggaaaacacatcgagcaacaacaagtcccacacacaaacatacgccaaaggatacaaatgttggacagccaaaacaatttgttcgaatcaaacgagggatcaacgaaaattcggggcaaacgcaaaaagtattcaaggcgaaactttcggaataataatggaaaaaagcttcaaaaaaaaaaacagaaatgtgatggaactcatagggaaaactagcatcaaacaagggaaacaaataatccaaagaacgtagcagccaaaaactaaagcaaacacaaactaaaccaaaagaaaaaccacaatatttcgccaagatccaaggcccagaaaaagggcaacaaaccaacagcaaacacatacgattatgactgggacttaggcccaaaataaagttcggctggtaaaccatattaagcccaaagtgtaacaagtgtaatgcagactcaacgcgttcaatattaaattaagaagcaaccgaaccggaaaagtttctgggaagataaaggaaaaggaaaacaccattgcttatgcgggatgccaaagagactgtgtggcttatgctcgaaatcaaaacacatttaaaaactatatggcttaataattataaaaaaaattagatttgatttgttcacatattattttctggcgaaaaaatacactgtctttcacaataaaatgatatagaaagaggataataggcttatgcatattcaaacatcaaacatcaatatctatcttaactttaaacgatatgaaagcatgtaaatattttggtccgcattaagagttggcgattagacagcgaataattgatataaaattggaaaatcctgcaactaatgacaacatcgacaatgagaacgacacttaacaacttgacaacgatgaggaaccaataaaataaatctgacaaccgcgactgtacctagtatctgaaggatgtgggatatggaatcaaacttagcgaccataaaaactatgaaagtccagaaaatccatggaatctgtttgattttgttgttgctgatcgatctacaccagggacgatgggcattaaaaaccaataatttaacaaaacggaaatgacagtgggtgtggttttattttggcggtgatttggtgggtttgtttttaatttggagagcaggagaaatagagagagttatatatataatatatatttgtggtaggagagtggaatatattacaaagtaagatttggggtgtgcacacttaacttaccagtttcttgaaacaatcctcaaagaaggcggtcatcgagcggtacaagtgccgcttaacccccgaaaggctgtgcccctcatccggatatatctgctgcttatagagcactcccttgctggtcagagaacgggccaggaccatagattgctgcacatggacattatcgtcggcggttccgtggaccagcaggaactggcgatcccgcaggttgtccacgtacttggacaggtcactctcctcgtagcccttgtagttgtccgtcacgttggggaaactcagatagcgttccgcatacgtggaatcttaaatgaaagaaataaaggagattcattgatttttatggcactctctaaaaccttcaaagataagtgaaactcaccatataacttccaattggtaaccggtgacacactgatgccgcactggaaaatggactgctgtccggcgagggccaatgcggctgtgtatcctccgtaactccagccccagacgcccattctgcgtgagtcgatgaagtgcaggttatccctgaggtactcgctcacctccagttgatcggagacctccacgctgcccagacgcttgtagacctcgtggagcagctggtagccctgtccagcagatccccgtccgtcgatctcaacgacaatgtaatccttgctgccggacaaataggtgttccaatcgacgtgccagtgatcggtgaccagctgactgccgggtccggagtaaacatgcagaatggtgggataccgtgttatctcgtcctcgcgcagcacaggcggcagatatagtcgaacctgggcatgataaccgccggagatcatcacggggaaggtcttgatttgcggcatagccgtcttggccatcttctccttcaagcgcgtgttattctgcacgatgaccaggagttccaggaactgagacttcggctcctcccctggtttctcatcaccaccctccgtgggtggttcttcctgctgggtgctgtgtcgtttcgtcttggcactgtccgcagcggcggatttcaagccgtatagtatggaggtgggtaccactggtcccaggcaatcgattagtacgtacttcgcctgccgcgaaattggaaacttcgcctcgtggtacaggcaatcactgggaggcggtggcagtggagcactttgaccccgccccggaggctgttgctccaccggcagagctggctgcggcggttgagcctccgcttcctcggaatcctcccagtcatcgtcccaggcggtcaccagcttgggcggcgacttggtgtgaccttcgtcgtagccctcggaccactgcgacactgccggacaagtcagacagtcgggtgagcgaagcgcctgaccttggcgggccggcagggcggatacgcgatacagatgctgctgcgaaggaagacgctccggagttcccagaaagtaactaaatggagggttacaaaattatgataaattaaacatttattgtaagttattcaaccaaatacgtattatatttatatatatttattcattatagaagcaatttgccaccaaacgaacggaaatacgcccggttcggtgtgtgcgcaattacttacatccaattatccagctgatcccagtgcagcaatcgattcacttcgtacggcccatgggtgaggggcagcacgcggttcttgtcgatgtccacgtgcacaatgtgccggaaatagcctgtgattaagaggtattgatttcaagcgcgagaggaaaagcgaaaggaggcgagcagcaagccagccttgtcactcggggggggggacacaaaggccaatttgacaactccctgacttaccaaacagtccatctcgtagcggggatatggccacgtagatgctggcattggcggcaaacagcggcactgcgacagtgtccacccaaccacgtccatctccgctcacccggtgggtctgcaatggcgaacggcggaaggggttcattagaagattgctagccagctggccggacctgccaccaacaaactcacctcgatgcactggaacaatggagccttacacacactgaccaccgagatgttttgcggacgatttagccacaccaccgcgatcttcgagtgactcacccaactggcactgctgaagtagtgatctctgtgggttagaatgattcggaataaggtaatattatgcatgttattataccgaaactaatatatacacaaagagaaaacgaacttactcattggctataatctgaggaggatgcaggtcggtgatgtgaactttcagcggatcctttaggtcagccactcgtagggttaccgtgggattctgagtgcccggcttggggtagctatcacaatgaggaaaacatgagaacaatatgaatggtgagttaaagctttaatctcatttgttatttctagaagacgacccaaaccctcaaatgagacaacactgacatctcgcattaacctttccagatccgttctagcaatttatcaaacccaattgacaggggatcacagcttgtttagacaccccaaaaattgttttgtcttacgcatagcaaccgattctaacgcccccaactatgagcacaaccgaatccggagttggcaagggtatggcgacccgaaaaaggatgaagccagtgcccaaatccacctgtgaaaacgtttcgccactgtcacttcatgaattttaagcatggcactaggagcccattagatgttacgagggaacgagcggctcgacgacgatgaggcatcattaacacataatcgaaaagcgatttagccagagctttggacctaatggggtcacgacttaccgtaaggacctgatttccggatacaggctggcatgcggattactgccgccagctcctgggctcccagttccggctcctccagcgccgactgccgctgcagctgctgctccaccggcggacggacccgtcgtgccgtaccaggcgaagtgctgctcctggacgtgcgtgtcgttgaaggtggcatacagcatcagttggccattgtcggacatccaaattgcattatttgcatgaaggatctcctctgcgaagtgccaaagagaacggaaaatagaaataagtgccggttgacaagtaatgcagtttgcaactcgaggaatatcttcatttcacataagacttatgctaagaacatatatattataaaacttaaattatatgctaccaatatcagcagctttagaagattaaacaacagataagatttgctttgagcacgcattcaggtgattcttctttgattcttcctgattatctctacaaataaatcctcatccacacatgcgatattttcttgcaaatgccactaaccttcgtacagccaatcgggaatgccgttgtacaccactccgggcaccgcatcgtgggtaatccgatgcacggacgcactgcggacctcctctcggtaatagatatcgtagctctggacccagaccagtgcgtttccagctggcgtaaatcgtgcgtagtgcaggtatggccattcatcctggtgcggactgtggcgcagcttgatgctctcgctgtcggggattagggtcgcaatgctaaagtgtggacggctgcggaatgatgccagaactcacctggtctgaatgtcgtagagcgtgtactgggccaagtacgagtgccggaatagtttcacaacattctgggccagaagcagatagcgcttgtccgccgatatggtgaaggtgaagggtgacagggttttctgtgtggggcaagtggagccattgagtggtattaaatgctggttgcaaattatgcgcaatactgttgagcggctgtaacagtgcgagcacactgcgtatacgcaattttaattaaaattttaatggtcttttctgattcgcacacaaaatggcggaagtttgccaccagtttggtggtgactggttggaaatttttgaaatttgcggcattgtttacggctctggatgtcgaaaattgtttgccaacgagttgccgccttaatttgcctgggaaaacaatctgaaaattattctcggcagaccaatgtaaccgagagccaagttgatgtctagtattttgctattcattgctcatttcgtgtttgagtttgacggcgaagtaactttaaagccagatccttagccaactatgaatatgtattgccattatgccgttgcgactgtacgctcgagtttctttggattcggctgcacattaattatttcccactcaactgtttcaactggcaactgttgacttgcagtggctgcacttgttgcactccctgtctgtatttttgggccctcgaggcactcggaatgttcgtttgccaagttggcaaggaaaagcttctggttaccgccctttgaccccctccccctcccctctccattcatttccattcattttcctccctttcagttttgtcttatttgtttgtttttcaattccattcgcgcattattcattagaaagcgttatatgtcccgcgatttccccgcacgttttccacatgtgtatgtttacccagtcattgacataaaaatctttttgccttttatcgctatcgctgtattggggcgagagtcgccgcactccgttaacgataacttggcccatttgtttcgcccacatttgtgcgcgccataatatcagttaacattgccaagtcgagtgtgtacacttgagatatctgccttgggtccgccccttgccaactaactacactttctaggactgcggactaggacttcgctagtcgtaaataagatggggcaaatatttattcagctcagaaagataagcaataagcaaacaaacagtccggcaagggggcaaggggattcaacgaaatgtacttacaaatgtcacattggacatgaggacacgttccgagcgattggctgcattcagcagacagatgcgacccaaatggtcctggtacaggaactcctcgcctgcaaaaaaaaaatgaaatgaaagcggaaattaaaagcgatttgccacatagaactgccactaaggggcactcatggcatacacgcaaaaaaaaacaaaaaggtttgtaataatctgatagagaaaacgaaagacatatatgaattcgatactaaaaccacttgtgcccaaaagaatgctatgaaatggtaacgttcttttacagcttgctgttgcatacttttaagcacctttgctgtggattttcaccaaagtgtagcactcaccatcgatccagctgccgttggagtgctgcggcacgaagaggccatcgacgatgtcctgcagcttgatgcgctgccctttgacccgcggtccctcatcggggggcgtgagcagcaccttttttgataaatgtagaaattttatatgttgtcttctgcacacacacacagacagccagccagccaaccagacaaacagacagacacacacacacacaacatcaacagcaacaacgaatgtagggaaaaatgttcggtttgatggtgtgggggggttaaatttatcaggcagccacaaaattgcaaaaaagtaaacaaacagacaaaagacaaaaatgagcgtaacgtatttacacaaaaatttatcacagttttttcatatatacatatataaatatacacataaatattaaaggtcgctttagttttctttttttcctttggagcattgttgtaatatttacgttgcagcccaaaagcaggccacaaaaaaatgtcattggtgaacgacacagttttaccaattaaaagagaaaactttcgacattcaatagcgcataaggatttgtatttcgtgtggaggttttaaattgtgcagagtaaaaactgtttagggccaaaatgaaattggcattgtggtgtttagttttagcgaggcttgcatttattcattagcgatatgtcaatttgaatactctagctaaacgacacgtatattggggattcatggtattcagaggtatctctgttcctattccaaaattaaactgcttttagcagaatattcaacaatggtctgttagagagtgaatttaatttcggtgttttcgtgtgtgtgaagtagatgtactcttgttttgacagtattttggttattgctttggacatattttcgaaaacaaacgcaattgcatagtccgtttgttgaaacaatttcgggatttcaggttggccaatcattgacgattgtccatgttagcacaaagccacgccaaatagaaattcatttaattgctcataaatataacaccgatttcgataattaaaccacccagttggtgcctaattataccgcaagggacaataaccaaacatcatgctgtactagttgtggtcggccttctggccaaaagtgttcgactcagacttaccaccgatgtaacaatcagggccagcacaatgatgatgaccagcagcgcgatgagaattccgcgccagttccgttggttgggattgctggagaccaactgtggaaaatcaaaagaaaacagtcagagagtgctgcgaaacattatggaaattaattggtaaacgccggaatgcaaatgctgcacataaagagcacgtgcggctcattacaccgaaagttatgaaggcctagcatggccataatcaaccggtcagaaccgcaaataattggtcggccaagatgcaattagtaaactgatgattcagttttcccctactgcgatgcctcataaacgattttccttccaatttatgtctgctcttaagcaaacacaatccccatattgcgagcatgtcgagcacaaagacccggccaaaaccccttggaaatcaaggcttaatgcatatttaatgttgtcaagcaacaaaggaaaacagaaacccaaattaaatacgacaaaaacttaactcacgcagcccgcacaagttgataccgatttttacgagcagttggggttttagttttttggatggaactctgcctgatttccaaccattcagtccatcatgtcgcacatataactacattcccgcttagccgaataattaattaagggctcataaaactacgctcctcgcaacgtaataaaaaaatgacaatgtattaatcaggagttgcgtgcccgaaagcttatccaactaattggacagaaatataagttggattttattatttaagcagagtttttaagattccctagttaaacaatggaatactctacagagaggcacaatttagcttatgaaggttgcctgaaaagggagagttctcaattaaaatcgcataaatatgttccacctgcaaagcttcccttttggccattagtgcaggcgggtaaatcgcggttcttaattaataacacgtcgcacatacaaatggggaacaaattgcgggagggaacacgtgtaccaggtacaacacacgcatccttgccagcatgtttatttataaggcagccgatccccatgctgcccctatatgtatgtgttggcttcatttcggcaatcgcaaaccagtggtatttattacttagcccggagttgtgccgcaaataaggtgaacagaacgtaaaccaaactatcaaagaacaatagagagctcaagctttggcaactttcgttaaactttatatcaacgcttc

SEQ ID NO: 23714 - DNA, 2967 bp, DROSOPHILA
atggccatgctaggccttcataactttcggtgtaatgagccgcacttggtctccagcaatcccaaccaacggaactggcgcggaattctcatcgcgctgctggtcatcatcattgtgctggccctgattgttacatcggtggtgctgctcacgccccccgatgagggaccgcgggtcaaagggcagcgcatcaagctgcaggacatcgtcgatggcctcttcgtgccgcagcactccaacggcagctggatcgatggcgaggagttcctgtaccaggaccatttgggtcgcatctgtctgctgaatgcagccaatcgctcggaacgtgtcctcatgtccaatgtgacatttaaaaccctgtcacccttcaccttcaccatatcggcggacaagcgctatctgcttctggcccagaatgttgtgaaactattccggcactcgtacttggcccagtacacgctctacgacattcagaccagcgagagcatcaagctgcgccacagtccgcaccaggatgaatggccatacctgcactacgcacgatttacgccagctggaaacgcactggtctgggtccagagctacgatatctattaccgagaggaggtccgcagtgcgtccgtgcatcggattacccacgatgcggtgcccggagtggtgtacaacggcattcccgattggctgtacgaagaggagatccttcatgcaaataatgcaatttggatgtccgacaatggccaactgatgctgtatgccaccttcaacgacacgcacgtccaggagcagcacttcgcctggtacggcacgacgggtccgtccgccggtggagcagcagctgcagcggcagtcggcgctggaggagccggaactgggagcccaggagctggcggcagtaatccgcatgccagcctgtatccggaaatcaggtccttacgtgacagtggcgaaacgttttcacaggtggatttgggcactggcttcatcctttttcgggtcgccatacccttgccaactccggattcggttgtgctcatagttgggggcgttagaatcggttgctatgcctaccccaagccgggcactcagaatcccacggtaaccctacgagtggctgacctaaaggatccgctgaaagttcacatcaccgacctgcatcctcctcagattatagccaatgaagatcactacttcagcagtgccagttgggtgagtcactcgaagatcgcggtggtgtggctaaatcgtccgcaaaacatctcggtggtcagtgtgtgtaaggctccattgttccagtgcatcgagacccaccgggtgagcggagatggacgtggttgggtggacactgtcgcagtgccgctgtttgccgccaatgccagcatctacgtggccatatccccgctacgagatggactgtttggctatttccggcacattgtgcacgtggacatcgacaagaaccgcgtgctgcccctcacccatgggccgtacgaagtgaatcgattgctgcactgggatcagctggataattggatttactttctgggaactccggagcgtcttccttcgcagcagcatctgtatcgcgtatccgccctgccggcccgccaaggtcaggcgcttcgctcacccgactgtctgacttgtccggcagtgtcgcagtggtccgagggctacgacgaaggtcacaccaagtcgccgcccaagctggtgaccgcctgggacgatgactgggaggattccgaggaagcggaggctcaaccgccgcagccagctctgccggtggagcaacagcctccggggcggggtcaaagtgctccactgccaccgcctcccagtgattgcctgtaccacgaggcgaagtttccaatttcgcggcaggcgaagtacgtactaatcgattgcctgggaccagtggtacccacctccatactatacggcttgaaatccgccgctgcggacagtgccaagacgaaacgacacagcacccagcaggaagaaccacccacggagggtggtgatgagaaaccaggggaggagccgaagtctcagttcctggaactcctggtcatcgtgcagaataacacgcgcttgaaggagaagatggccaagacggctatgccgcaaatcaagaccttccccgtgatgatctccggcggttatcatgcccaggttcgactatatctgccgcctgtgctgcgcgaggacgagataacacggtatcccaccattctgcatgtttactccggacccggcagtcagctggtcaccgatcactggcacgtcgattggaacacctatttgtccggcagcaaggattacattgtcgttgagatcgacggacggggatctgctggacagggctaccagctgctccacgaggtctacaagcgtctgggcagcgtggaggtctccgatcaactggaggtgagcgagtacctcagggataacctgcacttcatcgactcacgcagaatgggcgtctggggctggagttacggaggatacacagccgcattggccctcgccggacagcagtccattttccagtgcggcatcagtgtgtcaccggttaccaattggaagttatatgattccacgtatgcggaacgctatctgagtttccccaacgtgacggacaactacaagggctacgaggagagtgacctgtccaagtacgtggacaacctgcgggatcgccagttcctgctggtccacggaaccgccgacgataatgtccatgtgcagcaatctatggtcctggcccgttctctgaccagcaagggagtgctctataagcagcagatatatccggatgaggggcacagcctttcgggggttaagcggcacttgtaccgctcgatgaccgccttctttgaggattgtttcaagaaactgatcgatcagcaacaacaaaatcaaacagattccatggattttctggactttcatagtttttatggtcgctaa

SEQ ID NO: 23715 - protein, 988 aa, DROSOPHILA
MAMLGLHNFRCNEPHLVSSNPNQRNWRGILIALLVIIIVLALIVTSVVLLTPPDEGPRVKGQRIKLQDIVDGLFVPQHSNGSWIDGEEFLYQDHLGRICLLNAANRSERVLMSNVTFKTLSPFTFTISADKRYLLLAQNVVKLFRHSYLAQYTLYDIQTSESIKLRHSPHQDEWPYLHYARFTPAGNALVWVQSYDIYYREEVRSASVHRITHDAVPGVVYNGIPDWLYEEEILHANNAIWMSDNGQLMLYATFNDTHVQEQHFAWYGTTGPSAGGAAAAAAVGAGGAGTGSPGAGGSNPHASLYPEIRSLRDSGETFSQVDLGTGFILFRVAIPLPTPDSVVLIVGGVRIGCYAYPKPGTQNPTVTLRVADLKDPLKVHITDLHPPQIIANEDHYFSSASWVSHSKIAVVWLNRPQNISVVSVCKAPLFQCIETHRVSGDGRGWVDTVAVPLFAANASIYVAISPLRDGLFGYFRHIVHVDIDKNRVLPLTHGPYEVNRLLHWDQLDNWIYFLGTPERLPSQQHLYRVSALPARQGQALRSPDCLTCPAVSQWSEGYDEGHTKSPPKLVTAWDDDWEDSEEAEAQPPQPALPVEQQPPGRGQSAPLPPPPSDCLYHEAKFPISRQAKYVLIDCLGPVVPTSILYGLKSAAADSAKTKRHSTQQEEPPTEGGDEKPGEEPKSQFLELLVIVQNNTRLKEKMAKTAMPQIKTFPVMISGGYHAQVRLYLPPVLREDEITRYPTILHVYSGPGSQLVTDHWHVDWNTYLSGSKDYIVVEIDGRGSAGQGYQLLHEVYKRLGSVEVSDQLEVSEYLRDNLHFIDSRRMGVWGWSYGGYTAALALAGQQSIFQCGISVSPVTNWKLYDSTYAERYLSFPNVTDNYKGYEESDLSKYVDNLRDRQFLLVHGTADDNVHVQQSMVLARSLTSKGVLYKQQIYPDEGHSLSGVKRHLYRSMTAFFEDCFKKLIDQQQQNQTDSMDFLDFHSFYGR

SEQ ID NO: 23716 - DNA, 3060 bp, DROSOPHILA
ggccaaggcaaagggcgccacaccaccgccggccatcgaggtgcctagcatggagagatcttcgaaacttgctaacgggcatgacggctcgagttgagcgttattctagaaacccgtcttaggctagcacatgaacacatgaacacatcctcacatacaaaccaacacgctcttaatttgtaagccaatccaactaacaaactgttaagcctacctcgacacgctcatagctagatctaattcttaactcactaatttattgcgaaagaaacggaacagatgcaaccgatgggaagtagctaaatattaatgtttaaatattaacacacctgttgaacacgtctccttagttcgatttcctctaagttaagcgtaaagttgcggatcgaattctatcgatatattcaattgatctgactaaggaatccaattgtaaataacttaaacgaattgtagactatttagaaaaaaattattgtaaatgttgtcctaaagcaattttattcagtcaaccgaacgtaaaaatcaaaacaaaagatcagaatcaaaatcaaattaattgatttttttttaatagtttgctcacacgtgcgttacttttacccttgaatcgaacaattgtcaccaaaattattattaatataacattgtgaattaggcaatataaagatgaagtcactcattagacgtggccaaaagacaaagcacacattgtttgattgctcacaaaagtgacactttattgacgaaacatagaaacattatccaaagcggttggaaactgcagctcttatcagacatatttgcgatgtattctgcaataagatttagctagttatctttatcgcgactctatttattgtagaacaaacaaaccttcgatgacaatgaactgactttcgcgggaggaagtttgatgcgagtgctgtccatgcttcttggccttatctggtggtcaacatttgttacatctaagggattaagtaaccgaaatataatctcacttacggtgcacggttataatccgatctgtctgacccatcgcattctttgccctgcatatgtactctccgaaatctcttttcgttattggacgcagggtgatccgcatcacgatccggaagacgtggtccactgagaccgactcgtaggaacctccttgcagcaattgcgaatccctcagccagaagttcaccgatgccggctgcgattctgtgatgcactccagcgtcagcttctggcccaggcccacgtagatggtatcgtagcgtgtccagatcgtgggcgcaactgaaagataactcagtattatatattgaatccaactctttgttcacacatacaattcaccaccagcatgacgcgtttgctcactgtgggtggcactccgttggaggcgatgcagagataggcgcccatgtgggagcgctgcacctgccacagggtgagattctgaccctccacgctgaacacttcccgatcgccgtcgtctgaaatcagtatcggagtcgcttcctcgcgacgccaggtgatggtgggcatgggcactcccgttgcactgcaagtgagtgttacgttctgtcccgtggaacgaaccacatcctgactggtttgatagtctacaatgtctggcggcaccaccacatccaggtagcccatttggctcttcatgggatccgtgttgatttggcacatgtacctacggtaaacgctagtagaagaatatggtccatctatctgatagatactttcactcaccatccgcgatccgattcctgaacatcgcgtatttttagctgccagatccgatgctccgtgtgggagatggagatgcgatggttcttggtgatgacgtggttctggatgctcagtatcgtctgcgtgtccactcgcagccaggccaccttgaagctaaccaggtcgtggacaacacacgtgagtagggcatcccgtcccacgggaactgttgagttgttgattggaccgctgaacttgggatccgctgcaaaggaagatggtggcaccaagcccaatggtttggcatttatggctttcatcattagggcgctaaatggggcgacgatatacaactgctgggtggcttttggggtggtttatggggcttgcaaatgtgaggcactggcatttgctgtattttaatggaactcagacgccaaacatttaattcaattaaaaaataacctttttttatgtgcagcttttctaatccacaattatcaggataattatttcatttcttatcctcgcacatttttgcgtgtctctgcagaatgtcaacgcagactaggccaagtttgttgccagatggcccgccgaaatggtcaacgatatttaaaattgtttaacggccataaatttcttgaggttaacattaggccgagacagcggcagataatccaataattagataaattatagatgtcagctacattctggcaaaatagagtagcttcaacactaacaaattgtaaaactagcaaaacgaagctatttttgaatcagtaaaatatgttgattatattatatatatatagaaacaatagttttgaacatcatcttaaacctatgatttggttatggattcttttctgagcacttttactcaaaaatagtacctcatgtattgtacatacataatattgaacagcgggatagttatgttttgattttatcgtaaataatagcataaacacgttgggttcacacactatgaactcaaactactgctttccggcgtgttgttgcttcggccaactcgagtcccatcgcaataattttgagtcaaggtgcccgaccgcaggacttcgacagttgccgtcagccaatctaaccaccagagttccaaccgcaaaccgaacccacccacaccatcgcaaacacaacaatgggctggaggcaggagtaatggaagaaatcacatcacatgcctaacaagtagcacgactctgtggccaggagacgaggaatccagttccagctactgttcctgttccagcaaacgcctaaattacaattatgaccaaataataacccgaaaaa

SEQ ID NO: 23717 - DNA, 948 bp, DROSOPHILA
atgatgaaagccataaatgccaaaccattgggcttggtgccaccatcttcctttgcagcggatcccaagttcagcggtccaatcaacaactcaacagttcccgtgggacgggatgccctactcacgtgtgttgtccacgacctggttagcttcaaggtggcctggctgcgagtggacacgcagacgatactgagcatccagaaccacgtcatcaccaagaaccatcgcatctccatctcccacacggagcatcggatctggcagctaaaaatacgcgatgttcaggaatcggatcgcggatggtacatgtgccaaatcaacacggatcccatgaagagccaaatgggctacctggatgtggtggtgccgccagacattgtagactatcaaaccagtcaggatgtggttcgttccacgggacagaacgtaacactcacttgcagtgcaacgggagtgcccatgcccaccatcacctggcgtcgcgaggaagcgactccgatactgatttcagacgacggcgatcgggaagtgttcagcgtggagggtcagaatctcaccctgtggcaggtgcagcgctcccacatgggcgcctatctctgcatcgcctccaacggagtgccacccacagtgagcaaacgcgtcatgctggtggtgaattttgcgcccacgatctggacacgctacgataccatctacgtgggcctgggccagaagctgacgctggagtgcatcacagaatcgcagccggcatcggtgaacttctggctgagggattcgcaattgctgcaaggaggttcctacgagtcggtctcagtggaccacgtcttccggatcgtgatgcggatcaccctgcgtccaataacgaaaagagatttcggagagtacatatgcagggcaaagaatgcgatgggtcagacagatcggattataaccgtgcaccgtaagtga

SEQ ID NO: 23718 - protein, 315 aa, DROSOPHILA
MMKAINAKPLGLVPPSSFAADPKFSGPINNSTVPVGRDALLTCVVHDLVSFKVAWLRVDTQTILSIQNHVITKNHRISISHTEHRIWQLKIRDVQESDRGWYMCQINTDPMKSQMGYLDVVVPPDIVDYQTSQDVVRSTGQNVTLTCSATGVPMPTITWRREEATPILISDDGDREVFSVEGQNLTLWQVQRSHMGAYLCIASNGVPPTVSKRVMLVVNFAPTIWTRYDTIYVGLGQKLTLECITESQPASVNFWLRDSQLLQGGSYESVSVDHVFRIVMRITLRPITKRDFGEYICRAKNAMGQTDRIITVHRK

SEQ ID NO: 23719 - DNA, 12118 bp, DROSOPHILA
tcatatcatcgaagaaatcggagaggtatccttgatgaatttctggtgcagctcccaaagtcggaggtgtttggagcacggattacttgaaattagtttgattgcctggactgatggctaagtcataggctacctgtgcgcctttggtctgcagtccttggttgggttgaccacgctgtcgtccggatttgtatttgattgtgcggacatctcaaatgcgaaatcgattcgaaagtcctggaaccgcccacagcaaacaacactttccaaactaaccatctgcacattgttaggcacaggctgaaaagcttaaaataaattctagaaacgattggattggattttcacatatgccgccgtttattggatgcactctattacacgtgcggatattcggtctgttgttttccatctcttagtaactaaacaaaatgggaaaggtttctggatggataaacgatgagtgggtgggtgtacaatgaaggtgtatacatgccatgtctaatgtctaacgaactgtctagcactgaagtttgattcgtgagtgtgggtggggtggtgggtgtataaaaatgtctataaaagtgccgccataaatcaaagatattggtgaagaattgcaatagtcgtctgcttccaaaacatcacttgttcagattctgctcatgccgatttcagtggtatatgctttttgattacctaaaagtaagatcgagattgagagattggaacatttataaacattatcgattcgaccgcccaaactgtttacaattaaataataataaaacgaatatcaattaagaagcgtgtgaaatacgtcagacggcatgcaaatttagttagcggctgaacgattttgttttcattttatttggatttttcggtatcgatccatcgccaggagcggccgctgaatcattcggcaaaaacaaatcgcccccggaacgcatggaactcgatttccgcgattaaggccaatgaaataaaaggaaatcaattaagccatcaactgatgatagccaacacctacctcggagcacatgttcttgtagatctcatcggtgtcccagggtcctctctccggcagagcgatgcctcgccttcgcagctcctggacgcagtccgtcagatcaaagatgggcagtggatcgatgccagccttggcaaccttgccagccaaatactctacgtagtgggtgcttaaatgatatagaagtatattggttgaaaaatatgatttttcggggatttcccgatattaaacttaccgacacatgccagcgtgcttgtcaggaacttccgtgttgcacactgtgtcgactagtccttgcggcgtctccttttgcagcgggatcgggcagcgggcctgggcacgagccttggacgaactgctggactcgtccttgatctgcatgggttccgtgtcgaatttgacgttttgctccttgagcaggaactgcaactgaagggggattttatccctcaggtagaacaggcagttgcgcggatgatgggcatggagaccgagcttggcacagtatgtggacacagtgcacttggcacccatcatgaagggtcgggcacatccgtagcagaactcgaatttgcactgagtacaggtaaaatgcatgcatccgcctctgtataggttgaacattgaacttgtaaaagatacaacatactgatatttctgtatctgaacatacctggccagcgagtatcggaacttgcacttgggacagtcgatgccgttttgggccaaatgctcctggacaccctgggcctgcagctcgggatcgttttcgcgcttccattccagataagcttcgcagctactgccctcgtgctggcgctcccagggctttcggcactgggcacaggtaacggatccacagtccggacaaatcaatcgcttctgcttgggccgagcgaagaatccggacgagcactggatgcaccacttgaagttgggatcctgcagcagcgagcgatcgcgcaacttgcgctggaacagttcgtgcacatcgttgtccaggatgctcttcaggaagatgtccaggttggagaagtactcgaggtgctcatcctcatgctgagcctcgttgctcaactcgggcagcttgcaaaacgggcaactgcaatcgtttatactgcgatcggttatctgcgaaaggaagtttaagtgatggagcaattgtcagacttttcattatcctttatgaccacttaagccactcacctgtactgtaaagtagctcttggcacactgcttgcagcacttgtgcagacactttagcatggacaccatctgattcatgggatagctgttcatgcagagctcgcactcctgctggagcatggcaatggcctggtccagatcggagcactccctggccgcccacagagccacgtcttccgagaacttcatgctcaccaaggtggcggctatctgggcctctgcgatattggtcaccagctcctgatcgacgtacttgcgggcaaggatctaaaatgagaaagcaaacgttccaagatgattatagtacttgcttagctaaaaacttggcttgtacacaccgctggatcctcgattaccggctcttgaacactaggatatgcccgaaaaacgggcatactcatcttacgcttcagctgttctgctttttggggctcggccaagttgggttcctcctgctcctcctccgtggccgaggtctcgtagtcatcgtcagagaagcaggtctcgtggtatttcttctttgggattcggggttgggatcgaggtttcaacaatgccgctgctgccgcagccgctgctccactggtgctgggtccatcggcctgattggagttaaacctgctgatggcatcgttgattgacttcttggtgacgggactgctcttgagcggcactcggctggttgcaatcgatgaactctgcttctggaggtagacctcctggattcgcttcacggatgaaatgcccataggggccgagaaggacttggagcgcagcggaaccttcttgttcaagggggtgctattcgatttgttagtgggttcattggtgggcttgggaatcttactaactgtggacttgtttgttttagtcgaacttgatgtggaaggacctttggaggcagttccactgtttgcagtcttgcctttcatgctcggggttacctttttaggttcttccagtactgtttcaacaggcggctccacgggtcgcgattcggaatcaacaattggtggtgcaggtgttatgggcagggcagtgggctcttcaacgggagtaggctcaacttctgaagggatttctagcacaagctcaactggttgctctgcaggtcgagtttccgagtcagctatggggggagcggactgaataggaatcgcttccaccttgatgtcctcctgaacactttgagaaggcaagatggattccattgcagggttcggcaactctgtttccagcctcgttcctgtggaggaaacaacctcagtgtgtgcgatcgtatcagtttcttggttggtgggcgtgactgatagagcaggcgatatgactggttcaatgtctagtggaatttgtgattgcagtggctcgtcgtcatcagccagatcctcatcctcctccattatgtcctctatttcggtgccttcgtcaccagtggaggcctcctcgatgtaggatgcgtgctcgttataggtattaccctcctccccatcgaagtctccctcctcttcaccctcgctgtcgtaccactcctcctcctccccttcgtcatactcatccgagtattcatcggagtattcatcctcatcggtagactcgaactcatccatgctgatctcatcgcgcatctgcttgatcaaacgttgagtgtcctcaaccagttcgcttaggttctgtttggccggatctccagagggtacaaactccttgagaacaactttggacgtctcggattcacttgagtgggaatcaagacttgcgttgctttcggactgggctatcgaagattccatctgggattcctcatccagcaagattacgacttcatcctctggggacttggtttcagcccgctgcccatcgctatcaaggctataaagctctgcatcggaagcggtttcatcatggggtcttgttccatcgctaccgctgaactcaggagcatcttcgaatacttcgtccgagtcggtgggactgaccgctacagcagttgcattcggactatgttcttccagctctaagcctaaaggctgggtggcaggttcttcgacaatatttgtatcctttttggactgtgtttcttggctcacaagattaacctcctggttgtcggacaactgttcggattttggagaactgactgtttcccctatgggtacaccttgtgacgtggtctcttccctttcgatctcatcattggccgttggagtccgattgctcgaccgactctcactgcgaagactgctgctgctcagggttcttacgggaatctttgaaagacgcttcggactttgcttttgttctttggatattgatgaggtactaggcgctatattaatgatttctggagtgggtgtaacatcagtaattggtaaagatatgatgtgtgatgtgtcttgtatattaacttcctgtgatgttggagatttggtttgttcttcgtttggagggctgacaatttcaatgcttgcttcttctcgagggacttgaagtgcttctgtcgtttcagatacttcgataggtatttctggttcttgaggcccttcagattgttctgaaatagtcgtactattttgtatggatgtaatttcttcgattgggttcgcagttggttcagatatgtccttcgtttttcccaaatcctgaatcgctggaacttcttcggatcgatttgagatgacctctatagtaacattatcgtttatatctgtggatgttacgttttccatagtttccaaagtgttgctatttgttccttcagatagtattttaaggggtgtgctagttttaggatcagatgcagtaacatctgactgaatattacttgcagcagcactcagatctttatctttgactgcttctgtttccttagctgctgtttttgactcatttactttctgatcgatattgtttggtagctttgtacgattggttggtttttggctttgctcgcgggatctaccctttctcgattgctgggatctcttagctcttcggttggcatctctactcgtgcttggctggtcatccgactgaacttgtacttctgccacattctgcttaatttgcaaattattttcaattgatttttgtttatcactttcattggctgtctgcgaaactgtttcactaattgtctcacttgtaataactaatggtgtttctagtttttcctgctggcgaagttcctcattaacggtctctggttgtgtaacttctgtattttcaatcttttgagcttcaatgggtacttctggagcagattcttcttgtgcttttgctgttggaagcgaattgactgaactttcaaccgctacatctacaacatcctccttgggttgctcattaggagccatataacatttgtatactatgcgttctgcatccgtaagatcgctgctttcccattccgcctcgtgccatcgttcagtgccacgatcaaattccaacttgaagttggctatttcagtggcatagataaaactgggttgaacttcctcacgaatgctggcttcccttaaattgggcttgatgacttcctccatgatgtagacagcaggatcgacacttggtgtgggctcaggctgaggttcgagtagaggttcaggctcctttggctgttctgcctcaattttagctacctcttccggtttctccatgagctcctgttcaacctgttgcaccaggttgggcacaatttcctgaatgtgttgccatacaaagttctttacatcatcggttgacttatcctctgccggtccagatggtttcattgtgctaatggggctctttgttaggatacgcattatctccggatccgtttcgtactccagttccggctttcccttgaatgtgtccagcatggtctcgatggaacgtagaacctcctggttctgcttggcctggttctgttccatgttgccaatgagtatctccaggttcttcagggtgctgtcctccatctgatagggactgggtgtggcataggtggatttgacggggctctcgtcggtgcggggttggtcgaaaggattggcttgggcggggctgggactttgcccagccaacggaggctgcaggcagtccaaggcgtgtgtgttcaagaagtcatggatatctgtattggcaaatgaatgcgcggggggagagataaaaatgggacattatggcactgcgattgactgatgcacgatctacaaactaacccgacttggtgtctatggccacgccactctcattctcaacgccattcggcgagccccagatgcgcattagaaatggcttgagttgcgtgcgattcagctccaccagcgcctgctccacattaccttggtgcgcagtcagcgcgttgacaatgtcatcgcgcaggaagtttcccttggccgccagtttcctgtacttctgctgcctctgttggatgcagtcagccaccgcctgccacacatttccccccgagttgcgcaatgcctcgcgtgcttcgttttgggacacagttccgatcgtgttttcacccctctcctgtccgtacttggttgacaaactctgcaccgtctgcaccagcttgtgccagttctcgcgcagccactgaatcggatgagtctccggggagcagtacttaagggcagcttccagttcctcaaccgtaaacttgtacagctccagttctttcagtatgatgtgcatttccgtttccggatctctggccggctcatgcttgactccgaatgtctcatgcggcatatcgaaaggtgaagatacttgctgtaacacatggatccgttggattatgtcaactatcaagtattgccatagatacttacaagctgcagcatgcgtagctcgtttatgaaattgggtcttttggtgaccagaccggcactatatggatccaatccaaagccgtcgtgatacctcaggtcattggcactccgataacgttcactctcctgttgcagctgggaattgctgcgatagtgcggacgtcgctccatcttgtttggttctggagtcgtgaagcggtcaggaacaacggggatgatctcttcttgctttgtattgaagggcagagcgtcgtaggtctgtgtggaaatgctttgtggaggcggggaggttcccatctccacagctgctatttcccggggaggagtcccaccacaggccgtggagaccttctgagccttcttgagtacctgctccgcctgcgcctgtatgctctcatccagagtattccaaatgttttcaacggactctggaacgatacggatgagagcattagcttttgggggaacgggatcggggtcaccaacggattgaaatcaaacaaacggaatgcggcttgggttatggttctcttttgtatttcgtttccataaatgcgttaattgtaggcttacagttgatggctctattagtgtactaactaggtatagtctttggtggttgggcttaggtctttgtgccttcgaaaaatgagattctcttttgtatcctacctttgtgcagaagactcttggccagcgagttatcggattcattttccgacgaagttttcagtgtggatttcgatggtgtcttgataggaatactggaggtggtcttggagtttacagctggcgacgcttttgagctagacgtggagttggtgtgagtagtcttcgaaagagcagcaacggatttctgactgggttgttggctctttgtagtaggcttttgcactggcttagtttccgtcttggaagacgccttgatattgttagacttttcagctggaggctgtggtttttcctctacctttttggccttgttgggctgcactggaggtttgctgggcgtcttgcagcatatggagcagatcttgatgttgggctcgttcacaaacgtgcagaactcgcattcccattcgtggtctggggtagaaggtggtgggccgagatcatcagccccaatctcgtcaggaacttcctggggatcgggtgctgtttgagcctcagcctcactctctgaggcggttacctcttcgaccacttcctcgtattccgaggcactctcttcatgggctggtggcaccaccaccttttgcaccaccgctgccgcctgtgtattctcgtccttcatctccggcttgcgttttggctcagccttcttcgaggatttgtgctgatcggcttcttggagcttctgctgaattttagcttgaaccaaggcccgagcacccgatccctcagactccagatcggagtaaatgcgactggttctggccgagtccgttgctgttttgtttctggtaagggttccctcattttcccgtcgctccggtagccactcactctgcacggacttggcaatggatccccgacgattccgcatcttgtgatgcacctgatcgccgtccaattcatcgctggctatgagttgggaggcactggacaggcgcctttggcggggctggatatggttttggtgatgctgggagcgcgaggcactagtcatgcccgagcgattggacaccaaagatctgcggtcatcctggtcggagtcctcgtcatccgtaagttcgtcatccacgtagctattgcgcttgcgacgcaaggacatcgatttgcggctgggtgttggtgatgcagcgtaccgggaacgggatgcagctctggaggcagctgaaggtggcattcccatgacacctgcgcatttaaagtgcaatatgtaaattaaaatataactaatagtgcctcattttacctggatgcatcatgggatagcctggtgctcctggatacacattgggcatcataccacgctgggtcataaacactggtggcggatagtgtggatgatgttgctgcgacatgtaacccggtccaacgttcagggacagattggagttgttgaattgctgttgggagccgaactgtgaccactgatcgggatgctggtgctgaggaagtgcttggtgcggatgctgtgcccagccaggatgctgctgactctgttgacatccagcgcagtttagctgcgccagggattgggcctgcaagcgggatggtatcttagtttctaagggagcatgaaactctaactcacctgctggatgcgctgattggcgagccaggcacctccgttttgggcctcggacagtggtcgacgtggattcgagttgagattgaacaccgatgtgctcatctgtcgccgctgggcgccggccgcctgtcgttgttggagcagcaaggaattgtgaaattgtgagtcatccgagagatcgaaatgggatgagttcaggccggatgacatgctgccggaacgaaaatgcgagggcgatggtgaaatgtttgaccagtgctcgaagccggcttcattcgacaaatgctgcgcttgggaaatgaccaacgagaaacggaaaaagaaagagagagagagagaggaaagggagaaacgacacatgacgaaacgagacgagacgatacgatacgaagtgcaaggatcaaatactatcaaggatcaatgattaataaattaacatttcatttacaattataactgatccttgacacaattttcgccgagcaaagacaatacgatacactcagtgatgaggggactcgtacgattgtgattcggggtcaacgggtcactcacctgttcgctgttggcgctcagatcctggcgagccttctgttggcggtaccgctgctgcagaatggccatgcggtccagcgtggcgctggccttgctcttgatcttctccagctgcaccgacggcggtcgctggatggtgtcgaacacggacttgggggtgcccgatctggaagatcccccgccctcgctgcgcggtggatcgggcagtggtcggttgttcatctggttggcagagctggtggcaattggtggcactgggggcgtggccccgccaccgagcgatccccgccagccgcccagcgacttgtgcgagggcgtgggcgagggcggcggcagcatctggaaaagagtcgggttgggtgccatttcgtatgggtattcgggtaacaattgaaaaagtatgtctggatcgctgtttctacaattttggtcgggcgttctggttgtaaggactcttttattgaagcattcaaattgaagtttacaaacttggtactacgtgtagcccatgaaggagcctttcttacgggtctaggagatcgtgcagtggcgtacctgatccttgcggcccagaaacggtgtcaaaaggcctcgtttgctgcgtcgtggaggtgccactggtggtggtgccccaccaccggcctgtgcctttggcggaatcggcggtgtgccctgctccacagcctgcaaaacgaagttcttaagttcaaattcataatggatcgggagaacttacctttctcatgtgctgcttacgtttgggatgcttgtggaacatgtcgtcgcaggaggcgcaaaagatttggccggcgcactcggcacaggttacccagggattctgggaaccgcacaaggtgcactttagtttgttatctgcaagtgataattatctctggtagtattttaaataagtggaatatataaaaaggttgcccacctggtgtcttggttctgatcactgtggtcttcatcggttcgttggagtactgctggctggagaattcgatgatctcgtagtccggctcgggagtgctcttcgccttgggcggcagagcaggcgccttgggaagaccaccagccacaccgtttggtggcgtgggtggcggtttgggcccaatgcggtcatttgcctccatctgaaatgggtaattagtgcaattggatattgactggcaaactggatattggcttaccacccaggagggcatggtgcgaacattcttgtttagcaactggtgggtcgtcatcttggtcgattttttcgtctgggttttgccgtcacttaatcgtctttttgcgcttgattggttttctatttcatcgaaatacgtaagcagcaaaatattaatattattataattatttatagatcgcaaataccctgtgccatattttcgcccaaccgcagccacttcaaacgacttcaaattcaattaagcaaagtgccagaaaatgcgaattatgaatgcatatttttagctggctcacccaaattccgaagccaatgaccaaaatgcagtttcgtggatgccgtgcacaaaactaaacgctgccacagttcgatcgcgaataaaaacgctaaatgtagtcgaaaatatctttcggtgcatagaaaacaaaaattgaaaaatgtatatattttggcataacattttcggtcttgtttatttatgaaatcatgcgaaagagggaagtgctgttttgtgactcaatcgactcattctgtcaacgcggctaagtggctgagatgccaagaaaattgcaaaagagattagactagggagaagaattcgaatttgaaaatagttctcaaaagtttcgaatagaagagtatttcatgtaaatgcttgaaaataaaagcgagcgaataaaactaacagagagagggaaaatattgactaaaagctgagcgaatatgcatttggtaatgacgcaggtggccaaatcgttgccaaatagtttaaattaaataatggcctaaacaacataataattccattagtaaaggtatttcaaatgctgactttagtatatattttaagtttactataattgcgtccaaggcatcaaacttttcaactcaaagggcaacgcaccggtaaaagttatatgtatataactaaatatttcatatataattaacttattagatatctatgtttcttcatgttttatgaaatgtgtatctatgataccaaggaatcatttatctcttgcatattcttgtaagttaagattgaatgttaa

SEQ ID NO: 23720 - DNA, 7785 bp, DROSOPHILA
atgacgacccaccagttgctaaacaagaatgttcgcaccatgccctcctgggtgatggaggcaaatgaccgcattgggcccaaaccgccacccacgccaccaaacggtgtggctggtggtcttcccaaggcgcctgctctgccgcccaaggcgaagagcactcccgagccggactacgagatcatcgaattctccagccagcagtactccaacgaaccgatgaagaccacagtgatcagaaccaagacaccagataacaaactaaagtgcaccttgtgcggttcccagaatccctgggtaacctgtgccgagtgcgccggccaaatcttttgcgcctcctgcgacgacatgttccacaagcatcccaaacgtaagcagcacatgagaaaggctgtggagcagggcacaccgccgattccgccaaaggcacaggccggtggtggggcaccaccaccagtggcacctccacgacgcagcaaacgaggccttttgacaccgtttctgggccgcaaggatcagatgctgccgccgccctcgcccacgccctcgcacaagtcgctgggcggctggcggggatcgctcggtggcggggccacgcccccagtgccaccaattgccaccagctctgccaaccagatgaacaaccgaccactgcccgatccaccgcgcagcgagggcgggggatcttccagatcgggcacccccaagtccgtgttcgacaccatccagcgaccgccgtcggtgcagctggagaagatcaagagcaaggccagcgccacgctggaccgcatggccattctgcagcagcggtaccgccaacagaaggctcgccaggatctgagcgccaacagcgaacaggcggccggcgcccagcggcgacagatgagcacatcggtgttcaatctcaactcgaatccacgtcgaccactgtccgaggcccaaaacggaggtgcctggctcgccaatcagcgcatccagcaggcccaatccctggcgcagctaaactgcgctggatgtcaacagagtcagcagcatcctggctgggcacagcatccgcaccaagcacttcctcagcaccagcatcccgatcagtggtcacagttcggctcccaacagcaattcaacaactccaatctgtccctgaacgttggaccgggttacatgtcgcagcaacatcatccacactatccgccaccagtgtttatgacccagcgtggtatgatgcccaatgtgtatccaggagcaccaggctatcccatgatgcatccaggtgtcatgggaatgccaccttcagctgcctccagagctgcatcccgttcccggtacgctgcatcaccaacacccagccgcaaatcgatgtccttgcgtcgcaagcgcaatagctacgtggatgacgaacttacggatgacgaggactccgaccaggatgaccgcagatctttggtgtccaatcgctcgggcatgactagtgcctcgcgctcccagcatcaccaaaaccatatccagccccgccaaaggcgcctgtccagtgcctcccaactcatagccagcgatgaattggacggcgatcaggtgcatcacaagatgcggaatcgtcggggatccattgccaagtccgtgcagagtgagtggctaccggagcgacgggaaaatgagggaacccttaccagaaacaaaacagcaacggactcggccagaaccagtcgcatttactccgatctggagtctgagggatcgggtgctcgggccttggttcaagctaaaattcagcagaagctccaagaagccgatcagcacaaatcctcgaagaaggctgagccaaaacgcaagccggagatgaaggacgagaatacacaggcggcagcggtggtgcaaaaggtggtggtgccaccagcccatgaagagagtgcctcggaatacgaggaagtggtcgaagaggtaaccgcctcagagagtgaggctgaggctcaaacagcacccgatccccaggaagttcctgacgagattggggctgatgatctcggcccaccaccttctaccccagaccacgaatgggaatgcgagttctgcacgtttgtgaacgagcccaacatcaagatctgctccatatgctgcaagacgcccagcaaacctccagtgcagcccaacaaggccaaaaaggtagaggaaaaaccacagcctccagctgaaaagtctaacaatatcaaggcgtcttccaagacggaaactaagccagtgcaaaagcctactacaaagagccaacaacccagtcagaaatccgttgctgctctttcgaagactactcacaccaactccacgtctagctcaaaagcgtcgccagctgtaaactccaagaccacctccagtattcctatcaagacaccatcgaaatccacactgaaaacttcgtcggaaaatgaatccgataactcgctggccaagagtcttctgcacaaagagtccgttgaaaacatttggaatactctggatgagagcatacaggcgcaggcggagcaggtactcaagaaggctcagaaggtctccacggcctgtggtgggactcctccccgggaaatagcagctgtggagatgggaacctccccgcctccacaaagcatttccacacagacctacgacgctctgcccttcaatacaaagcaagaagagatcatccccgttgttcctgaccgcttcacgactccagaaccaaacaagatggagcgacgtccgcactatcgcagcaattcccagctgcaacaggagagtgaacgttatcggagtgccaatgacctgaggtatcacgacggctttggattggatccatatagtgccggtctggtcaccaaaagacccaatttcataaacgagctacgcatgctgcagcttcaagtatcttcacctttcgatatgccgcatgagacattcggagtcaagcatgagccggccagagatccggaaacggaaatgcacatcatactgaaagaactggagctgtacaagtttacggttgaggaactggaagctgcccttaagtactgctccccggagactcatccgattcagtggctgcgcgagaactggcacaagctggtgcagacggtgcagagtttgtcaaccaagtacggacaggagaggggtgaaaacacgatcggaactgtgtcccaaaacgaagcacgcgaggcattgcgcaactcggggggaaatgtgtggcaggcggtggctgactgcatccaacagaggcagcagaagtacaggaaactggcggccaagggaaacttcctgcgcgatgacattgtcaacgcgctgactgcgcaccaaggtaatgtggagcaggcgctggtggagctgaatcgcacgcaactcaagccatttctaatgcgcatctggggctcgccgaatggcgttgagaatgagagtggcgtggccatagacaccaagtcggatatccatgacttcttgaacacacacgccttggactgcctgcagcctccgttggctgggcaaagtcccagccccgcccaagccaatcctttcgaccaaccccgcaccgacgagagccccgtcaaatccacctatgccacacccagtccctatcagatggaggacagcaccctgaagaacctggagatactcattggcaacatggaacagaaccaggccaagcagaaccaggaggttctacgttccatcgagaccatgctggacacattcaagggaaagccggaactggagtacgaaacggatccggagataatgcgtatcctaacaaagagccccattagcacaatgaaaccatctggaccggcagaggataagtcaaccgatgatgtaaagaactttgtatggcaacacattcaggaaattgtgcccaacctggtgcaacaggttgaacaggagctcatggagaaaccggaagaggtagctaaaattgaggcagaacagccaaaggagcctgaacctctactcgaacctcagcctgagcccacaccaagtgtcgatcctgctgtctacatcatggaggaagtcatcaagcccaatttaagggaagccagcattcgtgaggaagttcaacccagttttatctatgccactgaaatagccaacttcaagttggaatttgatcgtggcactgaacgatggcacgaggcggaatgggaaagcagcgatcttacggatgcagaacgcatagtatacaaatgttatatggctcctaatgagcaacccaaggaggatgttgtagatgtagcggttgaaagttcagtcaattcgcttccaacagcaaaagcacaagaagaatctgctccagaagtacccattgaagctcaaaagattgaaaatacagaagttacacaaccagagaccgttaatgaggaacttcgccagcaggaaaaactagaaacaccattagttattacaaaaatcattaatatagcgcctagtacctcatcaatatccaaagaacaaaagcaaagtccgaagcgtctttcaaagattcccgtaagaaccctgagcagcagcagtcttcgcagtgagagtcggtcgagcaatcggactccaacggccaatgatgagatcgaaagggaagagaccacgtcacaaggtgtacccataggggaaacagtcagttctccaaaatccgaacagttgtccgacaaccaggaggttaatcttgtgagccaagaaacacagtccaaaaaggatacaaatattgtcgaagaacctgccacccagcctttaggcttagagctggaagaacatagtccgaatgcaactgctgtagcggtcagtcccaccgactcggacgaagtattcgaagatgctcctgagttcagcggtagcgatggaacaagaccccatgatgaaaccgcttccgatgcagagctttatagccttgatagcgatgggcagcgggctgaaaccaagtccccagaggatgaagtcgtaatcttgctggatgaggaatcccagatggaatcttcgatagcccagtccgaaagcaacgcaagtcttgattcccactcaagtgaatccgagacgtccaaagttgttctcaaggagtttgtaccctctggagatccggccaaacagaacctaagcgaactggttgaggacactcaacgtttgatcaagcagatgcgcgatgagatcagcatggatgagttcgagtctaccgatgaggatgaatactccgatgaatactcggatgagtatgacgaaggggaggaggaggagtggtacgacagcgagggtgaagaggagggagacttcgatggggaggagggtaatacctataacgagcacgcatcctacatcgaggaggcctccactggtgacgaaggcaccgaaatagaggacataatggaggaggatgaggatctggctgatgacgacgagccactgcaatcacaaattccactagacattgaaccagtcatatcgcctgctctatcagtcacgcccaccaaccaagaaactgatacgatcgcacacactgaggttgtttcctccacaggaacgaggctggaaacagagttgccgaaccctgcaatggaatccatcttgccttctcaaagtgttcaggaggacatcaaggtggaagcgattcctattcagtccgctccccccatagctgactcggaaactcgacctgcagagcaaccagttgagcttgtgctagaaatcccttcagaagttgagcctactcccgttgaagagcccactgccctgcccataacacctgcaccaccaattgttgattccgaatcgcgacccgtggagccgcctgttgaaacagtactggaagaacctaaaaaggtaaccccgagcatgaaaggcaagactgcaaacagtggaactgcctccaaaggtccttccacatcaagttcgactaaaacaaacaagtccacagttagtaagattcccaagcccaccaatgaacccactaacaaatcgaatagcacccccttgaacaagaaggttccgctgcgctccaagtccttctcggcccctatgggcatttcatccgtgaagcgaatccaggaggtctacctccagaagcagagttcatcgattgcaaccagccgagtgccgctcaagagcagtcccgtcaccaagaagtcaatcaacgatgccatcagcaggtttaactccaatcaggccgatggacccagcaccagtggagcagcggctgcggcagcagcggcattgttgaaacctcgatcccaaccccgaatcccaaagaagaaataccacgagacctgcttctctgacgatgactacgagacctcggccacggaggaggagcaggaggaacccaacttggccgagccccaaaaagcagaacagctgaagcgtaagatgagtatgcccgtttttcgggcatatcctagtgttcaagagccggtaatcgaggatccagcgatccttgcccgcaagtacgtcgatcaggagctggtgaccaatatcgcagaggcccagatagccgccaccttggtgagcatgaagttctcggaagacgtggctctgtgggcggccagggagtgctccgatctggaccaggccattgccatgctccagcaggagtgcgagctctgcatgaacagctatcccatgaatcagatggtgtccatgctaaagtgtctgcacaagtgctgcaagcagtgtgccaagagctactttacagtacagataaccgatcgcagtataaacgattgcagttgcccgttttgcaagctgcccgagttgagcaacgaggctcagcatgaggatgagcacctcgagtacttctccaacctggacatcttcctgaagagcatcctggacaacgatgtgcacgaactgttccagcgcaagttgcgcgatcgctcgctgctgcaggatcccaacttcaagtggtgcatccagtgctcgtccggattcttcgctcggcccaagcagaagcgattgatttgtccggactgtggatccgttacctgtgcccagtgccgaaagccctgggagcgccagcacgagggcagtagctgcgaagcttatctggaatggaagcgcgaaaacgatcccgagctgcaggcccagggtgtccaggagcatttggcccaaaacggcatcgactgtcccaagtgcaagttccgatactcgctggccaggtatgttcagatacagaaatatcagtatgttgtatcttttacaagttcaatgttcaacctatacagaggcggatgcatgcattttacctgtactcagtgcaaattcgagttctgctacggatgtgcccgacccttcatgatgggtgccaagtgcactgtgtccacatactgtgccaagctcggtctccatgcccatcatccgcgcaactgcctgttctacctgagggataaaatcccccttcagttgcagttcctgctcaaggagcaaaacgtcaaattcgacacggaacccatgcagatcaaggacgagtccagcagttcgtccaaggctcgtgcccaggcccgctgcccgatcccgctgcaaaaggagacgccgcaaggactagtcgacacagtgtgcaacacggaagttcctgacaagcacgctggcatgtgtcgcacccactacgtagagtatttggctggcaaggttgccaaggctggcatcgatccactgcccatctttgatctgacggactgcgtccaggagctgcgaaggcgaggcatcgctctgccggagagaggaccctgggacaccgatgagatctacaagaacatgtgctccgaggtaggtgttggctatcatcagttgatggcttaa

SEQ ID NO: 23721 - protein, 2421 aa, DROSOPHILA
MLPPPSPTPSHKSLGGWRGSLGGGATPPVPPIATSSANQMNNRPLPDPPRSEGGGSSRSGTPKSVFDTIQRPPSVQLEKIKSKASATLDRMAILQQRYRQQKARQDLSANSEQAAGAQRRQMSTSVFNLNSNPRRPLSEAQNGGAWLANQRIQQAQSLAQLNCAGCQQSQQHPGWAQHPHQALPQHQHPDQWSQFGSQQQFNNSNLSLNVGPGYMSQQHHPHYPPPVFMTQRGMMPNVYPGAPGYPMMHPGVMGMPPSAASRAASRSRYAASPTPSRKSMSLRRKRNSYVDDELTDDEDSDQDDRRSLVSNRSGMTSASRSQHHQNHIQPRQRRLSSASQLIASDELDGDQVHHKMRNRRGSIAKSVQSEWLPERRENEGTLTRNKTATDSARTSRIYSDLESEGSGARALVQAKIQQKLQEADQHKSSKKAEPKRKPEMKDENTQAAAVVQKVVVPPAHEESASEYEEVVEEVTASESEAEAQTAPDPQEVPDEIGADDLGPPPSTPDHEWECEFCTFVNEPNIKICSICCKTPSKPPVQPNKAKKVEEKPQPPAEKSNNIKASSKTETKPVQKPTTKSQQPSQKSVAALSKTTHTNSTSSSKASPAVNSKTTSSIPIKTPSKSTLKTSSENESDNSLAKSLLHKESVENIWNTLDESIQAQAEQVLKKAQKVSTACGGTPPREIAAVEMGTSPPPQSISTQTYDALPFNTKQEEIIPVVPDRFTTPEPNKMERRPHYRSNSQLQQESERYRSANDLRYHDGFGLDPYSAGLVTKRPNFINELRMLQLQVSSPFDMPHETFGVKHEPARDPETEMHIILKELELYKFTVEELEAALKYCSPETHPIQWLRENWHKLVQTVQSLSTKYGQERGENTIGTVSQNEAREALRNSGGNVWQAVADCIQQRQQKYRKLAAKGNFLRDDIVNALTAHQGNVEQALVELNRTQLKPFLMRIWGSPNGVENESGVAIDTKSDIHDFLNTHALDCLQPPLAGQSPSPAQANPFDQPRTDESPVKSTYATPSPYQMEDSTLKNLEILIGNMEQNQAKQNQEVLRSIETMLDTFKGKPELEYETDPEIMRILTKSPISTMKPSGPAEDKSTDDVKNFVWQHIQEIVPNLVQQVEQELMEKPEEVAKIEAEQPKEPEPLLEPQPEPTPSVDPAVYIMEEVIKPNLREASIREEVQPSFIYATEIANFKLEFDRGTERWHEAEWESSDLTDAERIVYKCYMAPNEQPKEDVVDVAVESSVNSLPTAKAQEESAPEVPIEAQKIENTEVTQPETVNEELRQQEKLETPLVITKIINIAPSTSSISKEQKQSPKRLSKIPVRTLSSSSLRSESRSSNRTPTANDEIEREETTSQGVPIGETVSSPKSEQLSDNQEVNLVSQETQSKKDTNIVEEPATQPLGLELEEHSPNATAVAVSPTDSDEVFEDAPEFSGSDGTRPHDETASDAELYSLDSDGQRAETKSPEDEVVILLDEESQMESSIAQSESNASLDSHSSESETSKVVLKEFVPSGDPAKQNLSELVEDTQRLIKQMRDEISMDEFESTDEDEYSDEYSDEYDEGEEEEWYDSEGEEEGDFDGEEGNTYNEHASYIEEASTGDEGTEIEDIMEEDEDLADDDEPLQSQIPLDIEPVISPALSVTPTNQETDTIAHTEVVSSTGTRLETELPNPAMESILPSQSVQEDIKVEAIPIQSAPPIADSETRPAEQPVELVLEIPSEVEPTPVEEPTALPITPAPPIVDSESRPVEPPVETVLEEPKKVTPSMKGKTANSGTASKGPSTSSSTKTNKSTVSKIPKPTNEPTNKSNSTPLNKKVPLRSKSFSAPMGISSVKRIQEVYLQKQSSSIATSRVPLKSSPVTKKSINDAISRFNSNQADGPSTSGAAAAAAAALLKPRSQPRIPKKKYHETCFSDDDYETSATEEEQEEPNLAEPQKAEQLKRKMSMPVFRAYPSVQEPVIEDPAILARKYVDQELVTNIAEAQIAATLVSMKFSEDVALWAARECSDLDQAIAMLQQECELCMNSYPMNQMVSMLKCLHKCCKQCAKSYFTVQITDRSINDCSCPFCKLPELSNEAQHEDEHLEYFSNLDIFLKSILDNDVHELFQRKLRDRSLLQDPNFKWCIQCSSGFFARPKQKRLICPDCGSVTCAQCRKPWERQHEGSSCEAYLEWKRENDPELQAQGVQEHLAQNGIDCPKCKFRYSLARYVQIQKYQYVVSFTSSMFNLYRGGCMHFTCTQCKFEFCYGCARPFMMGAKCTVSTYCAKLGLHAHHPRNCLFYLRDKIPLQLQFLLKEQNVKFDTEPMQIKDESSSSSKARAQARCPIPLQKETPQGLVDTVCNTEVPDKHAGMCRTHYVEYLAGKVAKAGIDPLPIFDLTDCVQELRRRGIALPERGPWDTDEIYKNMCSEVGVGYHQLMA

SEQ ID NO: 23722 - DNA, 3350 bp, DROSOPHILA
cttccattttaccttataatattattatgaaaacataaagattttagatttttattgaaattatttagtcacgcttgaaagcctttcctttattttgaaaataaatatttaacgaaataataaattttgctggattcccaagtgtatttgcgatgcttatagttttcgatagctgtccacgtgtttgacaaacttaacttaacttagcaaaccgatgctcataaataattttaaaaaaagtccatgtgatctgcatattttcacgccacgcgtaccgaactcgaaaactgaaaatcaaaaacttaaaaccgcgtatgtgagtgttgcagttcgggtttgagttcaaagccagaagcaaaacttttaggacgagacgatcgtttatggatcaataaatatacaatttatcccatttaattagttgttattggtgtaaaactgtccgaatatcaaaacatgttgtgccgcgcgcataaattcatttcaatcgctacgaaaataggtttttacgatgccaccaccatcgtcccatcgccttccctgttctccaccgagtaacttggcgtatctgaatctgaatttgaatttgtatctgaatatcccccacttactgtattgctttttttcgctcatctggttgttgtgcttgtgcctttgcttttcgtctcgggacttaatttatggctcgcatttgcctttttggcaatatcacaagcggccaaggagatgaatataataataagtctctgtggatatacgactttccagatactcacagcatactcatcagaatagctcaaaagtatgcagtcatttaatagttgtgtattttatttaactggtaacagaaaacaagagaaacaaagaaacaataatttaacaagttaacaaaactatgggatttgaattagtattctaatgggattttgtggttaagtcactcctatcctatacaaaatatatacttaaaattctatgccagcagcaaagtcgctgcattctaatccattgtggagttcagtctcatgaactcctcgttgagcaacgccatattcgtggagtgcgtgttggctccctgctcgcccagctgcaagtacctgtcccaaataaagcacttgaacggtgtcatcgtcggatctgaccgggtccaatcgtacatctctgacttccaaacgttcttcacgctcacctcgaactggcagtagtagcaacgtaggttctgcatgctcaagtcggccacgccgtaggagcatcgggtgcacatagtgcaggtgtacttgaagctatctatgcagttgtcctcgatggtgggtgcctccggcagggccatcttcgcctggtaggcccacctgcggcaattgtcgccgtgacccaactcccgattgaacacaaatgccgccacgtggcacatctcgtgcagcaggcagcggattagctccgccgtagtctttatactccgcagaagtagaatcttggctctgcgcttaccatgggcatcgacggtcagctggcatgtgcatcgcgtgtgcattgcgtgcttccaaacaatgggcacctgaaggccacagtggaagatcgcgtggttgaagatgttgaacagcactttggccagtgccaccttgcagattttgaaattgttttgcctgtaggtgagcgccagtggatggcacatattgagcgaaatcgaagggctgagcgaacgaacgaatccgtagaactttggatgccgctccaggcatggcacactgcttttgtgacgtcggcagttggcggccaactgctcttcgttgggtaaatcgataagatcaatgggctccttatgcaagtccggggtgcactgatcaaaggagaatgcaatggaccagagctcaaagtcatttttgcttttagcctggctctcctcaggggtcggttcatcgatattcgacaaattaagctttgaccaagtggatgtcatcattgttttcggacgaattggttgctcggctgatggagtaaatggctctgcggacgcatgggatgaattgacgacacaattgatattctcaatatcctccggcttcatatcgtaaaccaccgcaggattgtagagcttgcggcgtgatggtatcagacccaaaaatttgtgcatcttcgttttaagttgcacatcgtcttccagcttgacgttgggctgtggctcgttcctaacgataatgattttatcgcccaactcgagatagaccagcggcggccttttgcgacccgtccactcgggctgctgatactcctcgtcgtcggcatcattggagtcctcctcgccatcgccctccgactgagaggatgagtcggaaaactgttggatggacatctcgtctagatttcggcggcacttatttttaacacacccatggcctttggtcaccggcaagtgccgtttcactggcaacttctgtatttccatgtcggtatccatggaactacgactgctgtcgttcatatcatcgaagaaatcggagaggtatccttgatgaatttctggtgcagctcccaaagtcggaggtgtttggagcacggattacttgaaattagtttgattgcctggactgatggctaagtcataggctacctgtgcgcctttggtctgcagtccttggttgggttgaccacgctgtcgtccggatttgtatttgattgtgcggacatctcaaatgcgaaatcgattcgaaagtcctggaaccgcccacagcaaacaacactttccaaactaaccatctgcacattgttaggcacaggctgaaaagcttaaaataaattctagaaacgattggattggattttcacatatgccgccgtttattggatgcactctattacacgtgcggatattcggtctgttgttttccatctcttagtaactaaacaaaatgggaaaggtttctggatggataaacgatgagtgggtgggtgtacaatgaaggtgtatacatgccatgtctaatgtctaacgaactgtctagcactgaagtttgattcgtgagtgtgggtggggtggtgggtgtataaaaatgtctataaaagtgccgccataaatcaaagatattggtgaagaattgcaatagtcgtctgcttccaaaacatcacttgttcagattctgctcatgccgatttcagtggtatatgctttttgattacctaaaagtaagatcgagattgagagattggaacatttataaacattatcgattcgaccgcccaaactgtttacaattaaataataataaaacgaatatcaattaagaagcgtgtgaaatacgtcagacggcatgcaaatttagttagcggctgaacgattttgttttcattttatt

SEQ ID NO: 23723 - DNA, 1350 bp, DROSOPHILA
atgtccatccaacagttttccgactcatcctctcagtcggagggcgatggcgaggaggactccaatgatgccgacgacgaggagtatcagcagcccgagtggacgggtcgcaaaaggccgccgctggtctatctcgagttgggcgataaaatcattatcgttaggaacgagccacagcccaacgtcaagctggaagacgatgtgcaacttaaaacgaagatgcacaaatttttgggtctgataccatcacgccgcaagctctacaatcctgcggtggtttacgatatgaagccggaggatattgagaatatcaattgtgtcgtcaattcatcccatgcgtccgcagagccatttactccatcagccgagcaaccaattcgtccgaaaacaatgatgacatccacttggtcaaagcttaatttgtcgaatatcgatgaaccgacccctgaggagagccaggctaaaagcaaaaatgactttgagctctggtccattgcattctcctttgatcagtgcaccccggacttgcataaggagcccattgatcttatcgatttacccaacgaagagcagttggccgccaactgccgacgtcacaaaagcagtgtgccatgcctggagcggcatccaaagttctacggattcgttcgttcgctcagcccttcgatttcgctcaatatgtgccatccactggcgctcacctacaggcaaaacaatttcaaaatctgcaaggtggcactggccaaagtgctgttcaacatcttcaaccacgcgatcttccactgtggccttcaggtgcccattgtttggaagcacgcaatgcacacgcgatgcacatgccagctgaccgtcgatgcccatggtaagcgcagagccaagattctacttctgcggagtataaagactacggcggagctaatccgctgcctgctgcacgagatgtgccacgtggcggcatttgtgttcaatcgggagttgggtcacggcgacaattgccgcaggtgggcctaccaggcgaagatggccctgccggaggcacccaccatcgaggacaactgcatagatagcttcaagtacacctgcactatgtgcacccgatgctcctacggcgtggccgacttgagcatgcagaacctacgttgctactactgccagttcgaggtgagcgtgaagaacgtttggaagtcagagatgtacgattggacccggtcagatccgacgatgacaccgttcaagtgctttatttgggacaggtacttgcagctgggcgagcagggagccaacacgcactccacgaatatggcgttgctcaacgaggagttcatgagactgaactccacaatggattag

SEQ ID NO: 23724 - protein, 449 aa, DROSOPHILA
MSIQQFSDSSSQSEGDGEEDSNDADDEEYQQPEWTGRKRPPLVYLELGDKIIIVRNEPQPNVKLEDDVQLKTKMHKFLGLIPSRRKLYNPAVVYDMKPEDIENINCVVNSSHASAEPFTPSAEQPIRPKTMMTSTWSKLNLSNIDEPTPEESQAKSKNDFELWSIAFSFDQCTPDLHKEPIDLIDLPNEEQLAANCRRHKSSVPCLERHPKFYGFVRSLSPSISLNMCHPLALTYRQNNFKICKVALAKVLFNIFNHAIFHCGLQVPIVWKHAMHTRCTCQLTVDAHGKRRAKILLLRSIKTTAELIRCLLHEMCHVAAFVFNRELGHGDNCRRWAYQAKMALPEAPTIEDNCIDSFKYTCTMCTRCSYGVADLSMQNLRCYYCQFEVSVKNVWKSEMYDWTRSDPTMTPFKCFIWDRYLQLGEQGANTHSTNMALLNEEFMRLNSTMD

SEQ ID NO: 23725 - DNA, 5728 bp, DROSOPHILA
ccaagaaaaaggtatggtacaaaaatagttaacaattctggaaaaaatcaattttagagctgaatacttaacgaatttatttaaaatatttttagaaactatctgcgtcagctggaagctcgacggcagcctcggctcagccatcaacgcagaatttgacaaccaagttgatactaaatccagcaactcgggaaaatcttgcactgcaatatactgctccaaagtaaattggctaaatttaacttctttttgtgcggaatggaaaccacttttttttggacagtaggtactcctaagcatattcataaaatactatgaaatattttctttttaagatccaatgacacagaaaacaataatatgcatagattgtacagaactgtattagtaataaatatgtgtaaggaaagaaagcccagctggataggtttgcatcctacgaaaacaaaagagtaagtttaattcattattatattaaatttaagtaatattaaaataacaccgtttcagattccgaggatcaatgttcttggcgccagtggagatcaataaaaaatacatataaagtaacacataaataaaatatacagtcaggaccattaattgccaaatcgatttaaatttattaaatagatataacaattttagaatacaataacttgcgcagattttcataacaatttttgcaataaattcgtcttaaaaacaattctgtataattctggattattaatataattcgaatatttctaagatttcacatgctatagaacgtttgatttatgtatgatgttttaaattcatttattgaagtattcacaaaataattcgtcatcctaaaatgtattcaatttttaaaatatgttgtctaaaaggcagcttattcacaggttaaacgaaacccgtaccctggttgggtaatggatctccacttgtacctttaaggtactggagtggtaactacgttttattgaccaatcacggcagtttcggaggtgtcttagccgaccggaagtgctgaagcaggaaccatcagcgtggaaccattcagcttattggccagggcggtacgggggctcatcatctgggcctgggagagctgcagctcactggtggcctgcttcagagccgccacgatgggctctcctcgatggagtgcctgcacggatatgctaatgggcaacctcggaccattcgacttccggccaaaggtccggccaatggcgtgcatgcctgtgctgtcgatctcggatttagtgcgggttaggcggcgcgtaggcaaactgggcggagcaatcaagggtggtcctttagagcgggccgccaaattggaggaaccgcctgctgtggccgcaatgttgcgcaaactgcgccatttccgttcgcttatcgccgtggccgtggctgagttagccacttccggtcgcgcatcctgcatattctcatttccgttggacgaatagttcttgatcaggatcttgaactttttctccgtgctctccacgggattagtggaactcaatcgagggccacagctacgctggcgtttaggtggcaaggcggtgctctgtacctgctcacccgacagagatcccccggtattccttttgtgggttgcacttagcaactgggtgatggaacgacccgcctgcttgaggatgtacgagctggtcgctcccgacggcgttgccgtgagggcaggagccgccgatggcgacttttgtggcagctggctgcacaaactgctgcgactgctgctcagcggctccaccatgtacttctccatgtattcggtggcattgaaggtgggcatggcacggtggattcgcgatatactcgttgctggatggattatggccgagcgttggcggtaaacactgctggtggccaacgagcgctcctttcgctgctgctggtagtagtagtgaccgtgaccgccgccatgattcgccttttgcagcacctgcttgcccttcacgaagaggttgaggcccatgtaggcgggtgtgggtggcaccacctggcggtaggccagctcgaagttacccagttccgccttgggatccgtgcggcgatcgataacaactgaaaagggtatcacatcaaatgggtttcgtttgcccgacttcaactcacccttgacaacatcctccaaacactggggacacatgcgcgccgtcacactcgtggtggcccctagatccggactggagttgatctcgatgagccagggatagaaattctcacagatcatgaagtcggcgccgaagagctcgaaggtatttggccgtcggtccatgttctcctgtgaggctagcatacagccaacgatggccttgcgcattccgggaaagatccgctccagccacatgttgtacttgccaatttgacgcaggtacgcctggaaggagtagcaatcccacatgttctcgcttggcaggcgcttgtcccgctttccattggtgtacttcttttggatggcgtagttggtcaggtgcacggactcgtggtggttgctcagactgtactcctgtgaactgaatcgcaggtagctctcccggtagaaccacaccaccaaaggctatggatttagtaaaggagattatgatgcgctacttggagtgggtcgatattcgctcacctgggtgttggttatcagaaaccactgtcgaatgtcgaatttggtttggaacagaatcaatgggcgttctgcaagtacataaatggttagctattcccttgacattagtaacactttcttaaatatttcacacataatgaaattacttattataaataaatccttttcatattgattgactatcttcattccgaccaatgacattccggtctgaataataaatcaatatccttgcggcaaacctgttgcacttctcaggcagacagaacaataaagaaaacgagcacgacagcgggaaaagcaatgattgcgtttttaggccaaatatttatgcatttatgtgggcctgtaggtctttaggcccggaagccagaggctctaggatgtttgagcccatgtgcgtgcgttgggcgccacaacttacgattcgagttcgtcgaaaacgaggcctacataggaagcgaaaaaaaaacatcagctcgaacaacaaactttggcaccgtcctgatttacgacctacttccgtgtgtttgtttatgtttttatgttttaggcctgcacttaagatactctagtcgctatcgatttgtaaaggtggaattagtttctagtcaaagaaataagtacttaatggcttgtttaaaaattaaatcgtatcgattgaatgagatttatgcctttctccagcaatttaaacttcactcacctatatacttttgcaccacataacgactcttggaggcaatcgagagattaaccacgcccagtattttcttgaggttgtccatgaggatgatgcccctgccgcggcacttgttggccggcttgactatccacatattctggtatccatcaaggctgtactgcggccagtgcaccttcatcttgtccaccagcgagaggcagctcttgaccatcggctccagccgctggccaccgtcgtgctggatgcgaccatcctcgttcaccagctgctgatgctggaacaggaaggcgtcccaatcgtgctcccatatcttgggcggatcctcgaagtcgatgtcgttgtgctggcagctgtcgatatactccaccagccgcttgtaggcgaagtctatagcggagtagggtatcttgccgctgcaggagaagaccgcatcggagccctgtttgtggtacttgcagagcatggcccgcaggaaggccacgcaggcggtcagcttgaagttctcgataaactcgcccagctcctcgggactccagacgttgtagcacctgggaaagtacatctcggcggtaccctcctcgaagaaccagtggaagtcgcgcagttggctgcacagaccctccttcgaagtgaacggcgctcggtggaatttgttgatggtcatgcctgggttcttggcctggtcgatgtagtcgcacttctcctttctgtttgtccacaggaaatcgacgggcatgtgctccaggaagcgggacatgatgtttcgctcgcacttctgcacatactgccgtcgcgtctcacccgccttcctcttgggcagccgctgggtgaggtcctcgtaggtcatctgtcccgccggcatcacctttcggtgcacgtccagcttctccacccaacccctcatcagcagggcgttcctcacggagttgaagcagccgcggatggtaaagatcttgttctgcttggccgcctcctgcgcctttcgccgcagctcgttcatccgctcggtggtgatccaggtgcgtctggccacgtagttggtgggtgcgcccaggggacaggacttgctcggcggtggtgtcctagctggctggttctctttgttgctgtggtcgggaacgctgatggcggtttccttcggcgtggctggccgagccagcttcacgggactatcgctttgggcgggagtcagttggattactggcaccgtcaaaggagccaccacccgattggatggcgtaggtggaggtgccgctggcggtgtgactggcttcttggccaacgtggcacttgcacatttttgcggctgatcccgattccgatccccgtccgtcacctgatccctgctgcgatgcggttcactgctcggacgcgtctgcatggcggaagcctcgccaggcgactgagtaccagcacttggcactcggactgggccactgggtgagtgggttgttaattcgcggagcccctggcaaccattgagccagaaataagttcacaagttcacttcggcaacgactctattaataggtacatgctcaactcggtagcctcctgggcctggccattgtcctaagtcgggattcccttacttgataagataatataatccatgttttatcccttaaattcattagcttgtcgcactttaaaattattcgtcctttcaatctgcacattattttgtttcctccgattataatatatttatcacttctttaaaaacaccaaattcaagaaagagtatttgagaattggttgaaagagttaagatggtttttacttatgttatagtttggaagcatagtttttgcacttttcacgttggtttaggtcgactgagaatgtattttagtgtaagatacttttacaacgttgggtgacataaaattaacctttaaagaggagtgctagccattcttgaggtgagattgctaattgattagataatctaccaattttctgatttagaaattgatatttaaacatgaagatatacgcagaactataaatttgtaaacaaatttatacaattttcactagaaggtagatacgaatgcgacccatcccagtgctctccggactccaagcgaaacatatgctcctcggcaccgcgtaatcctgctcatgtgaatgatgttttggcacgatacctgtttgtttccaacgatgccgtggagcggaagagccagtgggtgtcgtcgtcatcgctgttgtttggtgttggtgtcatcgctggcgttgtcgtcactgcgagcagcgttgccgacgtcaggtgggttggcagcgggtggtggaggagcggttgatggatgcactgctgcttgccacggcggtcttgtctgcgcaatttgtgcaattttcgcaatggcgaggaaaag

SEQ ID NO: 23726 - DNA, 2979 bp, DROSOPHILA
atgcagacgcgtccgagcagtgaaccgcatcgcagcagggatcaggtgacggacggggatcggaatcgggatcagccgcaaaaatgtgcaagtgccacgttggccaagaagccagtcacaccgccagcggcacctccacctacgccatccaatcgggtggtggctcctttgacggtgccagtaatccaactgactcccgcccaaagcgatagtcccgtgaagctggctcggccagccacgccgaaggaaaccgccatcagcgttcccgaccacagcaacaaagagaaccagccagctaggacaccaccgccgagcaagtcctgtcccctgggcgcacccaccaactacgtggccagacgcacctggatcaccaccgagcggatgaacgagctgcggcgaaaggcgcaggaggcggccaagcagaacaagatctttaccatccgcggctgcttcaactccgtgaggaacgccctgctgatgaggggttgggtggagaagctggacgtgcaccgaaaggtgatgccggcgggacagatgacctacgaggacctcacccagcggctgcccaagaggaaggcgggtgagacgcgacggcagtatgtgcagaagtgcgagcgaaacatcatgtcccgcttcctggagcacatgcccgtcgatttcctgtggacaaacagaaaggagaagtgcgactacatcgaccaggccaagaacccaggcatgaccatcaacaaattccaccgagcgccgttcacttcgaaggagggtctgtgcagccaactgcgcgacttccactggttcttcgaggagggtaccgccgagatgtactttcccaggtgctacaacgtctggagtcccgaggagctgggcgagtttatcgagaacttcaagctgaccgcctgcgtggccttcctgcgggccatgctctgcaagtaccacaaacagggctccgatgcggtcttctcctgcagcggcaagataccctactccgctatagacttcgcctacaagcggctggtggagtatatcgacagctgccagcacaacgacatcgacttcgaggatccgcccaagatatgggagcacgattgggacgccttcctgttccagcatcagcagctggtgaacgaggatggtcgcatccagcacgacggtggccagcggctggagccgatggtcaagagctgcctctcgctggtggacaagatgaaggtgcactggccgcagtacagccttgatggataccagaatatgtggatagtcaagccggccaacaagtgccgcggcaggggcatcatcctcatggacaacctcaagaaaatactgggcgtggttaatctctcgattgcctccaagagtcgttatgtggtgcaaaagtatatagaacgcccattgattctgttccaaaccaaattcgacattcgacagtggtttctgataaccaacacccagcctttggtggtgtggttctaccgggagagctacctgcgattcagttcacaggagtacagtctgagcaaccaccacgagtccgtgcacctgaccaactacgccatccaaaagaagtacaccaatggaaagcgggacaagcgcctgccaagcgagaacatgtgggattgctactccttccaggcgtacctgcgtcaaattggcaagtacaacatgtggctggagcggatctttcccggaatgcgcaaggccatcgttggctgtatgctagcctcacaggagaacatggaccgacggccaaataccttcgagctcttcggcgccgacttcatgatctgtgagaatttctatccctggctcatcgagatcaactccagtccggatctaggggccaccacgagtgtgacggcgcgcatgtgtccccagtgtttggaggatgttgtcaaggttgttatcgatcgccgcacggatcccaaggcggaactgggtaacttcgagctggcctaccgccaggtggtgccacccacacccgcctacatgggcctcaacctcttcgtgaagggcaagcaggtgctgcaaaaggcgaatcatggcggcggtcacggtcactactactaccagcagcagcgaaaggagcgctcgttggccaccagcagtgtttaccgccaacgctcggccataatccatccagcaacgagtatatcgcgaatccaccgtgccatgcccaccttcaatgccaccgaatacatggagaagtacatggtggagccgctgagcagcagtcgcagcagtttgtgcagccagctgccacaaaagtcgccatcggcggctcctgccctcacggcaacgccgtcgggagcgaccagctcgtacatcctcaagcaggcgggtcgttccatcacccagttgctaagtgcaacccacaaaaggaataccgggggatctctgtcgggtgagcaggtacagagcaccgccttgccacctaaacgccagcgtagctgtggccctcgattgagttccactaatcccgtggagagcacggagaaaaagttcaagatcctgatcaagaactattcgtccaacggaaatgagaatatgcaggatgcgcgaccggaagtggctaactcagccacggccacggcgataagcgaacggaaatggcgcagtttgcgcaacattgcggccacagcaggcggttcctccaatttggcggcccgctctaaaggaccacccttgattgctccgcccagtttgcctacgcgccgcctaacccgcactaaatccgagatcgacagcacaggcatgcacgccattggccggacctttggccggaagtcgaatggtccgaggttgcccattagcatatccgtgcaggcactccatcgaggagagcccatcgtggcggctctgaagcaggccaccagtgagctgcagctctcccaggcccagatgatgagcccccgtaccgccctggccaataagctgaatggttccacgctgatggttcctgcttcagcacttccggtcggctaa

SEQ ID NO: 23727 - protein, 992 aa, DROSOPHILA
MQTRPSSEPHRSRDQVTDGDRNRDQPQKCASATLAKKPVTPPAAPPPTPSNRVVAPLTVPVIQLTPAQSDSPVKLARPATPKETAISVPDHSNKENQPARTPPPSKSCPLGAPTNYVARRTWITTERMNELRRKAQEAAKQNKIFTIRGCFNSVRNALLMRGWVEKLDVHRKVMPAGQMTYEDLTQRLPKRKAGETRRQYVQKCERNIMSRFLEHMPVDFLWTNRKEKCDYIDQAKNPGMTINKFHRAPFTSKEGLCSQLRDFHWFFEEGTAEMYFPRCYNVWSPEELGEFIENFKLTACVAFLRAMLCKYHKQGSDAVFSCSGKIPYSAIDFAYKRLVEYIDSCQHNDIDFEDPPKIWEHDWDAFLFQHQQLVNEDGRIQHDGGQRLEPMVKSCLSLVDKMKVHWPQYSLDGYQNMWIVKPANKCRGRGIILMDNLKKILGVVNLSIASKSRYVVQKYIERPLILFQTKFDIRQWFLITNTQPLVVWFYRESYLRFSSQEYSLSNHHESVHLTNYAIQKKYTNGKRDKRLPSENMWDCYSFQAYLRQIGKYNMWLERIFPGMRKAIVGCMLASQENMDRRPNTFELFGADFMICENFYPWLIEINSSPDLGATTSVTARMCPQCLEDVVKVVIDRRTDPKAELGNFELAYRQVVPPTPAYMGLNLFVKGKQVLQKANHGGGHGHYYYQQQRKERSLATSSVYRQRSAIIHPATSISRIHRAMPTFNATEYMEKYMVEPLSSSRSSLCSQLPQKSPSAAPALTATPSGATSSYILKQAGRSITQLLSATHKRNTGGSLSGEQVQSTALPPKRQRSCGPRLSSTNPVESTEKKFKILIKNYSSNGNENMQDARPEVANSATATAISERKWRSLRNIAATAGGSSNLAARSKGPPLIAPPSLPTRRLTRTKSEIDSTGMHAIGRTFGRKSNGPRLPISISVQALHRGEPIVAALKQATSELQLSQAQMMSPRTALANKLNGSTLMVPASALPVG

SEQ ID NO: 23728 - DNA, 4945 bp, DROSOPHILA
ctttatatatttatttatttatttatattttcatttgttatttatttttaactgctaaatttgtatgttcaacatttcattttcgttaattcttatttcttctcaactgggttatttatgcagcaagtgcataacaatatggcttgaatataatcgcaaacgttcgaaattaccgcttcataaccgattcgtttagcgggtaatcgtgtttcggagattgtgtactgttatgtatttattgctgtcttcattcgagttgcgtttttaattcggttcgataaatataaattaattttaataatttttttatgtattatactagttgtccgcagacgcacatacttgacttttattcatttactttgctagtctcgtgaattacttggattacttcaatccatttataaaatgttcacttcgtttactttagttttatatttaatattggtttcttagtgtgttcgtcgtctaagtcattgttagttatgcatacgttaatttatatatttataaatatcatgtataatgttagtaaatcagtgcataactgcaataaacgggagcattgtgatgatgcggatttgacatagaatggagtcgaaatacaattcaataaataagtttttaaattttacgcctatgatttagagaatacaaaaggttccatctaaaaatactataaaaagttcgacacatttataaaataatctttgtgacttttgttcaatagaaatgcttgggttttctctttgggaaatgagtttcgggttatattcgatcgcaagctcttattaaaaattaattaacaatcagctgaaagtgtatagagcacataatatcatcgtttacatttacatactagagataaatgtatattgcactttactgcgcacgagaatcaatcaatctggacctacatcagtgtcacaaggactcgaagaattttgacgaaatactgggcataggtatacattcaatttgagataaggaaacacaaatatccaataatgttaacaaaaagagggggtgcgtggggattggggaagtaccatggctgactcttaacgttgtccttgtatacaaactaccaatataaagattacaaaaatgccactgaataaattctctctacctgcgatatttgtttttctttttgggatttctctaattgttaatggaattcttcagcaacaggggcagcccagttttggtttttgatttggaaacgagtatggtggctgttttggctccaccagagccggctgcagcagcttccgcagaggctgagttgcgcctgggtgccgcctgccgctgatgaagctcttggagcaaagccgaatgcttgtccaaggccttcagctgcggcatgttctgagtctcgtaaagcgacgactgcagctgagtgtgtatcgaggtgacgttggagagcgtgctctcggcctctgcggttggaaagttgcttaaataacgtttacttgtcgtgcttcctgttgttgtcgatgatgtcgttgtagtattaatcattgtagtctgttcctgcactgaaacctgtaaagaacgccaatcaacaagacgaaactcaaaaggcaatgtgccgcaaacctttcgcataaacgccaactctgtgtctcaagtgcacttggcaatttgtataagactctccatatccttctgcaccccatacaactccgaaagatgcttggcaaacacaccattcacctcactcaactttgcaagctaaaaacaaagtttcattagcaaattactcaacatgattattatgctttacccaccgtttggtcattggacttttcacgtaggctaatattggccgacttaagctcaagttcctgttgcataagttccttctgtagttgttctgtccgcgccttgagcgtggccacctcacgacgcagttcgtcctctgtggcgcctcctccggctgcagccacaaccccgccgcccacgcacagctgctccatatctcgtttgaggcgaatattctcctccttgtaagtgtgcagctggcgcttccattcgtctacattggcagttgattcctttgggagaaaaaggccaaaaacgatcagtttcaataaatgtgagcttatcttattgcttacctgaagagcactagtcagccgtatattgttgttcttcaaggtagccagctcgatttcccatttcttggcattggcgcagctgaaaagaaggcattattgccttgagccaatgacggtcaacgctttgcttacctttgtgccagtgccattttcagacgctcgttctcgtacttaagctgctgctcggcggtggcgccggctccaggacccgtgtgcatgcccacaatgcttccgccagacgagatggtcactccaccgccaccagttacccctgaagtgggctgcggcgagggcgtggccgatccgatgtccgccttgacatcgctggtatttagaagcttgtgggaaggactgtccggattggcgttctgggtattcgtgttgctcatgttgggcggctccacagtgtgcggatcgatggctgtgttgtcgttctgcatggagcccacagctctcccggaaatgggcgacgtgttcgccgaggtggtgggcgtgacggcattcgatccgttggccgatttcatggcattcttggtggcctccttgacctcctggaacttctctacgaactgttgagcgatatgattagtatataaatatgtgagacatatgctaaccactcaccttggtcaattccgcctctgaggcaaatcccaagccgtacaccgtgtttgcccgcacatcgctccactggccgaacttctgggaggtctgggtgaaggtcatgttgggtgtgatcgtcgagtttatcaccgccttggtgccctcgacactgatgatgcggtacagatttcgcgagctgtcgtagaagaagctaacgttgaccgccttcatgctggccgtgatccaggtgcgcttcgtcttcggatcgatgtggaagacgtgcgcctggcaggtgaaaatcggttgttcgctaagggtcataaagggattaaagcgacaagcgtgtgattaattaaaaattccatttagagcaggcaataaattgtgcttctgtgctcgtgtgagtaaactatggcaaagcattcttttactgtggtttattagtcaacaggcactgtgtaatgcatttataattagtagtccttaagtcccaggataatcctcgtggtccttatttgataaagtaggtcgatatatgtttgttttttgcgatctggcctgatgcaatgacagtttgttgcggggcgcagggcccccatcaaatcaattccgtatccgtggtagcctccagtgcctttatttgtacacatatacatatatatatcttatctattacctatccgccgacatcgttcgctgagctctataacttgtgtcttcccgttatcgctggcgactgtcgaccgccgactaaattgcattatgtgctaagccttttccgcagccttgcttgtgatttttgattctcgggcggaaaacacgcacgcacacacctgcacagtcacacacacctgcacacccacacacatgtaattggcctgcccacgcgtgtgcgtgtgtaggtgtatgtttgtgtacatatatatgtatgtatttacgccgcccgctacacacagaacggcagcaacaacaacaacatcataggggggagatgtcagctagttcggcgtcgatttttcccacagtaaaaacggcaggtttaggccggtttggccgcgcccatcggtcttaccccattgtattcgttctttggcgctgactgagtgcttccgcagcagtttataccaatgctagtcggttttacttatgaatttcacggttaaaaaaaataaaacacaaatgtctagagctggaaccaaaatcgatgtttgtatggtgctatcgatgtttttactggctcaacaccatcgatgatttatttattagcttccaagcatcgataacacatgagctcgtataagagcaatgattcttatcgaataatttaatcgctgtaaagcgaattgcaaattaattaagataaataaatactaaatatgtttgtctgtaaggcaccataacaatgtaattttttcaaaaacatgtgtagctgttgaagcattgcatttaaatgacggaagttacaaaataatttcagataaaagtgataagtttttttgactgtctagttgtgcgcctacatgtagtttgaatatttgttagatatggttttctttgtgcggtgtggcagcattagttttagtacacatttttctaatacttgacgataggtcaaatggcaactcctgatcggcaataatatttgcatataatttagctttgaacataaatagactgccacaaaaactttaaaacaacacattttacttctatattttttggacgaaatagaaccactgaaaaaattcatgaaatgtagtacattttgtagtgaagaaccagggttggtttacggattttagccgttttgccatctggtaacactgaccagtttctcatcgttaaaaaatccatttggaattcggtttatttaattaaaagcagccgggacacctatgcgaagggcaaaaagcggccagagttgttgttgctgctgctgcccagccgccgtgcgatcgatcggggtacgtgttccggcgtaacgaggagtacgaggcgattttctcgcagcctcttttttttcacacgaacgccgtcccactaaaccgaaatttcaggtgaaaaactcattggaacgcatttaaaagcggcgtaagctcgcacctgctgctcgtttaaccctgtttcgggtatatgtgattgcaaaatgcgacagcgacacacctaggcacacaaaatatgccagttatgcgaaagagaaaaagtactgtgcctgtgtg

SEQ ID NO: 23729 - DNA, 1902 bp, DROSOPHILA
gcaccatacaaacatcgattttggttccagctctagacatttgtgttttattttttttaaccgtgaaattcataagtaaaaccgactagcattggtataaactgctgcggaagcactcagtcagcgccaaagaacgaatacaatgggcgaacaaccgattttcacctgccaggcgcacgtcttccacatcgatccgaagacgaagcgcacctggatcacggccagcatgaaggcggtcaacgttagcttcttctacgacagctcgcgaaatctgtaccgcatcatcagtgtcgagggcaccaaggcggtgataaactcgacgatcacacccaacatgaccttcacccagacctcccagaagttcggccagtggagcgatgtgcgggcaaacacggtgtacggcttgggatttgcctcagaggcggaattgaccaagttcgtagagaagttccaggaggtcaaggaggccaccaagaatgccatgaaatcggccaacggatcgaatgccgtcacgcccaccacctcggcgaacacgtcgcccatttccgggagagctgtgggctccatgcagaacgacaacacagccatcgatccgcacactgtggagccgcccaacatgagcaacacgaatacccagaacgccaatccggacagtccttcccacaagcttctaaataccagcgatgtcaaggcggacatcggatcggccacgccctcgccgcagcccacttcaggggtaactggtggcggtggagtgaccatctcgtctggcggaagcattgtgggcatgcacacgggtcctggagccggcgccaccgccgagcagcagcttaagtacgagaacgagcgtctgaaaatggcactggcacaaagctgcgccaatgccaagaaatgggaaatcgagctggctaccttgaagaacaacaatatacggctgactagtgctcttcaggaatcaactgccaatgtagacgaatggaagcgccagctgcacacttacaaggaggagaatattcgcctcaaacgagatatggagcagctgtgcgtgggcggcggggttgtggctgcagccggaggaggcgccacagaggacgaactgcgtcgtgaggtggccacgctcaaggcgcggacagaacaactacagaaggaacttatgcaacaggaacttgagcttaagtcggccaatattagcctacgtgaaaagtccaatgaccaaacgcttgcaaagttgagtgaggtgaatggtgtgtttgccaagcatctttcggagttgtatggggtgcagaaggatatggagagtcttatacaaattgccaagtgcacttgagacacagagttggcgtttatgcgaaaggtttcagtgcaggaacagactacaatgattaatactacaacgacatcatcgacaacaacaggaagcacgacaagtaaacgttatttaagcaactttccaaccgcagaggccgagagcacgctctccaacgtcacctcgatacacactcagctgcagtcgtcgctttacgagactcagaacatgccgcagctgaaggccttggacaagcattcggctttgctccaagagcttcatcagcggcaggcggcacccaggcgcaactcagcctctgcggaagctgctgcagccggctctggtggagccaaaacagccaccatactcgtttccaaatcaaaaaccaaaactgggctgcccctgttgctgaagaattccattaacaattagagaaatcccaaaaagaaaaacaaatatcgcaggtagagagaatttattcagtggcatttttgtaatctttatattggtagtttgtatacaaggacaacgttaagagtcagccatggtacttccccaatccccacgcaccccctctttttgttaacattattgga

SEQ ID NO: 23730 - protein, 394 aa, DROSOPHILA
MGEQPIFTCQAHVFHIDPKTKRTWITASMKAVNVSFFYDSSRNLYRIISVEGTKAVINSTITPNMTFTQTSQKFGQWSDVRANTVYGLGFASEAELTKFVEKFQEVKEATKNAMKSANGSNAVTPTTSANTSPISGRAVGSMQNDNTAIDPHTVEPPNMSNTNTQNANPDSPSHKLLNTSDVKADIGSATPSPQPTSGVTGGGGVTISSGGSIVGMHTGPGAGATAEQQLKYENERLKMALAQSCANAKKWEIELATLKNNNIRLTSALQESTANVDEWKRQLHTYKEENIRLKRDMEQLCVGGGVVAAAGGGATEDELRREVATLKARTEQLQKELMQQELELKSANISLREKSNDQTLAKLSEVNGVFAKHLSELYGVQKDMESLIQIAKCT

SEQ ID NO: 23731 - DNA, 4459 bp, DROSOPHILA
ctttatatatttatttatttatttatattttcatttgttatttatttttaactgctaaatttgtatgttcaacatttcattttcgttaattcttatttcttctcaactgggttatttatgcagcaagtgcataacaatatggcttgaatataatcgcaaacgttcgaaattaccgcttcataaccgattcgtttagcgggtaatcgtgtttcggagattgtgtactgttatgtatttattgctgtcttcattcgagttgcgtttttaattcggttcgataaatataaattaattttaataatttttttatgtattatactagttgtccgcagacgcacatacttgacttttattcatttactttgctagtctcgtgaattacttggattacttcaatccatttataaaatgttcacttcgtttactttagttttatatttaatattggtttcttagtgtgttcgtcgtctaagtcattgttagttatgcatacgttaatttatatatttataaatatcatgtataatgttagtaaatcagtgcataactgcaataaacgggagcattgtgatgatgcggatttgacatagaatggagtcgaaatacaattcaataaataagtttttaaattttacgcctatgatttagagaatacaaaaggttccatctaaaaatactataaaaagttcgacacatttataaaataatctttgtgacttttgttcaatagaaatgcttgggttttctctttgggaaatgagtttcgggttatattcgatcgcaagctcttattaaaaattaattaacaatcagctgaaagtgtatagagcacataatatcatcgtttacatttacatactagagataaatgtatattgcactttactgcgcacgagaatcaatcaatctggacctacatcagtgtcacaaggactcgaagaattttgacgaaatactgggcataggtatacattcaatttgagataaggaaacacaaatatccaataatgttaacaaaaagagggggtgcgtggggattggggaagtaccatggctgactcttaacgttgtccttgtatacaaactaccaatataaagattacaaaaatgccactgaataaattctctctacctgcgatatttgtttttctttttgggatttctctaattgttaatggaattcttcagcaacaggggcagcccagttttggtttttgatttggaaacgagtatggtggctgttttggctccaccagagccggctgcagcagcttccgcagaggctgagttgcgcctgggtgccgcctgccgctgatgaagctcttggagcaaagccgaatgcttgtccaaggccttcagctgcggcatgttctgagtctcgtaaagcgacgactgcagctgagtgtgtatcgaggtgacgttggagagcgtgctctcggcctctgcggttggaaagttgcttaaataacgtttacttgtcgtgcttcctgttgttgtcgatgatgtcgttgtagtattaatcattgtagtctgttcctgcactgaaacctgtaaagaacgccaatcaacaagacgaaactcaaaaggcaatgtgccgcaaacctttcgcataaacgccaactctgtgtctcaagtgcacttggcaatttgtataagactctccatatccttctgcaccccatacaactccgaaagatgcttggcaaacacaccattcacctcactcaactttgcaagctaaaaacaaagtttcattagcaaattactcaacatgattattatgctttacccaccgtttggtcattggacttttcacgtaggctaatattggccgacttaagctcaagttcctgttgcataagttccttctgtagttgttctgtccgcgccttgagcgtggccacctcacgacgcagttcgtcctctgtggcgcctcctccggctgcagccacaaccccgccgcccacgcacagctgctccatatctcgtttgaggcgaatattctcctccttgtaagtgtgcagctggcgcttccattcgtctacattggcagttgattcctttgggagaaaaaggccaaaaacgatcagtttcaataaatgtgagcttatcttattgcttacctgaagagcactagtcagccgtatattgttgttcttcaaggtagccagctcgatttcccatttcttggcattggcgcagctgaaaagaaggcattattgccttgagccaatgacggtcaacgctttgcttacctttgtgccagtgccattttcagacgctcgttctcgtacttaagctgctgctcggcggtggcgccggctccaggacccgtgtgcatgcccacaatgcttccgccagacgagatggtcactccaccgccaccagttacccctgaagtgggctgcggcgagggcgtggccgatccgatgtccgccttgacatcgctggtatttagaagcttgtgggaaggactgtccggattggcgttctgggtattcgtgttgctcatgttgggcggctccacagtgtgcggatcgatggctgtgttgtcgttctgcatggagcccacagctctcccggaaatgggcgacgtgttcgccgaggtggtgggcgtgacggcattcgatccgttggccgatttcatggcattcttggtggcctccttgacctcctggaacttctctacgaactgttgagcgatatgattagtatataaatatgtgagacatatgctaaccactcaccttggtcaattccgcctctgaggcaaatcccaagccgtacaccgtgtttgcccgcacatcgctccactggccgaacttctgggaggtctgggtgaaggtcatgttgggtgtgatcgtcgagtttatcaccgccttggtgccctcgacactgatgatgcggtacagatttcgcgagctgtcgtagaagaagctaacgttgaccgccttcatgctggccgtgatccaggtgcgcttcgtcttcggatcgatgtggaagacgtgcgcctggcaggtgaaaatcggttgttcgctaagggtcataaagggattaaagcgacaagcgtgtgattaattaaaaattccatttagagcaggcaataaattgtgcttctgtgctcgtgtgagtaaactatggcaaagcattcttttactgtggtttattagtcaacaggcactgtgtaatgcatttataattagtagtccttaagtcccaggataatcctcgtggtccttatttgataaagtaggtcgatatatgtttgttttttgcgatctggcctgatgcaatgacagtttgttgcggggcgcagggcccccatcaaatcaattccgtatccgtggtagcctccagtgcctttatttgtacacatatacatatatatatcttatctattacctatccgccgacatcgttcgctgagctctataacttgtgtcttcccgttatcgctggcgactgtcgaccgccgactaaattgcattatgtgctaagccttttccgcagccttgcttgtgatttttgattctcgggcggaaaacacgcacgcacacacctgcacagtcacacacacctgcacacccacacacatgtaattggcctgcccacgcgtgtgcgtgtgtaggtgtatgtttgtgtacatatatatgtatgtatttacgccgcccgctacacacagaacggcagcaacaacaacaacatcataggggggagatgtcagctagttcggcgtcgatttttcccacagtaaaaacggcaggtttaggccggtttggccgcgcccatcggtcttaccccattgtattcgttctttggcgctgactgagtgcttccgcagcagtttataccaatgctagtcggttttacttatgaatttcacggttaaaaaaaataaaacacaaatgtctagagctggaaccaaaatcgatgtttgtatggtgctatcgatgtttttactggctcaacaccatcgatgatttatttattagcttccaagcatcgataacacatgagctcgtataagagcaatgattcttatcgaataatttaatcgctgtaaagcgaattgcaaattaattaagataaataaatactaaatatgtttgtctgtaaggcaccataacaatgtaattttttcaaaaacatgtgtagctgttgaagcattgcatttaaatgacggaagttacaaaataatttcagataaaagtgataagtttttttgactgtctagttgtgcgcctacatgtagtttgaatatttgttagatatggttttctttgtgcggtgtggcagcattagttttagtacacatttttctaatacttgacgataggtcaaatggcaactcctgatcggcaataatatttgcatataatttagctttgaacataaatagactgccacaaaaactttaaaacaacacattttacttctatattttttggacgaaatagaa

SEQ ID NO: 23732 - DNA, 1812 bp, DROSOPHILA
ccagcgataacgggaagacacaagttatagagctcagcgaacgatgtcggcggatagcgaacaaccgattttcacctgccaggcgcacgtcttccacatcgatccgaagacgaagcgcacctggatcacggccagcatgaaggcggtcaacgttagcttcttctacgacagctcgcgaaatctgtaccgcatcatcagtgtcgagggcaccaaggcggtgataaactcgacgatcacacccaacatgaccttcacccagacctcccagaagttcggccagtggagcgatgtgcgggcaaacacggtgtacggcttgggatttgcctcagaggcggaattgaccaagttcgtagagaagttccaggaggtcaaggaggccaccaagaatgccatgaaatcggccaacggatcgaatgccgtcacgcccaccacctcggcgaacacgtcgcccatttccgggagagctgtgggctccatgcagaacgacaacacagccatcgatccgcacactgtggagccgcccaacatgagcaacacgaatacccagaacgccaatccggacagtccttcccacaagcttctaaataccagcgatgtcaaggcggacatcggatcggccacgccctcgccgcagcccacttcaggggtaactggtggcggtggagtgaccatctcgtctggcggaagcattgtgggcatgcacacgggtcctggagccggcgccaccgccgagcagcagcttaagtacgagaacgagcgtctgaaaatggcactggcacaaagctgcgccaatgccaagaaatgggaaatcgagctggctaccttgaagaacaacaatatacggctgactagtgctcttcaggaatcaactgccaatgtagacgaatggaagcgccagctgcacacttacaaggaggagaatattcgcctcaaacgagatatggagcagctgtgcgtgggcggcggggttgtggctgcagccggaggaggcgccacagaggacgaactgcgtcgtgaggtggccacgctcaaggcgcggacagaacaactacagaaggaacttatgcaacaggaacttgagcttaagtcggccaatattagcctacgtgaaaagtccaatgaccaaacgcttgcaaagttgagtgaggtgaatggtgtgtttgccaagcatctttcggagttgtatggggtgcagaaggatatggagagtcttatacaaattgccaagtgcacttgagacacagagttggcgtttatgcgaaaggtttcagtgcaggaacagactacaatgattaatactacaacgacatcatcgacaacaacaggaagcacgacaagtaaacgttatttaagcaactttccaaccgcagaggccgagagcacgctctccaacgtcacctcgatacacactcagctgcagtcgtcgctttacgagactcagaacatgccgcagctgaaggccttggacaagcattcggctttgctccaagagcttcatcagcggcaggcggcacccaggcgcaactcagcctctgcggaagctgctgcagccggctctggtggagccaaaacagccaccatactcgtttccaaatcaaaaaccaaaactgggctgcccctgttgctgaagaattccattaacaattagagaaatcccaaaaagaaaaacaaatatcgcaggtagagagaatttattcagtggcatttttgtaatctttatattggtagtttgtatacaaggacaacgttaagagtcagccatggtacttccccaatccccacgcaccccctctttttgttaacattattgga

SEQ ID NO: 23733 - protein, 397 aa, DROSOPHILA
MSADSEQPIFTCQAHVFHIDPKTKRTWITASMKAVNVSFFYDSSRNLYRIISVEGTKAVINSTITPNMTFTQTSQKFGQWSDVRANTVYGLGFASEAELTKFVEKFQEVKEATKNAMKSANGSNAVTPTTSANTSPISGRAVGSMQNDNTAIDPHTVEPPNMSNTNTQNANPDSPSHKLLNTSDVKADIGSATPSPQPTSGVTGGGGVTISSGGSIVGMHTGPGAGATAEQQLKYENERLKMALAQSCANAKKWEIELATLKNNNIRLTSALQESTANVDEWKRQLHTYKEENIRLKRDMEQLCVGGGVVAAAGGGATEDELRREVATLKARTEQLQKELMQQELELKSANISLREKSNDQTLAKLSEVNGVFAKHLSELYGVQKDMESLIQIAKCT

SEQ ID NO: 23734 - DNA, 6902 bp, DROSOPHILA
cttttcggacagcggcgaccacttgctgaaatttcattatgtgcgtgatttataaataagcctcgctggccccacgccccattccacacactcctcgtccgaatcctcctcgagttgttcccagcatcttcagtggttacgagctaagacgtcccacgcacttttcgacgccgcaacagcaacatcaagtctgatctcctccgaaatgccccacctttaccccaccacctcgcactgcagttcagtgcgtattaatcataaaattgtattattaacatgtttatttttcggtcttcaagattcgattacacgcattcttcctgctcttcgtgtgcagcgctttctggagtgtttttttttcctcagcgaacgtgactttgttgtgcagtgtaacgaaagtgagctactttctaacactcttaggggggtttgggattatcatcagccttcaattgctctaggaaatattgtcattttacgacttcgccggttaattgggttacgtggctttggccactgatgccgaccaggccagatgccttgcacctggaaatagtgtgggagttggcaagacatggtttgattggagtgaagttggtcaagcttccggcttaatgattcaaaggagagtgtttaatggcagttgataaatatgcatatctaagtgcaaatatttacctaaaggtgttaccatagctctccattcaccctacaaactaaaagcaagtgcttatcacttaatttccaactcagcccctttttttttgggccaatacaatataattaaaagtagttaaaggtcaattcaccagcttatcggggaagtaaaactggtttgctcgcatatcaattcaaaaatattgaataaatatttaagggcccgtcggtgagtgtataattaacgtggagggcttaagccataaaactagtgattaacgccaagttaacaacaaaaaaataaaccggcattgcgggctcttcgcaaacaaaactcagcatgttttctataattttcaagatccatttattcaatttcgtttataattatttgttatgaataaattattttaaattaagcaataatccgactaactagagtatatctaacagtaagcggcattacatcttaatcgtatttcctaggcgatagctttgcctaccaagcattttgatggttcaatacaaagcgttttagaaatcgaaatttatatctttgctgctttggcgttcgtggacttgaaaacgatttaatttgtcactagctaaatgcaaatgccaaaagaatttatgacgaaaattccgaactaagctggttagcaaattaaatgccctttgttccaagccgactcctccagttgaacattagcagatcgcttaattgatccagttgctctcggagctccatttgctccatgtgatgtctacttgaccacactggtcaattcgatggagtcgccacatctgaaatgatatatatttgttaagactctctggctgatgaccagatgtgttgacatcaaatgaattgcggcctagaaatgggctttaaagtgggagatatgatgcaattcttcattaacgcaaatgaactatcttaacccaatttaagataggacatatggaccctttttacatgttgcataatatgcagggtgtaaaaagtaaagcattgctgttacgtgatcgttaatctatgattaatctacagtgaagctacagtatcatacatcacatagtttactaagttacatagtgttacaaaaggcagttacaagtaaccagatgaacaggcactaaaaactgcgaaaacccaagacctaaaacaatttactttacataatccaacagaattaactcagtattcaaaggtattttaaaaatcccttgctttgtgctagattaaacactaaaaccacaacataaaacccaactttttatggcgaaccacgaaaaggaaaagtgattttgaggagcggttgtaaatcatttaaatgaaggatggcaatgagcatgggaatttcaagttcgcaagaagatagaaaacgggtgtagagaccgaaattacttctggcggatcggggattgatcctggcacctgatggtgaccgcactgagacaggaatcatcgttggcctcgtcgtcggtggccagcggagcgatggttactgtcagcggaggagttattggaactgttcccgcggctgcagctgagccattgccattggcagtgcctttaaggctgaccacattggccaacttagtggtggctgaaaccgcggctgccatcacctggcctcttccattcagcagcgagttgttggtcaactgcttttgcatcagctgattggaggagtccaggcgattggacagcgaggtgtgcctgttgttcaccgactgtaaaaaaggggaaagttgattaaattcataatcaaaacgcctgatatatgatagttcctaccggattgttgttgttcattcgcccgcgaatgttgtagagtccgtagaccaatggattcatacatgagttggtcgaggcgaagatgaacagcgccttgcgcagcaggggattgatcttgcccgcggagtgcttgtccagccagtaccacatggagatggtgtagtacggagtccagcagatgatgaacacaatcacaatcgtgatggtcattttgagcgtgcgcttcttggcccggctgagcacgtcgtcgttggaacgccggaaacgctcggcaatcacgtccttgaggacgcgctggctcttccgatagatctccaggtaaatggctccgtagcagtagatgaacatgatcagcggaaaggcgtacatgctgcacatggaggccgcctgatacagcttctcatcaaagtcgctcctgaacgagttgaagatgacgcactgaaagtagccggtgacggcgggatgctcctccagatggaagagaaaggcctgccggagatgggtgagacaattaagtatctctcactggtagaaaataacttatttaaatagcagccattaaaaatagtgcgtaaattgaagtaaatctcaatctcagtggttgagaactgttgttggttacccacctgtggaatgctgcagacgactgatcccagccaggcgcaggccagcatgatgcgtccccggttgtaggaccgcttgagcggcttcagtatggcaaagtatctgatggagacaagaggagccagtggtggtgagaggccgtcggccaacgattgacacttcgagccaccttatctggctatcaatttggtccattagcgacagtactcacctgtcgagcgatatgcagaccatcacgtagctggacagatacaggccaaagacgcggaaaaagctcatcaggcggcacatcaggtccgtggatagccactgcaccgtccaggcccacacgatctccattggcatcaggagcagcgtcaccattagatcggcgatggccagatgcattagcatgatatcaatacgcaagggaccgcgcagtcgccgcttggtcagcagatacagcacggtgctgttgccaattgttgagatcacaaacagtatgctgatccaaatgaaagaccaccacattaggtaccgggaacacggcggtgcaggaggagaaggttcagaagcgattaaattggtgagtgggaaattaaagaagttttttcccgaaggtgggtgtcggcgtgggtgccattaagtgggtcaacgaagtgcagttggaaaggtaaacttgttgaatgaatgaggtaaatgaatcgtactcaattggtatctattgcagacaatctgggcagacaaaattgatgtcccttcgaagtagccaaatagggtgaatttgaataaacagtttcagaaccggtcaattatattgttaatttcaggcacctttggctgctgtgctaaattaagcactttctacgccttgacttactgagcgactcacacttaatcgattaaacaaatctctggcattctataaattgaaccctgcaatgatccgcaaagttcaaattccaagtgagaatgattaatctcagacagatagccagacacccgaggagaaaccagcgatgatgaccccagtatgatttataggtgtttataattcaggcagcgacacccacatcgccatatgaattgattagtttagacttgttaaagatagtaaaagtcaaagttgataagctgaatatacaccaatgagagacgtgggcggtgatcttgacgaccaggttgtaaaatgctggtcggaattccactcacctgtacacggtgatggacaatcggtggccatcattgaagaccatatccttggtcaggtgaatggtgccattggtgtcgttcacattcgaccaattacttagatcacgatgatcattctcctcagctacttttgccattttttgggacaagctaataaattgtatctgaatgcaactgcatcaaggatttgcctcaaagataacgtcttttattctaaatcaaaagatacagatacagatggatgttaagatactatttcttgttttcgtttgaatgtttcataattgatttttgtatgcatgttaattattgaagtttaaactgtgtgctttatcatttgggttcgttttgggggcccgtcattaaattattgtgaaacgtgtgcgctgctttttgacttttcgaatgctttattattggcggctcagtcgagataatccaatattgagaacacaaataaacaaatatattattaataatattccctgacagacagtcactcaattaatcaaatcgattgcactcagtttgataatgataatgaacactttttcgattgctttggattttaggttcaagaacttgtttattatgttattggtatgattatttacgttctgtttgcttgtttgttggccccttttttttctatgtgctaaagctggcaatgaccttgaaccaaatattcccgcgcggcattaacgcattcaagtttccgattgataataaaaattccgtttatgttgagctgcccggctcggtgtgttttctagaattgatatgtacatacatctacatcggtataataattataatggggagcatcttgcgctctccgctggcttattaatctgttaatcaattgcgctcaatcgaaccgaaagttcactcaattgaacagcaatagctgcaaaaaactcggacaactcgttctcacattaatccttcagtcgaattattttacgggttgtttgtttagacgcgccgcgtttgatgccttttgaacttggcattttaatgtgctcaaacaaatgtgattccaaataactaagttttcgaatcgagcaaaatacggtccaaaacaattcgatttcgttctgaataaactgaataaactttaaactcgcagaggcccaagttcacctagccgagtgctggaacccctcgaagattacagggagattcaactagattgctcttactaatcgatcggcttgtgtatatactacctattgtaggcgtaatcttcgattacgagaacgcgtacgtgctgtttaaatcacttttcctctatatacaactattatatacgtttcttcattctgtttttcttccttttttgcgatttccgttttgttttgcgttttctaaacacgcggccacaccgtgttttgctgtgtactatacagatatagctgattttaacctgagatttttgaatatatttgaataaattctattttgcacacacctcccagcagcgacgaaaatacaccgttcacactgcccaccgcccacgcgcgtagttatcgctatcgacgatgcgagagcttcttaacggcacacacgactacgactaacggtactccagatccacactcacaccgatcgacgagcaggaactgactgaaccgattgcctgcctgggatgctgatgcctcgtactcgagatctcggcagccactgataacacagctggaagatgagcgcgacaagtggaagcttttgcactcccgaccattcaaatacctggtcctcggcctcctgtagaaatcgtagcctactttttggacaaggactatacacctgaatgcgtttctatgactcttatagctgctcaaaggataggaaaagtagaatttatctttagctctgagccctcttaatctgtaagattccagtttaaggtacttccttcgtcagtgttacaaaacgactcacgatattggtatacccctaatttcaagtagcaggtatacaatgttaggtacattgataacagcggacgaccccaatacacttcacatgtgtgtgtgtgttttcaggtcccgcccgcataaatttcacgattatcaatgcgtgtacacgactcaaagttcaaacggtggtccgtctgatcgccaaatgtttcgattccttatctgccgcatgagtcgcgtctcagccggcacaagtgatctacatgaatcttcttataggcctcgttccgagctttcctcctttcccaaaactttgctctctgtatcccactcgtatgtcctttttgtttcggatttcgcacctctgatcccgtcgagttttcactggcatctgccaagtccactgccaaggttcacaatttaacctcatgccggccggacgatacgcaattggacaaaacgattcattaaatttaatgagcgtgccggggcggacaaaaggatttcaagttcacgttccgcggcgcacatttgtatgctacgaaagtggcgtgagcgcggccttatcaagatgcacctggcgcacctgataagacgacggtggggcggctctaatgagtggtcgtgcagaatgtgcactaactgaaataaacggcacattcaagggcgccgtttaatttcgtatttgcgcttgcactcaacgcggctta

SEQ ID NO: 23735 - DNA, 2023 bp, DROSOPHILA
cagtcagttcctgctcgtcgatcggtgtgagtgtggatctggagtaccgttagtcgtagtcgtgtgtgccgttaagaagctctcgcatcgtcgatagcgataactacgcgcgtgggcggtgggcagtgtgaacggtgtattttcgtcgctgctgggagaataaaagacgttatctttgaggcaaatccttgatgcagttgcattcagatacaatttattagcttgtcccaaaaaatggcaaaagtagctgaggagaatgatcatcgtgatctaagtaattggtcgaatgtgaacgacaccaatggcaccattcacctgaccaaggatatggtcttcaatgatggccaccgattgtccatcaccgtgtacagcatactgtttgtgatctcaacaattggcaacagcaccgtgctgtatctgctgaccaagcggcgactgcgcggtcccttgcgtattgatatcatgctaatgcatctggccatcgccgatctaatggtgacgctgctcctgatgccaatggagatcgtgtgggcctggacggtgcagtggctatccacggacctgatgtgccgcctgatgagctttttccgcgtctttggcctgtatctgtccagctacgtgatggtctgcatatcgctcgacagatactttgccatactgaagccgctcaagcggtcctacaaccggggacgcatcatgctggcctgcgcctggctgggatcagtcgtctgcagcattccacaggcctttctcttccatctggaggagcatcccgccgtcaccggctactttcagtgcgtcatcttcaactcgttcaggagcgactttgatgagaagctgtatcaggcggcctccatgtgcagcatgtacgcctttccgctgatcatgttcatctactgctacggagccatttacctggagatctatcggaagagccagcgcgtcctcaaggacgtgattgccgagcgtttccggcgttccaacgacgacgtgctcagccgggccaagaagcgcacgctcaaaatgaccatcacgattgtgattgtgttcatcatctgctggactccgtactacaccatctccatgtggtactggctggacaagcactccgcgggcaagatcaatcccctgctgcgcaaggcgctgttcatcttcgcctcgaccaactcatgtatgaatccattggtctacggactctacaacattcgcgggcgaatgaacaacaacaatccgtcggtgaacaacaggcacacctcgctgtccaatcgcctggactcctccaatcagctgatgcaaaagcagttgaccaacaactcgctgctgaatggaagaggccaggtgatggcagccgcggtttcagccaccactaagttggccaatgtggtcagccttaaaggcactgccaatggcaatggctcagctgcagccgcgggaacagttccaataactcctccgctgacagtaaccatcgctccgctggccaccgacgacgaggccaacgatgattcctgtctcagtgcggtcaccatcaggtgccaggatcaatccccgatccgccagaaatgtggcgactccatcgaattgaccagtgtggtcaagtagacatcacatggagcaaatggagctccgagagcaactggatcaattaagcgatctgctaatgttcaactggaggagtcggcttggaacaaagggcatttaatttgctaaccagcttagttcggaattttcgtcataaattcttttggcatttgcatttagctagtgacaaattaaatcgttttcaagtccacgaacgccaaagcagcaaagatataaatttcgatttctaaaacgctttgtattgaaccatcaaaatgcttggtaggcaaagctatcgcctaggaaatacgattaagatgtaatgccgcttactgttagatatactctagttagtcggattattgcttaatttaaaataatttattcataacaaataattataaacgaaattgaataaatggatcttgaaaattatagaaaa

SEQ ID NO: 23736 - protein, 455 aa, DROSOPHILA
MAKVAEENDHRDLSNWSNVNDTNGTIHLTKDMVFNDGHRLSITVYSILFVISTIGNSTVLYLLTKRRLRGPLRIDIMLMHLAIADLMVTLLLMPMEIVWAWTVQWLSTDLMCRLMSFFRVFGLYLSSYVMVCISLDRYFAILKPLKRSYNRGRIMLACAWLGSVVCSIPQAFLFHLEEHPAVTGYFQCVIFNSFRSDFDEKLYQAASMCSMYAFPLIMFIYCYGAIYLEIYRKSQRVLKDVIAERFRRSNDDVLSRAKKRTLKMTITIVIVFIICWTPYYTISMWYWLDKHSAGKINPLLRKALFIFASTNSCMNPLVYGLYNIRGRMNNNNPSVNNRHTSLSNRLDSSNQLMQKQLTNNSLLNGRGQVMAAAVSATTKLANVVSLKGTANGNGSAAAAGTVPITPPLTVTIAPLATDDEANDDSCLSAVTIRCQDQSPIRQKCGDSIELTSVVK

SEQ ID NO: 23737 - DNA, 23654 bp, DROSOPHILA
ctgtgtatccacatcagtggcgtcatattgcacctgtgtatcctggtcaatatcatcgggcagtagattttgcatatctaaattattaaaagccacatcagcctccatttcggcgacgacgcgttgaagttccttgagagtctgctcctctgccagtcggagctccaactcgctgctagtgtccggaatcctgtcgagcatcggctgcagcattggactcggtctggccgacagcgtagtctgctgctcgtccgtggagcaatccaaattgatgccagaatcgtcggccatctgttgactttccatggaggagcgtcgctttctctcgggcatcagtgaactgtagatccggctgctggcactgggtcccaagaaaagtggagccggaattttagtgggcctaactcccgaactgcgaggccgcagctcactctccgacgaagatgggacaaccgcgtccacatcgttttccattgattgacattcttcggagtttttcacattcttgttgttctcagtccgcttcagctcttcctgggatggagttgcttgcacattgcggctggccatcgtggctatttggacgcataaatgaatgaggtcagcacaatttggtagagcactgtgctccaacttaccctttataaatttacgcaagactgactgaatttaacctggttaactagttcgacatccgtgaaatattatatcaatgttttcaacatgggttttcccttatttcggtgatcaaaacgttccctagcgaaagtgtgttcgcctaactgtggcaattgaactaaatggattgacaggcaatgtctcctgatttcacgtgcagccaggccaacttgattcagttcatttttgtgttggaaaacgcggctccaatggccaactggattggcaactcatttattaacttagtggtagcattaatacataatttggttagaattgatggcagaaaagacgttaatggctctgaggattgcgattcccctcagtcctgcaactccaccttcgtcttgagatagtcggacagatcattgtagatcagcggcttcacacgatctgttttgaaaagcatagaaaaaagtttagttcagttgaagttaccactttgtttcgatttcccttactattgcacttgtactgcaggttggaccatataatcatcctctgtgagaagcagaacacgcccagccgaccgcccttcagcgtggagtcaaacacattgcccgagtcgaagatcaggcggttaccctcgtgcattctgtgggtagaaggagaatgaagacatgggaaccctgtcatggtgccatcactcactgcaggcggatgaggccgatggccggtcgatgcaccagggaccagcggtaggaggtcctttccttccacgcaatgttcttcggatccttccacagcagcctggcctcaccgtcggtgtttccctcgtgccacaggctgttcctcatcattgggcccggaccctcggtgctgttgaccagcttgatctggatgcccggcgccgcagaggcggtgaagggtcgtggctcccagtaggtttgggtgcccttcttccactgcaccacgtagtacttgtagctgctctggtagctgaacacaaagccagcgtagtcatcgtccgtgtcatcgttgatataaaaggtgccgtcgaagtcaacgcctccgaaggcgtccttgcccaccgctagtcccggatccgaattgagggtctggactatctcggtgccattggcgtgtaccacccagttgggatccgcttgcgataggcctttgggatccagtggaatggtttgaagagtgcgaaagtcagtgtgatgaatcatcgagttgttcgggcagttgtccatgccattcggtacaccatctacgtcctcatcatcttcgcaagagtcacccttgccattccgattgaagtcgtcctgctttgggttcttggccagcggacagttgtccttgtagttgggtatcccatctccgtccatgtcgtcatcgcactcatcgcccgttccatcaccgtcagtgtccagctggtccgagttactgaccattgggcagttgtccagcgagtttggaactccatcatcatccccgtcgatgtctctgtgacaggcatcgcctacaaagtccatgtcgcgatccttttggtcgggattcggaagattcggacagttatcgcaagcgtcgcccacaccatcgttgtccacgtccgactgactgggattcggcagcagcggacagttgtctagcgcatttggtatggagtcgttgtcgatatcaccatcgcactcgtctcccagtccatcctcgtccgtgtccaactgcctgggattgtacttaagcacgcagttgtcgcacacatcgcccaccttgtctccatccgagtccagctgctcggtgttgtaggccagccagcagttgtcttggctgttctggacattgtcgccatcggcatcgtcgtcgcacccatcgccatgtccatccagatcggcgtcctcctggcctgaattaggcaacttcgggcagttgtctcgctgacagcgcagctctggacaaccgattgcctgatctggccatccatctacgtcggtatccctaccgcaaatcaaaccgttgcccgcccatcccacattgcagtgacacttgtggcggatgttatccatcctaaggcacacggcattgcggtcacaaacggttccatccggacacatgaacaccgaggatctgtctaggcagctgtaggtgccatttgttacatatccttcgtggcattggcatctgtaggaaccctgcgaaagaaatctattacttttaaactatttttttttaaatttgtatcgtactcacaatctcgttgatgcaagtagaatgctccgggcatcggaagaacccagtgcggcactcatcgacgtccaggcacgtttgcctgcgataatccacggagtagtagtcggcgaagtagccatgggcgtgggtgccatcgaagccaacgggacacgggctgcactggaagccaggactaagattggtgcacgtcgccagctcgtcgcaaggatcgtagagcaggcactcattcatatcccggcagctggttccgttcacctcgtggcccattggacacgagatgcagtgaaagtagggcggatagccaacctggaggcactgggcgccttcgttaagttaaaaagtaattgcaaaaacgaattaagatgattgcaatgcaataaaacgaatggaaacaggtgagttattcacgaagctgccaacatgttcactcacatatgtatgagtatctttatgagccattttcttcaaagaaaactttttctgtttaaaaaacggtttgaaaaatgacaatttcgatgtaagtttgacaaaaacactatatgtatataagcttttgtgctacttcgctttctacttctatattgttttccgattctttgccgattcatggacactgggtaaaatgatatagcttttctttgaaataagttatatctattcagctgattctttataattatctataagatatttcgagttcaacttccactcaccgttgatatatctgaatgtatgaccagaaaatgatagtgtataaacatgatgcgatagaaaggcatgtgggtttggtttggatgatttcgatgggtaaataaataaaaatttgtgtggccaatgatggagtttatttattaaataccaaaaattacagcgtacattttgttataataatattcatagtttattacaataattgggagatttcaggcggggcaagcaaattttgttacacgtttatagactccactttctgggcatttgattgggacgtacatatacatatttagttatctattctacaagagcttttcaatgatattatctcacgattttccgctggagctgcgtctgctttcaaatgataattgctaatactatgaatttccgctgttcgccaatcggagagcttacaacttatgactattttataaagtagtaattcaatatgtgcactttctacgctctgtacttgtttagctttagttgtgtatcatagctcagccgaaaacgttgcaatagtcccttcctccgcggattagttcgtaacgaccgagtattttcgggcggtgtactggctctgcctctgatagtgttgcacattatgcgagggcactagaatgttgcctgatacaaatgagaattgttgattagtaagtaggtagtttaatgtgtaatgtgtcccattcgactcgttcaattaagtccacctactggaagagcatcgagcactttgtacttttgccgcaaatcaattagacaacttgtcttatatggccccaacattccagcacgcccaaaactcgttgaatctcagtatatctgtgagctctgattaaccctcttgtttcacacattcgcgagaagccccaaattagcccaggtactacaggtactctataattttcgagggttttttattcaatcagaaggttcggcgagtcctcagaggtcgaattaaactgaagtgggcattaataaatcaaataatcgtgtgaattgagtacgctacgatcaaatggtagggcatataagtttctaagagtctgattgtagatcaaaagtggttttaagaacacaaaaagttactctaatctaaaaaaaaaacttaaaatcaattaaaatgtcatattttggagcaaccataggtgtaaagtcctcatttactaaagttcttgcccccaaaaagatcatgtaagatgttaaaatttaaaccaaacagtttaagaacttaacattaacattttacctcttcgttttgttaagaacctctgggtgcccatgtttaccaatcaacccactcgcaagtgagctgatggcacgacaaacacaaattagccataaaatcaacaaaatccccaaaaagacaaaactccatttaggaattaggacgtggggattacgttgtggtgggggcaaacatgggggcagaccgaccattccaattgagtgactgccacttacctgaggggcacggtgtgtccaggcaaggattacgtagcgaacatgtgcgtccatcaccttcgtagccggctggacaggagtcacactgggctccattcacggtatcgtgacactgaacgcctctgcaaagggagacacagattgttgttgttgttgttaatgcgatcgagcaggaggatgaaatggaatgggatgggattggattggattgtatggtatggtatcgtatggaatgggttcagatgcgctgagatgtgtgtgtgtgtgctattcggggcacattgtttattattattaataccgacaggcaggaacaaacagcaacaaaagactgttaatgttggacacagtcgagcatacaaaggcatatttattaatgatgtttagtggaaacggctacacaaaagccactgtgagctgggaaaagtgagagagaaaaggttgccccggcgaggatgcgagggtcacaaaagcaccgacaaagagacaagacatgtgccacggggttttagaggtgcctgggctcctccgcctcctcaggtggattttcgaacggttcgcccgcaggaacgacaacggatcccgaaaagaaaacaaattacaattacaagaaaatcttattaaaacccagcgaaacgcaaataacttaaggatggatggtgctggcatcgagtgtgtgtaggctgcgctacggatgtccaatggccaatgtccaatgcccaatggcccatggccaaacacacaaaacacaaaaaattcaactgcattgcatgcatgtaaatttcaccgaccgttttccttatttatgctcgagtgtgggattgcttatggctctgcgaaatatttacatatcatgacatggtcattagttcgccccgtttcgggggttacagttattggcccatcggccaatgttccgtcttcatccgcatccatactcatcagcatgccactttgtcaggacataactcttggcagtccaattttctaggaagatcacccagcggccagaactaccgtgcccaactgacccagaagccatagtttcatatattttatggctaagcacacagtgcgttttagcctgccggaagtcccagttcgagttatagacttggtagacttgttggccctagctaaccaacttgcatttggccccttggggaaagctgtaataatgatctagcacatgaaaaagggattcgaaacgaagcaaagctaatgcccttcaatgcagaaagaattttaaaaaagattcaactaaattattagtagaaaccaaaaagattctgctgtgatgatggcaacttctcgtgtgttattttcataaaacattatttttaaaccaccacatgatatttactatgcccgctttaggcagagtattaaaacaacataggctggcttaaaattcgagtcgcaaaaacttgaagtattgcgtttgttatttcttcgctctgtcagttgatgagatccatcagcttggagccctcgacttcggcatgtccatggtgggccacaacacacttgtcccgatccgccgagtgtgcgtcaatttggacttttcgagtggaagcatttttggggatcgcctctaactggttggggcgcaattagcaaaaagtgttaagtacttaagtggcaagcggtctaagaggaggcgatccccattcccaggttgcttgatgctgcgtgggggttttcgctttccggctgcgttcccagatgcctccgccccaatcttgtgggccagccaggcaacctccctctcctgaccgccactttgcgcttttctgctttgtttcagttcattcgaccatattgtctgggtccgaggagctgcggcatcgtttgagtgctgggaaaatatccagtcaagcgcaacgaggaacgcattagcatttcagccaacctccgtccaccggttggcatgacggacccaaacccaaacccaaaccgaaacccatacccacttgcctcgtcttgactgccgttccttctggacgttctttttattaaccacgcattcataattcataattccaatttgctggtctgagccgagttcgagtccagttcaaacaacggcccaaggaaggccatagaaggaatagagggcaggtcccactaaaggagcagggcctgagtaatgtgtgaacatggctttgaagcatgcaaaggcttttagccgcattgcactgccggatggggggagcgcacaagtttgaatcatcagggattacagtatgtacgattagagtattcaatattactgtacttagggtttgccgtagtctcccaatcacatagtttagttatacccttggccagtttaatggtctattagccaatacggatcgaacgttagcctcattcttagggcttgcccgaccgctcagccattaacctcatccaaatggcttctaatggtagcgcatgccatgcaaatgctctaacaacaaaagagcgaagaaacacttggctgccactccatggcgagcgctccttctgctggagaagtgcatccgagcagtgccaccaatcttcaataccacgtactccatcccccaatcctcgaatgtggcgcacgctctggacaaactgcagctaactgccataaagcggcgtttattttgccacaggccacttatctgcgaggttgaggttggggctccagctccagctccatctccaactccaacttcaactccttctctatctacaactccgactccggctgcagcttttcagctctttggctcgggcctgatctcgacttggcttggcccgggcttgtttttgttttcattgctgcgcctgcgcattgccaagacaaccggcgtcgtaaaaagtttatgcggcgttgcgatttcgcaaagtcctcgcgtgggatgttcataaaatccctattaacgtattaaggtaatagcttgtattaaagtatatcaggatacttgaagttgagattattttacgagtacagtaaagttaagaactcattagcagaagtaagttattattatgaattaaagtatattggtagtactagattttacgttacttaaagcatatttttttctaacataataaacctaataattttgaatgattgcctacaaagcatgaagttcctcataggaatgaagtttcttggtattttcaagtacacatgttgagatcatgatatttcgcatcgtataaacgaagcccgactggcaatcgctgccagtcgactattaatttgaattcaagcagtcaaacgctgcctcggccgccaagtcaacagccacagcaacccaacaacaaaaacgaatacccagccacgacgacttggaatcaatggatccactttttccccgatgcgtaggcgaacttgattcacactgagatatgcgttccaccgaactttgatgtttcgagctgtgaaccagctagctgcggcttccactcgcagcttttcctgcttttacctctgccggccgtaaacgatttcttgcttgttggattgttttttggccccaccatcaaagggaggggtgtggaaaggcaagattctgtgggaaagtttccccaatcgaaatgaaattctgtcgcgggaattgtccaacatgcgcgtacacatgttgcagctgccatccgcccaggaatcacactcccaaatcagtatctccgatctctagatggtaatattatctctctggtttgtggatcgcagcttgattgcactgctgattgtttcgtcaaatgcataatttaaatcgaacaacaggcgcccgactgtcaacggcctggggccacgttatgattggcttttcaggtggtcagcaccacctgggattgggattgtaccttgggaaatggaaagtgctgaaatgggtacaaaaagataaaggcaaatgggccaccaaagtaaatgagatatgcagaaggagcatgccaaacatttgactttaagattccattataataaaatatcttttaaaacataatttctgtacataaagtattacttgccacaagttcttcgaaaacatagaatcattttaaaacaatgtagagcactgccatgaatttaagaacctaacctcttatgacctctttcattatgtaagcctactcaaaacgagcatcaatataggaacagggatattgggattggtacctatgtaataccgccataaaaacacacgcacacacgatagctgccacaacaaaggatcaacaggtgtgcatgtcattagcacaagttttacggccttttaatagaatcgatggtctttcaaaagaatggggctctgaatcaaagtgaaaataaacaaagcgttgaccagattcagatgacattcgttgggttctaaattagaatgattgggaatggagttttggccatcggttttgggcctaccacacacattggccacatttcatcgataatgaaagatgacagtaacgagtcggcgtcgtgacaacatttaaggcaattttatgcaaattaaaagacggtcggtcagccagtggcgcaccttgcccgcaacaacccagggcgaagtaaacaaaccgaagcgattcgaagacacctacaacagaccgagctcctagcccgatctttgggagccctttacaataatttactcaaatttatggcctacgttctgtgaggctcctatgcgcgtggccagtggattctcgcatttcccgtggggtcgttcgtggtcggggaaagaataacagaaatcactttaggtgtcttgacacaatgaagtcagtcagtcctcagaatcgacttggttgggtgcgggttctttatgccgggctcacatttaactaatttatgcggctgcctcaagtgccatttgtggtccagaccccacatacctctatgggtcttccgtagtgccaatggttttgttgcattttgtccaacaatacgaggagtatctaccaaaaatattcttctccagttccagctccgttacatcgcataacttgttatagttttgtttaacatatttatgactggtgttgcaggtgggttaccagttcgatataatgtttttattagggtccccagcagtgctgtgggtatttagcataattatttttggcagcgccagaacaatatttaccactttattattattattatttcccattgtgacaagctcttccggttccaagctaacaactttatatggttgctgtgggtggattagtatctcctcctcctattcagttatgaatcgaaatttctatttcgaatcgccgcctgaccccattaataatcttaaacagatcaaagagatctctcgatggataaatccgtttcttggactccatttgaatatctaactcaccgcgtgtagattattcaaaacgcgataatgcgtaagaaatggaaaatctcgcagtgtaagtggggattaggaagtcttcgcattcgaattgacatatctacgatctacgatgcttatcagatgcacagaggtgagagaacaggttccacatgattcctcacatgactcacggccattaagcccaatccacttactgtgttctgggtaaccagcttatgttcatggtcgcgttgctcccatttattcgtagaattcacacagggcaaatagaggcctaaatgtgtcttcttctcaatgtggccatcacgtgcttatcaatcatagattgagatatgtatatggatgcatatggatgcctctggccagcttgtcaaggaggcgctgcttggctgtttgactagatcatcaaaccataaacaacatcaaattgccattaaggccaaatgcaaataattgcacagtcaggacggggataagcctttcggatggcggcgcttttcaagccctcgctgtcgcagcatgacaaatacaattaacatggatgcgatggccacgcccttgacgccattaaaagctccacaagccgcgttaattttcctcgcacgaagagcacacgcacaggattatatatacatatatgtgtatatggttggtatataaggatgcaggagggacttacggatagcacatgtgatgggcgcaggtaacgcccggcttgcagctcttgccatcgccaatgaagccaaggggacagtggccacatcggggaccggccgccgagtccaagcactccactcctggggaggaaaaacacaagatcaagctttaagatgcaatatctctactgatttcttgttctcagttaatgagtactttaatttaagatttagtttaacccaattatggccaacaatttgggcaatcgcacttaccaggataacagggattggcggaacggcagtcgggctcgatgcgcagttggttgtcggtggtgaggggattcttgcagccggcacagttctccaggagcatacgcaggtaggcaatctcctggcgctggtgggcgacgtcttcgcggagcagcttcaccagagccagtaaatcgctgagcgatcgtgcgagggcgtctgtttttggaacaatggccagagcgttacagttgagataagtcggattcgttggggactttaaataaagcaacaataattcacacaacaccctactccacaccctgcaaaaaaaaaagaagtcggcgaatgtgtgtgggaagcgttcaagcggctgacaagattaaggtctaaccgatgcacccatttcgcactcactctctgattgcaacctaatccgctttgtcgctccaatggatccaggactacgaacagctgctaatgcgaatggcgttttagtgcagcttaatgcactgggacaacagaaccgatcacctaatcccaaacccgcaactcactagggatgagtcagtggtgttaactgatcaagtgaaggaaatggaataactcaggttctaaatatatgctaatttcgtgtgtaggttgattgttttgcaagtgattaatcttgggtagaattcgcgaccggatatgggtcatcgattctcagcggaagcattcttcaggattttgcatcttgaaaacttattaatgtttactaacttttaaaactgctctacagatttcactttgttctccacatatctcaatttcttatgcttatcctggcaaagtcaacaaattgcaatatatcgcttatagatgtgtcatctctaggccttttggattgtacaacaccatgtacgacaccatggccacaactaaactagttcagcctagtggtccgttctacgggcacatctgtctgattttgtcggtttacctggctgagtgagttttgtcaacattgaaaacgccgccgcctcaacgcccaaacgcatccgttccaagtcagattggctgccactccgtcgcggctcctctgctcctcccatctggggtcctcgccccagcaatctcgatctcgttttggttacatttggcaaccttcgcttgcatttggcgttcgttggcggcgtggccacgtaattcattcattacgatttgccgttttcgttggctttgcctttgccgatttatatatgccgccccgtactcatgtcaagtgcactcgaaaaaaaaagtctgctctcaacattaactatcataacatagattacatttacaaagaagtatatataggtgacagatctaaattttatataaaattttaatcatttttgcatgtgcacaactgaatttctctctgtgtagattgtgtgggtacagatcggagctggctaccaatttggtgtctttgctctgagccagataaataataattatgccggctcgacaccaggcaatgttgggaatcgagtgcacagcttatgcgcggctttgtcatatctcgagtgttcattagtgagtgtgcactgtgggcgcctcgtagccctccattctctggatatatttgccttttaccgcgatcacttaacggcgacttattggccaagacattgacaccgatgagggtacctatggctatattacactggcatagatagtgctcgggtcattattaattgcttgccagatttataaggcattagcgagttaagcgagatggtttacgacttggcggcctaatgaagaccgcaatgctcaaggacaagcaaatcgatattggggaatcgtatgacaagggtattagccttctgacttgttttacatagtaaacttcttgccttgccagaactaaattatttgcgtattggttaagcagcccacatgatttctgttctgccatataaggaacccttcttgaacgctatcaatcaaagtcagttctattattttgacagctacgttttcgcttccccttcaatgaaatgaataaaaataacttacaataagattgtaggtaatttcatagttctaaagaatcaaataactttaaactattccaaaagattgcaatttgagaatgcctgtactggttttcaaggcctcgttcattcacttgcacatgccattgaaatctgaagcccccactcgatgcaacaacaatcccccgccgaatcagttccccagcccacacacataccccatttcaggttgctccactacattcgcctaattgaattatgttcctcgagtgacataaacgccaactgacaaaggccaaacaatttcatcaaaacgagcctctaatctagcaacagcccaaccctcggcgccgtaggaagccctcgtcgttttggactgggggccacgcctttgggccaagattcgttgactgcctcgagactaccgactgacagttgataaccgactacggagcagttgggtggatgaggtggtggtgaactgctgttgggcacctaccttcgcaatcgccattcagaacgggaatatcaccgcgctccacgtccgttggcacctcctggtgtctgtgatccacgactccttcccgggcgatcgttggctcataccagccgcgcacatcgcgcttcttgttcttctctgcaaagattggagcataccaagcagagtatatgtacatataagtgggttgtaggtagccaaggatgcgcgggaataactcaccacgctcggtgatcttgttgcgcagcatgcgacgattgccacgacgatggttgcccttctggcaattggcccgctgcagggagtgctccatgtccccgtcgaagtgaaggggatacttgcgctcacggaactgtcaacgatatggttcacttatcttcaatgccacttgggagcaccagcaccactctactcaccagcttgatcaccggatcgtccatctgggtgtacagcttggccaggttcatgtcgatgtcgtgatgcgtgctcgccttgcagtccacatggagcgttatgcgattcttggagaactgcagtgccagggatcggatggtgcttgtctcattgatgttgggtatctcgaagttgcgcgactcggtggctccgttcgcactaatgtccaacgttacccgctgctgtttgcggtccaggaagaaggacatcttgtgcttcagcatcgggaagtcgatcatgaagagtgcttctatggatatgtgcaactttcgacgaggtctaattgatgggaattcatagttttagaataaatagtgttatcgttcgttaattacctaatgtgtcgcgttgatatgaccacatctcctttgcgtataaactgctccagttcagcagaagcaactgcaatgataacatataaataaatcaaattcattctacattcctttctgattttcgtgccctatctcgtttggcattggttgatcagtttcgaaactgttaagaataacttccgttctaccttaaccacacatattgattacaaaataaacagagataatgctcaaatcatcattggtccatgtttgttaatctcttcaagtaaaccccgtcttagccacttgctctgtttgcccacaaacattggcaatcggttatttcgcctgccacagattacagcacctcgaatacggaacatggaactatttattttggtcacccagggagattgtctttaatacccgcggaccgtgttaacccaaataaatacacgatcgctatttgcacaatccgtgtgtatgtaagtgaacgaacaactgtgggtcaaagaatccatcaagacgactctatatagaatttcacgcatttgtgcggttatttgtcatgctgacagcgaccgacttttgacaggctcatgccaggtgaccttcacgacatggatgtggacttgggcataggtatggaaatggacatagttttgggaccggggacacgggcataaaagcctctggctcgtgatcgggctgtaatataaccatctacggagcagggaggtcgccaactcagaaactggtgacccggctgtcagctggcgacgtttgcattgggatttgagtacaatatttacataaatcgccaagttgttaaccaaaagtatggctttcgggcggattttagcatatattggcattgcagctagttgctttgctggccataggaaacgtaaagccatatgtgtacatacactgatcaacacttaggaaccaatttggatatatttttgtaatatacaattggttaaaagttaaaaattatcaatgaatctatctatctatctaagtattttaaagcgaataaactgacttgctttgtatagatatcgtttgagttctgctacctttatgttcataaaccacgcgaattcttcagctgacttattgatacaaccttggcttttctcccagtgcagctgaggaaagagttcgctggaatgcagagcggcgcgataaaggtgcttcggatgcacttacctggatcgagtgagagtgatgcaacatccacaaatgtcagcgccaaggcggtcaacccgattaacagcacgcgcgtccaattcatcgtgttcgttgttgctggtgtcttctgtgatcttcggaagcaatggatgggggtgcgggagtgatggaccgtggggtatgagcgcctcactccaaaatctttaccgtccgctgaaatataaatataaagaaagaaacgataaagtgaagaaaatgggatcccggtcgtcagtcggtggttgtttatttacgtttaaaaataaaacgcattgcgtggaggagcataaaataaaatcgcatcgagtaataaataaaattcaaataaaatttttgtttagcgagaaaagtattaaccgggacagaagtatagcaatcggtaaatattttgcagcatttttgggattctcaacaagcagctcccgcttcacatttttcactccccactttgccggaagtacttggtcgggtatcacctatgtatatagatttagctatagatatttatataggatcccccctatatctttcatctctttggccatctgtgggcgtcatcatcataaagcatttcggagcttaagttttatatttctcgttgtaatttccccgtgtgcccattgtggattccttgagctgctcgagatttatgttggatatttgcaatcattctttatcgtatgcctcttatttaacttaaataaatgtttatttaatgtgtgtgttcagatgtgttttcaggtgcttcttcaacggaagttccgaggaaatgccgattggagcttattatgccgattttggttaattgaaactttttcttggaagggcgcgagaatgggttggtcataattgcttcacaaagtatcattcataatattatgcaaagctaatttatccaaacttttttcattgcctccattggaaaacttctttcatgattcacataaatcttataaaagggagctagcagttcagcttttaatgatcagtgaaatgaaatagaatgtagtaaattttgtgatcttaaaaacagaactaagtacccaatgattggcgtaaaacaagcggtagtcgtaaaataaacccaaaaataggtttaggacctatccatcaatctcaaaaataatccattgcaattaggcctttagctcatcacttgagcagccacagatgtcagcaagtgccataaactgcataacacacaaatccaattgatatagacttacagtccagcccgtccagccacgagctcatcctccccaatctcaactccaactctaactgccagccattacacaactttcatgcttaaataaacacaagaaatgtggccgagatgttgttggctttggctctgaggtgtcccaggaatgtggtaacggtcgccgatgctccaggcacaagcaaccacattgggattcacattcggagccgggccaaaaccaaatggcgttctggccatacaagacacgacgacaacttcaccgatactggtccaaaatgttgactgacagttatggatttatagtggcagtggatattgctgttgttgacttcacgttctcccggctacaatgtcactgagtcacaagtggacgacgggctgtaggatctgttccgtttatgggtgtaatcgcaattaccggacctgggctctctatctccccacgtagtaaaactagaagaaacggtggcagatcacatactcttcgatcgtattttagggtttttattctccattcgacagatgtgatatcagagtgctttagtatgcggattaagatggacagccgagtagtactaggctttgtagtgggcgccataaggaagttgaatcaataaaaagaataaagtggaatgaatcctacatactcttaccatatcgaaagtcgcacttttcaatcatctatcagtggaatcttaagtatctgaaccaataaactggtaaataaatctattttcaattgaaaattgaatttatctacggtagattaaacataaaattcagaatatgtaaccaatgttttaatatattcccatcttatgagaaagagatccccatacattctaaagtcttaagtcgtccgagttattcagccatttcaaattccctgaaaggttatcaagaacttaacccaagcataatgcccgagatctgtgccaagtgttcattgaaacgtttattaatactcagttaagttggcctccggctaccagaacatttcccaccaaatgtcaaccgagtaatccgccgcaagcataaagaaaaaccgaaaccagcggtggaaacaccttcgagtgtacacctaaacgcatacataatcctcaggcctgaaatttattaaatactttttaatgccatcggtttggtatagatcatgcctagaccaggcatatatctttgtccagcacccacgcactcatcaagttgaggccccaaaaaacaaaatcccgccatggagacgccaaagaggccatcgtcagcatggtgaagacgacgccacatctacatgattattaaagcggacaaaatcagaaatcagaatcaaagtccgtctccataaagcgacgagtacattgattgacatttaattaagcaaaagcaaatgcacacggaagccgcaagccgatcaatcggcaaccaaaaccgcaactgagaagggttggatgctatccagatcatcatcttcacccactggccgggtttggacccctcctccactgattccaagccgattgaacaagtttggcgtcactgtcattgcagtgacaaaggcgtttctggtcgatcatcaaaggaaatttgatgcttatcggaaaagtcatttcatcagattaaacggctggccagaagagaggcaggcgaaagggaaaccagaaccctgggtagccagttggcagcgagggtcgatcgaagggtatgatctacaccgcagagggatgggagatgcatttatccaagtgccactttgatgtggtaaatgtttttatagctactaatcccatacatacatacttctgctttgggagcttaggggcctacaataatattatgattagcctgagagataattaatgctaatggtaaagaactattatgacaatcctagtggttagttaagtggttgaactgttctataaaatacctagaatatattaaaaaacaattcgaaagatattgaactatttgcttgtagttcttataagatgagtaccaaaattcgatagcttttcgatgatttatgttacactcctaagtctgccctcgtgcggcattagaaattcaaatattttgactcttttttttcgatcgcgccagcatgcaaccgctggtaccggtggtgtccacgtccacgtccccccgggcgtttaaaacggcgcaaaaactgaagcaagaaggaaaacgctggcgcggctactgcgcatgcgcgacgcgagttggcagcggttaaaaccgcgcttctgcgcagtcgcgtgtgggcaggacaagtttcgctgccgccgcgggcgtcgtgtcactgaaatcaaatcagccgggcttaaatgctcagccaaaaacttcgctgcgagtttgtggggctgtgagttggagctgtgagttgttggagctccaagcgctcactgaggctggcaaacctgctgtcagtcgctggtttgacatggaaaaaaaaaatctatgccggcgcctacgcagcacgagagtgaaaaatcgggagaaagagcgcaatcgcgctgttaagccacttagggaaattcttcggcggattttcatttgcagttaactttcttcaggctttgtttaatttcaagcagtcagcctattataattggaggcaaccaaatagagcgaggtgaactgaattgatttcgagcagcctgataaattggtttcatcataatggactttgtgtaacttccggcgcagtccaagcatttttttgaacgttgttttggaagtgtcaagattaggattggattcaatgtggagttcaatagtctcggacggcacttgacgtcgtcattttattgatttctgtatttgtatcgatttgaatttaggcccggtctttttgtcgtcgttttcccattcaatttttgactatttatattcgacaaaaatgcagtagttgacagctgaaaatgtggcttttcaggtgttatatggagtcctatttcaaaatattgaaaggtctgtcaattataagtcgggtgattgagatttctggtatggtaattgccacctgccaagttgctcaatcgcaacagcagagtacataaaaatgattgaaattgtaggtgtaaaaacgcataaatcacaatttaaagacccgtaagaatggtattattataatctctgtaatcttgaatctttaatcttgcgttgagctaaacatgcatgatgactactttttgatgtaagcatagccagcagctagaaactgtctcaaatcgtattatattgccatcaattaaatttatacagcggctatataattaaatgtttatttttaccaggtgtttgttggaccgcaccttgctatcagtggtcgtctttaaataatttgcatatcttcgcaaaatatctaaggaaaataatatgcgtgatagatgctactattcttgcccggataaaagtatacatttcggcgcaattttcgttggcaatcttgtcaaatcgcttgagaatgtgtttaatctgtcattaggccaaaaccgaaaacccattaacttatgttgatgaaccattaaggcaaagtcgcgtctccattcgacttgaattggttttgaagcccgcagtccaaacggccaacacaaatagccttagctgctattgtgactttgctccatttgaattgcaaattccgactgaagtcaatacaaagcattaaaatttgttagcctgatttgccgcagaaggttcggatattggtgtccaaatgactttccactgacgatgcgctaatttgctggtgcaacaattttccacttaatttgcatttgtttatgaactcataactcgctgccaagcggaaattccataactaacaatggcaatattatttatgttttaataatgtcaaactcgagctccaaatatggccagcaagatattaccatgtctgaagagtcatctctgtgtggagcgccaaggggtgtcaatgtttggacagagaataagaaaacaccaagctccatatttgaataattattcagtgaatttctgtcacatctcattgcaaaactgaacagatcgatcttatttgtccgctctattgaagggaaagtatctatctattgtatagatacatcgatacaacgaagtcataggcctagctaaaagtatctcccaactattggttactacatcttcaagattaataccccttcgggtcacaacgccactgccgctaaataatatattcaaataataaaataaccgcaagtctgaaatgtctctcgaacaggcagttataaattgttatggggatctttgcagtgggcgtcttttaattgaatcgcttggaattgagtagcagagcccagtagaagctgcaaagtgattgggaaatcgagccaaataaaattaagtattttaaccgttgttggggaatgtgaccagcttcatttggtcaacatcattagcaatctgtggctgccgtttcgaatcacaattcatatttgttggaggggaaaatattctgtgctctgaccttatatgatccacataattatagttctcgcaaaggcataaacctcaatctgatctgctttaaatacgtgtggaaagtccggtaattaataaattatgactcgactgcggtatttatggcgccaatgcagataagatctccccagatcccccatagattaatgtcgctcgaatggtgaggatgccacaggccgattttgccgccagattgcggttgacttgggtgtggctaattaatatgtatcgatagtatttgaattacaacaacaattagcttgatttatcatcagatataaaatggcggtgaaatgaatagaaatcttgtgaggcgctcataaaaaatattcatagattggcctatcaacaacttggtgattatcatgcaataaagtcgaatgaaaaggagttaaactgctgtgggtgtgcagctagaagatgcgattctttagtctacagtctgttaagattgaaaacaagaaattagcatttagctattaataactttctaaatgaatgatattaataaacatagacccaagtcgtgattacttccgtatatctttcgtttatctttacgatcctgagaatatgttaaaaatgagatgatgcatcattattaacgcaacttctttaagaacaacttaatatgctctagtaccttccaggcacttgaatatggaatgcacttcgcacctggccacttggcgcactcattttccgagtgagcggagtgtagcccagattttggccacacgaataagcagcatatgtagaagcccggaggtctggcccaccttcacactcacctcgtggtcaaggacgctgctcttgctctagaggtgcccccactgcggatgtggatgtgatccaagtgatccacttggcgggacggaactgacagctccttgttgtttgtgcggctcgtttgcgccacttgcggctgtcaacgcgcaatttagaatggaaacgacctgagttatttttacgagtattgccacacttttccgccgctttttcctggacgcccgcacagacacttttattatgttgtacttttgcagagcgaaagatcaaacacgtcgcaagggtatcttcacactaaaagaatcgataacgaaacggatgcattagaccatttaaacccttttcgaaatacgcgccaggtagaaaagctggattttggaatggggacacacgcgaagatttcgtggagtcgattttatggaatcgcggtggagaacacgcgacgccaatgcctacaatcctccagcaacgacaactgctccgcaactgactcgcccgttcgtgccaataaaaattaaaacacttttatgctattaaggcgaacgcgacgcgatcttggacaccttggatgcagaggatgctgcttgaggatcgatcggatttaaaaatatgggcaaaaaactttgtacagcgcgggctgatttcaaaagcacacttaggaagcgtttgaaaactgaaacattctcgcgatagttcgatcgattgatgctactgatttatcgccaaaactaatcactgatcacttatcgaagcacctaggacacgcaccgtcttgttcaacgttccaacgcgaactgaaactgaaaatttgaaaatgcaaagggaatgatcgacgcgcagcgtcgactgaggcagcggcagcgctgttggctggagcaacttggagcagcgacaacttgttgttgcctttctgcgtttctgttttgttctcagctgttgttgttgctcttgggagaaacgcggcattttgtcttcgtttgtgtttcttttgatttgacgcgtgagtaagccgcgacgcccacgtgcaaaatttgcgtaaacatcgacagtgtggccagatcgctgctgaataattgaggaagtgagtggaaaaagtggtagtcaactttcagatctcatatcttccgcttccttagtaaaaaataaaattttataatgggtaatcttctttaaaatataggaaatttaaaatttattttctatatagaaaatgttattttaaatattctgtaacgatcagcgcagttttcgtttgtgcgctttaagttgcaattatgtaatatattgtttaaaa

SEQ ID NO: 23738 - DNA, 3669 bp, DROSOPHILA
tgtgaagatacccttgcgacgtgtttgatctttcgctctgcaaaagtacaacataataaaagtgtctgtgcgggcgtccaggaaaaagcggcggaaaagtgtggcaatactcgtaaaaataactcaggtcgtttccattctaaattgcgcgttgacagccgcaagtggcgcaaacgagccgcacaaacaacaaggagctgtcagttccgtcccgccaagtggatcacttggatcacatccacatccgcagtgggggcacctctagagcaagagcagcgtccttgaccacgagcggacggtaaagattttggagtgaggcgctcataccccacggtccatcactcccgcacccccatccattgcttccgaagatcacagaagacaccagcaacaacgaacacgatgaattggacgcgcgtgctgttaatcgggttgaccgccttggcgctgacatttgtggatgttgcatcactctcactcgatccagttgcttctgctgaactggagcagtttatacgcaaaggagatgtggtcatatcaacgcgacacattagacctcgtcgaaagttgcacatatccatagaagcactcttcatgatcgacttcccgatgctgaagcacaagatgtccttcttcctggaccgcaaacagcagcgggtaacgttggacattagtgcgaacggagccaccgagtcgcgcaacttcgagatacccaacatcaatgagacaagcaccatccgatccctggcactgcagttctccaagaatcgcataacgctccatgtggactgcaaggcgagcacgcatcacgacatcgacatgaacctggccaagctgtacacccagatggacgatccggtgatcaagctgttccgtgagcgcaagtatccccttcacttcgacggggacatggagcactccctgcagcgggccaattgccagaagggcaaccatcgtcgtggcaatcgtcgcatgctgcgcaacaagatcaccgagcgtggtgagttattcccgcgcatccttggctacctacaacccacttatatgtacatatactctgcttggtatgctccaatctttgcagagaagaacaagaagcgcgatgtgcgcggctggtatgagccaacgatcgcccgggaaggagtcgtggatcacagacaccaggaggtgccaacggacgtggagcgcggtgatattcccgttctgaatggcgattgcgaagacgccctcgcacgatcgctcagcgatttactggctctggtgaagctgctccgcgaagacgtcgcccaccagcgccaggagattgcctacctgcgtatgctcctggagaactgtgccggctgcaagaatcccctcaccaccgacaaccaactgcgcatcgagcccgactgccgttccgccaatccctgttatcctggagtggagtgcttggactcggcggccggtccccgatgtggccactgtccccttggcttcattggcgatggcaagagctgcaagccgggcgttacctgcgcccatcacatgtgctatccaggcgttcagtgtcacgataccgtgaatggagcccagtgtgactcctgtccagccggctacgaaggtgatggacgcacatgttcgctacgtaatccttgcctggacacaccgtgcccctcaggcgcccagtgcctccaggttggctatccgccctactttcactgcatctcgtgtccaatgggccacgaggtgaacggaaccagctgccgggatatgaatgagtgcctgctctacgatccttgcgacgagctggcgacgtgcaccaatcttagtcctggcttccagtgcagcccgtgtcccgttggcttcgatggcacccacgcccatggctacttcgccgactactactccgtggattatcgcaggcaaacgtgcctggacgtcgatgagtgccgcactgggttcttccgatgcccggagcattctacttgcatcaacgagattggttcctacagatgccaatgccacgaaggatatgtaacaaatggcacctacagctgcctagacagatcctcggtgttcatgtgtccggatggaaccgtttgtgaccgcaatgccgtgtgccttaggatggataacatccgccacaagtgtcactgcaatgtgggatgggcgggcaacggtttgatttgcggtagggataccgacgtagatggatggccagatcaggcaatcggttgtccagagctgcgctgtcagcgagacaactgcccgaagttgcctaattcaggccaggaggacgccgatctggatggacatggcgatgggtgcgacgacgatgccgatggcgacaatgtccagaacagccaagacaactgctggctggcctacaacaccgagcagctggactcggatggagacaaggtgggcgatgtgtgcgacaactgcgtgcttaagtacaatcccaggcagttggacacggacgaggatggactgggagacgagtgcgatggtgatatcgacaacgactccataccaaatgcgctagacaactgtccgctgctgccgaatcccagtcagtcggacgtggacaacgatggtgtgggcgacgcttgcgataactgtccgaatcttccgaatcccgaccaaaaggatcgcgacatggactttgtaggcgatgcctgtcacagagacatcgacggggatgatgatggagttccaaactcgctggacaactgcccaatggtcagtaactcggaccagctggacactgacggtgatggaacgggcgatgagtgcgatgacgacatggacggagatgggatacccaactacaaggacaactgtccgctggccaagaacccaaagcaggacgacttcaatcggaatggcaagggtgactcttgcgaagatgatgaggacgtagatggtgtaccgaatggcatggacaactgcccgaacaactcgatgattcatcacactgactttcgcactcttcaaaccattccactggatcccaaaggcctatcgcaagcggatcccaactgggtggtacacgccaatggcaccgagatagtccagaccctcaattcggatccgggactagcggtgggcaaggacgccttcggaggcgttgacttcgacggcaccttttatatcaacgatgacacggacgatgactacgctggctttgtgttcagctaccagagcagctacaagtactacgtggtgcagtggaagaagggcacccaaacctactgggagccacgacccttcaccgcctctgcggcgccgggcatccagatcaagctggtcaacagcaccgagggtccgggcccaatgatgaggaacagcctgtggcacgagggaaacaccgacggtgaggccaggctgctgtggaaggatccgaagaacattgcgtggaaggaaaggacctcctaccgctggtccctggtgcatcgaccggccatcggcctcatccgcctgcaaatgcacgagggtaaccgcctgatcttcgactcgggcaatgtgtttgactccacgctgaagggcggtcggctgggcgtgttctgcttctcacagaggatgattatatggtccaacctgcagtacaagtgcaataatcgtgtgaagccgctgatctacaatgatctgtccgactatctcaagacgaaggtggagttgcaggactga

SEQ ID NO: 23739 - protein, 1024 aa, DROSOPHILA
MIDFPMLKHKMSFFLDRKQQRVTLDISANGATESRNFEIPNINETSTIRSLALQFSKNRITLHVDCKASTHHDIDMNLAKLYTQMDDPVIKLFRERKYPLHFDGDMEHSLQRANCQKGNHRRGNRRMLRNKITERGELFPRILGYLQPTYMYIYSAWYAPIFAEKNKKRDVRGWYEPTIAREGVVDHRHQEVPTDVERGDIPVLNGDCEDALARSLSDLLALVKLLREDVAHQRQEIAYLRMLLENCAGCKNPLTTDNQLRIEPDCRSANPCYPGVECLDSAAGPRCGHCPLGFIGDGKSCKPGVTCAHHMCYPGVQCHDTVNGAQCDSCPAGYEGDGRTCSLRNPCLDTPCPSGAQCLQVGYPPYFHCISCPMGHEVNGTSCRDMNECLLYDPCDELATCTNLSPGFQCSPCPVGFDGTHAHGYFADYYSVDYRRQTCLDVDECRTGFFRCPEHSTCINEIGSYRCQCHEGYVTNGTYSCLDRSSVFMCPDGTVCDRNAVCLRMDNIRHKCHCNVGWAGNGLICGRDTDVDGWPDQAIGCPELRCQRDNCPKLPNSGQEDADLDGHGDGCDDDADGDNVQNSQDNCWLAYNTEQLDSDGDKVGDVCDNCVLKYNPRQLDTDEDGLGDECDGDIDNDSIPNALDNCPLLPNPSQSDVDNDGVGDACDNCPNLPNPDQKDRDMDFVGDACHRDIDGDDDGVPNSLDNCPMVSNSDQLDTDGDGTGDECDDDMDGDGIPNYKDNCPLAKNPKQDDFNRNGKGDSCEDDEDVDGVPNGMDNCPNNSMIHHTDFRTLQTIPLDPKGLSQADPNWVVHANGTEIVQTLNSDPGLAVGKDAFGGVDFDGTFYINDDTDDDYAGFVFSYQSSYKYYVVQWKKGTQTYWEPRPFTASAAPGIQIKLVNSTEGPGPMMRNSLWHEGNTDGEARLLWKDPKNIAWKERTSYRWSLVHRPAIGLIRLQMHEGNRLIFDSGNVFDSTLKGGRLGVFCFSQRMIIWSNLQYKCNNRVKPLIYNDLSDYLKTKVELQD

SEQ ID NO: 23740 - DNA, 3637 bp, DROSOPHILA
atactttcttcagtttcttcctgcgcctgcagccgaaatcgattttcgcgttatgtttcacgggttgggggggtggtggtggaggtgatggtgctagaagcgcggagcaggacgaccacgctcaggcggcgccaggggagtgtgtggacctcctttcgcttggatattgaatgtgccgcacagccgttacataaaattaaagggtccaaaaagagctttcaaaatttcacagcagcgcactccgctaaaaaaacagtttgttcgttcatatggaaacaaccgtatgcgactgcagtgtgaccgcacgctagcacgcgaaaaaatattgcctttgaacaggagcggttcagtaaagatatttgtattcaatataatagttatgtaaaactaaaacttgcaataatcccaaactattttccaagtaaaaactattattccgggaattgcgtcaaattagccttttcatttattaattttctttcccgtcgtctagtactagtcccgccgaccagtctctccgtgtcccaccgacatagttagatctgtaagttcgtatcattgctatttttcacgattcctctatacattcaaaaaaaaaaaaataaataaaaaattccccatgtttagaattccgccgttcctccatcggtaattattccgggaaaacagtaaacgggcaggtgcagtttccggttatcgataaccgttaccctgccctagccaacaagagtatgacctgacaaaggcgccacctagcgctcgtttcaaaaagaatgttaagtaattggcgctttaattcaaatatacatacaaattatacaaattacaaacagtgcggccgtgatattgtggatatttatttggaaaatagatatttaaagcaacccaactatgccaatgcgtcgggcgattttgaagtgtttcctaagatataccgtagtgaaacgtatgctctcgcaagttcgcattatccaatttgcatttctagaatagtgaacttctactccttgcgaattatatagaccaaactgaaagccaagctgcagaacaatatgggatagctaagcttaaggattctgtggttgactagacgcctcaagaaactcaagggcttgccagtttgttttaggtccggatccgtttcctcctccatatcgatttccgcctccgggcccgtcagcgtctccctttcttccgcttgctcactttctatcaagtctggagctgtttcaacttcgctattctcttctattctggcctgcaaaagttggcgcattaggtgcacattgtactccggatcaaatagttcatccaaagtaaccatctcgcgaccgttttgcaccgacccatctagtgagggatggtcggccagttccgggaccgagtcaatgcacacaatctcatccgccgttggatgaaacatgggctccaatgtttcagggtatttctcgaattgttcacgaacaagcctgtcctcttcggactcgctactttcattaattaacgtttcgagttcctccatatccgattcgggtacagatttctcggattctacgtctgtaggatcttgcggggtctcttggacgatctctgtgtgttcatctattggctcttcgcccaaatgctggacaatttcgaattcctttaaagattctatttccacggcagtttcctttatttctggaaattcccctttcggtgcaatttctttttccaccatctgtacatttcctggtataagttcttcgggttgtgtttcaggaagtgtttcctgctgaatatcgtttcctgtcagctgttccatatctagtccggaagactcggcaccattctccacatcagaggcttcattttgcaactgtgtatccacatcagtggcgtcatattgcacctgtgtatcctggtcaatatcatcgggcagtagattttgcatatctaaattattaaaagccacatcagcctccatttcggcgacgacgcgttgaagttccttgagagtctgctcctctgccagtcggagctccaactcgctgctagtgtccggaatcctgtcgagcatcggctgcagcattggactcggtctggccgacagcgtagtctgctgctcgtccgtggagcaatccaaattgatgccagaatcgtcggccatctgttgactttccatggaggagcgtcgctttctctcgggcatcagtgaactgtagatccggctgctggcactgggtcccaagaaaagtggagccggaattttagtgggcctaactcccgaactgcgaggccgcagctcactctccgacgaagatgggacaaccgcgtccacatcgttttccattgattgacattcttcggagtttttcacattcttgttgttctcagtccgcttcagctcttcctgggatggagttgcttgcacattgcggctggccatcgtggctatttggacgcataaatgaatgaggtcagcacaatttggtagagcactgtgctccaacttaccctttataaatttacgcaagactgactgaatttaacctggttaactagttcgacatccgtgaaatattatatcaatgttttcaacatgggttttcccttatttcggtgatcaaaacgttccctagcgaaagtgtgttcgcctaactgtggcaattgaactaaatggattgacaggcaatgtctcctgatttcacgtgcagccaggccaacttgattcagttcatttttgtgttggaaaacgcggctccaatggccaactggattggcaactcatttattaacttagtggtagcattaatacataatttggttagaattgatggcagaaaagacgttaatggctctgaggattgcgattcccctcagtcctgcaactccaccttcgtcttgagatagtcggacagatcattgtagatcagcggcttcacacgatctgttttgaaaagcatagaaaaaagtttagttcagttgaagttaccactttgtttcgatttcccttactattgcacttgtactgcaggttggaccatataatcatcctctgtgagaagcagaacacgcccagccgaccgcccttcagcgtggagtcaaacacattgcccgagtcgaagatcaggcggttaccctcgtgcattctgtgggtagaaggagaatgaagacatgggaaccctgtcatggtgccatcactcactgcaggcggatgaggccgatggccggtcgatgcaccagggaccagcggtaggaggtcctttccttccacgcaatgttcttcggatccttccacagcagcctggcctcaccgtcggtgtttccctcgtgccacaggctgttcctcatcattgggcccggaccctcggtgctgttgaccagcttgatctggatgcccggcgccgcagaggcggtgaagggtcgtggctcccagtaggtttgggtgcccttcttccactgcaccacgtagtacttgtagctgctctggtagctgaacacaaagccagcgtagtcatcgtccgtgtcatcgttgatataaaaggtgccgtcgaagtcaacgcctccgaaggcgtccttgcccaccgctagtcccggatccgaattgagggtctggactatctcggtgccattggcgtgtaccacccagttggga

SEQ ID NO: 23741 - DNA, 1574 bp, DROSOPHILA
ggcgaacacactttcgctagggaacgttttgatcaccgaaataagggaaaacccatgttgaaaacattgatataatatttcacggatgtcgaactagttaaccaggttaaattcagtcagtcttgcgtaaatttataaaggccacgatggccagccgcaatgtgcaagcaactccatcccaggaagagctgaagcggactgagaacaacaagaatgtgaaaaactccgaagaatgtcaatcaatggaaaacgatgtggacgcggttgtcccatcttcgtcggagagtgagctgcggcctcgcagttcgggagttaggcccactaaaattccggctccacttttcttgggacccagtgccagcagccggatctacagttcactgatgcccgagagaaagcgacgctcctccatggaaagtcaacagatggccgacgattctggcatcaatttggattgctccacggacgagcagcagactacgctgtcggccagaccgagtccaatgctgcagccgatgctcgacaggattccggacactagcagcgagttggagctccgactggcagaggagcagactctcaaggaacttcaacgcgtcgtcgccgaaatggaggctgatgtggcttttaataatttagatatgcaaaatctactgcccgatgatattgaccaggatacacaggtgcaatatgacgccactgatgtggatacacagttgcaaaatgaagcctctgatgtggagaatggtgccgagtcttccggactagatatggaacagctgacaggaaacgatattcagcaggaaacacttcctgaaacacaacccgaagaacttataccaggaaatgtacagatggtggaaaaagaaattgcaccgaaaggggaatttccagaaataaaggaaactgccgtggaaatagaatctttaaaggaattcgaaattgtccagcatttgggcgaagagccaatagatgaacacacagagatcgtccaagagaccccgcaagatcctacagacgtagaatccgagaaatctgtacccgaatcggatatggaggaactcgaaacgttaattaatgaaagtagcgagtccgaagaggacaggcttgttcgtgaacaattcgagaaataccctgaaacattggagcccatgtttcatccaacggcggatgagattgtgtgcattgactcggtcccggaactggccgaccatccctcactagatgggtcggtgcaaaacggtcgcgagatggttactttggatgaactatttgatccggagtacaatgtgcacctaatgcgccaacttttgcaggccagaatagaagagaatagcgaagttgaaacagctccagacttgatagaaagtgagcaagcggaagaaagggagacgctgacgggcccggaggcggaaatcgatatggaggaggaaacggatccggacctaaaacaaactggcaagcccttgagtttcttgaggcgtctagtcaaccacagaatccttaagcttagctatcccatattgttctgcagcttggctttcagtttggtctatataattcgcaaggagtag

SEQ ID NO: 23742 - protein, 475 aa, DROSOPHILA
MASRNVQATPSQEELKRTENNKNVKNSEECQSMENDVDAVVPSSSESELRPRSSGVRPTKIPAPLFLGPSASSRIYSSLMPERKRRSSMESQQMADDSGINLDCSTDEQQTTLSARPSPMLQPMLDRIPDTSSELELRLAEEQTLKELQRVVAEMEADVAFNNLDMQNLLPDDIDQDTQVQYDATDVDTQLQNEASDVENGAESSGLDMEQLTGNDIQQETLPETQPEELIPGNVQMVEKEIAPKGEFPEIKETAVEIESLKEFEIVQHLGEEPIDEHTEIVQETPQDPTDVESEKSVPESDMEELETLINESSESEEDRLVREQFEKYPETLEPMFHPTADEIVCIDSVPELADHPSLDGSVQNGREMVTLDELFDPEYNVHLMRQLLQARIEENSEVETAPDLIESEQAEERETLTGPEAEIDMEEETDPDLKQTGKPLSFLRRLVNHRILKLSYPILFCSLAFSLVYIIRKE

SEQ ID NO: 23743 - DNA, 7778 bp, DROSOPHILA
ttcaaaacaaatccaaatatacacaattcgattccgaagcgcgccgttgcagtgtgcccagctatgctgacgggcggtcaacttcggtcacactatttttaaaaatcaatcgatgttttttcagatctccgattttaaaatcactcgcactattttttggcttaatgaagtttaaatttatcatactttcggtgcccctaaaaagaaatgcccatctataattcctttctttctgctttgtttccattaaaaaatttagcaattattaattttttatttatttattttggttttgacttaaaaattaacagcacaacaattaatattttcagagagcttcgctttgttttaaatacagcgtatatatagtaagaaataggagggtcctaggtaatatcggaaaatgttatagatcagcaagtgaatcagctttgaaacttaaaaactaaaccgaatacaattagtccgttttcgaaacgatatatttacactaactggcttagaacgaaaaagctataagtttatgttgtgtaaaatacatcaaaaatgaaatagtatatgtttgcctgcgcctgtgccttataactttttcccgtaaaatcctaagagccggattctcgtcgacaccggactttggacatgctccagaatctccatctgaatataatatggtttgtggttttcgggcgattacaatatacatgttagcacatttttcgatgtcgaatagataagaagaaggaaatatgtccataagtatgcgattaaacttttgctaggccattcaatttggcttgtgtatatatatatatatttatgtatttaggaaaaactaggtaaattgcagaggcaagttctaaaaataatagaatcaaagaggctatatatgcatgtaatttatcgtgttataaggtatggtactagtgtacgttagctcgatgatagaaatcatttttatagcttctgtgcccttactgatcttaaatagttgcacaacaactttcagatttgtgtttattactagagttccgaatcacatttccataaacaaggataaactgaaaagtaatattctaatttgtacagttttcacattttcgatttcagttgagaccaattcaataaataacaaaagaaaactaagaacttattgaacttatatgtaagcatttcgatgatcgcctccaacctaaaagcaaacaaaatcattaacaaaaaattgaaaacactgggactttgaaaattaatatgaagtaatggtgaattttcgacttgagatgcgcttttatgtacaataggcgttaggaaaatgaggaaatcaactgcaatttaatttgtacttacatggttagtcgcgtgttagaatctaagaaataagattatgaggaaaaatacagaaattaaaagtgaacaatataaacaaacattcctgactgctgtgctctaagaagctttggttaatcagatttcaatttcactggctcgtggctaagttaatcatgtctgggtctccgtctgtgcttcgttacaatgggtttaccaaggaaaagtagacagaatcgaacaaaatattataaataacaaaaataaatcaaatacaaaaatagatagggtccactctttggattacatgaaattgttagcaaccaggctgagttcgtttgcaaggtgattggcttcgttcaagtgaacagactttaggaattaccaatgaccgttggttgacatggattattgttttttttttttttttaggatgaatgcagtttgtaattagttgttggagttgttggtattgttgttagagcaaccaaagttaaattgatagagtccgcatgagtttgttagatgattgattgattgtttgatcgattggtcgaaggaaagacagaaagaaagaaagatgccgcataaatcaataaataaattagatcatcgccgagagagttgttacattttggttacataagtatatttggtaagcatgcatttagtagtagttaacagtcaaaacaatattacataggtgttatagtatactggaaatcgtttgccgtcgcacaaacttaaacaattagtcaaccatactgaagggtgtaacttatccatcacttccgcttataccacaaaatttaacattaaaattatacaaaagcaaaagatcgctaaacaaaaaaacattttcacggccaattcatacaataatacgtctactttgccaaagtctctgtggtgtagattcatttggattttagtttagtttagtttttttttgaggtttttcgtttctttgttagtggccagcttgctacgcttagattagtctttggtgtctggggtgcttcgctcattcggttattcaatatttcggtagctagcaagtagatggtgattatcggcggtgtacttaatacttacgcgactcagggagttccgacgccccacgcctggtgccgctccggacccatcctgactgagaccgttcccggtatcattgtctatgcaaatgtccgagtccgagtccacgcgtctgaactcgcttccatcctgaaatgagtccgagtcgatcaggattctgtcgtcctcttgctgaactgcacaactcacctgcgttagttgctgtgtggtggtgagcagtctggcaatgggattgcagcaaacgggcagcgtctccagcaaagtgggtcgcgagtgcgtcagtaagggcttcatgtacctttgagtagaaagcagcagccttgagagaaatccaaataccgattgctttttggcactcacttggtatcaaagtttccccagatcctagcaagaatggccttctcgtggctgttgcgccggcgaccgccgcttgctccgcccaaactgccattcgtaccatcgacgggcgtgtccaagttcgtatctgttccaccggacaagcgcatcttgttgcgattaacgccaccgccctccacatcctgcaaataaccatcagactaacacagagttctattaaattatattagctctacttttcacaggcttccaatcaaattaaaaatggaaagtaagaaaattatttaaaaccacggaaatgcattgaatgatcattggcaaaacctaccgtctgtggatgtgaattgtccattgaattgtaaaccttttttagcaaatggttttatgtattaaggtgcgcagaaatgtataaataaacaaaatcgtgagttaaaaattattctttgaaaagaatggaaaagagaaatttgatattgagcaatgtgtttgcagacaccatgcttttgggaaaataccttttcttatcccttaattaacaacctatactaatctttcggcaaaattcggtctaagcacgtatatatacgtgatattttgtacttacactgtgcacttgatagttattgagttgttcagtctcatcgtccacgccaacgctgcaagcgagacagagtttgtgacaatgaagcaaaaccatttaaatgtacgtcacatgcactcacggtattttcaaccaattaagcaggaaatttgcagccccaccctgaattacaaccgtaaagatgacaatcagcgatgtggcagtcagcatcgtctgtcgttcgtccgacactgtatttcggatggccaaggcaaaggacatggcgccacgaagtcctgtaatataatatatatgcgttaaagaaaatacatggcacattatatataaaaacttgccagcaaagaacaacatatgctgaaagtttgtggaaattttcggctttcgctttatgttcagcagccaggacaagggatacacattcaccgcccttccaatggcagcgcaaatctgtgaaaaaaagaaaaataactttctgtttgggaacgcctttttaagtatttctatgctgaaaataacttacaaaagctgttataatgaaaccggcgtcaaaatgatgcttgggaaaggtgaacatcgatacgccaatgtaggaaaagataaaattctcggctagaaagttcaggagctcgaatatctgttttgtcctttggcgcgagtcctccgacaagttgttgtacgtgtagtgagcctggcagatgccgcagaagagcacggccaccacaccagtaagttccgtagcctcagccagcaggaaggtgctgtagctcatgagcacgaagagcgcggattctagcaaaggaaagtctcgaacccgagtaaatttggtcatgtgcggtgggagttaaggaagtcattagcataggtgttttctaattaatgcggaatagatatacatcttcaatgccactttgaggtaacaaaaattaactcaaattttaccattcacatgtatactgcccttaaataaaataatttatcattaatctttgaaaaggatatcaatgctgtcaagcatcccatggccgcgccaatcatcagggatagtaagaagatggagaagaaatcgctcaacgagcgtagaaaagctgtagtttcgaattccccggtattggaatagtgttcaccataattttgaatggctctataaagaaatgatgtcttactgattcccaacgaaaaaaaaagtagcaaacttacccactaaggactatggccacggcatcgttgagcacagattcgcccaagactagcgcatataggtttacgtcgaccctaagatcgttgaatatggctagaatggtgagcggatctgtgggcgatatcagagctccaaagtataaggagtccaggaatgtgaaactgctactcaagtactttggcatcagtttcacacagccgtacatgaagcctccgattaggaaggccgacaaagtcgtgcccacaatggcaaacgtaagtatggcacccaagttgcgaaagaagtatttctgcaaaagccaaatatatctcggtaaatttttttcaatacaattggcggctcaatgaacttacctttttcaagctatagcccgcataaaagataattgggggcaggataatattgaaaaatacctccggatcgaacgttgccttaagatcgatttcgttctcatccacatcgtgtacctgtcctcgaaacacgtaggcatacgtcttgattccctctggcggctttgtgccatttgtttgattaacggggtactaaaattaaaaccaaattgtaatatatttacatatattcgttctggccattaatgatttaccctaaaccaaagagtatcaggcggcaatttatcgctgtacgttggaactccctgaggctccacctgcatgtggaccagggtggcggaggtgccggcatatcgtataattgcacccacaatcaagcctgaaatggggtaaacacattagttttggctattgctgcagttgggatcgaaaataagttgaattgtaatgtaattttaccgggtcttaaatgaaataaagctagtatgactgttttctggactgacctatcgcaaagcaagggtgtgactaatagccgcttagaaaaatgcttagtcaagccatatcaagccttatcaactaagcaaccactcaacaggttcataattcgcagacggaatcagtgttttatgttcacgccgataaacaaatttgtggggatgattaatcgtggtgcgcataacaaaatgctttcactggccctgccggacgaatgctaaataatcttttccagtttacaccagagctgggctttgtcgacgcccaggccaaccagttttattgaattgtttcattagcttcaattagtcgaacgaaatcttgtttgctcttttattgctgcacataaacgaaattgttagaataacaaagtactcggcagattgccgcgatcatgaacgagcagtgaaaatacattcggtcggaaaaccccaatgatattgactgactaagcaagtcaaggtctcgtatacaatatctttgccgcaatgcattagctctgctgtcgttgcgtgcaggttctttcacggatattgatgttacttctaccccggggtggcttttactgcctcccatatgtgcgcacgtaatgtcacggttggcgtggacaaaggcgtaattcgaaattggtgacaacaaagaggtagcaatgaatgtggcaggtgaccgataatcaagtctttcgagctaagggaaacatggccaaaagggaaagctgcccgcgttaccaacgtaccgtagatgacggccaatcccgtctcgtggagccaggagacgcgatggtgtttgaaaagccaaattgtgagcactgtgagcgccagcaggaacacgaagactagaaggtccaggctctggatgcggtgattgagcgtggccttggcgtccagagcgatgtcagtgtccgtggcgctgcatccaggcgcgaggacgcacaatgcaaatccgactatgagcagcatgctgctccgccagcactgtagcttccagaatgtctgcgaccttgggtgacttcctgcgtccccatgaatacggtggggcgatgtcatctctacctcggggtccacatcgccgtgggacatactttcttcagtttcttcctgcgcctgcagccgaaatcgattttcgcgttatgtttcacgggttgggggggtggtggtggaggtgatggtgctagaagcgcggagcaggacgaccacgctcaggcggcgccaggggagtgtgtggacctcctttcgcttggatattgaatgtgccgcacagccgttacataaaattaaagggtccaaaaagagctttcaaaatttcacagcagcgcactccgctaaaaaaacagtttgttcgttcatatggaaacaaccgtatgcgactgcagtgtgaccgcacgctagcacgcgaaaaaatattgcctttgaacaggagcggttcagtaaagatatttgtattcaatataatagttatgtaaaactaaaacttgcaataatcccaaactattttccaagtaaaaactattattccgggaattgcgtcaaattagccttttcatttattaattttctttcccgtcgtctagtactagtcccgccgaccagtctctccgtgtcccaccgacatagttagatctgtaagttcgtatcattgctatttttcacgattcctctatacattcaaaaaaaaaaaaataaataaaaaattccccatgtttagaattccgccgttcctccatcggtaattattccgggaaaacagtaaacgggcaggtgcagtttccggttatcgataaccgttaccctgccctagccaacaagagtatgacctgacaaaggcgccacctagcgctcgtttcaaaaagaatgttaagtaattggcgctttaattcaaatatacatacaaattatacaaattacaaacagtgcggccgtgatattgtggatatttatttggaaaatagatatttaaagcaacccaactatgccaatgcgtcgggcgattttgaagtgtttcctaagatataccgtagtgaaacgtatgctctcgcaagttcgcattatccaatttgcatttctagaatagtgaacttctactccttgcgaattatatagaccaaactgaaagccaagctgcagaacaatatgggatagctaagcttaaggattctgtggttgactagacgcctcaagaaactcaagggcttgccagtttgttttaggtccggatccgtttcctcctccatatcgatttccgcctccgggcccgtcagcgtctccctttcttccgcttgctcactttctatcaagtctggagctgtttcaacttcgctattctcttctattctggcctgcaaaagttggcgcattag

SEQ ID NO: 23744 - DNA, 2617 bp, DROSOPHILA
ttgtttccatatgaacgaacaaactgtttttttagcggagtgcgctgctgtgaaattttgaaagctctttttggaccctttaattttatgtaacggctgtgcggcacattcaatatccaagcgaaaggaggtccacacactcccctggcgccgcctgagcgtggtcgtcctgctccgcgcttctagcaccatcacctccaccaccacccccccaacccgtgaaacataacgcgaaaatcgatttcggctgcaggcgcaggaagaaactgaagaaagtatgtcccacggcgatgtggaccccgaggtagagatgacatcgccccaccgtattcatggggacgcaggaagtcacccaaggtcgcagacattctggaagctacagtgctggcggagcagcatgctgctcatagtcggatttgcattgtgcgtcctcgcgcctggatgcagcgccacggacactgacatcgctctggacgccaaggccacgctcaatcaccgcatccagagcctggaccttctagtcttcgtgttcctgctggcgctcacagtgctcacaatttggcttttcaaacaccatcgcgtctcctggctccacgagacgggattggccgtcatctacggcttgattgtgggtgcaattatacgatatgccggcacctccgccaccctggtccacatgcaggtggagcctcagggagttccaacgtacagcgataaattgccgcctgatactctttggtttaggtaccccgttaatcaaacaaatggcacaaagccgccagagggaatcaagacgtatgcctacgtgtttcgaggacaggtacacgatgtggatgagaacgaaatcgatcttaaggcaacgttcgatccggaggtatttttcaatattatcctgcccccaattatcttttatgcgggctatagcttgaaaaagaaatacttctttcgcaacttgggtgccatacttacgtttgccattgtgggcacgactttgtcggccttcctaatcggaggcttcatgtacggctgtgtgaaactgatgccaaagtacttgagtagcagtttcacattcctggactccttatactttggagctctgatatcgcccacagatccgctcaccattctagccatattcaacgatcttagggtcgacgtaaacctatatgcgctagtcttgggcgaatctgtgctcaacgatgccgtggccatagtccttagtggagccattcaaaattatggtgaacactattccaataccggggaattcgaaactacagcttttctacgctcgttgagcgatttcttctccatcttcttactatccctgatgattggcgcggccatgggatgcttgacagcattgatgaccaaatttactcgggttcgagactttcctttgctagaatccgcgctcttcgtgctcatgagctacagcaccttcctgctggctgaggctacggaacttactggtgtggtggccgtgctcttctgcggcatctgccaggctcactacacgtacaacaacttgtcggaggactcgcgccaaaggacaaaacagatattcgagctcctgaactttctagccgagaattttatcttttcctacattggcgtatcgatgttcacctttcccaagcatcattttgacgccggtttcattataacagcttttatttgcgctgccattggaagggcggtgaatgtgtatcccttgtcctggctgctgaacataaagcgaaagccgaaaatttccacaaactttcagcatatgttgttctttgctggacttcgtggcgccatgtcctttgccttggccatccgaaatacagtgtcggacgaacgacagacgatgctgactgccacatcgctgattgtcatctttacggttgtaattcagggtggggctgcaaatttcctgcttaattggttgaaaatacccgttggcgtggacgatgagactgaacaactcaataactatcaagtgcacagttctgatggttatttgcaggatgtggagggcggtggcgttaatcgcaacaagatgcgcttgtccggtggaacagatacgaacttggacacgcccgtcgatggtacgaatggcagtttgggcggagcaagcggcggtcgccggcgcaacagccacgagaaggccattcttgctaggatctggggaaactttgataccaagtacatgaagcccttactgacgcactcgcgacccactttgctggagacgctgcccgtttgctgcaatcccattgccagactgctcaccaccacacagcaactaacgcaggatggaagcgagttcagacgcgtggactcggactcggacatttgcatagacaatgataccgggaacggtctcagtcaggatgggtccggagcggcaccaggcgtggggcgtcggaactccctgagtcgcgttggaggcgatcatcgaaatgcttacatataagttcaataagttcttagttttcttttgttatttattgaattggtctcaactgaaatcgaaaatgtgaaaactgtacaaattagaatattacttttcagtttatccttgtttatggaaatgtgattcggaactctagtaataaacacaaatctgaaa

SEQ ID NO: 23745 - protein, 727 aa, DROSOPHILA
MSHGDVDPEVEMTSPHRIHGDAGSHPRSQTFWKLQCWRSSMLLIVGFALCVLAPGCSATDTDIALDAKATLNHRIQSLDLLVFVFLLALTVLTIWLFKHHRVSWLHETGLAVIYGLIVGAIIRYAGTSATLVHMQVEPQGVPTYSDKLPPDTLWFRYPVNQTNGTKPPEGIKTYAYVFRGQVHDVDENEIDLKATFDPEVFFNIILPPIIFYAGYSLKKKYFFRNLGAILTFAIVGTTLSAFLIGGFMYGCVKLMPKYLSSSFTFLDSLYFGALISPTDPLTILAIFNDLRVDVNLYALVLGESVLNDAVAIVLSGAIQNYGEHYSNTGEFETTAFLRSLSDFFSIFLLSLMIGAAMGCLTALMTKFTRVRDFPLLESALFVLMSYSTFLLAEATELTGVVAVLFCGICQAHYTYNNLSEDSRQRTKQIFELLNFLAENFIFSYIGVSMFTFPKHHFDAGFIITAFICAAIGRAVNVYPLSWLLNIKRKPKISTNFQHMLFFAGLRGAMSFALAIRNTVSDERQTMLTATSLIVIFTVVIQGGAANFLLNWLKIPVGVDDETEQLNNYQVHSSDGYLQDVEGGGVNRNKMRLSGGTDTNLDTPVDGTNGSLGGASGGRRRNSHEKAILARIWGNFDTKYMKPLLTHSRPTLLETLPVCCNPIARLLTTTQQLTQDGSEFRRVDSDSDICIDNDTGNGLSQDGSGAAPGVGRRNSLSRVGGDHRNAYI

SEQ ID NO: 23746 - DNA, 2868 bp, DROSOPHILA
attgcttagggtctgttatacctggatagtttctatccatgcagccgattgccaggtgcttgccatccggcgagtacttgagggaagtgggcgactcgacgctgaagaccatggtgctctcgtccagattgcgccacagcatgacatcctgtccggaggacatggccaccatgccgccggacgaccagtccatcatgttgtagtcgacgggactgcatatgccaggcatctcatgggtggcattctgaatggcatatggtcgcgcccgtggattacatggccagtccgaatcggcggagtcgttatcgaccaccctggatcttgtgccctgctggctgctaaactgaaacaggcggcgctctccgatgccaaaggttcggttgatgttcgatatgaagccgctctgtcgccagtagctggcggtcaaagtgacaccctgattgtaaaagtcattttcaattaataatggaaagtatatatagccagaagtactgcacacaccgtttcgaggatatctcgctccttccgcttgccaatgtacttcaggttgaactcgatgttctcccgctcaaatcggttgggtatgaatctttcgccgacataggacacctcctgccccttgctcgtatcactctgcgcgaaaagaaaactacgtttaggtggtcaaattgttttgaggcccatcatcttaccttgtaggccgcctcctgtttccagtttttccgccgcacctttttgaagggcgtcagagactttttgtccagcttggaatttttattgggactgtcacacacactcatctcgacgaacattgaaacatttctgttttgctagcgccatattaaattggcaacggatcaaaaaaaacttacagttacaagtacagtgaacactcgataggagtgcatttggtcttctttaatgtttgccatttaaagtgtggagtttatacttctcgatgctttacatgaagatgttttaaaattcaagttaagatgttgctttaaattatttattttctaccttgaaatcatttagttaataaagcggactactgttattctagtatcaaaatctatagtacatgtcgcggacataatgattaaccaatggagcgtcttattggagttgtccataggttgccgcaggaggggcaaatatcgcgtctctgcaagtaggtttggatgcacccgcggtggtactggatgttgcaggacccgcagcgaatgtcccacaacaccaggcacttgcacagcgtgcagttttttatgttatcggcgtggttcgagctcaaatagaaactgagctcgacgaggctacgtggacctaggtagattctgtcggtcacctccatgaagtagcccatttggatccacttctggagcagctcctgcatgcggctcttcttcaacggcttcgagctggcctgtaggacgatatcattgtaggcgtcattccaggcgatgtggcagtcctcctcggaggcgatcttgtccagcagtttcgaaaagtactgacactcctcggcagtgagcccggtgttggccacgctgtccggcgtagcgtccgtcttggcgtaaaccaggtactcctcggccttgaccggatacttgatgaagaccagcaactggcccaagtcgctgatggtgtcattaatctccgccaccagtgccctaatcgcctccttgctgccgggctttgtagtcttgtggttggcacatagcggggccaggatatcatcgatcagctcgaagctgaggtagctgtggttcttgcacgcacgcaggaacccgcgtttcaccaactccattgccaatgactgaatatgtttcaaaacaaatccaaatatacacaattcgattccgaagcgcgccgttgcagtgtgcccagctatgctgacgggcggtcaacttcggtcacactatttttaaaaatcaatcgatgttttttcagatctccgattttaaaatcactcgcactattttttggcttaatgaagtttaaatttatcatactttcggtgcccctaaaaagaaatgcccatctataattcctttctttctgctttgtttccattaaaaaatttagcaattattaattttttatttatttattttggttttgacttaaaaattaacagcacaacaattaatattttcagagagcttcgctttgttttaaatacagcgtatatatagtaagaaataggagggtcctaggtaatatcggaaaatgttatagatcagcaagtgaatcagctttgaaacttaaaaactaaaccgaatacaattagtccgttttcgaaacgatatatttacactaactggcttagaacgaaaaagctataagtttatgttgtgtaaaatacatcaaaaatgaaatagtatatgtttgcctgcgcctgtgccttataactttttcccgtaaaatcctaagagccggattctcgtcgacaccggactttggacatgctccagaatctccatctgaatataatatggtttgtggttttcgggcgattacaatatacatgttagcacatttttcgatgtcgaatagataagaagaaggaaatatgtccataagtatgcgattaaacttttgctaggccattcaatttggcttgtgtatatatatatatatttatgtatttaggaaaaactaggtaaattgcagaggcaagttctaaaaataatagaatcaaagaggctatatatgcatgtaatttatcgtgttataaggtatggtactagtgtacgttagctcgatgatagaaatcatttttatagcttctgtgcccttactgatcttaaatagttgcacaacaactttcagatttgtgtttattactagagttccgaatcacat

SEQ ID NO: 23747 - DNA, 868 bp, DROSOPHILA
cttcggaatcgaattgtgtatatttggatttgttttgaaacatattcagtcattggcaatggagttggtgaaacgcgggttcctgcgtgcgtgcaagaaccacagctacctcagcttcgagctgatcgatgatatcctggccccgctatgtgccaaccacaagactacaaagcccggcagcaaggaggcgattagggcactggtggcggagattaatgacaccatcagcgacttgggccagttgctggtcttcatcaagtatccggtcaaggccgaggagtacctggtttacgccaagacggacgctacgccggacagcgtggccaacaccgggctcactgccgaggagtgtcagtacttttcgaaactgctggacaagatcgcctccgaggaggactgccacatcgcctggaatgacgcctacaatgatatcgtcctacaggccagctcgaagccgttgaagaagagccgcatgcaggagctgctccagaagtggatccaaatgggctacttcatggaggtgaccgacagaatctacctaggtccacgtagcctcgtcgagctcagtttctatttgagctcgaaccacgccgataacataaaaaactgcacgctgtgcaagtgcctggtgttgtgggacattcgctgcgggtcctgcaacatccagtaccaccgcgggtgcatccaaacctacttgcagagacgcgatatttgcccctcctgcggcaacctatggacaactccaataagacgctccattggttaatcattatgtccgcgacatgtactatagattttgatactagaataacagtagtccgctttattaactaaatgatttcaaggtagaaaataaataatttaaagc

SEQ ID NO: 23748 - protein, 235 aa, DROSOPHILA
MELVKRGFLRACKNHSYLSFELIDDILAPLCANHKTTKPGSKEAIRALVAEINDTISDLGQLLVFIKYPVKAEEYLVYAKTDATPDSVANTGLTAEECQYFSKLLDKIASEEDCHIAWNDAYNDIVLQASSKPLKKSRMQELLQKWIQMGYFMEVTDRIYLGPRSLVELSFYLSSNHADNIKNCTLCKCLVLWDIRCGSCNIQYHRGCIQTYLQRRDICPSCGNLWTTPIRRSIG

SEQ ID NO: 23749 - DNA, 3751 bp, DROSOPHILA
acgcccgctgcaaatactcaagccagtttatgaatagctattaatagaaatttgaatttcaaataagcttaagttgtgtcggggatagtctggccacgctgacaactattatagaactcagtgttggtaagtgtcggctaaacaaaacagctgatctgaaataaattctcatggtgcgttgatgtaacagcagccggcgaaagaaacttgtgcatttaatgagaaataaatataaatagccaaagtaaccgcacgtgccatgcaaattcgtcgtccgcgtggtgtcactgttccgcaattgatggtggtcacggccattgggctgctaggcggtatttacatttggcaaccgctgattttgaagtacaaaaacgagaagaaaaccgaggcagaaacgccagcagtaactgaaactagtggaaccacaaagttagcccgcacactaaaccctaatctgctggctaaagtcatatattaattgaattccgttctcgcccacagatgagtttcattaacggcttcaaaagattcgccacaacgacggttggtctgatggccatcggtattggatcgactgttatattctacaccacccatcgccttgtcatcaaaccctatcttctcgagaaacgacgcctggaagccgaggccagtgcggagtacctcttccagcaggaggttcactcccagattggcgagtcaagacccaaacggagcgaatattgagccaaggctgccagtgccgtcatagacatctttacatacttatagcctagtgattagttaccaaatttcaacgctgtaacatggtgaacaatgaatggacttttactttcttaccttcactttgggtggagaggcccatcttcttgtgttcattttagagttaaacagaatggattttttatgaaagtaatatgaattgaataaataatgaaaagcacaaatggtttgaataaaagactagaaacataaacaattaaaaatcactgtgctctgttcaccgtatgcctttgtacaggctcagggagctgcacttgtccttggccttttgctcttgctttctcaatatcgcctcgcgcttataggtgggaaagaagttccacagcgaaaaggtgtcgtccagtccgccggtggcaattttcgttccatccggattccacatcaggaagagggtgccgcgatcctgatgggacatcaagtcaaccacgcggtttaaggaggccaagaccagaatttcgcacactgcaaggtccgcatcatctgtagatattagaatacattatttttagcaagcattaaggatccagtgcagttctcaccacgccgaataacgttgaccagcaactcgcccgtgattttgctgtatgttagtgtctttataacgattctgtcatccctgcgcctgtacgaagccacaaattgtcggcgcgggatgttgaatatgaagatcgacgcagggcttcgctccgctgttaagataatattcatgttgcagatactctaataattaatctgccactatcttaccaacggctaaatcctctccagtccacggatgccagtcaaagactatggacctgccgtccaacttgagcaggcgaacctttagcaccgcatcgaagatgaaaatcttgccatccgtatcactggatgcgaaatacttatgggtgggagcaaacttcattttcttcaccgtgtgtcgatgctcgcgcaactgcatcagggtgtttagcgtgggcatggccagcacgatgatgacgccgcactgagtgccgcagatgacctctttgccgtcgtgggaccactcaatgcaacttatgtagcccatggacttgaagaacagcttgcggtaggagaccaagaactccgtaggcgacctcacctcccagaggtccagaacttgtacgaaagaggagggttagggctttacaaagttattgcttagggtctgttatacctggatagtttctatccatgcagccgattgccaggtgcttgccatccggcgagtacttgagggaagtgggcgactcgacgctgaagaccatggtgctctcgtccagattgcgccacagcatgacatcctgtccggaggacatggccaccatgccgccggacgaccagtccatcatgttgtagtcgacgggactgcatatgccaggcatctcatgggtggcattctgaatggcatatggtcgcgcccgtggattacatggccagtccgaatcggcggagtcgttatcgaccaccctggatcttgtgccctgctggctgctaaactgaaacaggcggcgctctccgatgccaaaggttcggttgatgttcgatatgaagccgctctgtcgccagtagctggcggtcaaagtgacaccctgattgtaaaagtcattttcaattaataatggaaagtatatatagccagaagtactgcacacaccgtttcgaggatatctcgctccttccgcttgccaatgtacttcaggttgaactcgatgttctcccgctcaaatcggttgggtatgaatctttcgccgacataggacacctcctgccccttgctcgtatcactctgcgcgaaaagaaaactacgtttaggtggtcaaattgttttgaggcccatcatcttaccttgtaggccgcctcctgtttccagtttttccgccgcacctttttgaagggcgtcagagactttttgtccagcttggaatttttattgggactgtcacacacactcatctcgacgaacattgaaacatttctgttttgctagcgccatattaaattggcaacggatcaaaaaaaacttacagttacaagtacagtgaacactcgataggagtgcatttggtcttctttaatgtttgccatttaaagtgtggagtttatacttctcgatgctttacatgaagatgttttaaaattcaagttaagatgttgctttaaattatttattttctaccttgaaatcatttagttaataaagcggactactgttattctagtatcaaaatctatagtacatgtcgcggacataatgattaaccaatggagcgtcttattggagttgtccataggttgccgcaggaggggcaaatatcgcgtctctgcaagtaggtttggatgcacccgcggtggtactggatgttgcaggacccgcagcgaatgtcccacaacaccaggcacttgcacagcgtgcagttttttatgttatcggcgtggttcgagctcaaatagaaactgagctcgacgaggctacgtggacctaggtagattctgtcggtcacctccatgaagtagcccatttggatccacttctggagcagctcctgcatgcggctcttcttcaacggcttcgagctggcctgtaggacgatatcattgtaggcgtcattccaggcgatgtggcagtcctcctcggaggcgatcttgtccagcagtttcgaaaagtactgacactcctcggcagtgagcccggtgttggccacgctgtccggcgtagcgtccgtcttggcgtaaaccaggtactcctcggccttgaccggatacttgatgaagaccagcaactggcccaagtcgctgatggtgtcattaatctccgccaccagtgccctaatcgcctccttgctgccgggctttgtagtcttgtggttggcacatagcggggccaggatatcatcgatcagctcgaagctgaggtagctgtggttcttgcacgcacgcaggaacccgcgtttcaccaactccattg

SEQ ID NO: 23750 - DNA, 1452 bp, DROSOPHILA
atgttcgtcgagatgagtgtgtgtgacagtcccaataaaaattccaagctggacaaaaagtctctgacgcccttcaaaaaggtgcggcggaaaaactggaaacaggaggcggcctacaagagtgatacgagcaaggggcaggaggtgtcctatgtcggcgaaagattcatacccaaccgatttgagcgggagaacatcgagttcaacctgaagtacattggcaagcggaaggagcgagatatcctcgaaacgggtgtcactttgaccgccagctactggcgacagagcggcttcatatcgaacatcaaccgaacctttggcatcggagagcgccgcctgtttcagtttagcagccagcagggcacaagatccagggtggtcgataacgactccgccgattcggactggccatgtaatccacgggcgcgaccatatgccattcagaatgccacccatgagatgcctggcatatgcagtcccgtcgactacaacatgatggactggtcgtccggcggcatggtggccatgtcctccggacaggatgtcatgctgtggcgcaatctggacgagagcaccatggtcttcagcgtcgagtcgcccacttccctcaagtactcgccggatggcaagcacctggcaatcggctgcatggatagaaactatccagttctggacctctgggaggtgaggtcgcctacggagttcttggtctcctaccgcaagctgttcttcaagtccatgggctacataagttgcattgagtggtcccacgacggcaaagaggtcatctgcggcactcagtgcggcgtcatcatcgtgctggccatgcccacgctaaacaccctgatgcagttgcgcgagcatcgacacacggtgaagaaaatgaagtttgctcccacccataagtatttcgcatccagtgatacggatggcaagattttcatcttcgatgcggtgctaaaggttcgcctgctcaagttggacggcaggtccatagtctttgactggcatccgtggactggagaggatttagccgttgcggagcgaagccctgcgtcgatcttcatattcaacatcccgcgccgacaatttgtggcttcgtacaggcgcagggatgacagaatcgttataaagacactaacatacagcaaaatcacgggcgagttgctggtcaacgttattcggcgtgatgatgcggaccttgcagtgtgcgaaattctggtcttggcctccttaaaccgcgtggttgacttgatgtcccatcaggatcgcggcaccctcttcctgatgtggaatccggatggaacgaaaattgccaccggcggactggacgacaccttttcgctgtggaacttctttcccacctataagcgcgaggcgatattgagaaagcaagagcaaaaggccaaggacaagtgcagctccctgagcctgtacaaaggcatacggtga

SEQ ID NO: 23751 - protein, 483 aa, DROSOPHILA
MFVEMSVCDSPNKNSKLDKKSLTPFKKVRRKNWKQEAAYKSDTSKGQEVSYVGERFIPNRFERENIEFNLKYIGKRKERDILETGVTLTASYWRQSGFISNINRTFGIGERRLFQFSSQQGTRSRVVDNDSADSDWPCNPRARPYAIQNATHEMPGICSPVDYNMMDWSSGGMVAMSSGQDVMLWRNLDESTMVFSVESPTSLKYSPDGKHLAIGCMDRNYPVLDLWEVRSPTEFLVSYRKLFFKSMGYISCIEWSHDGKEVICGTQCGVIIVLAMPTLNTLMQLREHRHTVKKMKFAPTHKYFASSDTDGKIFIFDAVLKVRLLKLDGRSIVFDWHPWTGEDLAVAERSPASIFIFNIPRRQFVASYRRRDDRIVIKTLTYSKITGELLVNVIRRDDADLAVCEILVLASLNRVVDLMSHQDRGTLFLMWNPDGTKIATGGLDDTFSLWNFFPTYKREAILRKQEQKAKDKCSSLSLYKGIR

SEQ ID NO: 23752 - DNA, 3543 bp, DROSOPHILA
ggcctccccttcttggtatttcgcttatgtgtctgagtcagacggtcaattttcaggctgatttttcgaaagcagagcaaatatgcactttgatgaccactttcacgtattatctgtaaacgggtttttgttactgcaaacattgcacactttgcaatgcacttgatcacatctgcgatatatttacaagctgttgattcagattatcacttgaacgcctctacaaggatgagctggctggagtttcgaatcagaaagataaataaaacatgagagatagggcatttagtcgagcttaatatatatatatatatatgttttttcttttaaactaatagaccttgtttacacttttcgttaatacatcgtttagccctagaaaacattaggacttttataatgatttcattgatgaatagcaattgaattgtattaagctaacaaactttatcatatacttgtttctaagctgcgcttaaattcccaagcttagctggcttccttgtttgttcaagagatcaccagaacgtggctaactacgcaaacttaagatttcccagtcgaacaacatctcagccagccccctgagtcatgggttctatttgccgtcgactatgtgcgcaatcggttacccatcgatctccccattggatattgccgatgttacgttcgtgggacattcccagagttagcaggtatttgcatctctcacttgattgctgccttttgctttcaattgttcgtggcatgcctgggcgaggcataaatataaaaacaaacatttaacgacagcaccagtggctttatcagccagcggaatgttgtggcctgtagatgggaaccgactcgctgggggaatcgtcgccacgcacgattactgaaaaaggggtcaagagcacagattcgtttctcgtttgtaggattcagcaaaatgtattagaaagcttatccacttgcaacacttttcacatcatattaaggttaactgaagcgcagagactctcatttgtttgtatatttattgcgtatttaaagataaaaccgcctgagaggcttagttctgggtggtgggtgagtggactttgccggcaaacagtatgttaccagtggactcctcctcgataaagaacacaaacggccggtttacgttgaattcctcgatggcggtgctgccaccgaacttgttttcgatctccacaacggtggctgcgtaggcctccgttcccttctcgttcacattaatgccggccttctgcaggatgttagacacctttactttgccggcgacatcagcgccgcgggttaatcccggcagcgaggcgctgtcctcaaagatttcgcgcacacccaggctgcgcaacgtctccttaaggttctgctggtagtcgaaatggaacttgggcagcgtcaccttcactttcacctcctccatggcccactgagcgctctttagctcgtcgttttccaggttcttgaccaagtcatggatgccattcagggcgtagggcagcaggacgaacagggagttcttgcccttgtagggcagacgcagaatctgcgccttcagcttctccgaggtggtgtagtagaagtagtcggtctgctccatgaactccgcccgcgactggtcgtccttgctgcggaagaaggatccctggaatgtggtggcaaactgccgccgccacagaccgttgaagtagatcagattggtcagcaacattacgctgctgcgcacgttgtccggggctactagctgctgaagtctgccctgcgtgatgttggcggcccaggcgttgatggcatctgccgccgcctcgggattggtgaagtctagcgcctccacctcgctgtcgtagaagtgtttcagcgtggccgtgaacttctgctgtgtctcgatgaagctgtccgtgaagagcttggtgcgcacactgagcgtctcgtggagctggttctccttcttgaaggaattaagtgtcttgcggtagaactcccgcacattattttgcgatcgaatgtctgtttgcgtgttggccagctccacttgcgtctgggttccggctccggccgcctcagccagcagggccagcaccagtttgacggagaacggcgagatgatcacattcttgtcggctgtctcgttctgcagcaccgtcttcagtagatgccatgagaacggatcgtgcgagtcgctccggaagggcacaaaggtatctatatcgtcgtagatacccgctccactgggcacgctggcagcgccaccgggcagcttgtccgtacgggtttcgaatacgccctggggcgtcgtggtcgtcggtatggagttgccgttgcccgtggctaacgcactcaaaaacagcgacagcagcatcactgccaaatttccgcccatctttgtcatctgtgcttccctaagcttctgcgtctcgatcttcctcgggtctttgctttcagcctcttattcgcagcaaaacaactgttaaatgcgggctttggtggggcgagcggcgagagagcgccggtggagcgagcgataaccgtttcacgcgccgttccaactgagagtgactggtgcgccgagcgggctggccattttaaaatcgagctccagcttcaagccgctcttgacgccgtcctctgctgctgtgctgccgcgtcgacggggcagcgcatgtgtgttttttttgttgggactcccaaagcatacgtacgtcattatcgcaaagtgatgagtgtggttaagtgatgagggaagtgaagggaaacgactagactatacagtgcatcagtgcactcagagaatttccatgcctgtattgacaggattaaccaaaaaacctatacaaatatttaaggatcattcatcattatgaatgttattttgttattttgtacaaattagttgcgaacaatatccgcctttattaggctttccccacttcagctatttgtgaattattgcatagtcatcaaagaggaaagtttgcaaatgttattattcttaaactacgtcacagtttctttcacgcccgctgcaaatactcaagccagtttatgaatagctattaatagaaatttgaatttcaaataagcttaagttgtgtcggggatagtctggccacgctgacaactattatagaactcagtgttggtaagtgtcggctaaacaaaacagctgatctgaaataaattctcatggtgcgttgatgtaacagcagccggcgaaagaaacttgtgcatttaatgagaaataaatataaatagccaaagtaaccgcacgtgccatgcaaattcgtcgtccgcgtggtgtcactgttccgcaattgatggtggtcacggccattgggctgctaggcggtatttacatttggcaaccgctgattttgaagtacaaaaacgagaagaaaaccgaggcagaaacgccagcagtaactgaaactagtggaaccacaaagttagcccgcacactaaaccctaatctgctggctaaagtcatatattaattgaattccgttctcgcccacagatgagtttcattaacggctt

SEQ ID NO: 23753 - DNA, 1543 bp, DROSOPHILA
gtgaaacggttatcgctcgctccaccggcgctctctcgccgctcgccccaccaaagcccgcatttaacagttgttttgctgcgaataagaggctgaaagcaaagacccgaggaagatcgagacgcagaagcttagggaagcacagatgacaaagatgggcggaaatttggcagtgatgctgctgtcgctgtttttgagtgcgttagccacgggcaacggcaactccataccgacgaccacgacgccccagggcgtattcgaaacccgtacggacaagctgcccggtggcgctgccagcgtgcccagtggagcgggtatctacgacgatatagatacctttgtgcccttccggagcgactcgcacgatccgttctcatggcatctactgaagacggtgctgcagaacgagacagccgacaagaatgtgatcatctcgccgttctccgtcaaactggtgctggccctgctggctgaggcggccggagccggaacccagacgcaagtggagctggccaacacgcaaacagacattcgatcgcaaaataatgtgcgggagttctaccgcaagacacttaattccttcaagaaggagaaccagctccacgagacgctcagtgtgcgcaccaagctcttcacggacagcttcatcgagacacagcagaagttcacggccacgctgaaacacttctacgacagcgaggtggaggcgctagacttcaccaatcccgaggcggcggcagatgccatcaacgcctgggccgccaacatcacgcagggcagacttcagcagctagtagccccggacaacgtgcgcagcagcgtaatgttgctgaccaatctgatctacttcaacggtctgtggcggcggcagtttgccaccacattccagggatccttcttccgcagcaaggacgaccagtcgcgggcggagttcatggagcagaccgactacttctactacaccacctcggagaagctgaaggcgcagattctgcgtctgccctacaagggcaagaactccctgttcgtcctgctgccctacgccctgaatggcatccatgacttggtcaagaacctggaaaacgacgagctaaagagcgctcagtgggccatggaggaggtgaaagtgaaggtgacgctgcccaagttccatttcgactaccagcagaaccttaaggagacgttgcgcagcctgggtgtgcgcgaaatctttgaggacagcgcctcgctgccgggattaacccgcggcgctgatgtcgccggcaaagtaaaggtgtctaacatcctgcagaaggccggcattaatgtgaacgagaagggaacggaggcctacgcagccaccgttgtggagatcgaaaacaagttcggtggcagcaccgccatcgaggaattcaacgtaaaccggccgtttgtgttctttatcgaggaggagtccactggtaacatactgtttgccggcaaagtccactcacccaccacccagaactaagcctctcaggcggttttatctttaaatacgcaataaatatacaaacaaatgaga

SEQ ID NO: 23754 - protein, 447 aa, DROSOPHILA
MTKMGGNLAVMLLSLFLSALATGNGNSIPTTTTPQGVFETRTDKLPGGAASVPSGAGIYDDIDTFVPFRSDSHDPFSWHLLKTVLQNETADKNVIISPFSVKLVLALLAEAAGAGTQTQVELANTQTDIRSQNNVREFYRKTLNSFKKENQLHETLSVRTKLFTDSFIETQQKFTATLKHFYDSEVEALDFTNPEAAADAINAWAANITQGRLQQLVAPDNVRSSVMLLTNLIYFNGLWRRQFATTFQGSFFRSKDDQSRAEFMEQTDYFYYTTSEKLKAQILRLPYKGKNSLFVLLPYALNGIHDLVKNLENDELKSAQWAMEEVKVKVTLPKFHFDYQQNLKETLRSLGVREIFEDSASLPGLTRGADVAGKVKVSNILQKAGINVNEKGTEAYAATVVEIENKFGGSTAIEEFNVNRPFVFFIEEESTGNILFAGKVHSPTTQN

SEQ ID NO: 23755 - DNA, 3749 bp, DROSOPHILA
gtgagatagctcagttgacgaatgtgacccgagaggagatgattctgggcaccaccacaaactatacgactccagatcgggtgaatcgtctctttcacattaaagtcaccgacgacgatggcggaaagttggacaaaacgttggtaaatcgtatggcagacatatctggcctggatgtgggcaataccaccacactggccagaatcaattatggacttggtggttatttccaagaacacagtgattacatggacattaagctttatccggcaagtaacctgattcatttaagtgtatattattcattatatcgctagatcatacacaactattaggaactgactgaggaaggtgatcgattaatgacattcttgttctacgtaagttcaaaaccaacactctatagaaaatgtactatttaaccaatttaacacttccagatgaccgatgttccagtgggtggcaccacaatctttcccggcgcccaacttgctattcagccaaagaagggatccgccctcttttggtacaacctccacaataatggtgacccaaatctgctgaccaggcacgccgtttgtcccacaattgtaggcagccgatggggttggtaatatctcagttcttaaaattaatatcacaataaaatattcattttttagtgctagtcaagagcatgttgaactacgagcagatgttcaagaagccctgctacaagtaaactataaaacttaaaaacatttcacttttctaaatctacacagatagcttttattgttgttttaagtgcaaatgatattgtgataagcttacgtaatatcttaagtggcattatgagctgaatcttttataagattcgcattggtaaagttaaaatacttcttaggttcatagctaatcgaataaaaatgctagccagcttatgatgagccacaatatgagccaaatggctggctggatcattataattataagtttcagttcgatggttattatctcctcaattaacatcttcctttccatttgcattcaatggcttactgggtggcacataaaaccaccaggcgcaagcaaaaaagaccacggatcccagtttgcagatcaacgccagtagccacatatatctgtaggaattatgggattatatacattaaattatagtactttatacttttatggaagtaagaacataccggctgatatagaaattatcgtagactagacaagctcctccggcgtccttgtcgcaggactcttgccacaaaatgcaggattcgtcgatcagggctccgaaaatcaatggagctggtatggtgcccagtagtcgcacttttatccactgcaaacccaacgcaaatgatcgctgatcatcctgaacgcatctgcaaacaagaagatatgcatatttgattattattaattaatttataaataataattgatacctcagtgtagccgacagcgcgggcatggtggcgagaaacgtgaagaccatcaggatgaagcagagcgccacgaagagcggcagggtctggcacgtggagtcgcactttcggttggtggcatctggccggaaatggggggcttccgaggacgggttgccatcgtccacaaaaccaacttgctcgatgcagctgcagttgtggtagcgcttcaggctgttcgcgtgctcctcctggacgcatcctgcgtagcatggactgtagtacatgacgccatcgacgccacagatgggatcgtagttggtgcgactgcagccgcagttggaattgcaacttgccaccaaggcgggagaatcgctactgggctgcattttatagcccgtggtgacgccggcaaacttcggattcggacaagagaccagaaagcagatggtaaagagtgccgccaccgtggtggccaacaggcacattttgatgattcctctacaggcaagattccatttcttgaccaagtagccaccgagaaaggtgccaccgcctccagctggcaccgtaatcagacccatcaccaatgccgagtacatgggcgaaatgctgaactgattctcgatctgtttgggcaggaaggcggcaaatccggctatcaccagaccctccgtggcaccggccaggttcaggaaaaagaaggtgggattagccagcaggctgagcaccgcacgtggcagtcccctgaccacattactggagtcatccgcttccgatatggtggcatgtgcctcggaaaccctttccagctgcaacttctccgcgccgggcagcaacttgggatatccgaaaatgggcaaggcgatgagcagacacatggcggctgcgaaaatgaagcccagccaccaggctccaatccacaccttgctgtcgctggtcaggctgagtctgcaaggggccaagattgactcaatattagaaaggatctagcttactaaggtgattagtttaaatcgattaaagtattcaaatcaaaagccagagaaatgaatgcaaacagaatggctatacctatgatgtttccaacttggcgtcaattcatattttgttaaaatggctccaaaaatataagcccaaccactcgtaaacatgttcaaaatcataaacaaaatttccatgttcccgacattatttacgtactggagggctaaggttgagcagacattatgacttatggcatcaccttgacaataagccatgcggttgaatccggccggattgggatgtagatgggtttccgttttggtgcgactctgctccattcccagctatccaaccatccaaccaccacccaacggcccaccgtgaaggtgaatcaaacaaatgctcattctcattcgcaccttatttcctcgttgtcagcgggaatgttgttttattactctctggagatatttacacggcgaggtgctttgtggcatttgccgttgccgggtaacaaataagctccacagcatcgaaacccccattcccattcccattcccgttccccttccatgctccactcccccaaggccggtattaaagtcacctgctctttatctccatcagcactccctttttcatccgttggcgctaagtcgcccgattaataacaatcattgcgagcttatcagatgcacttactgaacgggatccacggtcatccaatccgtatagatgagcagcagttgtccaccgaatacatagccaatcgctggtccaacggtggccattgtgtagtagatgcctgcaacaatgaacttctcaattaaactttaactctacgaacaattggatgtgccatttgtcaagaattcaaaagttattccaattatcattatcagttagtcacatctttattttgcatgaaaaaggtcttgattctgctactcctgtttgtacagtacgtttcaaagttataaagatatttcaagatcaaagatagttgcttcgataatcttgcccagtatgcaatatgtttattagctggatgtgccaaaaactattgagaagcgagtagccaatcggcggattgtgcctttatttatttatctttgaaacgcaccgtgccatcacatcctggagctactccatcagccccaaaaggggggcctgcctccccgggatgaagcgaatttcaattgtctcaatgccagacagcgatatccaggaaggcaaagcggcaatgctggacgggtttgataatttcactgtcgtcttcggatggcacgataaacctaactaagaggcaataaatttcagctgccgctggctctggcc

SEQ ID NO: 23756 - DNA, 1365 bp, DROSOPHILA
atggagcagagtcgcaccaaaacggaaacccatctacatcccaatccggccggattcaaccgcatggcttattgtcaaggtgatgccataagtcataatgtctgctcaaccttagccctccaactcagcctgaccagcgacagcaaggtgtggattggagcctggtggctgggcttcattttcgcagccgccatgtgtctgctcatcgccttgcccattttcggatatcccaagttgctgcccggcgcggagaagttgcagctggaaagggtttccgaggcacatgccaccatatcggaagcggatgactccagtaatgtggtcaggggactgccacgtgcggtgctcagcctgctggctaatcccaccttctttttcctgaacctggccggtgccacggagggtctggtgatagccggatttgccgccttcctgcccaaacagatcgagaatcagttcagcatttcgcccatgtactcggcattggtgatgggtctgattacggtgccagctggaggcggtggcacctttctcggtggctacttggtcaagaaatggaatcttgcctgtagaggaatcatcaaaatgtgcctgttggccaccacggtggcggcactctttaccatctgctttctggtctcttgtccgaatccgaagtttgccggcgtcaccacgggctataaaatgcagcccagtagcgattctcccgccttggtggcaagttgcaattccaactgcggctgcagtcgcaccaactacgatcccatctgtggcgtcgatggcgtcatgtactacagtccatgctacgcaggatgcgtccaggaggagcacgcgaacagcctgaagcgctaccacaactgcagctgcatcgagcaagttggttttgtggacgatggcaacccgtcctcggaagccccccatttccggccagatgccaccaaccgaaagtgcgactccacgtgccagaccctgccgctcttcgtggcgctctgcttcatcctgatggtcttcacgtttctcgccaccatgcccgcgctgtcggctacactgagatgcgttcaggatgatcagcgatcatttgcgttgggtttgcagtggataaaagtgcgactactgggcaccataccagctccattgattttcggagccctgatcgacgaatcctgcattttgtggcaagagtcctgcgacaaggacgccggaggagcttgtctagtctacgataatttctatatcagccgatatatgtggctactggcgttgatctgcaaactgggatccgtggtcttttttgcttgcgcctggtggttttatgtgccacccagtaagccattgaatgcaaatggaaaggaagatgttaattga

SEQ ID NO: 23757 - protein, 454 aa, DROSOPHILA
MEQSRTKTETHLHPNPAGFNRMAYCQGDAISHNVCSTLALQLSLTSDSKVWIGAWWLGFIFAAAMCLLIALPIFGYPKLLPGAEKLQLERVSEAHATISEADDSSNVVRGLPRAVLSLLANPTFFFLNLAGATEGLVIAGFAAFLPKQIENQFSISPMYSALVMGLITVPAGGGGTFLGGYLVKKWNLACRGIIKMCLLATTVAALFTICFLVSCPNPKFAGVTTGYKMQPSSDSPALVASCNSNCGCSRTNYDPICGVDGVMYYSPCYAGCVQEEHANSLKRYHNCSCIEQVGFVDDGNPSSEAPHFRPDATNRKCDSTCQTLPLFVALCFILMVFTFLATMPALSATLRCVQDDQRSFALGLQWIKVRLLGTIPAPLIFGALIDESCILWQESCDKDAGGACLVYDNFYISRYMWLLALICKLGSVVFFACAWWFYVPPSKPLNANGKEDVN

SEQ ID NO: 23758 - DNA, 2717 bp, DROSOPHILA
agtccaagttagataagtactacacgctgaagaccaagtatccggactatttccgagttaccaacaccacggatagcaagttccgggagattcatcaaacggggtaaggattttgacgccagctaactaatttaatttatcaatgcaattctgtcaattcagtgccatcatctacctgcccactccgctgaatgaaaatggacctcgcatcgggatctggcgcatgggattggtgccagtggagaagtacacaatgctggagtgcatgcaagtggcccaggcaatgcaggagattgccattttggaggacgactacgccaatgtcaatggagtagttttcattatggacatgaagggtgccaccgccgcacacttgttccagatgacgccgtcgatggccaagaaattcactgtcttctcggaggaggcacttccactgcgtctgaaggcacagcatttcatcaacaccatcaccggattcgagcagctgttcaacatgttcaagccaatgatgtccaagaaaatgcagtctcgcctatttgtgcacggcaacaaaatggggctcttgacggagcagattccactgaaatatctgcccgaggaatacggcggcgagaatggcaccacgcaggacatcgtggccgccatggagaagaagttggacgagtacgccgatttcttccaggaaaatgtgaacttcggcaccgacgagagcctgcgtcccggaaaaccaatcgattttgaggggcttttcggagtagaaggttcctttagaaagctcaacgtggactagtttcagtttgtaactttaaagattttattttcttatcagccagttgaaaaagttgtccaatttagtggctagaaaacacattcgcatcagttgaattgtaaaatccaatagtaggaatgataatataggaatacatgaatatgctacgatacttcgcagcagttttaggtttctcctatataaacattgtccttttagcttttattatcatctgtagaagcagatctttcgctgccatttagttggtgcggatttgaatatctttcttcggtccaaagactcttccaggtacttttgtatctgaagatccacatcagatcgccacttaagttccaggaaaagagggaatatctctccggcttttttcaggcgtctctctgctttctgatagcatttccagggctgtggttccaccaccaggagctctgccagattggagagcttttgcagaaagaatcgcaggccttgatcatggtgattcaagtgaatccacatggtaatggagtagcagcaaatggcatcaaatttctcgagattattcacctccatataggttttaacggattcaaaggcttcatcatcgaggacatccacgcaggcgtagctcacatctttcggggattcattctcctcgctggcacgttgaatcagccgagggtctatatccacacctagaactttcacagatctatgaagacgttcctccagatatttatgcatgagttgagtgagtacgccgcaattgcagcccacatccaggatgaaatagggtttatccttttgggtttctccatcctccaacgcaggaagccatatgtccgcgtctggtaagagtttcacgcgttctgcggcggaactgaactgatagtagttgaagaagttgccatattgaaccgcgccgggatcgttgtttctaatatccatattttataagattcgtgtttttatttgttttgatttcacagaaacatgctgctagagatggtcgttgagacgatatatcatatttaaatgcacaacaaagttaacatgccatctctagcagcgctgttaagtgagttaacatctacaattttcacaaggccagtgttaaaaggtgcagtttaagaaaaccgccaaattcaaactgcatctccaaataaaactcacatgcattttcatcatttttgcgtttatttactgcgttctttgtttatatttgtcgaaacgcctcttgctatctgcttatacggctctaacacttacacttaaaaatcgttaacacttgctctttggtgtgtaaattagtttcaaactataactaaatgtacaaaatatcgtcaatgaaatgtacaatacaacaacaaaatatacacaatgtttcgtcttcgaattcgttcggtattttcgcatttggcatgtttgtggctaagatatcatcaattcaacacaatgatcaacaatattcaacgacaaacactcgacttgggaccctggatgcttcatcggcggcgctcgggaaactgaatttgacccactaagggaactaggcaaaattgcaacgctctgttggtaagcccaccaaatcgaagcgttcaggggcggccaaaaggaaaatgaatcattctaccgatttgaacaacgatcgaaacttcacactagcctatcatttcagtatcatagttgtatgttgtatggctaagaactactggaaatgtctttttgggcttatttgctttttggattttaacatatttgctgtgttttatattcgtttagtgggccttggtttttcgtttcttaagcgcaattcgcaaagcgtgcgaagattgaagattttccgaattttgaattctcatatttcggcccgtcgtcaagtttggcaaattgtttaataaacgctacacgatttcattttgtaaaattctaaatgctacttaatatg

SEQ ID NO: 23759 - DNA, 717 bp, DROSOPHILA
atggatattagaaacaacgatcccggcgcggttcaatatggcaacttcttcaactactatcagttcagttccgccgcagaacgcgtgaaactcttaccagacgcggacatatggcttcctgcgttggaggatggagaaacccaaaaggataaaccctatttcatcctggatgtgggctgcaattgcggcgtactcactcaactcatgcataaatatctggaggaacgtcttcatagatctgtgaaagttctaggtgtggatatagaccctcggctgattcaacgtgccagcgaggagaatgaatccccgaaagatgtgagctacgcctgcgtggatgtcctcgatgatgaagcctttgaatccgttaaaacctatatggaggtgaataatctcgagaaatttgatgccatttgctgctactccattaccatgtggattcacttgaatcaccatgatcaaggcctgcgattctttctgcaaaagctctccaatctggcagagctcctggtggtggaaccacagccctggaaatgctatcagaaagcagagagacgcctgaaaaaagccggagagatattccctcttttcctggaacttaagtggcgatctgatgtggatcttcagatacaaaagtacctggaagagtctttggaccgaagaaagatattcaaatccgcaccaactaaatggcagcgaaagatctgcttctacagatga

SEQ ID NO: 23760 - protein, 238 aa, DROSOPHILA
MDIRNNDPGAVQYGNFFNYYQFSSAAERVKLLPDADIWLPALEDGETQKDKPYFILDVGCNCGVLTQLMHKYLEERLHRSVKVLGVDIDPRLIQRASEENESPKDVSYACVDVLDDEAFESVKTYMEVNNLEKFDAICCYSITMWIHLNHHDQGLRFFLQKLSNLAELLVVEPQPWKCYQKAERRLKKAGEIFPLFLELKWRSDVDLQIQKYLEESLDRRKIFKSAPTKWQRKICFYR

SEQ ID NO: 23761 - DNA, 11658 bp, DROSOPHILA
taagacgagcgaatcccggaaaagaagccatgcaaacggcgtagagagagtttcattttaataagtccgttgacgaataggaattatatgcaattatgggtatatctaaacaatttagctggggaagtaaacaaatgttctgcaaatattgtatgtatatatgtatattcgtgaaatagaaaataaataaatttaaaatattcataagcaataaatgtttgttagatcgaatgcgcgaatacattttgaatgttttatgggcgagagagaaattaaaaccattggggtgtgaactatgtgcaacttttatagaggaatattcgaagttctaaaacatcagtaaatatacattttgtttgctgaattctggctcttcaaaagcaaaaatcaatcaacttcagtcacacacaactggattcacctccatccgtaagtggcccaaacgatgttgccaacaaacatttggaggcctgttgcacatgatagttttgtccggcaggcgtaactcgtttagccagctttggcgtcggttccggccgtagagaccatttcctggcctgaattgcagcggcagcaacagcagttggccgatgcagttgcaggatggctcgccccggccaattggattatgcgtggtgcgggctaaactagttaaaaacatatttgcacagctcccaggacttgccgacatggacatgggccatcttgtcgtccggggagcgggctgaaagtcatgttttgctactgctgcgtgtgcggttccgtgcgccaaagttttaattaaacgggtttatgttttcgccgccacacacaaaaagttaacacacgaggcgtgataagtcccatgggaaattgggggacaacagggactaattgcgtttgtggtacgcctttcatcgactcctctgctacgcgtaaattagattattggattattagggcaaaaataacttcaaaacttatcaatttgggcttacatcacctctaactaaggtgaaaactaagccaaagctatctaaaggtttagggaaagataaggtatcttagatactcttcggcgcatttgcaatagaaagaacccttacccatctgccatctgcctctgctttcgtgctagtgacttgcttatttcgtaggggacactcaccaacattgccctccgcttgagcaagatctccatgcgtggcgagcagaaggatcagcagcaggactccgaattgcagtagcttggccggacgactcagcgcgtccaggctgcagcagagcaggccgccgccacccgccccgcagccacgcacctcgcgccggcgggcgccttcgctgatcagatgacgaccgcgggcgggcagcgtgggcggcaccttgcgctggtggtgcagtagctcgtgctggcgcggacttcggtggtgatgcactgactcctgcggcgtcgaagggtgctgctgcggatcctgctccggatcctggtcctcctgctgctgctgctggtcgaatggaggtcgctgcttagaccagaactgctggcattctcccgtcgccgactcctggtgcccggctgttccgcgtgctctctggtgctttggctcttcagttgtggtgcatggatgttgctgccgttgttgtacattgcgtgccatgataatcggcacacctgcaagaggggaaaccaattaattagcacacaaaagaatggcgacccgaggacacaattactcgcaattacttattatcttatattaatatgttaatttatactataccccattcaactattttgagccccccgaagccagatttcatttggataaacaatgcttccattttcaattagtttttttaggggggagaaatgtcgcactcaccaacccattcccatcggctcataaatccctacacaaatttatgcaggaatttgcactaatgacctgctgctgctccgcaaagtgggtggtgctcctgagtacagcccaagtgattcgggtgctccttattgttgttaccggaaattagcaatgtatattcggtggcgctgcctcggctgcctcttcggggaaattgcattttattgtgccagggacaacttttcgcttttccggcatttccatatttcatattttcacacaatgcgcacaaagggaagccttggaggagctgggggctgggggctggctggaatctttgctggttgggcacatttgtcgcgctgcagtttccggttttttagttgctccttctttgtgcgggcttggtgtggcctccagtgatccctgctccggctgccgaatgcttagcgagtatttcttgctctttatatggtaataaatgtcagacttcgcttagcccttggcagtcggcaggggaaattgattttccttgccgctccagcgactccaaatcgtgatgggcaggtggttggggtctggaaatgctgttggttctgggttctggatatcgtctcggtcatttggcgataagcgcgtcagcctcgctcaaggctgacatattttgaaagaggatgacggcagagtttacttcattctgaaggcacagccataccgcctgccaaacgggattccagctcatcaacagcagcacaaagatgtggcattccagattggcccatcgacaaaataaacgtcaaattatcaagcgaacaaggtaccaagtgaaatgaccttgtcaacgctaaaaacaaattgggtttctactttattgggagtgcaaacagtatgtccacaaatttgctacggcatcaggatgtataaaaacttggtgctattcgaaactaatttgcagactcactataaactcactaaaacaaactcctttaataaatagttttcctagcaaagactgctgattcacttacaacaatagaattaagccaaataagcatcaatcagcaatgaaattcattagcgggaagaggagactctcgagcaggcacaatatgaatgccttggccaagatctcaattacggaaacatctttggttataacatgtctacgacatggtaatatgatttcaatcatttctcgaaacttgcatgattaatgcgttacagatttttgcccccagaaagcggcttctgtgggcctcgttgccttgaaggagagtgaagacctcgtcctggtgggcctccgaattgggttcatttttcatgcacaggccgtggcagcagaaactaaacttcgaggctaagactaagccccaataagttggatgggcccagatgacaccgcagcatatggggcggataattaatcatgggacgaacgtgccaggacgcccaaaaacttttcacccttctccggctctccgggtctccgagttccaagtccgcgcagaacttaacttaaccgagcaacattgaatcgaatcgaccgagatgttaagatgcgaggactcatggctgggcaaagggaatatctgattagttggcctctcgaatttaattatggtgacaggacagactctgcggcggcagccggatgcatcctcggtctcctgccctccacatcctcctagtcctcctcctgctgcttcattcgcctctcctgaataatttgtgcaactcaattaggcgttgaccccacgataaagtttaataattgcaggtggtggacgcccttctttcgctcgaactttaattaaaagaaccgagcaattaaaaacgcatcatcagacagagcgcagcggcttgcagaaaaaatgcaatacatgctcccgattaccacatacctgttatgtaggaaataggaaaggtcagaattcatgaaaattatgctaaatgttatgttaactccattggggatttgatccatacgtgctcatattcttattgtacggttgtctcgaattgtgatgtaatttccgtaacacgaagagcgccctaatagggcgtggcacttttttaatgcacttagcaagtgttttttcgccacacgcagaacgcaaaacaggatcacacagccccgccctgaaccgcctgatctgggaaattcgggagccggaaaaccgcaaggaaaaccgcacgtgtaaccgcgcttgctccaccgcgtcgtgtttgtggggctgctccgctttggaggcagactgcggtgcgaccacgacagcaattaacacggaggaaccagcttcagattcaggtctttggcattttccgggcatccgagttttacgactttgcatattcgaatattacccaaataaccgctgaacttttcatttctccaccacttttaaactggctttgtcaggtgaaaattttcaagcacgtcactgcagtggattgatttgcaatcatcaatttcgatagaatttgcgaggcgctgcagcaaaacttttataaccgcgaaattaagtgcacagttcgaaggcagctgacattctcgtttgaaaaataccaactttcttcagagcagcgctgctaacgcctataatcagttcacgattgcactgggacctatcgatatcgatagacttaggcgtgctctgcatgttcgaatggccgagtggccattttaaaaacttataatctttccgaaagcaacacttgatattgtttatttcgctatttaggtgccattagcataaaaaatttccagttttcattatgaaaaaacttttcgataagtataccaaatttcgcaacagcacttatcgaagagagcaacaccagctgtcaagccactggaagtttcacctctgatatttcctgtcaagtctttcccgcaagaggtcacaccacgtgcgctgccaatttggaaatttttttggagaagttgtcctcgcaaatctgtgatcgcaaatccctcagttgctgtttattcctcaagatgggtaagaagcagaaaatgaagaaggctgcccagatggcgaccgctgccgagaaattgaagaccgctgccgagaaatcgaagaccgctgccgacaacgtggtggccaaagaaaagcctgccgaagaagcctctccctcaccaagtggcagtggaaaaaaagggaagcccaaggcaacgcaaaaaccaaacgtcgcaaaggcacttcagaaggagatctccagttcggaagacgccttggatgtcaagaataaacctccggcaggctttagtggcgcaaaggggaagccccacatcatgggtcaaatggacccggcctaccgcaacaagatcaagaagctgatgagcctggccaaacagctgccgcccaatgtgttcagtctgccgaactcgcagaaggaggagggcgcctccgccgcgaaatcctgcgtagttgaggatgatcagagcacggactccgatgacgccccggatctcgtggaagcggatcccaaggagacccaaccggacgagcagggtcaactcggtacggtggccgtgcgaacacgtgaggtatcaaagcagtctcgcggcgagcggaaggcacgccggatcctcatgaagctggacctgaagcccatggagaacgtggcccgagtgaccatgaagaagggcaagaacatcctcttgtacatcgatcagccggacgtctacagagtggcgcactcgtcgacgtacatcttctttggggagatctgcgtggaggacactagcaccacgtccgtcgcctcccaggcagctgtcaaggcggccgagcgattccgtggaacctcgcctgccgggcggcaaggtaacgaggatggaaaagcccctggcgaggagtccccacacgacgacgacgacgacgagaacgatggcgaggacgcggatgccatgggcctacatgcgaaggacatcgaactggtacagatgcaggccgcgtgctcgcgcaaaaaggcgatccaggcgctgctgaagaacgacaacgatgtggtcaatgccatcatggccctgactgtgggttaagtcgctctgagtggctcctttgtattcaaagtcatgaaataaagagaatttcaataacatccatgttcgccatagaaattaatggtaattaaatgattacaatcaaatcgtaaactttcatgttgtttttatttactatactttcatgtaatccagacaatcctttcggacttcacttctcctggtggatggcttgttctacaagaatgacaatctccggtgccaatgtagctcgtactatattaaatgccgatcatttcctggtttttgaaaatgttttcggtcccagcagaagaatcccactgaagaacccctttgtacagcgaaattgccatcttatttcaattttctaatgaattgacatttccaccatttccatcttggcacagtgaaagcattttccgaagggcgaagaacgcatatgcgaacccgaaccattttcattatactcgtatttgctcttccatcagcgctagactttggcaattttcctttcaggtaccgtcattcttggacattttctctgtggcggaaacttaatcgcttctttctttgtgccgctgacgctgcactcttgtttactctgcacttagtttttagccatttggcgaagtcccccggcactcgactttgcattttttgctggcgaatttttgacgacgccgtgattgcgtttcagctctttcaggggatttcaggggtactcccaggtgagacaggtgacgtcgctgctggtgacgtggctacgcaagtcctgctccgcggacatttgactcaattaaatggctcgactacgttcaacgtcccttttctggccccaaaagccacttaatgactagctccggctctaactgaactttttttaattttcagctgtcgtcagcagccgtaaaaaaggctttagttttgcattgtgggcgctcaacagtccgtgcggctgagcacgtgcccgctttttcgccggaaaagtggaaatggaaactttgtaggtgggacgcattcaccttcttcgttctgtacactcatatagtgcgagtagaaagtgcccgcgcgtgtcggcttcgaatggaaagttcttggggctccattccctttccgtggaactttctccgccggaaattgattaagttggctccctttaatcagcggaattgaagatgctgccgaaatacaaatcagttgacagtcggcagccgtactgcgcaatttactgcccaatccaaatggtactttgaagtactttccgcgtcggcaatttccactccttgctgaccaaatcccggagaaagcggcaacaacagcgaaagttgttaaatgcctaatgacatcattcggtctagcactttctcgaaatgaactacttgtaaaacggaacgaaacattgtttaatattataatattaggtagccatatattgcttgggataacggcagtcattgttccaattaaatcgtccggttctgagccattgtatccacttggtcttaagaatttaacatgtttcttttgtgtaggctccaaggcattctttatctgaatgccaccttgtgttcctgttttacaagaattttctttgacatgaaatgctcttgcttttcactggcttttgcctgccgcttataaactttcccttttggttttgcggccaacgtttggcctgctgcccgttcgcttgagaagttttccttttcgtggttattcattcgctttcaacttgatttgggtttcacatttcggtgcgcatttcttgaccaaaatctgcaggatttgtcttcgccgtcgtccttccgcctgtccgcatccgtctggccaagttggcctgccaagggactcgggcttacttgggcgcctctggcgcagttcatcactttgggcgagccgcatatactgctgagctaatcatgactcctcagcttctctatattcatctccatttcactggaatgctctgagtcccgcccagaccaggccccccgatctggcttgatgtgttggcaagcttttgccatttgatttgacgccactgtttgctttcggatgggcagagtggctgccaggtgtgtgcttgccagcacactttagcgctcttcgggctccttggggttctattattgagaatatcgagcacctgggccccgaaagccagcggcgcaaagccaacgcgtgggagcgacttcctggcaggtgatttaaagctcgacaggctcacatttcccggcctttgtgtaattgatgcacggcagcagctaaaggataacaaatcgctttcatcctgactccgcttccgggcgagcacaatgtgtacaatcacaatccgccgtctgcaaatacacaatccataattccttttttggccagcccagcgtgaaacggatttccggcgcctcttcggcgaaaaaggacctctccgtccgaaaagcaattagataaacttgccagctggattcggcaattgaaagtggccgaaagtggaaaattgcggaccagctgggagtggcaggacaattatgagagcgaaggttcggataattcagcaatttggtcgggttaggggaatcagcgtggaattattctcctaagtgccatgaattatgacttagttagctaaagcgaataaattattgttacggatttcggagtaaagcgtccttttctctctgagccaaaaactcaaaacgtttatacatcagattagttaaatgataggaaatggaattcatttccagttctagtgtatctgactgtatcaactgttcaattgctatccacaagagagatccttccatattccctggactaatctcacttaaatggaaattgtgtttgtttcgtatatatctcacattcatctttattatttaaggtgctttttgttatttgctatttgttgcgaccattacaacccgttgttttgctctgtttcaggtggcagagcatcagataagatatttcggggctttattctgcatgtaggaaaattgcctttccccgttccaaattgttttacatttcaacccagaaagttttggcatttcgcagtttacctcttggccctttgagcatgttagcaattataagctgcctagggaatattcaaggaatttgtaggagcaaagggcagggtccgccaccaacactgagttacacgatccctagaaccctggacctctgaaactcgttatggaaagcttcttatgttgcaggacggacgcccgttttctcccctgaaaacgctcgcagttaataagcatttccttttgccggattttatgtgccatattttattcagattgcgcttcataaatgcagctggtgaaaaggagagcaaaggccacggataatgaacaccagtcaggcccgggtggagaatttccagcaaactgaactgataatgttgttagagtgcacacatacatgcatgcatgatgtgggcgtgttccgggagggcggggggctgggaaatcaatttcggggaaaacaaattgcgcagctcgtagtgaaagctcagcgaatataatactgctgcagtttccgtgctcaggaggtacacttttcctggctgcctgcttatctgtcattttagcgggaaactatcgttaatgggaaactgatagcaacagctttcccactcgcgataagtaatgtttcctaattgactttttatcacgctatccgacacctgatacgagaattatattattattcccattcgccgaacaataattcacaataatttgtgaaattgtcgcgatttcgggacattcatcgtgacagcaagtgagcaatccgcagcattcatttgcattctataattgaatttatgtaaccaatatgcctgtcttcccacgaattaaatcacgctgcattgagttttcgaattgagtttccgcccgagcggattgcccacttttcagtgcattcctctgcccgccgatcaggattatttattttcttgctcgctacctgtcggatttacttaaatacatttaaatgaaaacccacgccctgtgccatttcaagtaatgtttactcgctcaacaaaataaaaggtaaatttgattgtagtccgccgtactgaaatattgcattttgtcagttgcgaaaaatcaaacatggagtacagttaatcacattcacaaagaaattccattatccttatatattgtgaaaaagatgtgagattaagtattttaacatcagcaatgtatttaatggttaattcgattaaaatttttcaacttcttattatatgctacaatcagaatcttctgtttagcaaagttcactttcatagcagcatgtatcttaagtactttaaatggatctccacaaattgttaactttgcacaaaatttttcattattgaaatattttaatttgcacactttttaaagaagttctgtcaattaacagtatgaatattatgcaatggacttctagacctgcatttggctagcgagtaaattgtggtgccttcaaagagggcccaatttcctgcccatgcccatgcccaggcccatcccagcccccgaaaaactcaccgcaagaagtgccgacggctggcatcgatgctgggtgccatatgttaggcttacgcgcttatcgcaccatgagcagaacttgggccactggccccgccactgggaactaggcacttggcactggcactcgtcctcgggcgctgaagtagctggcgcagaacactggttgggactccgccgcctacgtgtggtaggcgggcgccttcttatttaaccgctcaacacttggttgctccgctccccaggttgaactgaacggcgtcgatagatccagccgtccgtggagcactgagcatcaggtagcgcacgagcggagccgactgttgcagccgaagccactttccagctgccttccagctgcctggggaagcggacgaaagctcgatggagcttttgctgttgcttcgccagctgctgctttcccgattttccgcccttccgatttcccgctttcatggctgtcccacggcatcccctgttgctccgctggaagcgcgacgcccacgcaagtagcttttccgcgcaagccgcgacgagctttccccgaaggcggcgcctacgtttcaaggcactcgggatgggagcgagctcgcgtcggccactcgggaagcagcctgctccatcgtcctgccaatcttcctgcctcctcttggggcctacaagttcggcagccaaaaatagcaacagcgcgaaagttcgaaaaggctctcccaaccgcctaaacattacagtacagcctcactagaatgaagggttttctagaaagaaaactttctagacatttccgaaatgcattcaaagatgatcaaaatgaaaggaagccgccgagtctgaagtggagatgaaatttgacacttaagtgcatctttcatcctagcgaatttctactgttccaaatgccaaaatttcctttcattttcgtttgccagtgctttccattgtcagtgtgtgggctcctttctacaatacattccgcctactaagcagagtgccaagtcagtttttggagctcagctcacgaccagccgcagctgcctcgcgaaattgtgtcgaaaatgttatggcttgatatatctgcttgggctatttttagcagtgggtgtgggtggagccagtgttgccactgccaccattgattttcctcactgttttcgtttttcctgctcctgccccatgtttttccggaccttttcggctgttgcctgacgcagcgccttttatgaatgaacttggc

SEQ ID NO: 23762 - DNA, 815 bp, DROSOPHILA
agcaaccaagtgttgagcggttaaataagaaggcgcccgcctaccacacgtaggcggcggagtcccaaccagtgttctgcgccagctacttcagcgcccgaggacgagtgccagtgccaagtgcctagttcccagtggcggggccagtggcccaagttctgctcatggtgcgataagcgcgtaagcctaacatatggcacccagcatcgatgccagccgtcggcacttcttgcggtgtgccgattatcatggcacgcaatgtacaacaacggcagcaacatccatgcaccacaactgaagagccaaagcaccagagagcacgcggaacagccgggcaccaggagtcggcgacgggagaatgccagcagttctggtctaagcagcgacctccattcgaccagcagcagcagcaggaggaccaggatccggagcaggatccgcagcagcacccttcgacgccgcaggagtcagtgcatcaccaccgaagtccgcgccagcacgagctactgcaccaccagcgcaaggtgccgcccacgctgcccgcccgcggtcgtcatctgatcagcgaaggcgcccgccggcgcgaggtgcgtggctgcggggcgggtggcggcggcctgctctgctgcagcctggacgcgctgagtcgtccggccaagctactgcaattcggagtcctgctgctgatccttctgctcgccacgcatggagatcttgctcaagcggagggcaatgttggtgagtgtcccctacgaaataagcaagtcactagcacgaaagcagaggcagatggcagatggatagctttggcttag

SEQ ID NO: 23763 - protein, 201 aa, DROSOPHILA
MPAVGTSCGVPIIMARNVQQRQQHPCTTTEEPKHQRARGTAGHQESATGECQQFWSKQRPPFDQQQQQEDQDPEQDPQQHPSTPQESVHHHRSPRQHELLHHQRKVPPTLPARGRHLISEGARRREVRGCGAGGGGLLCCSLDALSRPAKLLQFGVLLLILLLATHGDLAQAEGNVGECPLRNKQVTSTKAEADGRWIALA

SEQ ID NO: 23764 - DNA, 2817 bp, DROSOPHILA
ccctgcacagagacctgaaactcgcaacggtatttgacgaaataaacaagcactcgagcagataccatgacaggctggagcgccacagaaatcggctggccagcgctttaaacagatctcgcccaccaaggaggctcaatagaaggcaaccgagggatctcattacccgatctcctttgacaagggtccgcagaagctgacgcttatcttaaatcctatttgttatatgtgattgttatgtaattgtagttaaattactgtaaatttgaaaaagctaactatagttagccggcgagcccaaatgggctgaattaatagataagaaggacacaaaggggattcaagacttccccgtatgccttaataaataaattaataataaaaactttcacagcattgtgggcggattaaaacaaaaaaaaaataaaatacttccaatggtcgggggcgtatcatcacacctcttaaacaatgccagcgattgtctcgagcaattaaggtggtatcataaattataagaatgtcgtttattgaagctcagccacaattcgacccataaaactacagcttattatggctgctaagttcaattactcaaagctggattttgtttgggttgtcaataaatcaagccggaattggccatagagcattactcagtgtagttcccaaaataaccacagctggattgtccatgaatgaaactgttctgcctcggtctgaaatataattttagcactcccgaggcaattatgctgtctatcgtggcacttgagccgagttcgtggtcatggcctcttttacgataggattttcccttctcaagttcaagatcagaacaggatatacatataacacgcttgggaaactacgttttcgcagtgctaagctttatttcgtttttagtgcaggctgagctaggtaaacaataaataactacaggtaaatacacgtcacactcaaagacaacaaataaaaaatggctgaggatgatggctatttagaagaggaacggctgagatggcgcatcgtagtggtatccatcatcatgggactccacgatctcctggggtggcagataggtgtttacgggttcctccagaggtgcggcgtatgaagggatcgggatcttgaaggcgggcactacagctggtgcgacgtaacggggctgctccaccacaggtgcaggtggcagataagcgggcttgggtgggttgaccttgacagccggtggtggaggtggcacataggcaggcttgggtgggttgaccttaacaaccggtggtggaggaggcaggtaggagggcttgggtgggttgaccttcacaactggtggcggaggaggcagataggcaggcttgggtggattgaccttgacaactggtggcggaggaggcagataggcgggcttgggtgggttgaccttaatcactggtggtggaggaggcagataggcgggcttgggggtcctgacaaccgggatctcaggtttcacggtcgctggtggcaaataaactggaggaggcacggtcacaggagcctcacgaacggtcactggttctggaggcagataagccggagccggagtgggcagttcaaaggggatgcttggtgggtcatagttgtagccaggatggtcatggtgatcatggtggtcatgaccgaacaaatgcgagacatcagcggctaccagagccaagctgcaaacagccagcataaggactttctgaaatatacaataaaatcaatttaacacgctgagctattatccttggagagtaaacacaaaccatttttctgttggaacgttcttggtgcgacgacggcctctaccgaagtgatacagtttccggcaagtgcttctttatttatacagttagagaacctgaacctgaatcagtggtcgctataaagcgatcgcgtcacgttattacctctggccaacgccgacgccgcgagagacgatctgactgcgatccgtctatatccaaatggcccggttgtcagctaagcggcgtttaggggtctcgcccctttggcagccggtattgggaattggcattcaatttttattaaatctcttaattcgaagtcatctcgttgcgttggcttttgtttttttttggcccgaccagggagctctttatggctgggagccataaacgtgttgggttttacgatcaccgctgcgtttgccaagtacttaaaatagtttttggttaggcaattattgggataaatagtttatcgtacttttggagttgttagactatttatttcgtatgcattagtcatcatgtacctaagaaatgtataacattattgatacatcactatcaggttttaattaaaatgcttaaagacaaaatgaaagacaaatcaagtgtgctattaaagtaacctaatgtttaaacatttaaactttaacccttttcaaaagagcatactcaattcgttaggggcttaattatttatttctgtctaatcttttcatggcacctttaaaagacttgccccatctctgggcaacattgaaagaggtcaactgtcgtcccattgccgatggctgcaattggcgattagcgattttggttcggtttgaacctttctgtaaccgacaccgatcaatccctataaatatattcaaaccaaaactcacatcatttttcatccaaaaagacagtaattatcgacactgcaggtgatgatcgagctgaactaaagctaaaaccgaagccgtttggctatttcggttgattggccgcaattagatttggaggtcagattgaaatccacatggatcccttgggggctggg

SEQ ID NO: 23765 - DNA, 753 bp, DROSOPHILA
caccaagaacgttccaacagaaaaatgaaagtccttatgctggctgtttgcagcttggctctggtagccgctgatgtctcgcatttgttcggtcatgaccaccatgatcaccatgaccatcctggctacaactatgacccaccaagcatcccctttgaactgcccactccggctccggcttatctgcctccagaaccagtgaccgttcgtgaggctcctgtgaccgtgcctcctccagtttatttgccaccagcgaccgtgaaacctgagatcccggttgtcaggacccccaagcccgcctatctgcctcctccaccaccagtgattaaggtcaacccacccaagcccgcctatctgcctcctccgccaccagttgtcaaggtcaatccacccaagcctgcctatctgcctcctccgccaccagttgtgaaggtcaacccacccaagccctcctacctgcctcctccaccaccggttgttaaggtcaacccacccaagcctgcctatgtgccacctccaccaccggctgtcaaggtcaacccacccaagcccgcttatctgccacctgcacctgtggtggagcagccccgttacgtcgcaccagctgtagtgcccgccttcaagatcccgatcccttcatacgccgcacctctggaggaacccgtaaacacctatctgccaccccaggagatcgtggagtcccatgatgatggataccactacgatgcgccatctcagccgttcctcttctaa

SEQ ID NO: 23766 - protein, 238 aa, DROSOPHILA
MLAVCSLALVAADVSHLFGHDHHDHHDHPGYNYDPPSIPFELPTPAPAYLPPEPVTVREAPVTVPPPVYLPPATVKPEIPVVRTPKPAYLPPPPPVIKVNPPKPAYLPPPPPVVKVNPPKPAYLPPPPPVVKVNPPKPSYLPPPPPVVKVNPPKPAYVPPPPPAVKVNPPKPAYLPPAPVVEQPRYVAPAVVPAFKIPIPSYAAPLEEPVNTYLPPQEIVESHDDGYHYDAPSQPFLF

SEQ ID NO: 23767 - DNA, 2564 bp, DROSOPHILA
ttctttctggctgtataaatctgcattaagagcacataaattccaaaaattatttaacatcgtctttgaaccgaccgttgtggcttacattcgtggttcgtgtcccggcttactctgttacggcaacagaacacagttctttaacagtggcgatacagacaattgagcagaacacgaactagtaaaaaaaaacccgtattatagctcttactgtctgaaataagtgggtatactaggttagatgaacagtacgtaacactagaagtctgctcaatgaaatatgtacgctcttaattaggaggactaggaccagggcagaatctgactgtgctaaggaacgtcaaaatgtgttaatagtattttgtttaggtcagcaataacaataataataaaaatttagttcgtacccattactcgggcactgaaccggtatgggaatacgtatgaatcatctatccaaaacagtactatgaccatacatcgaaacaaactgaatccctaatccaattatcccttagatggaatctttatgcgtttattagaaactcaaattaataaaaatacgcatttcaaattgcgtcttattaattaactcatagtattgcagaaaagtgaaagtatttaccaaaccagatttatggacttggcgagctacttttatttaaatattttaactcaaattgatgcgagcaattgttttatggctgacatggaacctgcgtctggactactgcttttatttatggttcgcagtcgtaaccgcatttcgccagacgactgcaatcagaatgacaataccgatacatatgcaaaagatataccagctgaatgttattagatatactatatatttggggttctgcccaaattgtcttataaataccaaatgttctgctcgcaaaaaaacagtttaattgttcgactttgtgtgatcaacatggtgggtttcaatcggattggatttaataattgtgagattaatggaaaatttttctgcccagcgtgtcctcttcttgcctttcgcagtggctctcttgggagtggtcggtgccacttctctatccaggacctatttgccgcctcaggtgcaggtggtgcaaccccaggtgatctctgttcccagggttcaagttcaaccccagatcatcgagcgtcaggtggttcccgcccctctggtggtgccacaagtggttcccgtttatcgtccgtcgccagtggtgcagatagctcgtcctgctccccaagtgatctccgtggctgcgcctcgtaacacctatctgccaccccaagtgattagtcgccccgctccacaggtggtgtccattgcgcgtcccgctccacaggtggtgtccattgcgcgtcccgctccgcaggtggtgtccattgctcgtcctgctccacaggtggtgtccattgctcgtcctgctccacaggtggtgtccattgctcgtcccgctccagaggtggtgtccattgcgcgtcctgctccagaggtagtgtccattgcgcgtcccgctccgcaggtggtgtccattgctcgtcctgctccacaggtggtgtccattgctcgtcctgctccacaggtggtgtccattgttcgtcctgctccacaggtggtgtccattgctcgtcctgctccgcaagtgatctcggtggctgctccgcgcaatacctacctgccgccacaagtcatcgctcctcgtaacacctacctgccgccccagtaagatgcctcatcatccgaaacaacatttctgagcaaccaccaactcaactggtttgtggtttaacccacaacaccaactatattcgaatgctaattcaccatcttggcaaagaaatgcaaaaatacatttaataggtttatttgtgtgtctgacttgatacgattagcatattctcgaattagcgcaaaagagacaataaagaaagctcagaaagataaacaataacattgtttagactcgagaccattggagggcgtcaatacagatcagataacgtgattatgcaaaaaagggcaccatatgccattaaccccaagaggaaatgtttaagatacctaataccttgggagtcgcgatcttgaggcttctctgaacaattaatcaatcagtccatcaatcgagttagcggaacattaagtcattagcctgagcaatttgtttgctttaagtggataaggtatacggctgactagatagtttatgaccggctaattgctatacttcttgttctggatcgatttaaaaatagctctctgctactgtttctattaacccaatatcgggtttagtcttagcaaaagcttgggtgaattaaaaaagctcttcttcaagacgaaaccaaactatcaggtttgcgataaaattgttttggcaaaaaaattaagctgtgatacgtgtattcttatgaatatttatatttaatatgacagcaaaaaaatgagagttttaaatccaaactccatggcgtacctaactgataaaaacaagccccatatggcgtcgtggtcgaggtatctgtttgcccaattaaacaaatttttcgacgcgaagaaaaac

SEQ ID NO: 23768 - DNA, 564 bp, DROSOPHILA
atggacaccacctgtggagcaggacgagcaatggacaccacctgcggagcgggacgcgcaatggacactacctctggagcaggacgcgcaatggacaccacctctggagcgggacgagcaatggacaccacctgtggagcaggacgagcaatggacaccacctgtggagcaggacgagcaatggacaccacctgcggagcgggacgcgcaatggacaccacctgtggagcgggacgcgcaatggacaccacctgtggagcggggcgactaatcacttggggtggcagataggtgttacgaggcgcagccacggagatcacttggggagcaggacgagctatctgcaccactggcgacggacgataaacgggaaccacttgtggcaccaccagaggggcgggaaccacctgacgctcgatgatctggggttgaacttgaaccctgggaacagagatcacctggggttgcaccacctgcacctgaggcggcaaataggtcctggatagagaagtggcaccgaccactcccaagagagccactgcgaaaggcaagaagaggacacgc

SEQ ID NO: 23769 - protein, 96 aa, DROSOPHILA
MDTTCGAGRAMDTTCGAGRAMDTTSGAGRAMDTTSGAGRAMDTTCGAGRAMDTTCGAGRAMDTTCGAGRAMDTTCGAGRAMDTTCGAGRLITWGGR

SEQ ID NO: 23770 - DNA, 7525 bp, DROSOPHILA
acagttgacccacattgcaaaagatctttaaccccactacaaagtattggatctataggatcaataaggaaacccttgctattaaaataagaagaatctccgacgatcctttgactctatgagtgataaatcccaataaatcccataaaattccagatggttctttaaagtttagcagaattatttttattgtgatttttttccttctgttatatatatattttttttttttttttaaccccttctcacacattttgtttcatacatacgcacgcgcatttccaacataatcaggcatacaatagaacattagatctggtgccaggggtttaatacaatatatcctacatttcgataagcatacactttacacacggaaattcatacaaactcaaatcaatcgatattcagagaccgatcacacaaacaaacataaagttttgcaaaacataccataaagtaatcgtgtgtgtgttgttgattgttaaataaataaaatagttttcttagctacattaacaaaatcgtttctgttgcttattttatacatgcttttttttgtcatttttcatgtgtgtattttctcatgggtttttttgcataatcattttgaaaattttattgcattttttttttttggtatttttcatataagttttgaaattgaaacggcaaacgttaaaacctacgcatttacacagatagttaaatttttttgttgcttttctttttcgtttttacacaagtatttgttaagtttagttaattaaacatatgcgtttcttgtagctgctagatttttgatatttttgtggcatttttcctttttttgcgaattttctctcgtttcatctgggggtaaggttaaaatactaattaaaatcgcgtcgcctgccatgattgtaatgctcctcctacggctccgtcggctcctcgagcgctggaggcatggtggtggtgttggtgttgggtggttgtgggtggcgtgggtggtgcccgcctagtagcagcacttgctgcggttgttgttggcgccgctgaccagcttgcagtgctgcatctccgagcggcgcgggcggttggccttggcctggaagtcgcgcaccttgttggcccgcttgatggcactgcggcagagctgctggtgctccttcttgttcttgctctatggattgggtggagaggatagatctattagagatcatatacttttaccattgtgtaatatgtgtaatccttaccttctgactctgacgagccagcgtctgctgcttcaactgtacggccgcatggctatcgaagcgagcgttgggggcacgttgctgctcctggagagcctggcgctgatcctgcggctcagcctccggctcgggctcctcccgctgctgcggcacctccgtcgacaccccgagatcaagattaacaaaactatcggttccctcctgggtggacctaatactatgataaacggacatgctgcaaaatagaatagaaaagtcgcaagttagtcaaggatcaataagtccagatggataactagtattttgcgtgcgtttcggctgcaaatggcggttgttggtggaacgggtaggatgctgggatgggttggagacttgtaatgtgtactataaagatcaccaaccttggatgctcaatcaatagattctcaaatggtgatgtttccatattgattggcccaatcgaggtgaagcatggtggcggtgttacgtaccaggactcctccatcagcacgttagcaccctggccgtgatcctgaccctggtcgctgccgctcggcgaggccacgtacagcgactgggtcagcgtgtcatgatcgccggcccccagggcgggcacacttctgggcgggctgagggtgctgatgctcagcggccgggagacgcgcgagcgttgcagatagttgcgttgctgctgcggccggggcccactgtacagggaacacgagttgacgccctgccggcggcggcagttgaacgccgtgccagtggccacggtcaccattggagaggaggcgttgttggaaccgccccgcggctgcgacacctccaccacggagagctcctcctcggagtcgctgcgtggcagggagtcgtcctcctcgtctgcaagaggaataaaccgtattagtttagcacgaactattaagaaaataaatcttaaaagttactatttgattttttagacatggattttgccattttaacacacactttcagatcaagactgttgaataacctgcgactttattttcaatgctaatgtagtgaatgagatttatcagtatctttttctttttaattgcgtactttgaacactactttctgcacataatggataacctaatataacctaattaaaatcttaaaatttggcagaattgacaactcaccttccttctccacaatgtaccattcgtcctcgtcgaagtcctcgtcgacgatctcgccggagggcgtcagcaatttggtgatcgctggctgttgtttccgctgctgctggttggtccgctgctgcttgccacgcctgttcttgccccgcttgccgttggaggcgcgcaccgccccacgactgctgcccgctaccgagggcgtcgaggaggtgacctcaattacatcgcctgcagcgggatcgctggtcgggccgggactcgagctagagttcgcgttcgaggcgttcgttcggttctgggcgggattggcttcttggctaatggaatcggatgtagctgatccaaagagatacgaggcgaggctgcttaacattatacaaggttaatgcggctgatccggcggtaaagtgcgctggctctttctttttattgcttcttggttgcggggttgctgagatcaaagatgcgcttttccactcggatttttgtgggcctagtttcacagttagagagacgatttgtgggagattgcttatgttgctgttggttttgttccttggatttgcttgaacgttgctcagtcttttatttaattctttttgtatttgtttatgttacttgtttgtacgctgttctcttgtcttgttctgtttctctttcttcgtagcgtagaagctgcaagtggaaaggaaagagagagtggtgagaaatgagcttagcaaattgtgtgcacattgcgtaatcgccaacccccccccccccttcggaaaagtccccctttttcccagtaagccgcttgcttgcgtgggcgcacgcggttcaatggggcggctacttaatttcatttaattgcccatactctgttaagttatgagcagcaggatttttttaagtgcatacctcaagtgcttgggtaacaaagcttatttgattgaagttccaagacacgataatggtgggaaaacaaaagttatttaagtaactttagaagaacttaaggtcttgcaaatacgaatttatttaatttgatttatttagctttatatattttttagagtattcaatgtgcgtcattcaatcaatccttgctaacatttaatttaatcgcctttcgttgaaactcacatattcaacttaattttaatgaatgtgcggatccgaatgtgaactcgaaaaacgcaaacgacaagttccccacaaaatgatagcaattattttttattgcatcacttggatgctatattataaatacaatatatagctcaagcgaaatcaatgcaaatgggctttcgaattcgattgcgaaagtgaaattttcccaacgcaaattaaccgaacgctccaattatgtgtgattacattaatcagatttttcttctatagcaccgtgctgacaactgtataatagactggccagtgccataaagtatcgccgcactcgccattaagtttcccagttgatagataccccctgtccaccaaggccacctcccaccgcccccaattccatccgattccaattggaacggtgtgcatgcgccaagcttatgatcgaggcaattatatatggcacacacacacacacacagcagtagagtggtttgctggaacactaagtgtgtatgcaatttgaatcgggctctcgtcatgacaatagaaaaatgtgtataaatgtatgaactaaatcggtgatgcacttggctaaatgcatattacatagctaaagcaatggagaaactagaaaagttgtattgttaataaaatgttatgtatttttccccagtgcatttggctgattatcgcatcgtcataaagatgccagcagctcgactggcatatttttgtcgatcaaactgtgcgcacggaaaacggaaaactcaaacaaatggaaatgaaaatggatctgaagctaaagctggacttgcagagacaattgccggggcaatttgcaatttaaccgcaaagcaaaaacgtgaaaagccacagaaactaacaaagtgaaatctcctgcagcagagacacaaaagcgtacgaaaattggatttgatgaggcagtccaagtcgaaatgtcagcgaaagtttgacaatcaaatttgatgggggggggccattgacttggatagcacaaataaattctgataattgccattggcaatggtaatgcgctaaacagagagcgcgctgcctcttcaaaggggttgcaggaatacaataaacatttagcaaactcaacttgacctcaaaatgccaggccatattttagcacattgaagaatgcacatctaaccgaaaatagcggcaaaatgttttgcattcgaaatgcatttgcgttgcacaaccgcgtttgccgtgcaggcattttataaataaacacgttcatatggtggaccgatcgagggctctccttacttttatggccgacagcttacagcacccttgataacccgtaggattgattggtcatggaccccgcgatgcatatatactctacttggcttgagctgctgcagtaagcacaatttcacttttgtcacatctgcagccaaatatttgcgaccttcgaatgttcagatacaatatatatattctgatctgcattatatattctagtcagcgtgcatcgctagataccagatatcatcgcgcttattttagctcacaattttgttgattttcctttggcaccgaccttgatcgctaattggttatataagtcttaggaaatcgttatccacacaatgtttgggctttgtttgctatcggaataagttttgactgtttatcaccgacgactaacaatagagaattcgccaactcattttgaggaccgataagccgcaccccagacgaattcgccagacagcgtcaactatgctaataatttctatttgtatactattataccattgtttactatatagtctaggtccgactatagcgcagagtctggcgtgtgtggcaaacgagccagcagtcgaaagttcaggctttgttcaattgattgttctatatagtttcgagatagtggcggcttcactatccaccgggggctttcaagtggggctgggctaatgaacttgaactaatttagtagaactgacagctgctgtgagcacagagtgtgaaacaagtgcagagcagggctttcacagaacaggaatatctggaccattaagtccaaacatctctaacgaacttatttatacctcggcatgtatttcaaacaaagagccgtatgtaaagctctctgcttgagtacaaaccaatagccaatctgctatatatacatacgttaggattgatatctatatgtgggcatatattcatatcagtcaaatcgtatctgattagctttaagctctcgcccagtcaaagtgcaaaagtgcctttgttttgaaggaatttcgtgttattgtttgttacttgttttcgctttcttattatttttttttttttcttcgttttgggaaaacaaaaaacaaagtggggtatggaatttttctctttatggcataatgcggaattatgcaagctagccaaatgacgtcagtggcgaccttggcagtgcctgaattttgcgaattacaggcactaattggtagaacacttgaaaatagatagctgcgatctgctcaccttatggatgcgcaaaactatcaaactgcacaaggaaaacacacacgtaaattcactaaaaccacttagagtcaggccacaaaatcggatattgtttgagggatatatatatataggtatatatatatatatggatatggatgcggatgccactgcagacggtacagcctagtcgacactcgattgccaactgaatcgacggaagcgcatttgaatttcaaaagcgggcgcaagaacaaaagctacagtattcgtatttgagagtatctgtatctgcgagtacctgtatctgaagccgagtgttgcttgtgttttttccactgcagtttgtactcttctattattttggcgtttttcggttgggtatctcacacttctcttgtttgtttgcttgtatttacctaatatcttctgggattttcacttttcttcttctgctgcactcgattttccggtgctgctgctgttgcgtctgctttcaaatatcaaaggcgaatgccaggcagcgatcgttgtaaacgctggaaaagtatctgagtatctcttggtttttttttccccagagagcggaaaagagagcgcaactcgcgagcgtttctaagcccataattatgtatttttttaaaacgcaaaaagccaacaaagccagcgccaaaattatgctccaaccagctgagcagcgctaaaaaaccgtgagagaaccgcgatcatacgtgttgttcgtgacttttgtttaccaacaaagcgatcgcggctctccttcttcaaatacaaactatatagcgtatagtattcgctctccgatcagctgctctgacgtttgcgcactgacacactttcccgccccctagcccgctccccctcccaactgtagctgtatctgctagatacttttctatcgccagaccaagtggctcttcgctgccaactggccacgggccgcccgagtgactaagcttcgacaggaagggggtgatggaaaaaactgaatacacgtcaacaaatcatgggatttgtgaaatatgaactcaaaacctacttgaggtagttacgccatttctttttctattagtagatattagttagttttgatccgattgctaattgattgagtacatattacttgctttttatattataattaattcagttttttttttatggattacaaccatcaatatatgaaattatgccataacttggctaaaaataatcccactgtgctaagattacattttttatgaagctaataacacatattaacaatctgtatcattaattttttaattttgaaaaaaaatttttttttgattttttcactttttgacagtggttacatcatcaaaatttgcaaaaaatggcaaaatttaaaaaagttcagattcgaatacaattcgattggtggtgtttctacgagctcaaaaatgtattacattccgtatttgaacaattttttgattgttttttgtgaaaaacact

SEQ ID NO: 23771 - DNA, 1544 bp, DROSOPHILA
aaagcagacgcaacagcagcagcaccggaaaatcgagtgcagcagaagaagaaaagtgaaaatcccagaagatattagcttctacgctacgaagaaagagaaacagaacaagacaagagaacagcgtacaaacaagtaacataaacaaatacaaaaagaattaaataaaagactgagcaacgttcaagcaaatccaaggaacaaaaccaacagcaacataagcaatctcccacaaatcgtctctctaactgtgaaactaggcccacaaaaatccgagtggaaaagcgcatctttgatctcagcaaccccgcaaccaagaagcaataaaaagaaagagccagcgcactttaccgccggatcagccgcattaaccttgtataatgttaagcagcctcgcctcgtatctctttggatcagctacatccgattccattagccaagaagccaatcccgcccagaaccgaacgaacgcctcgaacgcgaactctagctcgagtcccggcccgaccagcgatcccgctgcaggcgatgtaattgaggtcacctcctcgacgccctcggtagcgggcagcagtcgtggggcggtgcgcgcctccaacggcaagcggggcaagaacaggcgtggcaagcagcagcggaccaaccagcagcagcggaaacaacagccagcgatcaccaaattgctgacgccctccggcgagatcgtcgacgaggacttcgacgaggacgaatggtacattgtggagaaggaagacgaggaggacgactccctgccacgcagcgactccgaggaggagctctccgtggtggaggtgtcgcagccgcggggcggttccaacaacgcctcctctccaatggtgaccgtggccactggcacggcgttcaactgccgccgccggcagggcgtcaactcgtgttccctgtacagtgggccccggccgcagcagcaacgcaactatctgcaacgctcgcgcgtctcccggccgctgagcatcagcaccctcagcccgcccagaagtgtgcccgccctgggggccggcgatcatgacacgctgacccagtcgctgtacgtggcctcgccgagcggcagcgaccagggtcaggatcacggccagggtgctaacgtgctgatggaggagtcctgcatgtccgtttatcatagtattaggtccacccaggagggaaccgatagttttgttaatcttgatctcggggtgtcgacggaggtgccgcagcagcgggaggagcccgagccggaggctgagccgcaggatcagcgccaggctctccaggagcagcaacgtgcccccaacgctcgcttcgatagccatgcggccgtacagttgaagcagcagacgctggctcgtcagagtcagaagagcaagaacaagaaggagcaccagcagctctgccgcagtgccatcaagcgggccaacaaggtgcgcgacttccaggccaaggccaaccgcccgcgccgctcggagatgcagcactgcaagctggtcagcggcgccaacaacaaccgcagcaagtgctgctactag

SEQ ID NO: 23772 - protein, 387 aa, DROSOPHILA
MLSSLASYLFGSATSDSISQEANPAQNRTNASNANSSSSPGPTSDPAAGDVIEVTSSTPSVAGSSRGAVRASNGKRGKNRRGKQQRTNQQQRKQQPAITKLLTPSGEIVDEDFDEDEWYIVEKEDEEDDSLPRSDSEEELSVVEVSQPRGGSNNASSPMVTVATGTAFNCRRRQGVNSCSLYSGPRPQQQRNYLQRSRVSRPLSISTLSPPRSVPALGAGDHDTLTQSLYVASPSGSDQGQDHGQGANVLMEESCMSVYHSIRSTQEGTDSFVNLDLGVSTEVPQQREEPEPEAEPQDQRQALQEQQRAPNARFDSHAAVQLKQQTLARQSQKSKNKKEHQQLCRSAIKRANKVRDFQAKANRPRRSEMQHCKLVSGANNNRSKCCY

SEQ ID NO: 23773 - DNA, 7221 bp, DROSOPHILA
acagttgacccacattgcaaaagatctttaaccccactacaaagtattggatctataggatcaataaggaaacccttgctattaaaataagaagaatctccgacgatcctttgactctatgagtgataaatcccaataaatcccataaaattccagatggttctttaaagtttagcagaattatttttattgtgatttttttccttctgttatatatatattttttttttttttttaaccccttctcacacattttgtttcatacatacgcacgcgcatttccaacataatcaggcatacaatagaacattagatctggtgccaggggtttaatacaatatatcctacatttcgataagcatacactttacacacggaaattcatacaaactcaaatcaatcgatattcagagaccgatcacacaaacaaacataaagttttgcaaaacataccataaagtaatcgtgtgtgtgttgttgattgttaaataaataaaatagttttcttagctacattaacaaaatcgtttctgttgcttattttatacatgcttttttttgtcatttttcatgtgtgtattttctcatgggtttttttgcataatcattttgaaaattttattgcattttttttttttggtatttttcatataagttttgaaattgaaacggcaaacgttaaaacctacgcatttacacagatagttaaatttttttgttgcttttctttttcgtttttacacaagtatttgttaagtttagttaattaaacatatgcgtttcttgtagctgctagatttttgatatttttgtggcatttttcctttttttgcgaattttctctcgtttcatctgggggtaaggttaaaatactaattaaaatcgcgtcgcctgccatgattgtaatgctcctcctacggctccgtcggctcctcgagcgctggaggcatggtggtggtgttggtgttgggtggttgtgggtggcgtgggtggtgcccgcctagtagcagcacttgctgcggttgttgttggcgccgctgaccagcttgcagtgctgcatctccgagcggcgcgggcggttggccttggcctggaagtcgcgcaccttgttggcccgcttgatggcactgcggcagagctgctggtgctccttcttgttcttgctctatggattgggtggagaggatagatctattagagatcatatacttttaccattgtgtaatatgtgtaatccttaccttctgactctgacgagccagcgtctgctgcttcaactgtacggccgcatggctatcgaagcgagcgttgggggcacgttgctgctcctggagagcctggcgctgatcctgcggctcagcctccggctcgggctcctcccgctgctgcggcacctccgtcgacaccccgagatcaagattaacaaaactatcggttccctcctgggtggacctaatactatgataaacggacatgctgcaaaatagaatagaaaagtcgcaagttagtcaaggatcaataagtccagatggataactagtattttgcgtgcgtttcggctgcaaatggcggttgttggtggaacgggtaggatgctgggatgggttggagacttgtaatgtgtactataaagatcaccaaccttggatgctcaatcaatagattctcaaatggtgatgtttccatattgattggcccaatcgaggtgaagcatggtggcggtgttacgtaccaggactcctccatcagcacgttagcaccctggccgtgatcctgaccctggtcgctgccgctcggcgaggccacgtacagcgactgggtcagcgtgtcatgatcgccggcccccagggcgggcacacttctgggcgggctgagggtgctgatgctcagcggccgggagacgcgcgagcgttgcagatagttgcgttgctgctgcggccggggcccactgtacagggaacacgagttgacgccctgccggcggcggcagttgaacgccgtgccagtggccacggtcaccattggagaggaggcgttgttggaaccgccccgcggctgcgacacctccaccacggagagctcctcctcggagtcgctgcgtggcagggagtcgtcctcctcgtctgcaagaggaataaaccgtattagtttagcacgaactattaagaaaataaatcttaaaagttactatttgattttttagacatggattttgccattttaacacacactttcagatcaagactgttgaataacctgcgactttattttcaatgctaatgtagtgaatgagatttatcagtatctttttctttttaattgcgtactttgaacactactttctgcacataatggataacctaatataacctaattaaaatcttaaaatttggcagaattgacaactcaccttccttctccacaatgtaccattcgtcctcgtcgaagtcctcgtcgacgatctcgccggagggcgtcagcaatttggtgatcgctggctgttgtttccgctgctgctggttggtccgctgctgcttgccacgcctgttcttgccccgcttgccgttggaggcgcgcaccgccccacgactgctgcccgctaccgagggcgtcgaggaggtgacctcaattacatcgcctgcagcgggatcgctggtcgggccgggactcgagctagagttcgcgttcgaggcgttcgttcggttctgggcgggattggcttcttggctaatggaatcggatgtagctgatccaaagagatacgaggcgaggctgcttaacattatacaaggttaatgcggctgatccggcggtaaagtgcgctggctctttctttttattgcttcttggttgcggggttgctgagatcaaagatgcgcttttccactcggatttttgtgggcctagtttcacagttagagagacgatttgtgggagattgcttatgttgctgttggttttgttccttggatttgcttgaacgttgctcagtcttttatttaattctttttgtatttgtttatgttacttgtttgtacgctgttctcttgtcttgttctgtttctctttcttcgtagcgtagaagctgcaagtggaaaggaaagagagagtggtgagaaatgagcttagcaaattgtgtgcacattgcgtaatcgccaacccccccccccccttcggaaaagtccccctttttcccagtaagccgcttgcttgcgtgggcgcacgcggttcaatggggcggctacttaatttcatttaattgcccatactctgttaagttatgagcagcaggatttttttaagtgcatacctcaagtgcttgggtaacaaagcttatttgattgaagttccaagacacgataatggtgggaaaacaaaagttatttaagtaactttagaagaacttaaggtcttgcaaatacgaatttatttaatttgatttatttagctttatatattttttagagtattcaatgtgcgtcattcaatcaatccttgctaacatttaatttaatcgcctttcgttgaaactcacatattcaacttaattttaatgaatgtgcggatccgaatgtgaactcgaaaaacgcaaacgacaagttccccacaaaatgatagcaattattttttattgcatcacttggatgctatattataaatacaatatatagctcaagcgaaatcaatgcaaatgggctttcgaattcgattgcgaaagtgaaattttcccaacgcaaattaaccgaacgctccaattatgtgtgattacattaatcagatttttcttctatagcaccgtgctgacaactgtataatagactggccagtgccataaagtatcgccgcactcgccattaagtttcccagttgatagataccccctgtccaccaaggccacctcccaccgcccccaattccatccgattccaattggaacggtgtgcatgcgccaagcttatgatcgaggcaattatatatggcacacacacacacacacagcagtagagtggtttgctggaacactaagtgtgtatgcaatttgaatcgggctctcgtcatgacaatagaaaaatgtgtataaatgtatgaactaaatcggtgatgcacttggctaaatgcatattacatagctaaagcaatggagaaactagaaaagttgtattgttaataaaatgttatgtatttttccccagtgcatttggctgattatcgcatcgtcataaagatgccagcagctcgactggcatatttttgtcgatcaaactgtgcgcacggaaaacggaaaactcaaacaaatggaaatgaaaatggatctgaagctaaagctggacttgcagagacaattgccggggcaatttgcaatttaaccgcaaagcaaaaacgtgaaaagccacagaaactaacaaagtgaaatctcctgcagcagagacacaaaagcgtacgaaaattggatttgatgaggcagtccaagtcgaaatgtcagcgaaagtttgacaatcaaatttgatgggggggggccattgacttggatagcacaaataaattctgataattgccattggcaatggtaatgcgctaaacagagagcgcgctgcctcttcaaaggggttgcaggaatacaataaacatttagcaaactcaacttgacctcaaaatgccaggccatattttagcacattgaagaatgcacatctaaccgaaaatagcggcaaaatgttttgcattcgaaatgcatttgcgttgcacaaccgcgtttgccgtgcaggcattttataaataaacacgttcatatggtggaccgatcgagggctctccttacttttatggccgacagcttacagcacccttgataacccgtaggattgattggtcatggaccccgcgatgcatatatactctacttggcttgagctgctgcagtaagcacaatttcacttttgtcacatctgcagccaaatatttgcgaccttcgaatgttcagatacaatatatatattctgatctgcattatatattctagtcagcgtgcatcgctagataccagatatcatcgcgcttattttagctcacaattttgttgattttcctttggcaccgaccttgatcgctaattggttatataagtcttaggaaatcgttatccacacaatgtttgggctttgtttgctatcggaataagttttgactgtttatcaccgacgactaacaatagagaattcgccaactcattttgaggaccgataagccgcaccccagacgaattcgccagacagcgtcaactatgctaataatttctatttgtatactattataccattgtttactatatagtctaggtccgactatagcgcagagtctggcgtgtgtggcaaacgagccagcagtcgaaagttcaggctttgttcaattgattgttctatatagtttcgagatagtggcggcttcactatccaccgggggctttcaagtggggctgggctaatgaacttgaactaatttagtagaactgacagctgctgtgagcacagagtgtgaaacaagtgcagagcagggctttcacagaacaggaatatctggaccattaagtccaaacatctctaacgaacttatttatacctcggcatgtatttcaaacaaagagccgtatgtaaagctctctgcttgagtacaaaccaatagccaatctgctatatatacatacgttaggattgatatctatatgtgggcatatattcatatcagtcaaatcgtatctgattagctttaagctctcgcccagtcaaagtgcaaaagtgcctttgttttgaaggaatttcgtgttattgtttgttacttgttttcgctttcttattatttttttttttttcttcgttttgggaaaacaaaaaacaaagtggggtatggaatttttctctttatggcataatgcggaattatgcaagctagccaaatgacgtcagtggcgaccttggcagtgcctgaattttgcgaattacaggcactaattggtagaacacttgaaaatagatagctgcgatctgctcaccttatggatgcgcaaaactatcaaactgcacaaggaaaacacacacgtaaattcactaaaaccacttagagtcaggccacaaaatcggatattgtttgagggatatatatatataggtatatatatatatatggatatggatgcggatgccactgcagacggtacagcctagtcgacactcgattgccaactgaatcgacggaagcgcatttgaatttcaaaagcgggcgcaagaacaaaagctacagtattcgtatttgagagtatctgtatctgcgagtacctgtatctgaagccgagtgttgcttgtgttttttccactgcagtttgtactcttctattattttggcgtttttcggttgggtatctcacacttctcttgtttgtttgcttgtatttacctaatatcttctgggattttcacttttcttcttctgctgcactcgattttccggtgctgctgctgttgcgtctgctttcaaatatcaaaggcgaatgccaggcagcgatcgttgtaaacgctggaaaagtatctgagtatctcttggtttttttttccccagagagcggaaaagagagcgcaactcgcgagcgtttctaagcccataattatgtatttttttaaaacgcaaaaagccaacaaagccagcgccaaaattatgctccaaccagctgagcagcgctaaaaaaccgtgagagaaccgcgatcatacgtgttgttcgtgacttttgtttaccaacaaagcgatcgcggctctccttcttcaaatacaaactatatagcgtatagtattcgctctccgatcagctgctctgacgtttgcgcactgacacactttcccgccccctagcccgctccccctcccaactgtagctgtatctgctagatacttttctatcgccagaccaagtggctcttcgctgccaactggccacgggccgcccgagtgactaagcttcgacaggaagggggtgatggaaaaaactgaatacacgtcaacaaatcatgggatttgtgaaatatgaactcaaaacctacttgaggtagttacgccatttctttttctattagtagatattagttagttttgatccgattgctaattgattgagtacatattacttgctttttatattataattaattcagttttttttttatggattacaaccat

SEQ ID NO: 23774 - DNA, 1683 bp, DROSOPHILA
cgactaggctgtaccgtctgcagtggcatccgcatccatatccatatatatatatatacctatatatatatatccctcaaacaatatccgattttgtggcctgactctaagtggttttagtgaatttacgtgtgtgttttccttgtgcagtttgatagttttgcgcatccataagcttctacgctacgaagaaagagaaacagaacaagacaagagaacagcgtacaaacaagtaacataaacaaatacaaaaagaattaaataaaagactgagcaacgttcaagcaaatccaaggaacaaaaccaacagcaacataagcaatctcccacaaatcgtctctctaactgtgaaactaggcccacaaaaatccgagtggaaaagcgcatctttgatctcagcaaccccgcaaccaagaagcaataaaaagaaagagccagcgcactttaccgccggatcagccgcattaaccttgtataatgttaagcagcctcgcctcgtatctctttggatcagctacatccgattccattagccaagaagccaatcccgcccagaaccgaacgaacgcctcgaacgcgaactctagctcgagtcccggcccgaccagcgatcccgctgcaggcgatgtaattgaggtcacctcctcgacgccctcggtagcgggcagcagtcgtggggcggtgcgcgcctccaacggcaagcggggcaagaacaggcgtggcaagcagcagcggaccaaccagcagcagcggaaacaacagccagcgatcaccaaattgctgacgccctccggcgagatcgtcgacgaggacttcgacgaggacgaatggtacattgtggagaaggaagtgtgtgttaaaatggcaaaatccatgtctaaaaaatcaaataacgaggaggacgactccctgccacgcagcgactccgaggaggagctctccgtggtggaggtgtcgcagccgcggggcggttccaacaacgcctcctctccaatggtgaccgtggccactggcacggcgttcaactgccgccgccggcagggcgtcaactcgtgttccctgtacagtgggccccggccgcagcagcaacgcaactatctgcaacgctcgcgcgtctcccggccgctgagcatcagcaccctcagcccgcccagaagtgtgcccgccctgggggccggcgatcatgacacgctgacccagtcgctgtacgtggcctcgccgagcggcagcgaccagggtcaggatcacggccagggtgctaacgtgctgatggaggagtcctgcatgtccgtttatcatagtattaggtccacccaggagggaaccgatagttttgttaatcttgatctcggggtgtcgacggaggtgccgcagcagcgggaggagcccgagccggaggctgagccgcaggatcagcgccaggctctccaggagcagcaacgtgcccccaacgctcgcttcgatagccatgcggccgtacagttgaagcagcagacgctggctcgtcagagtcagaagagcaagaacaagaaggagcaccagcagctctgccgcagtgccatcaagcgggccaacaaggtgcgcgacttccaggccaaggccaaccgcccgcgccgctcggagatgcagcactgcaagctggtcagcggcgccaacaacaaccgcagcaagtgctgctactag

SEQ ID NO: 23775 - protein, 401 aa, DROSOPHILA
MLSSLASYLFGSATSDSISQEANPAQNRTNASNANSSSSPGPTSDPAAGDVIEVTSSTPSVAGSSRGAVRASNGKRGKNRRGKQQRTNQQQRKQQPAITKLLTPSGEIVDEDFDEDEWYIVEKEVCVKMAKSMSKKSNNEEDDSLPRSDSEEELSVVEVSQPRGGSNNASSPMVTVATGTAFNCRRRQGVNSCSLYSGPRPQQQRNYLQRSRVSRPLSISTLSPPRSVPALGAGDHDTLTQSLYVASPSGSDQGQDHGQGANVLMEESCMSVYHSIRSTQEGTDSFVNLDLGVSTEVPQQREEPEPEAEPQDQRQALQEQQRAPNARFDSHAAVQLKQQTLARQSQKSKNKKEHQQLCRSAIKRANKVRDFQAKANRPRRSEMQHCKLVSGANNNRSKCCY

SEQ ID NO: 23776 - DNA, 2155 bp, DROSOPHILA
aatggatatagagtcggagagcgggagagaaagagagagcaagagagagagagagagagatagctaaagctaagctaatgtttagtgaatcttatatagagatactaagttatagctatcccaaaatatctaatcctgtggggcgggcacttaacagagtgcgcaggtgtgctatgaggagttcctacttgagattccaaattatatatatataatatatataaagtttacaaagagttttgatgactagcgcagttgtgattcggttataattttcggttctttttttttttttttttttttgcagcgctgcagcagcgacgctttgacagattctccaagactcattttttcgggcaatcgcaagtcgagatttgtgtggcggttgttgttgctggtctatttgctatatagctactaaatccagtacatttggtagttgttgctgttcttttgggagttgtgtggctaagctatatacacgaaacgttggatgccaggagctggagggccggtggtagttggtacttggtacttggtggttggcaatgagagcttggagaacttgttaaggcggcgctgccagcgcaaagcgtaaatttaagaaaaaaatcaaatcattgctgtaaaatcgtaagctagctaaggagaagagaaatagagagatagttttcgtttttcggggactaagaaacggttagcagagttaacagagtttttaggccttcatttgcatttctttcctttacgattacataacggcccttgcccgaaagggggcgtggcagtcttcttcttcgtagcccaaaatacgtacccaacgaaaaggccacaagcaccaggatgctgcacaacagccaggatttgcaggaagactccatgatttttccacacttttcacttactccagggacatggctaatttatattttttcgcattgggatttcgctggcccacgccccaaaactgtagacacaataaatgaggcctttaatccagacaaaacctcttaaaaacagcacacttcaccttatctcaagcttttcttaattttagctagtgctttatgaatattttcttaattttcactgatttttcagggaattttctttccgaactttccgtcttgaactggagccgtcagtttgggtgcggattaagaactctacttcgggaatctggataaaaatcaatgggattctgactttctagagcgcagcagccaaatctgacaaaaagagctgagcgcaggcgcgaaaaattcggataactgagatgaaaatggaaagctctctcatttctaaaggtgttttttccaaaaccaacccttttgataatctttagtttgtaaacaatagcagttggccctatcagctgttgataatatttgtttacatgtgcttggcctccagagttgccggcgcccacaaaaagtttccaccacagtgattgtgaaaagttagtggaagaatgcttccgctatccggcaatctcgttttattttgttataaaaatgtttagttatgacataagacttgggcctataaattaagcgaataacaaaaaaaaaaaaaaactaacgacgtaaaggtcaggtgggagtggaatttaatttgttatttcatagttttttttatatattttttcacagcgtccaatcgcttatggttatcattaggaaaacgcagttcctcatggcgcgtaaatgatttaaataaatgtttcccaacaacggcaatgctttcgagtacccacatttcacgatatttgttccagatttctaaaaatgcaagtgcattatttttaaactcttgtataatatggcttcagtttgaccttttggtcaaattcccaattctcattcagctgtcagcacttatattaacctttaattacatttggaattatattgccaaatggctttgggcttgtaagcttccgtgaattgattgatagctgctcaatttatttaatctatcgaggatgttgaaaaagcaagtacaataaaaactccaaaaagattctctgcaaagggaaaaccgaacaaaaaaattcaacgatgagttgcccaaaggagaatattattaataccacatgtgtgttatactgtttggtaatgaaagcatatttttacattactgatttttacggagt

SEQ ID NO: 23777 - DNA, 789 bp, DROSOPHILA
cgcacccaaactgacggctccagttcaagacggaaagttcggaaagaaaattccctgaaaaatcagtgaaaattaagaaaatattcataaagcactagctaaaattaagaaaagcttgagataagttttggggcgtgggccagcgaaatcccaatgcgaaaaaatataaattagccatgtccctggagtaagtgaaaagtgtggaaaaatcatggagtcttcctgcaaatcctggctgttgtgcagcatcctggtgcttgtggccttttcgttgggtacgtattttgggctacgaagaagaagactgccacgccccctttcgggcaagggccgttatgtaatcgtaaaggaaagaaatgcaaatgaaggcctaaaaactctgttaactctgctaaccgtttcttagtccccgaaaaacgaaaactatctctctatttctcttctccttagctagcttacgattttacagcaatgatttgatttttttcttaaatttacgctttgcgctggcagcgccgccttaacaagttctccaagctctcattgccaaccaccaagtaccaagtaccaactaccaccggccctccagctcctggcatccaacgtttcgtgtatatagcttagccacacaactcccaaaagaacagcaacaactaccaaatgtactggatttagtagctatatagcaaatagaccagcaacaacaaccgccacacaaatctcgacttgcgattgcccgaaaaaatgagtcttggagaatctgtcaaagcgtcgctgctgcagcgctgc

SEQ ID NO: 23778 - protein, 64 aa, DROSOPHILA
MESSCKSWLLCSILVLVAFSLGTYFGLRRRRLPRPLSGKGRYVIVKERNANEGLKTLLTLLTVS

SEQ ID NO: 23779 - DNA, 3880 bp, DROSOPHILA
gcctcagctccagctcccgttcagtcctttgctcctgctccagctcccgcccccgcccccgtgcagtccttcgcctctgctccagctcctgctttcgagtcctccggaccggtgttcgaggccgcagcttccgccccctctgccgcccgctccggatacgattatagccagcccgccgccagccagcagggatacaagtacaagaccgtccgtcgccgtgtgttcaagcaccgcgcttaaacgatgatgatgatacgataaaatgcgacaataaaaaactcgaatattaaatttataaaaacatagttttatttgagcattaaaacactaataaagataatatgataatttgataattaaacaagaatgatatggtgtatagttttagcaaaagaagcgcgcaaaaaaaaaaactataaaacctaaaacaacatttcaaaagtgctaaaattcttgctagaaaagaaaaaaaaaatcgcaaaattaaattttattaataattgttagttagtactggagtgcagtttttcttatccataactaacaatcagttgttaatgataaattagtttgaagcttcaattgtattactaggccaaattcacacctggaaacgaagttcaaagaacccatgcgttatcgcataagtgtgcagcgcacttgggccaataaatttaaacgctttgatctgacaaatttacgggacactttcgttgtgcttcagaatattcaatagaatttaaattggcggctattcaataagaacaaatgggtcacataaagcgcggaatcgatttctcacgctcggcaacaggtttcgctttcaactgtggtcttttttgggggctcgatgtggggatgcaacaaaaaagatcccgaagagagtatataagttgcatctacagctgcttacagtcactggcactttagcaatggtaacggatcaacgataggttctaggttccgcatttcaccaatccatttttattttagaatgtcctcgtgatcctggttctatgccttatggcaatcgcatgtctggcggacgtttcccatgtgaaacaccacaagcaccagcggcatcatcactccagggatcacgaagatgacgatgaggagtcccattacctacctccccacgaggaaaaggaggtggagcaacctttttacaagaaggagaagcacaccagtgaaaaggtggtttaccacaaggtagaggagcacgaggagcccaaatactacaaggagcatcaacatgaagagcccaaaaagcagcgagtggatcactaccatcactatgacaagaagccagaagtaaagacccagcacattcactacaagcatagcaagccccatgtccgtacggattacaatcaggacttgttcaccccagctgctacccaagtggtttatcgccgccgtcgtcctagtcgaattctatacgccagtgcccccaactcggtgttccacacccacacgcagatcaacgtgcagtcccaggattcggaattgaattcccttactcgcccagatcgtgcagcaggagcacaggatcctgctggggctcaagcaccgactggagcccaggcaccaggatttcgacccaactgccagtttgttggacctggaaacgtaccacctggctgtggaccctctgatcccataggtgctcagctaccagccagtgctttggctcccactggtgctaatcttccggccaatcaacctgttgccggcggacaattggctgttctgggtaacggtcagcgacctccacgtccaggtggctatggaggtggatatggcaaccgactcaacttttttgttgatccttcgctgggcgctcagctgggagccataggtaatgctggagctggaaatcaacaggctgccggaggaggtcagcttgcgggaggagctcaacttggagggagccaaggattcgacccttcctttggtgcccaagcagctgccggaggaccatttaacactggttttggagctggtcaaagacctcaaagacctgcgcaaaaccaatatgatcccaaccttcagctaggtggcccttttgacccctccgtgggtgctcaattgggcgcaggtcagggtgtttctaaccaaagaccaagtggacagggagcatttgatccttctacaggtgctcaattgggcgcaggtgagggtgtttctaaccaaagaccaagtggacagggagcatttgatccttctacgggtgctcaattgggtgcaggtcagggctttaaccagagaccaagtgcacagggagcatttgatccttcgacaggtgcccaacttggagctggacaaggcgtgcctaaccagcgacccaatgcagctggaccaggagcttttgatcccaatcagcgacagtccgacccctccattggagcccaattggcagcgggacaagtaccacgcctcaacaaccgacgacagcgcaatcgatccaactaccagggtctcaatgtgctgaatggaaacgttttcggacaaccccatctccagggacccacaaatgcgctgggaaatcaacaggacaccaacatcatagacggcaacttctacagcgatcctcatcatggacaccagcgggctttggtatcggttaatcctaatcagcgttcagtccttatacccgatgacgatgatgcggacgatgatgggcagctaggatttctgggctttgcggctagtaacaagcagtcctcttatgtggttgctcccaaacaactgcgatctcataggcgcagttcaaagcgaaacaatgtggatcttaaaacatctgcttcggagtacgacactgactatcgtgaggatggctatcactaccagaagcccaaacagtcattcgagttttaagtattttaaaacagaacatattataacataaattaaatcatacttatcagcatttgctacaagagcataccaaacaaaccttgattacttatttaaagcatactttcaggcgaaaactatggcggctacttccgtttccgctcaaggtagctttaaagtttgttgagaaatcgacacgggttttcaagctgagctttataaattgagcttttgattaagctttacaccagactacaaatatctatattgcacataaaaatatccagatatttaccaactatgtatatttgatttttttgtttgcctttaaattacatacattaacataaatatacacgtgcaaatagattagggcatttatgttctggccatatctgcgattgcctttgatggaaaaggtgtatatattgtccattagggtacgcggaaaggaaactagttcagagctatatagaaatagaggcacaaagacattttttttatagtgagagaggcaaaatgaattgtcgacataaatttatgcaatcatttagattcgattctcatgcaaatccaatcaactgaaatcaaaatagaaataaaacaaaatctattgtttcaccaggcagcatatcttggccagtcgactgcatagaggtgagctgcccaaaacacattcattggatccgtttttggcccacctcatttgtgacctatggataaaaggctgcgtgtatgttatgtttttgttatgattattttttactcagactgaggcgggccttagtaatgtttaaattcggcaatcaatgtcaatattagcgagtggactcctaaatcaaatgtgggcagtccactgccggcatgtgcgtctgttttttggccaactgtaggtcagagaggattagccttagcccatctcgtcggctcgtgacccaatgcaccgacccatagaaacctattagctgatccccataaatcagcgcacttctcctggtgaaattggcaagcttaagagagt

SEQ ID NO: 23780 - DNA, 1880 bp, DROSOPHILA
tcgtgatcctggttctatgccttatggcaatcgcatgtctggcggacgtttcccatgtgaaacaccacaagcaccagcggcatcatcactccagggatcacgaagatgacgatgaggagtcccattacctacctccccacgaggaaaaggaggtggagcaacctttttacaagaaggagaagcacaccagtgaaaaggtggtttaccacaaggtagaggagcacgaggagcccaaatactacaaggagcatcaacatgaagagcccaaaaagcagcgagtggatcactaccatcactatgacaagaagccagaagtaaagacccagcacattcactacaagcatagcaagccccatgtccgtacggattacaatcaggacttgttcaccccagctgctacccaagtggtttatcgccgccgtcgtcctagtcgaattctatacgccagtgcccccaactcggtgttccacacccacacgcagatcaacgtgcagtcccaggattcggaattgaattcccttactcgcccagatcgtgcagcaggagcacaggatcctgctggggctcaagcaccgactggagcccaggcaccaggatttcgacccaactgccagtttgttggacctggaaacgtaccacctggctgtggaccctctgatcccataggtgctcagctaccagccagtgctttggctcccactggtgctaatcttccggccaatcaacctgttgccggcggacaattggctgttctgggtaacggtcagcgacctccacgtccaggtggctatggaggtggatatggcaaccgactcaacttttttgttgatccttcgctgggcgctcagctgggagccataggtaatgctggagctggaaatcaacaggctgccggaggaggtcagcttgcgggaggagctcaacttggagggagccaaggattcgacccttcctttggtgcccaagcagctgccggaggaccatttaacactggttttggagctggtcaaagacctcaaagacctgcgcaaaaccaatatgatcccaaccttcagctaggtggcccttttgacccctccgtgggtgctcaattgggcgcaggtcagggtgtttctaaccaaagaccaagtggacagggagcatttgatccttctacaggtgctcaattgggcgcaggtgagggtgtttctaaccaaagaccaagtggacagggagcatttgatccttctacgggtgctcaattgggtgcaggtcagggctttaaccagagaccaagtgcacagggagcatttgatccttcgacaggtgcccaacttggagctggacaaggcgtgcctaaccagcgacccaatgcagctggaccaggagcttttgatcccaatcagcgacagtccgacccctccattggagcccaattggcagcgggacaagtaccacgcctcaacaaccgacgacagcgcaatcgatccaactaccagggtctcaatgtgctgaatggaaacgttttcggacaaccccatctccagggacccacaaatgcgctgggaaatcaacaggacaccaacatcatagacggcaacttctacagcgatcctcatcatggacaccagcgggctttggtatcggttaatcctaatcagcgttcagtccttatacccgatgacgatgatgcggacgatgatgggcagctaggatttctgggctttgcggctagtaacaagcagtcctcttatgtggttgctcccaaacaactgcgatctcataggcgcagttcaaagcgaaacaatgtggatcttaaaacatctgcttcggagtacgacactgactatcgtgaggatggctatcactaccagaagcccaaacagtcattcgagttttaa

SEQ ID NO: 23781 - protein, 618 aa, DROSOPHILA
MAIACLADVSHVKHHKHQRHHHSRDHEDDDEESHYLPPHEEKEVEQPFYKKEKHTSEKVVYHKVEEHEEPKYYKEHQHEEPKKQRVDHYHHYDKKPEVKTQHIHYKHSKPHVRTDYNQDLFTPAATQVVYRRRRPSRILYASAPNSVFHTHTQINVQSQDSELNSLTRPDRAAGAQDPAGAQAPTGAQAPGFRPNCQFVGPGNVPPGCGPSDPIGAQLPASALAPTGANLPANQPVAGGQLAVLGNGQRPPRPGGYGGGYGNRLNFFVDPSLGAQLGAIGNAGAGNQQAAGGGQLAGGAQLGGSQGFDPSFGAQAAAGGPFNTGFGAGQRPQRPAQNQYDPNLQLGGPFDPSVGAQLGAGQGVSNQRPSGQGAFDPSTGAQLGAGEGVSNQRPSGQGAFDPSTGAQLGAGQGFNQRPSAQGAFDPSTGAQLGAGQGVPNQRPNAAGPGAFDPNQRQSDPSIGAQLAAGQVPRLNNRRQRNRSNYQGLNVLNGNVFGQPHLQGPTNALGNQQDTNIIDGNFYSDPHHGHQRALVSVNPNQRSVLIPDDDDADDDGQLGFLGFAASNKQSSYVVAPKQLRSHRRSSKRNNVDLKTSASEYDTDYREDGYHYQKPKQSFEF

SEQ ID NO: 23782 - DNA, 3436 bp, DROSOPHILA
agttcaagcctgcttaacgcttttagaccatttacctacaaaagtaagggtatgttaactttcttggatggtgtgtctttttaatatgccgttattaatttaataggtttttatgacctaaacgcttatgtaatttattaaaatgttattttatagtggatatattatttatatacgatttgcaattaaatatagaaacgttttgttagcagaatctagttcgaggaatagaattaattaccccgttttattaatgttttccttcgactcttcataaaaggtaatttttccaaaagtgtattcagttcattttgttcaggttttctttcagccggtgatatacaatcgctttcgacagtcacatctatgtattgtttcggcattgaggtcgtgatttatttccgcaatttgattgctttttcggcagtcatttcgcttcttaccaactgtttttagccttttctccgctccgctatcgaacatctgcttttattacccgaagtcatagaacccgattagtaccagttgattaagccacaatataattatcgacaattaagcaaattgagctggggtgggtcggaattgggaatcgaaattggcacgcgtttggtctgggagaaattggcaagtgcggataggggaacaatggaacctgatcttggccactaagtattaacgaaatatacttaaaatattaagtggccgtttggatgatttggcggttaggccgggggtgaaagggggactcccaaatcgtggctcatgatctcgctggagttgagcagagcgcaaaacccgttgcaaacctgcttgcaaaactataatggatatgttttggcggtgtcactaaatacaaattcataaattaaatagtcaaatgcaaatttctcgccgcaggccggtgattagaatcatataaataagccgcagaacattgtctaaggcatcacttccacttgcactctccgttcaactggacagccgagcacccagcaaaatggtattaaccaggaacggtgcgccattaggataatcagctaatatgtgccattttctccattgcagaaattcttcttgttctgcgccttcatcgccgccgtggccgctgatgtcagccacctgccatctagccagtacctgccccccggccgtggagcagcatcggctcccgtggcttcctactctgctccttcccagagctacagcgtagaggcctcggccccagttgcctcctactctgctcccgttgagtccagctactccgttgctgcttctgctccagcggtgtcttatgctgctccagctgtgtcctacgccgctcccgcccagagctactctgctcctgctgccacctacactgctgctgcttctgccccagctgtgtcctacgccgctcctgcccaaagctactctgctcctgctgccacctacactgctgctgcttctgccccagctgtgtcctacgccgctcctgcccagagctactctgctcctgctgccacctacactgctgctgcttctgccccagctgtgacctacgctgctcctgctcagacctacaccgctgccgcttccgccccagctgtgtcctactccgctcccgctgagtcttacgagaccgctgcctctgagcccgcccacaccttctcggccaacgatggataccgctacaagacccacaagcgcgtggtccttcgccgtcatcgtcgtggcgtgccctccaacgactacctgccccccttccagggagccgcttctgccccaaccagtgagtacctgcccccagcagcttccgcccccgctccagtctaccagagcgctgcctctgccccagctgtgtcctacgccgctcccgcccagacctattccgcacctgctgtctcctacgccgagcccgccgagagctacgaaaccgctgcttctgctcctgcccactccttctcctccaacgatggataccgctacaagacccacaagcgtgtggtgctccgccgtcaccgtcgtgatgtgagccacctgccttccaacgattacctgcctccagcagcctctgccccagctccagtgtactccgcccccgctcagagctactctgctcccgctgccacctacaccgctgctgcctccgccccagctgtgtcctacgccgcacctgcccagagctactctgctcctgctgccacctacaccgctgctgcttccgctccagctgtctcctactctgctccctctcagagctactctgctcccgagtactacagcggtgccgcttccgccccagctgtctcctactccgccccagctgcttcctactctgccccagctgagagctacgagaccgccgcctctgagcccgcccactccttctcctccaacgatggataccgctacaagacccagcgtcgcgtggtcctccgccgtcaccgttactagaggctccaacgaacccccagcgaaccgagccaaatcctgttatttgactcacgggtttcatctgggaaacgaaattaataaattcataaataaaaaaaatattgaaaaatacttccactgcctgattaattaatcgactaacaggaaaccccattgacgggagcccccttatttgcctaacaataatattgcataatagaataagaagttttggccactaaagccaatgattatcaggcattaataccgagctgtcgtcaagcggagacgatacagcaactgaaaaaactagttcaaatcgagatgcggaaactcgtttaatgcttcgaaattaattttttgttcagcaagtgcattgtcatctgaagcttcaagttcaaagtcaaccataagaaaattcgaggcatactttttggcctttgtaagatttatatggatgtagtaagcatatagtaagtgtatatttatgtagtaagtccctcgcggcagactacagagttaaaaaaaacccagtgaattatggatctattttgtaaggcagacttattaaaaaatttatcttagtaatataaaaagcctcaatgtatagcattatatccgtatcacagaaagacttttgttattccggctaaaaaatagcaggttgaatgattccaatgctatcgcgttaccgaagtttgagcagaattattaatttcttgttgcccaaatgtactctacttttcggcaagccagcactataaactgcgatgtctaaaagtatgtgattcgaccgaatttttagtttattctagatgggatctgctgtttcactctaagactagacgtcttacccttcgacacactgaaagaaaacagtaagaacataacattcacattgtcatttttaattcggcagcattgcgtaatcgttaaaacataagttttaaaaacatattttaatgactaagttcgattggagattccgcaggcaagatccccggtaaatcattaataatag

SEQ ID NO: 23783 - DNA, 1101 bp, DROSOPHILA
atgaaattcttcttgttctgcgccttcatcgccgccgtggccgctgatgtcagccacctgccatctagccagtacctgccccccggccgtggagcagcatcggctcccgtggcttcctactctgctccttcccagagctacagcgtagaggcctcggccccagttgcctcctactctgctcccgttgagtccagctactccgttgctgcttctgctccagcgacctacaccgctgccgcttccgccccagctgtgtcctactccgctcccgctgagtcttacgagaccgctgcctctgagcccgcccacaccttctcggccaacgatggataccgctacaagacccacaagcgcgtggtccttcgccgtcatcgtcgtggcgtgccctccaacgactacctgccccccttccagggagccgcttctgccccaaccagtgagtacctgcccccagcagcttccgcccccgctccagtctaccagagcgctgcctctgccccagctgtgtcctacgccgctcccgcccagacctattccgcacctgctgtctcctacgccgagcccgccgagagctacgaaaccgctgcttctgctcctgcccactccttctcctccaacgatggataccgctacaagacccacaagcgtgtggtgctccgccgtcaccgtcgtgatgtgagccacctgccttccaacgattacctgcctccagcagcctctgccccagctccagtgtactccgcccccgctcagagctactctgctcccgctgccacctacaccgctgctgcctccgccccagctgtgtcctacgccgcacctgcccagagctactctgctcctgctgccacctacaccgctgctgcttccgctccagctgtctcctactctgctccctctcagagctactctgctcccgagtactacagcggtgccgcttccgccccagctgtctcctactccgccccagctgcttcctactctgccccagctgagagctacgagaccgccgcctctgagcccgcccactccttctcctccaacgatggataccgctacaagacccagcgtcgcgtggtcctccgccgtcaccgttactag

SEQ ID NO: 23784 - protein, 366 aa, DROSOPHILA
MKFFLFCAFIAAVAADVSHLPSSQYLPPGRGAASAPVASYSAPSQSYSVEASAPVASYSAPVESSYSVAASAPATYTAAASAPAVSYSAPAESYETAASEPAHTFSANDGYRYKTHKRVVLRRHRRGVPSNDYLPPFQGAASAPTSEYLPPAASAPAPVYQSAASAPAVSYAAPAQTYSAPAVSYAEPAESYETAASAPAHSFSSNDGYRYKTHKRVVLRRHRRDVSHLPSNDYLPPAASAPAPVYSAPAQSYSAPAATYTAAASAPAVSYAAPAQSYSAPAATYTAAASAPAVSYSAPSQSYSAPEYYSGAASAPAVSYSAPAASYSAPAESYETAASEPAHSFSSNDGYRYKTQRRVVLRRHRY

SEQ ID NO: 23785 - DNA, 5760 bp, DROSOPHILA
atacattcgaatttgtttaaattgtttgtctttcatgtagaatcctcatagttctacacaatctggtgatgtggctggtctatccgattccttagtattatttacgaataatctgtacaattcacgccttgaatcgctgatgaataataataataatgatcccagcatttttgttaatcagcaacggtaggtatcaaaggattcatattgctcgcaaatctaaataaaaatatttctagatcggcgtgggataagattgctagggaatcatttaaaattgagggaaatgtgaatctcattcgttgttgcaatggagtgccctcaataccgaagctggataaaatatttcagcccattgatagcaagatcaagaaatcaaaaaaggttgtggaggctgaaaaaccagaaaatactccaagtgatcttccagaaatagaaatagatttatctattaaagtcaaggggcaggaaataaacctgcgagaatacggaacccaactcaagaaacatattgcaagctcagagagcttcgacattttgataagtagaatgtcagagcatttggaagtcgacacttttaagcttataatggcgctaacgcaaacatttgtggaaactgtgagggaggaaatgtgccaaatgctaaaatattattttcccacggaatccattctatatcagataatactgtgcataagtaagcaccatccaaagtgggacttcaatgaaattgaagagcattcgtcggatattttgaggcgcgtacgaatgttttttgtttctactggaccgaatccctatgctgaatttttaaagaaatgtgaagtatgtcctggatactacgacatatgcaaatcgacttaaaacaatattttgtattaccttaccttatgtgaattccactgccttacgatcatataataaaagccaaatatacacaatgtatatcctttaaagaaggaccattccaacatatatcgagtaaattattcagatttttaaattttttcaacagttgtatattctgtgctggggaataatgattttacgtaacacaaagtacatatacagctagtgattatcttattaagtatggtttccacccgaagtacaggatatatcatataagtaaatacaatataagtaacattgactaagataagactaagtttagtgattcgataataatgattagttgtacatgaaagcaatcacaattgtcagatggaggcgtgtgcggtgaccttaacgatctagtttagggctagcatctttaaatcgattttggcttgctctgccgtcgatttagcaaacttgaaagattgctgaagggcagctcaaaggccagcgaaaagaggatggaagccaggtagactatgacagcaaagccgcaggtcaccacgcactaaaaattgatgacaaagttattggagtcatttaaaaaaacaaaaggtaatgaagtccacatggtactcaccagcatgaaaggatccgcatgtgtgctcgcgttggttaaactgtagaataacgctatgaccagcggattgagaaggtaaatggcgtaggacagtcgactgacatgttggaagcccttggcctccagcaggcgtgaccaccacaccccccggccatcgcagctgcgcgctatcatccagcatacactaagcgaaaagaacaggcgacccatcacaaaaagcgtgatggccatcagaggtccaagatcccgtttgacagtcgaataaatgcaggcgaagaagacgaataaggcgaagtgccagcatgcccgttccttttgctcgctgatctccaactggactcgattctcttgcaatagccaagccgttacagctcccaggatatatggaaggacccttacgaagggcgatgtatagatctctgttccagtggcaaaggccgcgtcgaaggacaattggaacttgatgctcagtccgatgccgtaggaccaagcgatggtggccacaaaagaagataccactagagactttaccaccttgggatatctatttatcaatgaaaagtatagcgtttatttcgtatttatatttgtaagtaataaactaaataacttacttcacatagaggaacagcagagcgttggccaggataaagaactgcatttcgcaggccaaggaccaactccaattggcgcacatgtcccgatggtcgaagaggttttgaatgaacaaaagattgcgccaccagtgacgtgtacacatctcatcgaatcgctcgttgatgtggtaaactgagacatctccaatataggcgtataccaagtccacggtggccatgaccaccaggtaaagaggtccaagacgcaaataacgatggaagagcagtttgccaaagagttttagattttcgctgaagctattttgccgtactgcctccaactgccgggagttcctgaggaagttaaatgtttgcaggaagccactatgaaacaaaaaaatgaacatatttacataaaggtttatggtttgtatcagtggtttctatcgaacccacctgatggtaaagaagacatccacgagcagaggagccgacgagacatattggaagaaggcctgttcggcatacgaaatcagcaccgtcttattgtggacagtaaagtacatgaaccataccacatggaagaccatgatccagatagcgcatacagatcgcaggccattcatcaagggaatttcattcgcagtattctccctaatcgcaaaaattttggcccaattgccgggaacatcccagcaagttacatatcgctgcagtctctctatttggagcagggagttaagtccacgccatatttccgattccgcgggtgccaagtcacgatccagaggatccacagaaatagatggcattttactagtcgcatgcagttgttgagcacaaaacatcagagtgacagtgagcagaacacaggccaccaagagacgaaagctggccctctcgaagaattcatccttcagctgcagatccttcatgtaaaccacttccggctttatgtcgaatatctcgttttcagtgaacattccgccagccacatagtcctgggccagactctgaacttcaaccgaactgcaggcacttggcaggcacaggccaatgtgtataatctgctcagacatcagcttaatctccacttgccacggagaattgtgacgtaggtataaaacccgatagtccatgtcgaagggcgcctgctgggtgataattccatagtgcataacacgatcgaagttctttgatagggttatgcccacgggtctttggacgccgcgacaagcttcgcgacttcccagccagtagttttgaccatatacaaagccggagggctttgttcccgaagcatccagaactgtgggaaaattcaatagcacttcaattaggaacatgttaatagcttttgtgatcaagggttcaacctacagagcgaatctgaaattaagtgttctttgtgcccaagtaactaagctgtcgaattcaagtgtcgcatgagtaatggtattttcaaaatataaagtccatgattattagttttgaaatttacttagaagtttggtaatttacaatctttgcattattttttatcttgagtcattcgcttatctaaacaaattttttagaagtgttttctcgtacggttcacttgtagtcatgcaacttacttaggtgcgaattttaatagaaaactgtttatttgatgaatcgcatattttgcatttcaagtaaactaatctgcgtactgattggagattgtacatacattattggatttgcctctagggtcgtgcaaatttactttttttttttaggaagtcaacaagtacttggggactttacgctccccttgtgaccatatgtatttatttttatcgactcacccttcatggcccatggctgtttgccgagtatgccgcgctgcatttgtcgcagctgcgcgtggcacttttggctgacgctgctctcgttggccactttggtcagtccgaaaatgacggaggtgcgtgtcaaatgggtttcatgaggcgaatgtatctcaatcgtagagggggcatccaatatttccaattcatcgggcagcgctggcgacgcattgagtgcctgactgtgatatcgctgccaggcgtgtgagttggtagtggccgactgattgctagcgcccttggccaaaaccgaacccagccaaaggccgagcagcatcagcactggtgtgtaccaaagatatggtcgagaggtgcgcctgatctccatgctgaggcggtgggtacttggtaaccttggcttatatttatctatttagctgctgttagtgcgcgtattgtgagagttatttggaccgcgcttgtttggctatctcaaatggctcgttcgattgctgtttgctgccgtcgattgccgaaggtcaccgcactgcgattcactgcgattcacctggccacgcctgtgcttctcgcccctcccggatccagatgcctgtggtatatttatattggttaatgcttgccaattgatggggagaaactttcgtcggccatcgatggccaataagcacgttttcaaacgcggctcagtaatttcccactgacacacattgcacacactaaaaagtagcaacgcttttatctttggttttgccgattgcattagaatattacgcatacgcagtgtagccgcttaaataaccattcatgaccgaggaatacaagaaaacgagagcgagtttttttgttttgtttttgttttttttttcttagcaataattaaaatttaacgtctttatttcgttatgaatgagttgcatcttttgtttgactattagtaagttcgtaaaaaaatgtattttgcaaggtgttcaggcgaaatataacaccaaattgggtcagcacttaattatacttgttttttatttacattaaatggtaattaacgagttatttctcaattatgtttgatagctattaacatttaatgtctcttatttgaactttgtaaatactattgttaattactcgttggaaatggaggttgtaggttattttccctatgtaaaaagtgaaagatgtaaagaaaacacgcaatacacgcacaacactactacgactcatcatcgatttcgttagaatattacgcatacgccttgtgcgcccaattaccggttaaacaatcgtcgaaagagcggaaaaccgcaccgagggtaacttatgcaataattaacgttaataattttgcgttttatttcgattgtattggatctgcggccacaaacaaacggcacggcgagtaaaagtttttgaaacgcaacaaaaagataaacaagaaaccaaataaacgaaacgagacgagactcaacccaattccgctgggagtgcgactcaaatggagactaaggttcaattgattaccttcgttgcccggcgacgaatttgagttgttggccaaatgccgggttgagtctcgatatttgagttgttattttcaacctggagtgagttatgcgcaggtgtaaagacatcggtacttccattgattttgcacccaaactgctgaccacacacaattgatcgtgtgttggtgctggcctttcgttttcgctttgacacactcgcacacaatcgcagctcactcatacgtaataattcgcaggttattgtttattatgttatgactaaaggtgcgcgtgtaatcaaaattaaccgacgaaatgcggttaaagaattatgtgattactccact

SEQ ID NO: 23786 - DNA, 3020 bp, DROSOPHILA
caaaacaaaaaaactcgctctcgttttcttgtattcctcggtcatgaatggttatttaagcggctacactgcgtatgcgtaatattctaatgcaatcggcaaaaccaaagataaaagcgttgctactttttagtgtgtgcaatgtgtgtcagtgggaaattactgagccgcgtttgaaaacgtgcttattggccatcgatggccgacgaaagtttctccccatcaattggcaagcattaaccaatataaatataccacaggcatctggatccgggaggggcgagaagcacaggcgtggccaggtgaatcgcagtgaatcgcagtgcggtgaccttcggcaatcgacggcagcaaacagcaatcgaacgagccatttgagatagccaaacaagcgcggtccaaataactctcacaatacgcgcactaacagcagctaaatagataaatataagccaaggttaccaagtacccaccgcctcagcatggagatcaggcgcacctctcgaccatatctttggtacacaccagtgctgatgctgctcggcctttggctgggttcggttttggccaagggcgctagcaatcagtcggccactaccaactcacacgcctggcagcgatatcacagtcaggcactcaatgcgtcgccagcgctgcccgatgaattggaaatattggatgccccctctacgattgagatacattcgcctcatgaaacccatttgacacgcacctccgtcattttcggactgaccaaagtggccaacgagagcagcgtcagccaaaagtgccacgcgcagctgcgacaaatgcagcgcggcatactcggcaaacagccatgggccatgaaggttctggatgcttcgggaacaaagccctccggctttgtatatggtcaaaactactggctgggaagtcgcgaagcttgtcgcggcgtccaaagacccgtgggcataaccctatcaaagaacttcgatcgtgttatgcactatggaattatcacccagcaggcgcccttcgacatggactatcgggttttatacctacgtcacaattctccgtggcaagtggagattaagctgatgtctgagcagattatacacattggcctgtgcctgccaagtgcctgcagttcggttgaagttcagagtctggcccaggactatgtggctggcggaatgttcactgaaaacgagatattcgacataaagccggaagtggtttacatgaaggatctgcagctgaaggatgaattcttcgagagggccagctttcgtctcttggtggcctgtgttctgctcactgtcactctgatgttttgtgctcaacaactgcatgcgactagtaaaatgccatctatttctgtggatcctctggatcgtgacttggcacccgcggaatcggaaatatggcgtggacttaactccctgctccaaatagagagactgcagcgatatgtaacttgctgggatgttcccggcaattgggccaaaatttttgcgattagggagaatactgcgaatgaaattcccttgatgaatggcctgcgatctgtatgcgctatctggatcatggtcttccatgtggtatggttcatgtactttactgtccacaataagacggtgctgatttcgtatgccgaacaggccttcttccaatatgtctcgtcggctcctctgctcgtggatgtcttctttaccatcagtggcttcctgcaaacatttaacttcctcaggaactcccggcagttggaggcagtacggcaaaatagcttcagcgaaaatctaaaactctttggcaaactgctcttccatcgttatttgcgtcttggacctctttacctggtggtcatggccaccgtggacttggtatacgcctatattggagatgtctcagtttaccacatcaacgagcgattcgatgagatgtgtacacgtcactggtggcgcaatcttttgttcattcaaaacctcttcgaccatcgggacatgtgcgccaattggagttggtccttggcctgcgaaatgcagttctttatcctggccaacgctctgctgttcctctatgtgaaatatcccaaggtggtaaagtctctagtggtatcttcttttgtggccaccatcgcttggtcctacggcatcggactgagcatcaagttccaattgtccttcgacgcggcctttgccactggaacagagatctatacatcgcccttcgtaagggtccttccatatatcctgggagctgtaacggcttggctattgcaagagaatcgagtccagttggagatcagcgagcaaaaggaacgggcatgctggcacttcgccttattcgtcttcttcgcctgcatttattcgactgtcaaacgggatcttggacctctgatggccatcacgctttttgtgatgggtcgcctgttcttttcgcttagtgtatgctggatgatagcgcgcagctgcgatggccggggggtgtggtggtcacgcctgctggaggccaagggcttccaacatgtcagtcgactgtcctacgccatttaccttctcaatccgctggtcatagcgttattctacagtttaaccaacgcgagcacacatgcggatcctttcatgctgtgcgtggtgacctgcggctttgctgtcatagtctacctggcttccatcctcttttcgctggcctttgagctgcccttcagcaatctttcaagtttgctaaatcgacggcagagcaagccaaaatcgatttaaagatgctagccctaaactagatcgttaaggtcaccgcacacgcctccatctgacaattgtgattgctttcatgtacaactaatcattattatcgaatcactaaacttagtcttatcttagtcaatgttacttatattgtatttacttatatgatatatcctgtacttcgggtggaaaccatacttaataagataatcactagctgtatatgtactttgtgttacgtaaaatcattattccccagcacagaatatacaactgttgaaaaaattt

SEQ ID NO: 23787 - protein, 754 aa, DROSOPHILA
MEIRRTSRPYLWYTPVLMLLGLWLGSVLAKGASNQSATTNSHAWQRYHSQALNASPALPDELEILDAPSTIEIHSPHETHLTRTSVIFGLTKVANESSVSQKCHAQLRQMQRGILGKQPWAMKVLDASGTKPSGFVYGQNYWLGSREACRGVQRPVGITLSKNFDRVMHYGIITQQAPFDMDYRVLYLRHNSPWQVEIKLMSEQIIHIGLCLPSACSSVEVQSLAQDYVAGGMFTENEIFDIKPEVVYMKDLQLKDEFFERASFRLLVACVLLTVTLMFCAQQLHATSKMPSISVDPLDRDLAPAESEIWRGLNSLLQIERLQRYVTCWDVPGNWAKIFAIRENTANEIPLMNGLRSVCAIWIMVFHVVWFMYFTVHNKTVLISYAEQAFFQYVSSAPLLVDVFFTISGFLQTFNFLRNSRQLEAVRQNSFSENLKLFGKLLFHRYLRLGPLYLVVMATVDLVYAYIGDVSVYHINERFDEMCTRHWWRNLLFIQNLFDHRDMCANWSWSLACEMQFFILANALLFLYVKYPKVVKSLVVSSFVATIAWSYGIGLSIKFQLSFDAAFATGTEIYTSPFVRVLPYILGAVTAWLLQENRVQLEISEQKERACWHFALFVFFACIYSTVKRDLGPLMAITLFVMGRLFFSLSVCWMIARSCDGRGVWWSRLLEAKGFQHVSRLSYAIYLLNPLVIALFYSLTNASTHADPFMLCVVTCGFAVIVYLASILFSLAFELPFSNLSSLLNRRQSKPKSI

SEQ ID NO: 23788 - DNA, 13227 bp, DROSOPHILA
tcgactcatttgccgttgtctgttttatgcggccgcatgagggagcaatcaaatggaatgtgttggagtacatacctgaattttagccacccttttggccacgttccgcactgtactttcactcactttagcctttaatttagttagcggaagtgcctcgggcattccagcttttaattttgcctttgtagctggcagctcggcaatttctttatgctgcaactcttttatcgcactcacctcttgcccttctgcctttgggggcgacttttgagtacatccgcttaattaaaagcatagttgtccgttttcttttcaagaccccgagaaagaaactttaagacaatcggacttaaggttgtcgaataaataaaacttcctttatttgtagcacacataacgtttaactggaggaacgtatattgttatattgttatagtatatatgcatacattgggttgttaggcaaagggttcgtttattgcatattgcatttaacatgtattcaggacacagatatatctcagaataatctcctcgggccaagagtacaacattaacacttctttactagtttagcactgggtaatggtttttatttgcgcttagcaacatttggtttctgcttagtggtaacaaccagatatcaatatttatgcggaagttaaaaggtacaactctcaagtgccagtgatatcctagctagactatatatacacacatcgcaccgccacttggccatccaaggctaggaatataagtcgatgcagacttcacctgctctctatgtacaatatacaatggttggcttacggaggctcttgctcaaagctaggacaaatccgcacgagaagcggctcctttctatccttacggcctcctttcatgtcaaaggattgtctcagctgacgttaagctgcctgagttctgcactgaggaaaatgacgctttgaaaatgtaaattaaatgcttgcagagaaatcaattcgttagatttttttttttaaatttcttggtcatatttgcttgatgtaagtcaaatcttttttaaatgaattatattcaatttttacagtttatatatgaatttttagagtttatatctaaattatgaattactttgaatacaaaactagttttggaaaaagcagtctttaccttctattgcttcctcagtgtagctatctcagctggcaaatcctagacctttgcatcgctatactcgatgcgaaccacgcgccttggtcgctgccctgcgggcaaggggatcactcccgttctcgttccacgcagcgccattagctcccgcggctacaattgcgttcgctttggtacgctacctccattgccaccggccacggagcaggaggcggacccatcgctggtggcctccacatacgagtagcaggccgtctccatgaccagaggatgacaaatctcatagacgggcaccttgaggctcgtcttgcgtaacccgcccaagctgctttgcgagctcgagctgggcccaaacgatcgtcacctggggtcgttgctcatctcagaatggtgcagttcactctcgtctccgaaactgtgggccgcagcactgggcgttatgctgggcgttcgggcccgaatgcgaatggccgacatgtcagatccccggcgggagctcttcaaggagacggactggcgggagcagaagcacctgcagataatccgcttgaaggcgaagcgaaagtcctttgagaacagggcgtagatcatggggtttacggcggagttgcagtagccaagccaaaagagcaccgaaaagagcagcgggtcgacgcagtcctggcagaacggccggatgatgtacatggtgaagaagggacaccagcagaagatgaacatgcccacgatgatggccagtgttttggccgccttggtctccatgcggaaccgcttcacctgcgccttgatgttgcgcctgcccatcttcttgttggccggacgcgagtgtcccgatcctccagcctcgctggtgttgctctgccgcctggccaactccggtagacccttacccacctgcaggtagcatgagctggctacgccgtgctgctgctgctgtcggtagagctgcgattccgtggactcccgaccattggtgccgttgtaatggacggcgaacagtgcgtttcccgattgacgccgctcgtgacccacatccccgtgtccggcaagctcgctgatgttttcgctggaggggtaggacaccgagatcttgatcttgtcgtggtggtgcagtcgcctagtggcgtacttcgacaacctctccggggagggggtgcccagggtggtggtggtgctctgagtgctcccgttgctgtgcatggagtcctgctggtttgatcctcgtcctctatgtatgcgcaatgtgaggcgttgctcctcgaagcgagaaccgatgcccttggaacctggtcaaggaggaaggcaaagaacatatcagtataagcagcattacatttcggtggtgttgtaattgcccctcccattcccgtccccttctcttccaatcctgttgaatatcgctcatacgccctggtgcacgcgctcgcagttcgttgcctacttctcggcttttggcccactggaaaagagctcgccagcctgcctgcactttagcaaattaaacgcgtaattatgcaaatgttgcgccataaacgcgacaagcactcgacgttgtcgtagtcctcgtttcggtgtttctccacctcccctccccaccaacaatctgtatgttcttggcatggagtgtagtcgcctttaagccgccttcaaagcgaactttatttcattaacacaaccatttgcataatcctcgctttcttgctttcccgctcgctcatccggcgcatatgttcactgcctccgccttgctttgcatttattactcatacgcacgtttaactgctgaatacattttcattactcggctacactcaacccgcgacgagtaatgaataatcggcgcaataatgcaatatttcagccgggccattactggcactgttgcgtctccgtttgcggcattaaaagctggcttattgtcaaagaaacactcgagggctttaagtctgctccaagtttatggacactcggatgggcagtagaccatgcggatttgacgcagccaactcgagtgggagtgaccggcaaagaaagtaccattcaatttgattgctattaaggggaattcgaaaatccaacaatgaagtaaacaactttagttgggatgagccgggattctcggaagtttatgttacttctacagaatttaaattttctggctgataagaataattatttgtatgctactttaatattggcaagaatgtttgggaaattaaggtgtccgacaaacaaaaattaacttccaaccttgcctaagactaagactttcccaaattctatcttttctctttaatcactcgggttcaatttatcaatgacgtggaaaacaggagtaaaatatattaattagttagtatagctagttaattgtgacctgtacatataccgaaaaaaagtaacgaagcaactgaaagggtataagattgtcggtttggctaggcttgttttgttgtacttgtttcgtgccacggaatgttgaccttatgtcaaccaatacctgtgagttgcccgttggtatttgccaatttctgtcttcgtggtcggcacttgtttttatcttttgtgcttactctgattggttttcgttttgttttgttcgattttacttttattgaaaacgcagccaacttaccctgctgcgatacacacatacatatacattcaatatatataatatctggattaacttatgcgaatgagtgtcctcagcgactaatacatgtacatacacatcggaactgaaaacaatggtctgcttacgtctaatctatgtattatatctcatactgctgtatctgtatctcatgtggtaggtatagtactatatagttaaacgtagccttaggtctaggtaaatacatgaaaattattgccatacagttacaacgtcgttcaatgcgaatactgacagttttgagaagtgggatgcactgcgtctgcctctgcgtctggcggagcttacaaaagtatcaaaagagcaaaatgcattagaggacgcgtcccttgcagaatcctccccgccggattcgccgtcccgatcccgacacggatgcggagcattccgcctcctgcggcagggaggagctcctttgcagcggactcggctcatagctgccgattagtcagctgaagtccacgccctcgccgtcgtccgagcatccggatatggtcttgtggaatgttgccggtgccatcagggcacgcgccgctatcatctggaaattctccgacgcccggaagccactgcgggtgcagacgcatctgcacactatccgcttgaaggcgatgcgaaactcattcgagaagagcgcatagatcatcggattaatggccgagttgcagtagcccagccagaagagcaccgaaaagaccgtcggctgaatgcagtggtcgcagaaggcccggatcagatacatcgtgaagaagggcagccagcaaacgatgaagccgcccacaatgatggccagcgtcttggctgccttggtctccattcggaaccgcttcacctgaaacttggcgctgcgcttgcctgcccgcttcttggccgacagtgaggtggtcgagagtccggtctctaggtctccgggaccggacgcagctgcgtccaaattaaaggtggtctcgccaatgtcgaagaggctcgtcttaaaggaggcacgacgtccgttggcgctactgattaccgcatagtgtggcgatgcctgtggctgctgtcctgcgtcgaggacattctcggaggagggaaaggacaccttgatggccaccttctcgtgtcgctgtcggcagacgcgcatcgatgtggcccgcttgggggcgcctccctgaaggtgatcctcggtggaggcacccagtcccgaggccacggctccacccccgcccccgttgctgttcacgctgagagtcgaggacattgagtgcaccgagaggggcgtgcgctggggggtggagcaaggtcttcctcggtgaatgcgcaatatgagctgggactcgtccactcgattgttgcccgactcgcggggactgcctgcaattagtgagtggtgcaatttggcggagtttgcatcgcggtgacctctcatggattaatttctgtgggtttggtggtttctttggactgaatatgagtgtgtgacatggatgttggacattcagcttgtattgtacatggacatgtggttatatggacgatctgtggctgctgttggctgttggttcgaggtgtttgagttagatacaatcgtttaagtagatgcaagatacatttctccttgagtaaggtaaattaaatttgttgactggcacttcacgaagagcggttaactaactacatactgttacattgagataggtttaatggtggtaaaaacttacgactatttgagtataataaaatgcttctctacttttgtaaaatacaaacacattattcatagagagaaaagggactcattccattataaaaatctagttcatgaaaacgtacaaatattggagtttttaaaatgttttttgttttggttttttcgtttgaatttatctaggaacaggcatcgaacaggggacttgggttttatggatattgatcacatcagttataaatgcaaaatattgtcggtaattaattgttataaacaagttgtttaatttattgtggtttatttgtagggtcggttttttctttatcgtttcgagctattcgccctctgggaatggctttattagcctaattttatttattactctatgtgggattggtcggaaggggtggttcgttggtatctaagcactgaaaatggaactgaaatgctatacgccatggatatgaatgaaaaataggagaggaggaaacaaaccaatttctcaattgtcaattttttcaaaaactgtccgacgtaattaggcaaaatggccaagcccatttgttttgggctatcattgccaagttgtgaactgaataaatattggtccagatgcggatacacgtgtgcccagagttatctcaatttaaagcgaagcagccgcatttttatttgcataaaccatattaaacctattgaaagcaaatatggttcgcctatgaataaacgaagtgggtgaaaggaaaatgtgtacaaacaagaagcccaacatatgcaggattcagtaaataaaaagggatacactattgattttgttttcccctccaccaaaaataaaagttaaacaaacaatttgtatacaaatatacaacgaaatatcctaatgtatgtaaatatgccaggatgtgcaggcgcaatcccggcgaaagcctttatatttccaaggaccctgtccgagcctcgggatgtttcgcatcctgcggcgcagctgatttaaataaatgtatatctttcgcccgccactaaggataatccctgcacataaatgtacattgaaatgctgggtcgcattcgaccatttccatttcactgagcgctgtagttttcgtgcattaattcagcatttacaattcactcgcaacatttttgcgggtctttgtgtggcccttaattgaatggcatttaataataattaagcgtctgagtgccgcgaggtaattgcccagaattgatttgtccgccgccagttgttattatgcgcggacttgcatgctacgacgagcactgtcgccagcctttgaccttttggacgatgtcctggccgggacagaagacaagtgtggctgcaagtcaaggcccaggactcggctcaagttgagcctttctgccagtggcagctcgcacgaaagttgccggatcctttccgttttgttctgctcttgacacggggccagggtcacacttctgaaatttctaaggcctaacaataacagtgacctcctcctcgtggtcgggtgccgtgaaccacggcaagtttgaacttgaaacttgattaccttcaaaagccacgaaaaacgagaaaggcgcgtgggccggatggcacacctacctccaaaaataatagagaatagaggaaccaggacaaaaagcatcagcaccacccgcattgtgtcacggagcgatttccgacgttgtgcacgcacagccaagtggcccatgttcatatgtatacgacctgggctcaaaataatgggagtggacgcgctgataggaagttattttgaggaatattttaaattgaaattttcatttgatagaacaatgaatgaaaggaaaaatagaagaaattatatataattaaataaatgcctgacttgtcttgaaatcaccaaatggcttaaaacaatttaagtgtaattaatggataaggcataaacagttgaactgatttagtgctaaacaaaattatatgcctttcgctaaacaagtaaaaatgtaaaaaagcgtttaagttatattttctggcggtgtatccacataaaactataacgagctgccccgcgtgtgggtgtgtgggtaaacatctctctttagccgcctccaaatgtgtgtgtgtgtgtgtttgtttgcgaggagacaaagcatatttcaaggctgccacacgacgattctcgccagtgttggtgggtgggtgtgagtgtctgtgtgggctgctggcaaatctgggctttgtgctcaaaatggcgccaactaacgacacgacagtgccaaaacaataacaactgccaaggcaacgggagcaagaatgtcgacaagagcattggtcttaagctgctggcaccgaaatgcactatccgcttccgttttttgaaaagcaactgaactccaatatggcggcagtcagcgccccaaagtatgcaatcacgtttaaaatgcaatttcgtcgcatactcgtacatcgcagagctgcaggatttgtggggcccataaattagcggggagcactgatttgcactggcacgaaggttggctattgattttcccgctgaagttagtcggtcggtcggttgacttagttacggcagattatcggcgaatgcgtgctatggatagaatggaacataatatttccgagaagtgtgcccaatgagctgatcacgcggaagaaagtgcgctgtggccctggccaagtaatgggccacatattaaaataaacacccagtgccagtctaatgggggctcccgacttcaaacacaatctgctcccggggattatcgccaccacagcgtctttggggaccagtgaggcctgaaacgacaaaaacctaagaaaatagaaaattgcaaacagaacatgctaacagggaagacatattatattttatttcgttttagccgatggctcgctttcatgtctgccattttctggctggaatcccgctcctatttaatcccaacctcaattttatctaagccgatttgtttgatgtgcttcctcagcgtttatcgatttcttgtttttgcccaacttggaatataatgctaattatgatgcgtgacttcttctttgagcatgtgatttatattatgctgtaatttaaaaggaatgagacatgagcaggacgttgattgtgggtattaaggattgattgaaactcgaaaggagttaggttaagccaattgggtatttcataggttcatagcgggttattcacaatttaaagttggagcgcttgttaatcatacgcatctatatgttcacatagttgggtacactaagctaattaaaatttatgagttaggactttccggtactaagttattatcacattcatttgaataaagtagggggatttaaattacaaggattttaatttgctccgtgctttacagagtttttggtttatttaaaatatattttcctctctttgcttacataaaaatgagaactctattttcaattggttttaaggggttgactttgtaatgcctgggctttcactaagtgtatatgcatatgtatacttataaatttactcatttccaggttatttatcatgtttatttatgtgcaaaacacaaaaacaaattgccgacatatgtatatataaatgtttggatgtgtgcgtgaagttatttatgaatgtaaatttagtggtactctttttagcgccatcgatttatacatttccgccgtgtaagttgttatacactcccccgacaatttatgctcttcgggtgttggttattcaggggggacgaggacaaggtcgagtgggtggttctgtgggggtgtctggaatgctcagtgtgtgaatttgtacacttttcggtaggataaccaaaataaaacgggacaaacgggacgtcacactattgactacacgtcgagagattttaaattgtttagcaatcgatattaaagcttgaataaaaggaactagctacgtgattacgttacttatttggtaagtaaacaaatatatatatatatatatatgtatatatagagagatagtgatgagtatcaaaaccaaactgttagctacgcacacgttaaaccaaactgatggtgacaaggttcaaacaaatcgtgtccaaatgagctggtggttgtggttgctgggtcagttaactacggatataacttacccttggtggtcttgaagccctggttgatggctctcgtcgttctcacggcagcccggtagatgcgccagtagaagaagagcatcacgaacatgggtatatagaatgagcccagggcggagtacaggacataaccccgatcgttggtcagctcgcacttccacggacaactgccggaaattgtttggggtctgttctgcggcggtgcgttcagtagatcgaggtccatttccgtttccgtggtgctcgagctggacgctgtcgtcgtggtggttgcggttgttgaagtactggtcgagtcaatggccgcaatccgaatctccgcggatccatcgatgggtgcgaaaccgggatcgtagggattgtaggcgttgccgttgccgatatggggcggggatggaggcaaggatgcctcgccctggtccttaatgctatctaaccctagttgaccatcctccgagcttgacatcgtggtggtgtagtaaagcgtatggtttccctttggataggtcggctgtataaccgcctagaatgaagagtagagtagagtagagtagagtagagtagagtagagggatatgggatcatgagatgatacttgatattcggaggaccacattaaaattccaccctcgtcctggcaccctcttcacggcgccaagaagccaataaaaatgcaacttaaagcgggttatattgccagagatattcgccgacgtgttgcgcataaatattactcgtggctaaaggtggcgttaacaaaaagccaacagaccggcgaaataaatgccgcgagctgtatgtgagaacatgttgggccatcagagaaggagaatcagggcatgttgcccaacccatcgcatcctgactatacgccgtaataataatcgatgccaacagcctcgactcgctaaccgggtttcagcctggcagcgggctgaatgccagccattcaaacgtggcccattcaactgcactcagccactgcagttgtgaatcgcatcgaattgaattgaattcagttgagttgaatggtatggaatgtccttcgaaaggatacattttcgcatgtgcagctattgggaagccatcacatcatcggcaccttgatgcaaactggatttatatgtctggctgggcaaatacaagcagtagtacaaccaaaagactggagcagggccaaaaggcgagtagtcatgtatcctgcccgatctgattacccagtgactggggtgcccataaattgtgcgccccggcatgttggcaattttgttgcggcatgtgtaacacatcattatcaatgtcgttgcgtaagaataatgtcaaataatgtccccagaaaaggggacaaaattagaagcaagtcccttcctttcaaaaggacgaaattcgtgtcttgttttacggtaattttggcacaaatgagccggattgcagtcttcaggaccagccagtgtcgcttccattgtcgatgtggttgagagaaaccactgctgccaaccccaaaatggtgtcaatgacagaatggccctcagttttggggctatagaaacaacttttggcagtcggtcgcctgactgcctgtcggcctggcttttgttctttatgaggctgacttgagcgtgctaaaaacagtttaccgactttcaattttgccggcccttttcggcttcaacgttggcagagacaaaccgcgtttcccatttaccccgttaatttatcgcatcgggtcacttgtgggtcagttgctgcccccaacttaccttttgatccttccagccgactagcggcggaaagcaaataaaaaatgagagtacccaaatgccggcgattaaggacttggccttcttcgtggacattatgcttgggtaggtgacgggtcgtgtgaccgccacatagcggtccagtgatatggcacacagattcaggatcgatgccgtgcacatccagacatcgacagccagccaaatgcggcaccagagatcgccgaatatccaaacctaagggttgcaaagtatgaaatattttaataaaaaagaatcactaatattgcgtaattgttgtaaaataaaaaaaatgaattttctatttagattatgattagtgatcttattcgaatgaatttctgaatgtaagtattgttcaaatgcttccattgtaattaaagcatcatttggtttagcatctcaaaacatttcatttcatacattagacatttctaaaacgtggtggcttgattgaaatttaactactagaacttaccttgaagacttcccaggtggctgagaagggtaggacggccaaacccaccagaagatcggccacagctaggttgacaataaagaagttcgtcacactcctcaacttattcgaacagaagacggcggcaatcacgaggcagttgccaccgatgaccagaacgttgatgaactcgagtacggccagggagatcagattggctggttccgtccatttcacagatttgatgagatcctcgcactctgtttcattcatggcggtacttttgagatgggtgtgtatctgagttcaccacctgcaacagacagcagcagacaacacggggaagttttataaaaaaaaaacgatacacaacaaaacatttgactggccacctaattgctgccacaacctgccctcgcgtgcctaattaatttataaaaaggctggcctataaatagtccaaaaatgaatggaacagtcgttgaacgaggaaacccaaatgaaatataaatgtgcgtgggttagacatgaccagaaggcattactctattttgggaacaatgtgaactgagccacactttcaaattgcttgacaataattggaatttgaaaaatacaaacaatgtgcttgggccttaaactaaaaattgtaaagatttttctatttgttatacaaattacacaaattttttgtaaattgaagaggtgctttgctggttatccctttaaatacactgtgacgaaaacgtatcattacaaggataagagaaatcgccccaagccataaatgtaaaaatagggcaattaagggcagaagtgaacaaaaagatgggcagaatgagcaggagggctgaaaaataaaagaggatgtgccgcaatgccggtggcgtatttgcttaattgttttgtaagacaacataagcccaacctttgggtctcatccgacgctgacctgggccaataatgtaaaattaaatactcgtggatatataatactgaatggtaattatatttatgtacacatatacatattctgagtcggcggatggaagtcgtacacacatcttgcacacttggtattcaactgcagttgcacattgcaatttaattgccgtaattaattaagctcgtttgcaatacgttcgagtgcgtgagtgtgtgttgcgtgaactttatgaatgaatttgctgccgaattggcactgtcagcacttttcaattattgtggaggaactgaatgaagaggagtgcactcaaatagctgataatgcccgataaaatataaaatcggctaaacaagcaatcaactgccataaagt

SEQ ID NO: 23789 - DNA, 2501 bp, DROSOPHILA
tgcaggtggtgaactcagatacacacccatctcaaaagtaccgccatgaatgaaacagagtgcgaggatctcatcaaatctgtgaaatggacggaaccagccaatctgatctccctggccgtactcgagttcatcaacgttctggtcatcggtggcaactgcctcgtgattgccgccgtcttctgttcgaataagttgaggagtgtgacgaacttctttattgtcaacctagctgtggccgatcttctggtgggtttggccgtcctacccttctcagccacctgggaagtcttcaaggtttggatattcggcgatctctggtgccgcatttggctggctgtcgatgtctggatgtgcacggcatcgatcctgaatctgtgtgccatatcactggaccgctatgtggcggtcacacgacccgtcacctacccaagcataatgtccacgaagaaggccaagtccttaatcgccggcatttgggtactctcattttttatttgctttccgccgctagtcggctggaaggatcaaaaggcggttatacagccgacctatccaaagggaaaccatacgctttactacaccaccacgatgtcaagctcggaggatggtcaactagggttagatagcattaaggaccagggcgaggcatccttgcctccatccccgccccatatcggcaacggcaacgcctacaatccctacgatcccggtttcgcacccatcgatggatccgcggagattcggattgcggccattgactcgaccagtacttcaacaaccgcaaccaccacgacgacagcgtccagctcgagcaccacggaaacggaaatggacctcgatctactgaacgcaccgccgcagaacagaccccaaacaatttccggcagttgtccgtggaagtgcgagctgaccaacgatcggggttatgtcctgtactccgccctgggctcattctatatacccatgttcgtgatgctcttcttctactggcgcatctaccgggctgccgtgagaacgacgagagccatcaaccagggcttcaagaccaccaagggttccaagggcatcggttctcgcttcgaggagcaacgcctcacattgcgcatacatagaggacgaggatcaaaccagcaggactccatgcacagcaacgggagcactcagagcaccaccaccaccctgggcaccccctccccggagaggttgtcgaagtacgccactaggcgactgcaccaccacgacaagatcaagatctcggtgtcctacccctccagcgaaaacatcagcgagcttgccggacacggggatgtgggtcacgagcggcgtcaatcgggaaacgcactgttcgccgtccattacaacggcaccaatggtcgggagtccacggaatcgcagctctaccgacagcagcagcagcacggcgtagccagctcatgctacctgcaggtgggtaagggtctaccggagttggccaggcggcagagcaacaccagcgaggctggaggatcgggacactcgcgtccggccaacaagaagatgggcaggcgcaacatcaaggcgcaggtgaagcggttccgcatggagaccaaggcggccaaaacactggccatcatcgtgggcatgttcatcttctgctggtgtcccttcttcaccatgtacatcatccggccgttctgccaggactgcgtcgacccgctgctcttttcggtgctcttttggcttggctactgcaactccgccgtaaaccccatgatctacgccctgttctcaaaggactttcgcttcgccttcaagcggattatctgcaggtgcttctgctcccgccagtccgtctccttgaagagctcccgccggggatctgacatgtcggccattcgcattcgggcccgaacgcccagcataacgcccagtgctgcggcccacagtttcggagacgagagtgaactgcaccattctgagatgagcaacgaccccaggtgacgatcgtttgggcccagctcgagctcgcaaagcagcttgggcgggttacgcaagacgagcctcaaggtgcccgtctatgagatttgtcatcctctggtcatggagacggcctgctactcgtatgtggaggccaccagcgatgggtccgcctcctgctccgtggccggtggcaatggaggtagcgtaccaaagcgaacgcaattgtagccgcgggagctaatggcgctgcgtggaacgagaacgggagtgatccccttgcccgcagggcagcgaccaaggcgcgtggttcgcatcgagtatagcgatgcaaaggtctaggatttgccagctgagatagctacactgaggaagcaatagaaggtaaagactgctttttccaaaactagttttgtattcaaagtaattcataatttagatataaactctaaaaattcatatataaactgtaaaaattgaatataattcatttaaaaaagatttgacttacatcaagcaaatatgaccaagaaatttaaaaa

SEQ ID NO: 23790 - protein, 645 aa, DROSOPHILA
MNETECEDLIKSVKWTEPANLISLAVLEFINVLVIGGNCLVIAAVFCSNKLRSVTNFFIVNLAVADLLVGLAVLPFSATWEVFKVWIFGDLWCRIWLAVDVWMCTASILNLCAISLDRYVAVTRPVTYPSIMSTKKAKSLIAGIWVLSFFICFPPLVGWKDQKAVIQPTYPKGNHTLYYTTTMSSSEDGQLGLDSIKDQGEASLPPSPPHIGNGNAYNPYDPGFAPIDGSAEIRIAAIDSTSTSTTATTTTTASSSSTTETEMDLDLLNAPPQNRPQTISGSCPWKCELTNDRGYVLYSALGSFYIPMFVMLFFYWRIYRAAVRTTRAINQGFKTTKGSKGIGSRFEEQRLTLRIHRGRGSNQQDSMHSNGSTQSTTTTLGTPSPERLSKYATRRLHHHDKIKISVSYPSSENISELAGHGDVGHERRQSGNALFAVHYNGTNGRESTESQLYRQQQQHGVASSCYLQVGKGLPELARRQSNTSEAGGSGHSRPANKKMGRRNIKAQVKRFRMETKAAKTLAIIVGMFIFCWCPFFTMYIIRPFCQDCVDPLLFSVLFWLGYCNSAVNPMIYALFSKDFRFAFKRIICRCFCSRQSVSLKSSRRGSDMSAIRIRARTPSITPSAAAHSFGDESELHHSEMSNDPR

SEQ ID NO: 23791 - DNA, 2360 bp, DROSOPHILA
cccaacacgagagagccaggagaagcgacggaagcgagagcgagagagcctgcgactccattgcagcgccgccagcagcgcagtcggcgtcgcagcagccccagctcaacattcgctgcatctcgctctggcgcaggcgaaatatgcgagcactgcttgccgcattcggtagcacgagtgcgagcgatgcgcctgctagcatctcgctcgcacccaggcgcgccattcgtcgccgcttcggctcgccgttcgtgtgtgtgcgtgtgcgctcggctggcagctatcggtaatcgggccgtccgctttgccgtcgcgtttgccgttttccgttttcagtttttgtttgacgttcgcgtgaagcgcccgcaaaacgcaaagcgcacgaggcaacgctcgaaaaaggagccaacgcagccgtttaccgttagtcagctgtttaccgttccgccgcgagatcgaaaaccgagaatttttgccgttgttcaaatttttttgcaagtgagaatcttgaacaacaagaagaatatacaacacataaatacaacaaaaccaaggaatcgccgaaaagccgatagtgcaaagtgtttaaaaagaaaagaatcaatttcatatacaacaactaaagaaatactggaatataaggcataatagaagcggaggaagtttcttcaactcaaagaggagcggaatttcgcgctttgtttttgttttgccaaatttgccgccggcacacacgtgctatccccctcttgctcgcaccttgccacccagtctttatgtgcgttaaccgttaagtgtgcagttggggcccgctcctatctttctctccctctctctctcgcttccgcacccgcacacacacacatatatccacacccacgcgcgcctcgttcacatacgcacacacacgcgggacttaacccattgacggcccccccaaaaaagcagtcactcttaacccccccgaaaaaaagaaaaactccatccccccggcatcaagatattcgacaacaaaattctcaccgaggcctcaaaagcgcccctgagggccgtcgcactggcgtcatatctgggcgacgggttcgccgccctcggtagccgcgcccccccgcccaaggaccatctgatggcgttcggggcggtactacacaccagccagcacaatatcgctgatcggaatcgtcatgggtatttttgctatcggtgctcatgctttgtactgatatatccgatgtgcccagaggtccgcccgctgagtcgggtccgttgggccccagtacgcccaatccgagtgccgtggcccgcaaatgcggcggatcatcgtcgtcatcgtcttcgctcgccgagcccattaatgaatctgtaagaatcgagaatcgaagcgagatatatagtagtgtgaggtttttcgaaatagaaggtgggggcgggggggagcgggggttactagcacagcttgaacaaattgctgggcctgtagattgtagggcattccacttaaaatacaattgcaataaataatatttgcgctgggctaagcccaaaacgacgctggaatcgcgtttggattgggtttatttggctgactgggtcacgtgtcgccatttcatgctctaagtagctggtctttcccttaactggcgttcggtgttcgggtcacgtgtcaactgcagttgttgctcgctgatttctatataagttgattaggtcgatggagtggcaggaggagtggcaggggggtcttatctctgttgagttctctggtgctgactattaagctctgggccatgcaaaatgctgacacgcgttcgagtttcatcgcttacccagtgtccctgcgctatgttccattcgagataagcgagaaaacgagcttcgaaacgtgtcactcaaaggaaacaacgttcgcgttttgaatggttttcggtctggaagtttcgaggatttggtaaatctgtgcggtaaccctcggggagcacctgacctgacagtatggcactgagaagcgtgttcccgagggacagttgccagaaataaattacactttattatgcataatctaatccgcaccagatgcaacccaagggggttgtcctctccaacgatcagagctctgtgactgtgattctgcgatttcagtcgtggtctgtcgtagtctcgcctggtctggtctggtctggtctggtctggtctagtctggtttggtatggtctcatctggcacctgtcacatcgactgaatctggagaagaagagcttaactcatcccgagatgaatgcaagtcggcctgatgggatgagtggagatgatgatgagattccagtgattcaaatgcgaaatcatcgccagacgtctctgaa

SEQ ID NO: 23792 - DNA, 2434 bp, DROSOPHILA
atattcgacaacaaaattctcaccgaggcctcaaaagcgcccctgagggccgtcgcactggcgtcatatctgggcgacgggttcgccgccctcggtagccgcgcccccccgcccaaggaccatctgatggcgttcggggcggtactacacaccagccagcacaatatcggtcgcagtgaaccgccggtgggcgtgggcgatccctgcgccggatgcaacaagcccatcctggacaagttcctgctgaatgtcctggaacgcgcctggcacgcctcctgcgtccgctgctgtgaatgcctccaaccgctcaccgacaaatgcttcagccgcgaatcgaagctctactgtcgcaacgatttcttcagacgttacggcaccaagtgcagtgggtgtggccagggtatcgcgccatcggatctagtgcgaaagcccagggacaaggtcttccacctaaactgcttcacctgctgcatctgccgcaagcaattgagcacaggtgagcagctctacgtgctggacgacaataagttcatctgcaaggacgactatctgctgggcaaggcgccatcctgcggccacaattcgctgagcgattcattaatgggctcggcgagcgaagacgatgacgacgatgatccgccgcatttgcgggccacggcactcggattgggcgtactggggcccaacggacccgactcagcgggcggacctctgggcacatcggatatatcagtacaaagcatgagcaccgatagcaaaaatacccatgacgattccgatcagggctccttggacggcgatccggatggacgtggcgattcccaggcggagaacaaaagtcccgacgatgccaacggatcgaagcgacgcggtccgcgcaccaccatcaaggccaaacagctggaggtgctcaagacggccttcaatcagacgccgaagccgacacgccacatcagggagcaactggccaaggagaccgggctgcccatgcgagtcatacaggtgtggttccagaataaacggtcgaaggagcgacgcatgaaacaaatcaccagcatgggccgcccgccctttttcggtggcgcccggaaaatgaggggcttccccatgaacctctcgcccggcggactggacgacggacccggctttccctacttcgcggcggacgccaagttcgagttcggctacggcggaccctttcacccgcacgacggaccctactttcccggacatcccggcggaccgatgcccttcaatgcgccaggtggccccatggaccacagcggacccattccgatggtgaacgagttcggactgacgccggaggcgacgttccttgggcaggcgggcggtccgccaatgcaactgcagtcggccgtcggaccgccgccaccgccgccgccgccgagcgccgagcacttgatggccgccgcagcggcagcggcgcagcaacaggcggcgcaacagcagcagcagcagcagcaacaacagcagcagcagcaacagcagaatgcgcaacaagcggcgaatcagacgcagcagcagcagcaacaaaatggcccccgcaccaattcgccggagttcatgagctcggcgaatttcagcgaaccgcagaatatgcaaaatgaagggctcgtttggtaatatacgaaacagttggcaacgcggctgctgctcttcggcagagagcgagagcgagagcgagagagagcggcgcgagtggaagagtaaatgagagggaaggagagtcagatgtagtgccgtctcgttctggccaaaggctaagccccaccccctctgctacgttttgtttttgttatacttttattattattattattattaaaactgtgctatttttttgtatttcaattcggcgccaaaatatttgtaaattataaaacaaaaaacacaaaaaaaaaaacaaatagacaaaggaaatctctcttaaatgtataaaaatcaaataatgggcgctgcacatagtaaacaattttttttaacaaacaaaaacataaaaaacacaaaagaaaagctctaaaaaaattaaattaaacccaaacactaaacgtcttgtctgtaattaaaacaaaaatactatttatgtgtatcagtgtataaaaacaaaatgaaaaactgtagtcttaaaaaaaggatctgcataaagagatttttttttttgtaaattagcacattttattcgtatatctaaaatttgtttatttttgcctgcattttttgacgaaaaacgtttttttttttttatattattacacgtaacatatggatatatattataatcgttgtctaacaacataaacgtaactaggcatgtactagctcctaagtctacataaaccagatattatatatacaagagctacatacggcagcacacacgtacacggcaaaaaaaaagaaaagaaaaaagaaa

SEQ ID NO: 23793 - protein, 505 aa, DROSOPHILA
MAFGAVLHTSQHNIGRSEPPVGVGDPCAGCNKPILDKFLLNVLERAWHASCVRCCECLQPLTDKCFSRESKLYCRNDFFRRYGTKCSGCGQGIAPSDLVRKPRDKVFHLNCFTCCICRKQLSTGEQLYVLDDNKFICKDDYLLGKAPSCGHNSLSDSLMGSASEDDDDDDPPHLRATALGLGVLGPNGPDSAGGPLGTSDISVQSMSTDSKNTHDDSDQGSLDGDPDGRGDSQAENKSPDDANGSKRRGPRTTIKAKQLEVLKTAFNQTPKPTRHIREQLAKETGLPMRVIQVWFQNKRSKERRMKQITSMGRPPFFGGARKMRGFPMNLSPGGLDDGPGFPYFAADAKFEFGYGGPFHPHDGPYFPGHPGGPMPFNAPGGPMDHSGPIPMVNEFGLTPEATFLGQAGGPPMQLQSAVGPPPPPPPPSAEHLMAAAAAAAQQQAAQQQQQQQQQQQQQQQQNAQQAANQTQQQQQQNGPRTNSPEFMSSANFSEPQNMQNEGLVW

SEQ ID NO: 23794 - DNA, 2642 bp, DROSOPHILA
atcaatattcagtgctatcttattgaacgctggtgtagtaatagtgacagcctttaagaaatgtaatttaaaacgccacacaatgtcaaattcgaaatcctggccacttgggccaacttgtaattgttaattagagctgacaacgaacagagtcaaccggagggctcgtcataaattgtgcgaaatgcataattctccgcttaccaggacaattgattaacttttgttcgattcgaattgacaggcaaaacagtggatatgccaaattcaaaatcaacacacacacacattcacaacacatttctgttgagttcgaaatgtgtggctgtgttattcacttgaatttgctgtgttccacttgcactcacttgttgttcaatggcattgagatatttggctgatatctgtcaatgcattggcaagttttgtattttacagcttaactttgatcaatgatcacatgctaaagtgtacaattacattggagatttctttacatttcgagaaacaaaaaaaaaaaaacaacaagaatgacagttaattgtttgaataaaagggttttcacatttaattcgacttggttttgtcacaattcctacactgaactaagggcaaaaatagcctctggtaaaaacactttaatggtttaatttaatatttttttttggcactttaaatgcgcactcgatcactttttttcgaaaactagttagtcttctgggtgcgaatttacaaagaaaattttggatggtgctgtactgggccttttttttgttccaccaaatccttggatagcaggcaatatctgtgggaatttaagtaataaataatggagttattaatcttaaattattatttatacaagaactggactcacctttcgtgtctgtcgccgaaaacgatgtctatgaacttgagctagttttgcgctgggtaaaagcgatcgctttcgacgctgccaaacctggaaataaagtggaaaatttaaaataattaaggattagggataattccactttgaagtaaacttctttgacacaaacgggaagataccatttaatgatttcttggtatgctgcctcacctgcatatttacatcgtatcgaatccgctgatccaattgcgattttctggccatcaactggtggcatagccatcgaattccccgatgcaaatcctccgtctcgtccatgtgacagatgagcagtggacagtcgcacgatttggccagctcctccaaaccgaaggcatattccacgtcgtacagctggacaccaacgcgatgacgtgatgccaccaggagcactggtttaccagctagctgtgtgcccacaaggcaatcggttagcagtgagaatgtgccctgcattaccattggatccgcacccagatcgaagcaatatatcagggcatgcgaggaggcataataatgcttccacaggcgctgcatctccacattgccaccgacttcggtgagctgaagctgtgcaattggctcctctgctgacttcattcgatagcaacgcacaccattcgtggcctcctggtcatcccggtcacgtgacactctgctcaagcggtgtcccagctccgttttgccactgcccgagggtccaaggatcagcacctggaattcctccatcgcaggcgaactagtccgacaacagctgatggtttgatggtaacaacagcagtcgcacagcttggcgcacagtaaacccatctagcacggtgccatttttgtgaatatttctatcgaaattttggtcggttttcactgcaactctatgtgtgattggatggaaatgcttgtttatttacctgccaccggcggacagctgactgcgacaggtagtcgtcacgggcaacgccagaaagtccaatgttttggccagttttcctgggccagttgccaagccaaccgattcgacgagggctggcatttccacgtacataagttgttcctagttcacattcaatccggggtggtggttactccaaatttgggtcacaaaagggcccttatgtgaaataccaataatgaatattaaaagtattaacaactggtgaaattagatggtatttcaataatttattaagcattttatacaaactgaatgcccaattattcgttcattcgaagatcctctatttcgagcttatgcacttaaaaaatgtgttttttaaaagtttaaattgtcttaaaatgctgttaaaaatatgaatgttacttttgaagatagctttagttagcgttatttaccaaagtactgtatatcttttcgaagttcgaaggaaaagctttgagccaatatgccaattttcgccgctggctggcgccacttgtcccaagagtaatacagggatttttctcacacgatttctatgtttttttgaatgaagtctcttaaaggacttttgcatttcccaccttggctaaaataaaaggaatttaaaaagttacccgttttgtggcaccccccgacttgccgctgattttcaaacaccaattgtttgtttgttcaaacaaaacttggcaagttattgattcgatagcatttcctcatttccttattgccaatgagctgaacaagtggcctattgctttgataatggccaaatagcaattgcccgatgtttgt

SEQ ID NO: 23795 - DNA, 642 bp, DROSOPHILA
atggaggaattccaggtgctgatccttggaccctcgggcagtggcaaaacggagctgggacaccgcttgagcagagtgtcacgtgaccgggatgaccaggaggccacgaatggtgtgcgttgctatcgaatgaagtcagcagaggagccaattgcacagcttcagctcaccgaagtcggtggcaatgtggagatgcagcgcctgtggaagcattattatgcctcctcgcatgccctgatatattgcttcgatctgggtgcggatccaatggtaatgcagggcacattctcactgctaaccgattgccttgtgggcacacagctagctggtaaaccagtgctcctggtggcatcacgtcatcgcgttggtgtccagctgtacgacgtggaatatgccttcggtttggaggagctggccaaatcgtgcgactgtccactgctcatctgtcacatggacgagacggaggatttgcatcggggaattcgatggctatgccaccagttgatggccagaaaatcgcaattggatcagcggattcgatacgatgtaaatatgcaggtgaggcagcataccaagaaatcattaaatggtatcttcccgtttgtgtcaaagaagtttacttcaaagtggaattatccctaa

SEQ ID NO: 23796 - protein, 213 aa, DROSOPHILA
MEEFQVLILGPSGSGKTELGHRLSRVSRDRDDQEATNGVRCYRMKSAEEPIAQLQLTEVGGNVEMQRLWKHYYASSHALIYCFDLGADPMVMQGTFSLLTDCLVGTQLAGKPVLLVASRHRVGVQLYDVEYAFGLEELAKSCDCPLLICHMDETEDLHRGIRWLCHQLMARKSQLDQRIRYDVNMQVRQHTKKSLNGIFPFVSKKFTSKWNYP

SEQ ID NO: 23797 - DNA, 12427 bp, DROSOPHILA
ctgcttgcaagaaaacgcagtccttatctctgcattgtttagtactgcttgcaattgctcaaagcagtgcattcaaatctcaatttaaaatattagaaacaagacgttagcattttgtatttatgtattttgaaatgacttttatataatttctgacaaacttgaacatttaattagttttattacacatttataaatttcatttgttaccattttcgttcgttcatcgattttagcgttctcggaccgtacaatttgctatttgtttttgatatttcttgttaacgttcctgccatttctgttcccacttatcttattcattaagtatatctgactaaatgtaatgcatatgaagattctgactttccattaattggctttactggaattttgggatcaaaacgatacagactgtttaatagctttaaaatacaaacatttaaaaaaaataggtaatttttattattatttttcgtttgcccctacgtatatatactttttaataaatatttccgtccactgttacgcgatctacatcgaaatcaatatttggtttggttattcactgatttcagcagttttcaatcattttatcgtttattaagtactattgtagttttcttacgatttaagagttgtgcttaaggttatgcgctccgtttattgttgccgctattagagtttggtgttcgtatttcatttatgtttttggattttcggttatctattggtgagcgattcgcgttggatgtacatgactatcagtagaatccttacattagttacggttcatatgatacgaatgattgtaggcaggtggttggtggttcacttgacttgcaatgttccgtttgtattcgtctcgacaaaaatgctacctttcattaatcagctaacattacggataactatgagttaatactaaggcctaacgaaaccctaaaactgaacagccaaagaaactaaacgtaatcaatccatcgagtggtgccagtcaaactagctgaggccggtggagctcgtctgggccacctcggaaatgttggcacttggcgcaacgggtgcggatctggaagcggaggatgcggatgagtaggcgggttgtgtgagcagtggcctctgcattctgtccagcgccatctgccaaatggtcatgctttcgtctggcttaatggcgtgatttgtgaagaggaacgggggatcctcaagatcagcttccccgccgaccagcttgcgaacgtccttctgctcgaggtaatgctgcagcggggtgatcttactgcccgtttcctcggccaggatccccgtgatgagtacatcgtctacccagaagtatttggacttctgggccgcctcgtacaggcgacgcaccacttccggtgcgtagacaatggccattccgggacagtattccggatagaaacgattcgggtactccttgtaggtcacccgccatttggactgaaaatgaagaaatcattgttatttatggacttcgataagatagcaacattttttttttcctatcggacagttgacatagtagtcaatcttctttagcgctaattgctttttaattatattttaaattttttttgtggcaaaaatgtttatgaactacttacacgatatgaacgcttgaccctcgaatgatggacggatcgacagagcatcagattgggatcccggagcatggagtactctggcagagagggtgtcgccaagtacttgaccagctgcggtgtgttcataaacacatcgtcgtccaccttcaccagcagctgggcatgcgcacacttctcgttgaaccacttgagagccatgacatgcttgtaggtcatgttgcgataggcgtctttgaagttaccctggatgagatcgccgtgcaggtggttctcgcgtcccaggaactgctgccacttctcgctcttagcgctcaccccgcccaccaggaagtaaaccttcagcggcgtctggtctatatagctccgattcgcccacgtttctcggattatccggcgcttttcgatattgcgcactgccgaatggaccaatatcagtgcccggacatccttatcacaggcgggctggtctattagatagacgaaattgggcagatccatgaggtgcatgctgctctgtggcggcgtgggcgtttgtgacgccaaagtggggggcgtgcccatggggtggttatcgaatgtgttgctaactaggctactatcattactattactaggtgtgcgactaggctggtgtatttggtttggttggctcctgctcctccgcaatccacttttggcactcgttggcggctgtgcggtgctgctgctgctaatgccgccacttccgctaaaatcggcgatgatttccgcttccagcatcggcaactgctgcacactgaccagccagatgaccaggcacagattgatgcagatgagcagcaggcacaacgatcgcttgtccatcctagcggcttctaattggatctaactctatttccggacacctcagacggtagcgttttctgcgtgccttggccatttaactccagatccaagtgactgcaacggcacaaagttaaggaaaaagaaaacggttagtaatcgcccacggaattgccacttaaaacccacttcccatcaggttatcaccggtgcgataatcacccaaggcattagggcaattggctgccgcatgacatgtggccaattttctaaatggccagcagcaggtgtcaacaggtcgcacatgaattaagtgaagagcagtctttctatcctttggataagttcaatgaactgacgtcatgctattacccaatcgatgccaataaaacgcacctgccataactcattcacaggtagatgatttcccggggacttccaactgggaactgatatacaatttttttttgggcagttttctttcaataatcgaaagtgaaaagtgctttgagataagttgaaattattgatttattggccaaacttttgattgctttgtcaacatcgataatgtaattccacgagcttgggcacaactttttgtgaattatactactgacaactgaaacggtgacgtcctatgactgaaatcttatcaaaaaacgagtaggtaatcgttatggtagtaaatacatgttaattgcttgtactataaacgctggcgacttcttgggctctatcagttttagatacatacaaaagtgtggccaccatgggtgtgttatcactgaaatccgaaactgtgtttagacacacacttttcggtcatcaaactcggcaaaatgtataattacctaattatacactttctgggccaaaccactgataagtacttaagcttatgatttttgaaaaacattattaacattaacattattaaaacatatttatttatgttgttcttacttttacttactactatgtaaccgcaataagaaacctgcgcgattcattactgttttgtaagactttgaaaattttgcaattacgtttatcttatcagacctatttttttttttttaactatgattactatttgtacaaaaaatggcttttaaagtacttgagaaagctttcttagcagctcaatcaagcttaaccaataggattatttgtattgttcaacacgaatatgcacacatataatacagtttattgaaccttataagattcgactttttattaaggttcaactgcaaccatatgcatttatgtacatacgtttctgatattttcgaaggcgaccggaagacgcactcatgcacatgtccgtagatagtgcgacggaacacagaaggagcaattctccagactcgaggcaaaacggcagtctgcggttttcctcagtcacgtattcgaataaactgtgcgcattgtaattgaaatacgacgtacgacggctccgtggaatatggaaatggtctctagctaagggtcgcttgcacttggctgactatctatctggttccgaaactctcccaagggactttattaaccaacatttgaaaacgctctcgattagatagccagcccgttgttttcgataagattacttcccaaatgccagattggttgtgcccctatttcatccaatgattccgtgggtaatccacatttcattactcccatcgaaagagtctcaaattcggggccggaacgtcgccacgttccacacgcgaaacgatataaaaattttatatttatgtaaatttaccgattcaatagaccgattccataggacatggttaatgtaaaagaactgtactagatggtgattaatgttcgatggtagcacgcaatggttttcgtgtccttagacttttgccacgccaactacaaacacccagatctggcgcaattgtaaggcagttaaggtttaagcagccggatgcgacggcctcaagatatgcaaaaactaattacaactgaacctttgaccttagccaggctgtacggcaccagcagacttggccaaaaacgaacggcaacaaatacttcgtaagcagccaaggccaaagtgcaatgcaaaatggagtttggctgcagttgtgacttctagggtggtttcaacacacattgactgccagcagtcacgacactcaggttgttaaggatattagaaataagttgaaagtacatatatacacatttttcatgttttatgttcacatttaagtgagacgacattttcattcctcgcgtgctgtatttaaaatacttttaaaaatgaaaaaccatactcatggtgtataatgtggcttaatctaaatatctcacattcaattaagctcaacaatcaatcgattttgtatgtgcgtgccacgctgaccttatctgggtcattaataacagagataattatctggcggtcaccccaaaagggcccggaggaaagtcatcttcataaattatctgactgacctgtacaccgtgacattgcggagcatgatatgaattcaattaggcaattgctttatagacctttgaacttactctgcagtatatacagagattgcgatcaaggcaataaaaacgatcctcatatgaaataaatcataaatatttattattgtaaaatgcttatcttataggtttaaacactcctcgttatactcgcccctctctgtggcaagactttccacatacctcacctttttttcaattgaggtactcacacctctcgtgaactttacgaaaataagcctagactatgaaatgtactcgtggttttctatgtatatgtcgatgggcttgtggggctgggacgtctgccaaaggctggcattttgcagtcgataaaatgccaacagcaacagcaacgccgaataactttttcaagtcgaaggttaaattttatcgtggcccgaatgggcaacaaaaacagtggcagccccaatggatggatggattcgcctgcagttcgggccaggcgtcttctattgtttatctggtatcgtatcgggcttttgattagttacccagcggcagggaagctatgggttggttggcggctttcattcaatggcactggttgcaggttggcactgcaaaaacttggctgctgcccaaaagccactttgaatgcctgtcaggttgtcccttgtattcacttgtatacaatgcaactttcacgtgcagcaattgcgatttgtggcaattgccatcaatcgggagtacaatatttatatacatcgaacaaataaatacgatatgagggccgtcacaagccataatatccattattccgactcattacaaggcaaaatgcggtaattagcgaaaaaaaaagtaataaaaaatgctttaaaatattgcaaaacaaacatcgagcagaaaattgcagttgaaattaccagtcggagagttagttaccttatatgcgaagttacatatacgcaccaattgaaagtgtgtggaaagtggttgggttttgtaagtctggttctgctaagcagctaaagatcattttttaagcgggaaaacccactttatgtgtggataacttaataaccggtttttggcattggcaattgcaacgccagtcacgttagcttaaaatgattgtaaagtgtttttgttaaacaaagaaatataatcttccgccagtttcaaaatatgcagtcttaactagccatatggttttcaaatctgccgattaaacgcccctaaatgcagcctgtcattttaatctgcactacatgagaatttcaattcaattcttatattcaggttgacccgatgactaatatccactatcccaaggcattcgcaccattcatttgaatgtgaaaatagtgttattaattgcttggaattttctcaaattgatgcggggctattgttcgttcacgcaccaaactgtggcaacttctgggaaactgaggcacagatatgcgcccagctggatatcgtacatatatgtgtcactgtaatctgagttcatctcaagatcccagcgagcgttgcattcgccacttggcatcctgccgccgccatcgtcaaatgggagtcaagaactcaagcattaaacattaaaaccccgccgccggccaaacaaatgtccctcacatgttgatgcctcacaaatgtagccatccatgtgcgcttacaagcatgtggattatgtacacatgccatatgcagacacacttcgagaaaaccattcggatgcaatcaatttgatcgagaattctgatgtcaaagtctaacgagtttagtattaatttatttttaaatggtcaaatttatttctgtaaatattattatttcaagggtatatttagcaattgtataattacatactatttaaaccattaattgtcgcttcaaatagattttctgagtgcatgcatcaagctgagagcaccacggaaaaatcgccctgtcccagatgtcgaaaaatgtgagtcagcagcggcttgaaggagtttcgcagactggcggaaaaacagaatagaagaggaaaggcggtaggaggcctaggaaaaccccagtcgagttttctgttgccaacatgccgcaattacaacatgctgagggagtttttctcagccgacaaccgagttttgcggtgcagtgcggtctgtttgtggggtgaaactgcataggacggctatgcagtgcaaacttttcccattttcatttccatttccatttgtcgtacagcacgcacattcacgtgggctaacaaattgcggggcaatgttgaataacgatgccagacagatatttaggcgaatgcaacttagtgcgggtgtggatgccactttggattgcaattgtaatcgcaatcgcaacgtcaggcatcgcagccaacggatgcggatgcaatctgcccgaacctccgaggcattatccgccgccttctcgggatttacgagctctatcttgcccaattcctgtggtctgcggcttgggcgttggcctccactcacagaaattgatccaagtaatccaaacctcgatttcatattaatcactgcctcatcaaacaaagttgacttgaagactgaaagaagtcatcataaattatcataaacatatttactaaaaatttatagtcgaatcatacatttcaaaattaaaaacaaacgattttattttctttatagtaagacgcagtttcctttgattgtactacacccaagggcaaagttagtttcaccgagataagcttacaatgtcgaaaaaataaactttaagcattcgagatgcgaggcctcgggcccatttctcgcagtgtatatgctcaagcccataattaactcatccagtgcagcttgcggttgtagaaagtacatagttgcatgtattcgttattcaggacacggatggcgaagtttcctgttttgcacataaagtgcagggcattactcataacccccgatggaggggatcatataaagtgggcggggggtggctgtgtggcgacgacaaatacattcagctcgattgaaggacacgacgggctgagtgacaaaccggcgaccccgcaaattggcaattaaaatagcttgtgctgcagtggaggggaataaaaatgcaaaactagaggaaccacgcccaagccgaggtcctgcctactttatggacttcctctgcagggttggtcgctcccgttctctcgcacgctaaataacttatgaatacatattcctcggctgcgtatgaaaatttaattaagcgccttttgtttaccttttcacagggcaaagtccggtttcggagccccgaacaaaacgtgttttctgcacgcactctcagcgtttctttggtacacgggacatttgtacattgggactcgatagtgaacacactgcacatatttgtatttcaataggcaaaataaagaacatttagcaagggaaaagcaactggacgacgccttgatgggctcgctgaagcagacaatcgaaatgtttgtgtggtgactcagttttcttggtgtttgggaagttcacatttctggaaacttgctcggttcggctcgcgatttgcactcaattaaattttttgctgataaaaattaaaacgaactagacaaacatgatcatggccattttttgctgttcttgcaacgctcggaatcgctcgcatgtaaattaaagaaatcacacgatgatccagtaagtaagaaatccagtaataaattaaagttctcctgcagtgcacaaatttcgtggatgtctggtttctatccatttacgcgcgcaatcaagaaattccaaatacttgcaatatttatagaatgtatccacatcagcaaatgcgtgtgtgagaagagaggcacgtgtatgtatttgtttaaaataaaagaacaatttgcattatacgaacataaacttttaaagtattttggtatgccttatctaaacaaattcacaatggaaataagtgttattctctcgatgttccgctggtttcaaaaaaaaaaaacaattatctgataaacattatatttatttgaagcattgaatttgaaagtctcacatgaggggatcacatgatgaaacggaatgaattattatgttcgagtattagagtattatattctagctgatactagcacattgataaagaccaaaatacaattttcttaaaattattaagattggtgtgcttatacacaaaattctgtgaaacttgctacatgcagattacttttcgcatatcttagaaaagcatgaataagtcgagtggagaaacccaaaaggaagtagaaaacagttgaaagattaagttgtgagacataaggatgttatttcataaacgtactgtttaggatcgcaaatcgctcgaaattcgggtattaataatgaatagcagttcgtacgtgtcgaaaatttcggcgcggcaagggggagtaaaagagaaagcaaaaagctgaaaacgttgacgtgacgttacgtcggcggagaatctcggggtcactgtacggaccaataaaagtaacaccgccgacgtctaacgcctcgcaccgccggttatcagtgggccagaaggcgcaaacgggtgaaaagcggtgacagcagctgataggcaaacaaacagtcaagcaaagcgtatacaacgttattttgcgccactgaaaaaagcgttaaagcccattcgacagagacggccgatcgaggggagatgaatgtgggaaaaagagagagcgagagcttctcgcggaagctggcgcaattaaaaatcagagcttcgccaacgagcatgtgattgaaaatttgaagcgccaatgcaaacaatgaactttaaactgaacggaatgattgtaattccttataagccatagtgctcaataaattaaacattaatttaaagtacacgtgttaaatgtctattagcgaaaatcacacaaaaatcgatttagatccaaaatatcgcccttagagatatggtgctatcttagtgggactcgaacacggtcttcttagcgacttcttcttcagataacaaatctattgaatatgtaataagttgaatacatatgacttgattgatatcaggaaaaattgatatagaaatgggttattttttattgataagcggtgtatcggaactagtgagatttccactgtacctaagtgatgaggtaaacactctcgcagtcttgggcaaacattcagacgggagcgaggcgcacagaaagataggaagagggagacggagcgaggcggcacagtgggacaggccaaggacaacgagttgaaaaaggcgaaaaggagcagacgagccaaaacggaggacaacaaacaggcatgcgtgccactgtgcctgaacttgttcaaggtcagtcctcagcgacagcgacgtgctaacaaaaagcgaagaaaattcatgttggaaaaaagcacaaaagaagagcacacaacaacaacgcctcttaaaggcgaagaaaagagcgaaagaagagatagatgcgtatataaaaaacaaaaaaaaaaaacgctacccacacatgaaagagagtgagcgagagagcaagtgtccctccccgcagcaacaatgacaacaataggatactgttcaatggatgctgataagcaaaagtaaaagacaaaacccctcgaaatctggagagatagtatccaagcactcgcataattaatttcatacattttatgcttttttttatgtattaatagtcacctgctggttgttcgcctggctgcttcctcattagccagtcagtcgaatccttgcgggagagcgagggaaatggcaacaaatgtgcgtttttaattaatttccatgtgaagcactcacgcacacttacacacacccatcgctttgggtaacagttcaaaaacagagttagagcgaaagagacaccaattgggagtgctaattcaacacacacgcgcacgcagcacttaatttgtatagatttttggcatcaatttgttgttggcagctggaataaatttacttaacttaacacaattttcaagcttgcacacaaccacaccaacacgaacacctatacagacgcggcgaaaagaaatgcaaaaggagatgaagaggaagaagaagaagcaggctgaaggatgctgggcctggatttctctttccttttttcgctgcccaaaaaggcgttgacagcgcttttattcacttttaattcatttaacgatggtgttgtccgactttaattgtttatgcgcttgggttttttaagaaaaactgaataaaaaacggaataaccgccgtcactcgtcgaaaaattctcggcgcggctattgttcacttattatcatgtcatattttccaactgatttgaaagacagtattttagagaataagtataccgagcgagttatcagcgacgtgtgcaatttttatgcacttttttaatattttaagtggaaaataaaacacagagcgtttcagagggcgctaaattgttttttgcccgttcggaactgagtaactgagaagcgtagcgttattaccagtctttttcttcttttttgttgctgccccgttcgaatttctctcgcactgttagccgctctcagttgctgttaaagcggcgaaattcactgttatatttaacagaggcgttgttgttagttgtaaagaagggctgttaaggggagttggcttcataaaactttttgaatattcagagttaaagaaatctagtttttaacaatatttgtatcaaaacacatttaaaaatattaacatgttcagtattaatatatattatttaagtataaatttcaaaaaccccaggcataagattttatatacaccactggaatgttaactgaaagcgggagatagggatggaactcaagcatcgacacgcgtttaaaatttggggtgaccatttctatcgctttctcatctagcttgcctagattttcaagatccatctgccaaaattgctatcgattaaagtgcatcggctcagtcgccattcgtaagttgtaaattacgaagaaacgcaatgataattgattcaaccgataggaaacctattttaacttaacattaagattttaactttttaaattgcactaatatcgttatcagccaactaaattttgtaattacttaattacttaataacaaaaattagaataatatttaattcgttgagtaataatgccttttatgaaacctaattatttacaaacagtcgaatgtaaacaatattggggtgatcataaacattaagagatatacattttgataagtgttttatttaatgtttatttaaattacaaatatccctaatatgactggtaaatacatcatattacttagatagtgacagttcgtcagcactgactatcgatagccgccttttgttgcaacttccatcttctacgtgcaacagaagaagttctagaaataagcaggaataaaagtttgcaaaaatgagtgctccaaaaggggacggaaactt

SEQ ID NO: 23798 - DNA, 1775 bp, DROSOPHILA
aacgggcaaaaaacaatttagcgccctctgaaacgctctgtgttttattttccacttaaaatattaaaaaagtgcataaaaattgcacacgtcgctgataactcgctcgctgccaacaacaaattgatgccaaaaatctatacaaattaagtgctgcgtgcgcgtgtgtgttgaattagcactcccaattggtgtctctttcgctctaactctgtttttgaactgttacccaaagcgatgggtgtgtgtaagtgtgcgtgagtgcttcacatggaaattaattaaaaacgcacatttgttgccatttccctcgctctcccgcaaggattcgactgactggctaatgaggaagcagccaggcgaacaaccagcagtcacttggatctggagttaaatggccaaggcacgcagaaaacgctaccgtctgaggtgtccggaaatagagttagatccaattagaagccgctaggatggacaagcgatcgttgtgcctgctgctcatctgcatcaatctgtgcctggtcatctggctggtcagtgtgcagcagttgccgatgctggaagcggaaatcatcgccgattttagcggaagtggcggcattagcagcagcagcaccgcacagccgccaacgagtgccaaaagtggattgcggaggagcaggagccaaccaaaccaaatacaccagcctagtcgcacacctagtaatagtaatgatagtagcctagttagcaacacattcgataaccaccccatgggcacgccccccactttggcgtcacaaacgcccacgccgccacagagcagcatgcacctcatggatctgcccaatttcgtctatctaatagaccagcccgcctgtgataaggatgtccgggcactgatattggtccattcggcagtgcgcaatatcgaaaagcgccggataatccgagaaacgtgggcgaatcggagctatatagaccagacgccgctgaaggtttacttcctggtgggcggggtgagcgctaagagcgagaagtggcagcagttcctgggacgcgagaaccacctgcacggcgatctcatccagggtaacttcaaagacgcctatcgcaacatgacctacaagcatgtcatggctctcaagtggttcaacgagaagtgtgcgcatgcccagctgctggtgaaggtggacgacgatgtgtttatgaacacaccgcagctggtcaagtacttggcgacaccctctctgccagagtactccatgctccgggatcccaatctgatgctctgtcgatccgtccatcattcgagggtcaagcgttcatatcgttccaaatggcgggtgacctacaaggagtacccgaatcgtttctatccggaatactgtcccggaatggccattgtctacgcaccggaagtggtgcgtcgcctgtacgaggcggcccagaagtccaaatacttctgggtagacgatgtactcatcacggggatcctggccgaggaaacgggcagtaagatcaccccgctgcagcattacctcgagcagaaggacgttcgcaagctggtcggcggggaagctgatcttgaggatcccccgttcctcttcacaaatcacgccattaagccagacgaaagcatgaccatttggcagatggcgctggacagaatgcagaggccactgctcacacaacccgcctactcatccgcatcctccgcttccagatccgcacccgttgcgccaagtgccaacatttccgaggtggcccagacgagctccaccggcctcagctag

SEQ ID NO: 23799 - protein, 434 aa, DROSOPHILA
MDKRSLCLLLICINLCLVIWLVSVQQLPMLEAEIIADFSGSGGISSSSTAQPPTSAKSGLRRSRSQPNQIHQPSRTPSNSNDSSLVSNTFDNHPMGTPPTLASQTPTPPQSSMHLMDLPNFVYLIDQPACDKDVRALILVHSAVRNIEKRRIIRETWANRSYIDQTPLKVYFLVGGVSAKSEKWQQFLGRENHLHGDLIQGNFKDAYRNMTYKHVMALKWFNEKCAHAQLLVKVDDDVFMNTPQLVKYLATPSLPEYSMLRDPNLMLCRSVHHSRVKRSYRSKWRVTYKEYPNRFYPEYCPGMAIVYAPEVVRRLYEAAQKSKYFWVDDVLITGILAEETGSKITPLQHYLEQKDVRKLVGGEADLEDPPFLFTNHAIKPDESMTIWQMALDRMQRPLLTQPAYSSASSASRSAPVAPSANISEVAQTSSTGLS

SEQ ID NO: 23800 - DNA, 2812 bp, DROSOPHILA
atgcgatatgtgatataaaataatattcatattaagtgtgaatattaaatattaaagtctcgaataaaatatattaaagcctttttaaaaagtttaaaattattaagtgtaaaatatttttaaggcataacattaggtatttatgggtattaatgtacgataattgtttgacttcgaatttaaatagtttttatttatgttcttgagataaaaagcataagtaagtaactcctaaaatagcaatattatcaatgaagcttgaaattaaaataaaatgacgtgagcactatttttgtgtcctcagctgtgcaaggaagcgccgcgcacaaaatgcaaacgcacagcggaataacatcagcgagagagagagagagagagagagagagagagagagagagagagagagagagagagagtgatggggcgacagtggacgaaagagaccgaccatattctatgggatacaccatatgggaggggggaggggggcttgaatgaggcgttgggttcaaagggcacgacaagatgctcggttagccggcttgtgcttctcaaagtgaaacggaacacatctcaagtaaatgtgcataattcatactcgcagttatccgtttgcagttcgcattagtggacaatcgggtgaaggacatgccacgagtgtcacaacttggtccgatccgattccatttaagtgccccaccccatcgcaatgcacaagattcgataaccttaagaataaatagagcatatacattatattataccacatttaagactagagtaaatggttattgaaataatgagtaattttcatgtcaagaagcaacttagcgctaatattgtggaataacaggtgttctttcgtgaaaagatatagtaattgaagaaattcaatactatgtgcaaatacatataaatacctttatcattttataagacatgatgtagcaatgactttccggactttggaatgttagccttgtgatgcgtcttcgcattcctgatcacattgtccttggatctaatttcatcgaacaaacggagctgtcaaatccatgtacccctgcccgactcgaaatatattcagtttgctttcagagctcgtccggagcacatctcatttcggaaaaataaaaatgtgaaaaaaaacacagaaaatttttagtaaaatcaaaaaaaagaagttttggtttgcttcgcttcgcttcggtttacttgggtacaaaagtgaaataaactggataactacaccttatacatacatactaataatacacagaaaatcacactgtcatgcagttcaaatatacaccaactgagtgcagttggtaagttttgggtacttacacaccttgtaagctctaaacttaatctctagccattcagaatatacagattcttgtagatacttctagcgccaactgacctagtgaatcccgttcaccattcccggatgttaattgattgcttagtctaggaatcaattgcattaacaagccagaaatattcgccattgctttttgtaacgacgtggaagcaatggcaacggttgccaagcaaccgctttacacaaaaagagtaagtggccctatatatattttttttttttcctcccatttagtaacaaatttttcaacgcagctgagaaacgcacacttgatgtttggccaacgggattactatggtatccggcttttcaaaacgatggtaccggtcccattggacaagaggatcgcatcgtggcgctaattaaaaaatgggttttcgctccgcttgctaatatattgccgttcccccatcattcccatcatcttatcgcttgggcttggcttccttcggattcaattgggtcagctcaaaatgcaaactaactgaagatcgttccgccaggccatcattaggataggtttgttttaattgtttgtaattgcatttgaattgcattcgattgcattaatccccggactgttgttcacagatatagcggagctctcaattcgatggtaccagtcccccgatggacgagtggattgcatcggtttggccgttattagcatttcgttcgttcgttcgtgtctaaataaacgggattcattgaacgcaaattagaaaagtttcttgatcctgggtggggttgtgttaatcctgcactccaggaggtactggggccatcagccatcgtcccaaacacgtcgacgcagatgaacaaactttggcaaacaacgagcgcggaccgatgcgcaaacttatttataaagaaatgttggcggttagtgcagcaaaccgaaagcttcaaataccctaacttgttgtagcacctgatctcaagggttgcttagtattggtaataaagagtgaccatatatctagccagttattagttagttataaccataaaatctcgagatgaacccaattgagtttctctagttaatatcgtagtcgtagttcccatttggcagacttcgctcagctttctttatttttccattttgtttttcattctttttgtgcataactgtaagtttgtcctgtgcgattgtcttccgtctccctctctctgtcgcaaatagtttgttggcggagggagcgagagggggcgtacgtgatgttcatattttcatagattcaataattcataaattttatgcgcacacgcatacattgatatgcgctgatttcagcatcctttctacggaatgtccatttcctagcttttattggcattccactgtctcgaaactttttgctaaacgaaaaggatcttcgggcatcagacggaaataccaacactcatttaatccacaggttg

SEQ ID NO: 23801 - DNA, 698 bp, DROSOPHILA
ctgatcacattgtccttggatctaatttcatcgaacaaacggagctgtcaaatccatgtacccctgcccgactcgaaatatattcagtttgctttcagagctcgtccggagcacatctcatttcggaaaaataaaaatgtgaaaaaaaacacagaaaatttttagtaaaatcaaaaaaaagaagttttggtttgcttcgcttcgcttcggtttacttgggtacaaaagtgaaataaactggataactacaccttatacatacatactaataatacacagaaaatcacactgtcatgcagttcaaatatacaccaactgagtgcagttggtaagttttgggtacttacacaccttatacttctagcgccaactgacctagtgaatcccgttcaccattcccggatgttaattgattgcttagtctaggaatcaattgcattaacaagccagaaatattcgccattgctttttgtaacgacgtggaagcaatggcaacggttgccaagcaaccgctttacacaaaaagactgagaaacgcacacttgatgtttggccaacgggattactatggtatccggcttttcaaaacgatggtaccggtcccattggacaagaggatcgcatcgtggcgctaattaaaaaatgggttttcgctccgcttgctaatatattgccgttcccccatcattcccatcatc

SEQ ID NO: 23802 - protein, 48 aa, DROSOPHILA
MATVAKQPLYTKRLRNAHLMFGQRDYYGIRLFKTMVPVPLDKRIASWR

SEQ ID NO: 23803 - DNA, 2219 bp, DROSOPHILA
atattttttaatgtatttcaatagaattaagttggttactttaggagaatccttttagccaagacaccaatccgcgaatataagagtttggcatgccgcaaatctctgaggcattttattagcgtcgacttcatgtaacctcgataataaattccattttccgaactcttttttaaaagttttctcttaattcttctccttcgataaaggacgcaagcgcacagaaaatataagtctagttttatagcatttaaataatattttttcggagtgtcgatttaataatgcaaagtgtaagatctgacacaattaattcggcttacagaaatgcgaaaagcaaataaagtcttttgaattattcaaatacgaaagctgattttaattcctttaatcaagcatatgttcgattcgatacaaaaagaacaagcgatttaacgcttgttagccggtgatgctccccgatacgcgaagatatccctcgatattgccaaatcggagcttaacaatgccattgatggcatcgcgataggtaatgatcatcggaccaccgatccttgtcccatttacggctacacatccgatgcgactttcgttatccaaaatcaatgcattctcgctgcgcgtcaagctggcatgcaacttatgcaacgactttgtggtataaacagatttatcagattgggatatctacatatatatatatatacatatatactcaccttatcgggcgaataatagtcaagactcttgtcgttttcatcgctgccaatgcgccaaacttgataggtgtgcaacacctgggtgggtcgacccttaaacgatatgctggccatttagatgcagttcaacacttttagttacacttctgtcgaattttccggaatgccttgaaattttgtttcctgctgctatttgcaatggaatacgttatcgaactgaatttacgaccgaacatattttgacatttgcctaagcattgccaactgcgatgcggtgtatcctgatcacttggtccttggaactaatttcatcgaacaaacggagctgtcaaatccatgtacccctgcccgactcgaaatatattcagtttgctttcagagctcgtccagagcacaactcgtttcgtaacaaaaaatgtaaaaatttccaaattattgtgtaattggtaagctacaaatttaacaaaccacaaacatatggaaaaactacacagaaatcgtacaacatttgtatttctagagtttcacccttttgataacttaaatactcgccattgctttttgtaaagcaatggcaagtggttttatagctccggcaacacgaaaaaagtaagtaaataaattgtgccttatatttttccattaactaaacaaatttttcccttagcacctgacaattccatgactggactacactaattacaatacaatcgaatcgatggaaccggtcccgttggacgagtagcttgcatcgattctaacatgtgatacacaaatcggctaaaaactacatactaatatcatatatgggtttatatggcttaatgtgcgcttatatggattaaaaataaaatattgttaaatcaatgcgaagtctattacttttggttagtctgcaaatcttttcaagaggttggtatatatgtatatcctatatgcattccaattagtagtgccagtcgaaagacaatgctcgaaaattgtgggtggtgggagctggccaatgggggagggggggtggtgggagtggcaccgggaatatcggcgtatcgtgatgcgtgatgcggttgcttgcaacgtgacacggggctcggctactcgataaatttgtattcaaaatgcagacccaaatgaaattatcgaccacagacagatttcagacgtggattcaattacaaggcatgtgcagagttggacactcgaggaggcttgtgtgggttaaggcatctgatggctaaagggggttgcccttttgtcttctgagccgcacaaatacatacgcataaatttgccttgctatttacataaatgtgttgggttgggttgggtttggtttgggttttgcgtttgtgttatgacatttgcttacgaaatgaacatcattatcggcatacttgggctttccatttaagcacacacacttatgcttgcactgctacaaatttttattgaataatatatataaataacatataaataaatcatatatatatatatata

SEQ ID NO: 23804 - DNA, 453 bp, DROSOPHILA
tgatttaacaatattttatttttaatccatataagcgcacattaagccatataaacccatatatgatattagtatgtagtttttagccgatttgtgtatcacatgttagaatcgatgcaagctactcgtccaacgggaccggttccatcgattcgattgtattgtaattagtgtagtccagtcatggaattgtcaggtgttttttcgtgttgccggagctataaaaccacttgccattgctttacaaaaagcaatggcgagtatttaagttatcaaaagggtgaaactcaattacacaataatttggaaatttttacattttttgttacgaaacgagttgtgctctggacgagctctgaaagcaaactgaatatatttcgagtcgggcaggggtacatggatttgacagctccgtttgttcgatgaaattagttccaaggaccaagtgatcag

SEQ ID NO: 23805 - protein, 80 aa, DROSOPHILA
MELSGVFSCCRSYKTTCHCFTKSNGEYLSYQKGETQLHNNLEIFTFFVTKRVVLWTSSESKLNIFRVGQGYMDLTAPFVR

SEQ ID NO: 23806 - DNA, 3460 bp, DROSOPHILA
cactcaaatgaaagatgtgcgagttgtgtagacgttagagttggcttgataaaaattaatatacacatacaaaacgcttctatgtgcctgttaaatacttttcaacgattctcgtatactaatccctctactagtaacggggtataacaacaaaacttttttattctcgtattttcaaaagtttctttttcagttcacccatgggatgaagatttctgtaaaacattgcaaacttcaaaataaaatgtcatactcattgtatagccattgaatataacttcgtaaactgtttaagagggtgttcctattatggctgtcaaccaattcggagcagcaccgaaccgaagtacagactttttagaaaatcaaaacggaccactagccaaaactcactttttgtgtaaatatggatcggtttaaaaaaaaaaaactataatattcaatatttggagtactgagtgcttacaataacatttagtgcacccaataagcatttttataaattgttattgtgtttataaagacagtttgaaaattttcacttattaaaccgcaacatctgacagtatcattaaagcttatttccgcacaatattcattattataactcaaagtattggccagttataaaaaatttgcaagagagaatcgctaaacaattatttgcaagaaaccaaaaaagcactccgattttgaaattttaaatataaatagtaggtagggtcaaccagttttctaggaacgaagacgttacataaagttgacatcgcgttcaaaaaaatcgtaatattaaatttgtgtctcgtcccctgaagccaaattaaaagaaatttttaatatattggttcgttataatcagcagttaattttaaattaagaattccctttaatccctgaacgttcaactaatgttaatagacttcacggaagccacgactagatgtgtaaccgactaactaaaaactaacaaatattaaatacatttacaaaaaaattcaaattatcctaaaatccgcattgcatggtaaacaatagaattacaaaccggacaaactgcatccatagaaagacagatgtgattggcgcactccatacaaaacatattgtgaccacacggaaccaaagcagtggtaacagtattttcattacatacaaagcattctcgatgagttaaaaaattgtctgcgttagattgcacttgaatgccttttatcttttgcgggagattaggcataatgggctctttagcatggttcaaattttgttgatttgcagaatgttcacccatacctaacagtgagtcggtaggactaattgatattgtgggcgagcaatgagctgtgggtatgatatttgccggttggttccaaatactaggagagtcgcctataccctcgtcaacgtcaattgaatcactaatacttttccatatatttaatatttctggaggtgtattggcgctattgttggtactttttgtagaagtggtagaagaagcggatgaacaagatcttgttaaaatatttgcattacagttggaatgaaacgatgccgatgtagatgtgggaggacagaaagacaatgttttactagacgtagtgcgaaaaacaatattagcaacattagctttggccaaaggcacagaaacttcatttccaggaagacgtttatctaatatatctgctgctgttatatttgctgtcatttccatctcagcaaactctgatttttgaaaacagttcccagtatgatgtccttgcacaagtttcactgaattgcttacgtttacaaccgtcttcattgaattatttgcatactcctgcgtagacggaacggaatttttgtatatggacgatagaatttccgaatttaaatcatcatttaaaatttgagttaatgaaggcagtgacgcgtattctttagtatcgaccgaatcactactttgcatagtaatagcatcaccacttccagatccgctaccagttctaagggcaatgtgagcttctatttgctttcgtgcagtatcaacgttatctggcaagccagtcacttcaaaaattggttccttttctcgcgatggtgtcacaatgtaagtttgcgtctcttgttgaatatgtttgatagtagcaccttttggcccaacaacgagtccaactacccgataaggtacacgtacctgtatggtaacctgtccaggcatacaagggggacctgacatgcggggaactgcaccaccaccggagctagtcgtacttcctaccattccattgttctgactatcgcttacaggcttacgtgatgcgcgaattaagctaaagtggtcggcagcagaaagtatttctcgtttagccttgtttacatcttcctttcgaccagtcacaacgaacacaggctcctctcctcgaactggtgtcttaatgtaagtgttggttttggctctcaaagctttaattttgcaccctaaaatggaaagagggtattcaaaaattatatatatttttacgaactttgatcaccattatctgtaataaacagatagataggtataaaataactatagttataaacaaaggcattcaatcgatactacaaccgtaaagcactaccaaatctagaacatagccttaccttaaataattataaaggaactacacatattgcacttacacgaactttgacaccagcaaaaaaaattgctgacatccttccagaaagttactggaattttcctatttccattatagtatatatatatatatatacatatatatatatatagtatttatattttggatccggatcaccagccgagtcagtctgaccatgaacagtgattaaatactaagcatgcagactcgaggacttgacacctttacgcagtttgtggtcgttaaatcagtcttcgacaaattgatttggcacaaggcagaatgtgtgtgtgactgttttgggcggattataggtgctagtaggggcgtggtcgtagtgtctttgatagaccgatagaaatttgcaagaaaaacaataaaacgaataaaaatcaaaacatttgtcaaaagtaaggtgtagcagttctgggcgatatgtggtcgttagaaacaatttcaagaaactaacttgcgctgcgtcttcctgcacgcttattccaactttacatatgttaaataaatatggccaggtcgactcggctattgatcctgatacatacagctgcggttaaagtaatagcactactgcaggttgaaagttgatttgctaaaaaaaattattaaatgtttttttttttaagtcagtttgcatgaataataagtaccatttgttgtctctctgagcaagaaatttttactctctcaatataacggttctttttatttgtattttttatttgttcaataaaattaataggagtgattgctttggaattttttttcgacaaattttgaaaaaaggagttgcatta

SEQ ID NO: 23807 - DNA, 1460 bp, DROSOPHILA
ggtgcaaaattaaagctttgagagccaaaaccaacacttacattaagacaccagttcgaggagaggagcctgtgttcgttgtgactggtcgaaaggaagatgtaaacaaggctaaacgagaaatactttctgctgccgaccactttagcttaattcgcgcatcacgtaagcctgtaagcgatagtcagaacaatggaatggtaggaagtacgactagctccggtggtggtgcagttccccgcatgtcaggtcccccttgtatgcctggacaggttaccatacaggtacgtgtaccttatcgggtagttggactcgttgttgggccaaaaggtgctactatcaaacatattcaacaagagacgcaaacttacattgtgacaccatcgcgagaaaaggaaccaatttttgaagtgactggcttgccagataacgttgatactgcacgaaagcaaatagaagctcacattgcccttagaactggtagcggatctggaagtggtgatgctattactatgcaaagtagtgattcggtcgatactaaagaatacgcgtcactgccttcattaactcaaattttaaatgatgatttaaattcggaaattctatcgtccatatacaaaaattccgttccgtctacgcaggagtatgcaaataattcaatgaagacggttgtaaacgtaagcaattcagtgaaacttgtgcaaggacatcatactgggaactgttttcaaaaatcagagtttgctgagatggaaatgacagcaaatataacagcagcagatatattagataaacgtcttcctggaaatgaagtttctgtgcctttggccaaagctaatgttgctaatattgtttttcgcactacgtctagtaaaacattgtctttctgtcctcccacatctacatcggcatcgtttcattccaactgtaatgcaaatattttaacaagatcttgttcatccgcttcttctaccacttctacaaaaagtaccaacaatagcgccaatacacctccagaaatattaaatatatggaaaagtattagtgattcaattgacgttgacgagggtataggcgactctcctagtatttggaaccaaccggcaaatatcatacccacagctcattgctcgcccacaatatcaattagtcctaccgactcactgttaggtatgggtgaacattctgcaaatcaacaaaatttgaaccatgctaaagagcccattatgcctaatctcccgcaaaagataaaaggcattcaagtgcaatctaacgcagacaattttttaactcatcgagaatgctttgtatgtaatgaaaatactgttaccactgctttggttccgtgtggtcacaatatgttttgtatggagtgcgccaatcacatctgtctttctatggatgcagtttgtccggtttgtaattctattgtttaccatgcaatgcggattttaggataa

SEQ ID NO: 23808 - protein, 420 aa, DROSOPHILA
MVGSTTSSGGGAVPRMSGPPCMPGQVTIQVRVPYRVVGLVVGPKGATIKHIQQETQTYIVTPSREKEPIFEVTGLPDNVDTARKQIEAHIALRTGSGSGSGDAITMQSSDSVDTKEYASLPSLTQILNDDLNSEILSSIYKNSVPSTQEYANNSMKTVVNVSNSVKLVQGHHTGNCFQKSEFAEMEMTANITAADILDKRLPGNEVSVPLAKANVANIVFRTTSSKTLSFCPPTSTSASFHSNCNANILTRSCSSASSTTSTKSTNNSANTPPEILNIWKSISDSIDVDEGIGDSPSIWNQPANIIPTAHCSPTISISPTDSLLGMGEHSANQQNLNHAKEPIMPNLPQKIKGIQVQSNADNFLTHRECFVCNENTVTTALVPCGHNMFCMECANHICLSMDAVCPVCNSIVYHAMRILG

SEQ ID NO: 23809 - DNA, 2430 bp, DROSOPHILA
acatttttacagaaacaagaacaacaaattgcgtttcattgccacagtggtggtctctgcgccgtcgtcggcagcgacgtcgacgtcggctgcgaaaggcgacaccatttcaccggcgactattagcagcaagtgcgagagaaacggacgatggcgatcgcacaattccacacaacacacacacacacacatacgcataggctgcaactgttgcagcagccaaaacaacaacaagacggctaaaaagcgagtgttttttttcgattttttcgcgctgcgaccttggaaccgttagcttttcaagctgaactcttggactgttaagttggctgcctttttaacaccttaatagcgcttatccaattgtttgccttttgcttttgttgcttgttgctgccgtcgctgctctgccgctgtcgctgctgctgcactgcctctgccggcgtcagctgctcgcctgcgtgtgtgtgcgtgtgtccgtgtgagtttccgtttgttttgtgttgggccttttattttgtcgtgttttttgtgcccaccgtgcaattgcaatatttacggattattcgcggaccgttgagcgatatatgtgcggttttttgcgcggagttggatcggcggagacgacggaacagcgatatataattgcagcagttgcaagaagaagagccaaccagcagtggctgccagtgtgtgcacactgcgcagcagaattgccacctggccggcggtgttgccacatcgctggatttcgtgctgcgattgtctggagtgtaagaagaagagcagtggatcagctgttgctcacaagcggctcaaattgagttatgtgctaacgcgttcgtggaagatttgggcgcgcaattcaaaaatgtaacataacgggatttaaagatttcaatttaaataaactttgaatctataataatctattgttcgaattaagcgtcgaagtaaagttttcaaatagtatactttgcgtcacaactcaacccaaaatcagaacattgtaacagaaataattaggtctgaaaatgaactcaatagtgatttttattctgcactttttcttgggtaagcaattaacatatgtataaaataaattctactaatgaattttccctgccggcttaggaatcacactcggaacagctattcccaacgaaataagtgtgaaaatggcagtgccaaataattctgttactatgaaaaccgaagagttcctgctgcaaaacgaaaatattccctttggtcttcagagtattccgcattacttaaaacatctcattacaaatgtggacagggatatcccgggaaagagaaaaccgaagattactcagtacttcaagctgagtccagaaatggataatttgcagatgatgcggtttcttatcgagacctttggcagattcattggactcattacataggcgtagtatgttcttttttgatatattttccagctgtgagaagaattccaacgcgctcataaataagaaaatgaaaggagaagacgatgaggttttgatgatttcaaatgagaggaacttgatgagattttttggtcaagagcatttatttcgaattcagttttgcaacgaggccaaaggagaaaagaaatgaagtattaaaactgataaatgatagaagaattcgttaaggaagaacaaagaaatatgccacagaaagctttcaactaaagacggcaagaaacgaagatttgctttccaaataataaacaacagataacaaggtacatttaaggttttttcattggtttcttttatatggatatatatatatatatatatttatatatatatatagatctatgtatatatagtataccattgttaacatttactattgactatgtaatatccgctgcagagatacttttcgtgtttcgtgttctgtttcagtttcggtttatgtttttctgtttgatttgcaggtacttagtactactttgctccttgggtttgcgattattgtacgcttgtcctatatatacacacgctataacatatagttttttaataggtatccatggttagatatatgagaatttggggggcttcttatataggttcctttgggtagggtggaatactaaagagtttaggcgttaataaatacatctcgagttttagttggtaaaattgctaacatttagtaagtaactatgttgtacattcaagggctacatcgtataaggtatcgctgatctataacgatcgtaaatatatctatgtgtatacagtatacagtgtgtatatgaatatgaaacaatctgcagttatagattctaggcataggctatgcagtgaagtcttagacgagtttaaatagcactttctcgaagttcgtacatctataaatagtaaatatatgtatatatatatatatattaggtatatatatatatcg

SEQ ID NO: 23810 - DNA, 370 bp, DROSOPHILA
cagaacattgtaacagaaataattaggtctgaaaatgaactcaatagtgatttttattctgcactttttcttgggaatcacactcggaacagctattcccaacgaaataagtgtgaaaatggcagtgccaaataattctgttactatgaaaaccgaagagttcctgctgcaaaacgaaaatattccctttggtcttcagagtattccgcattacttaaaacatctcattacaaatgtggacagggatatcccgggaaagagaaaaccgaagattactcagtacttcaagctgagtccagaaatggataatttgcagatgatgcggtttcttatcgagacctttggcagattcattggactcattacatag

SEQ ID NO: 23811 - protein, 111 aa, DROSOPHILA
MNSIVIFILHFFLGITLGTAIPNEISVKMAVPNNSVTMKTEEFLLQNENIPFGLQSIPHYLKHLITNVDRDIPGKRKPKITQYFKLSPEMDNLQMMRFLIETFGRFIGLIT

SEQ ID NO: 23812 - DNA, 2215 bp, DROSOPHILA
caaattgaggacagatattacgcgaggcttgcatgaatggcgacgcttgaagattattaacttatatgcccataaaaaaagcatattaataggtaatccaacatgatgccatctcaggatttaaccatcgtattacgatcttggctgaaatcgcgcaaaaatgttcatcaaactgactgcagagtgcgtcaatttataattttgattaataattatcaatagcaattcttttattaggaattatttgaacttgttactaatttatttaaaaaattacttcatttatttatttattttccttaattaccttgcacttggtgtgtaattaataataaagtaataatttaatttattaaaatcctttcttatgtattttttcattttttttgctgagcaagatcaaatatgagagagcgagcgcgaaagcgcagagacagcttcaaaagctcagccttaaaagttcagcaaccgttattttgaagagcttttaatgcgctctttttctattgcattgaaagatctctctcgctcttcttcttcttcagttcaatttttgttacgacgcgttgcagttgcactggaatatcaattttaataatattaagttgtttcgcgttgttaaagtgtttcgcaatatgataatacgagttattaagtgatcgcggtgttgtgttttacgcaaacatataaaatatatgttaggctagccagttaaatgcaaaaatgcaaatggcgttccgcgtggtggtgaaaatgtatgcaaaaatacaaaatgtaataaaacattgttatttcgcgttgtttaagtgttcgcaatatgttaatataagttattaagtgatcgtagtgctgtgtttcacgcaaacacatggaaaatatgttaaaattgccaattaaatgcaaatatgcaaatgatgctccgcggggggagtgaaaatgcatgcacatatgtatgaatgtaagaatgtatatatgtatgtacatacagcgtggtggcgtggaagttcagcatcttgtgataatcggatgaaatttctcgccaggatttcggtcctttaaagtgttattaaatcggtaactttttttttgttttttaagtgatgttgcaatgtaagaaaaagtgtctaataatatttacacacatacataaatggccgaagaaattattaacgccataagaaatcttaagtaatttgaaaacgcaaggtaagtggctcttacataatatttaatattgttatttatttgtcataaatacgcaatagtatgttaaaacatttattgagatgcaaatatgtatttacattatgattatctatagtatttagtaagctgcaaacgagaaacaatttatgaaaattttatctttatagttttaagtatgtttcgaaagaatgttttaaatgttttatagcgcaaacgtagcttgtttattgtgaatacaattgcagaatgtacgattatgaaaacgttgcttactttacatcgacgactttagccgtttaacgagctcagttctcgattcaaagtcgatgataagctgcttccccatttttcacggtacagtggctctcatgtttgccccgatatcgaaggataccgaagatacccggcataggcaggcaatatcttgcacaacaaggacatgtaccaattggcccgcccaaagggctcagtgggctcgggtgggtgtgcggacatgaaagatgtaaatcaaatccaggaaaaatgagaccaacaaaaggcgatgagggagaaggtggtggtggaggatcaggtgcctcgggttgggtgggggagggggagggggcgtagctggcgcagccaggacaattcaatcgaaagggcatggcggatgacaggacgagagtcctgccgcatcctgggggctaacccatggcaatgccaaagtcgaggacacgtcaagcagccagctcactcgattgagggttcccagcttccaggtggcaatgggctatgtgaacaacggatttggattggggacaggaattgggcaagggtaaggtggtcctgccagagacttctgcgcttccgatggctcatagtcagacagaggcacaaactgccaattaaccaaacaaagaaagcaacaacaaaaaaatggcagaaggcaagtgttagattttctacgaaactggaaatgctctttccaataaaatgagctggatttggagttttaggtgcatacagtttg

SEQ ID NO: 23813 - DNA, 160 bp, DROSOPHILA
gccacttaccttgcgttttcaaattacttaagatttcttatggcgttaataatttcttcggccatttatgtatgtgtgtaaatattcgatttaataacactttaaaggaccgaaatcctggcgagaaatttcatccgattatcacaagatgctgaacttc

SEQ ID NO: 23814 - protein, 27 aa, DROSOPHILA
MCVNIRFNNTLKDRNPGEKFHPIITRC

SEQ ID NO: 23815 - DNA, 2441 bp, DROSOPHILA
caaagtggcggctcgtacatgaatatgcaatccgagccaaaatgcagtcggcgccccttcggtttggccaaccacgtgggccactctacctgaaccaccttttagccatcaagccaagccacctacacggataaatccagccaagatacacctaaaccattgaacagtcggcgccaattaagtccacgaaaagatcggatggaggatttcagagatgatgtttttaggaaaggacatacgaatacatatgaaataaaaaagtaatttcatacttaagtagaagactggcgttcttaaaacttgatcaagggacttgcagttgttgatttttcttgttatacccatccaaaaatgcttatctttgttaaaatctacaactaataatataataaacaataaaagctacaatatggacaagttggcaacacgaattctggtgtaaaattttactgcgcgcgatgtgaaacaatcgctaattgttttaggaccttcgcttcagatgcggaggcaataaggtgtgaaattccagaccgggttttgacttttcgcccgcggcacaaaagtttttagccagccaaatgaaaattacgcatacgccgccttgtcttacactgaagtaaggagcgcaaatgaatataactcatacgccacgtagcagctgccgggtaattataatcatttaatgaagagcactgtaacgagagttatgagaccttccactaatgtacgcaaatctcgtgcggattcaaaaaaatgatctataatgggttaatacatgttgtctgattgctttgtcaccgcaactttaattggtgtctgtcgctgataaaaaaaaaaataaacaatttcgctccatttcacaccatggctaaaaactcaattcgtattaattgcaaatgaaaacccgtgtttcgtaatgacaattcgacacgctcagtcgatttaatcggggagctataaaagctccacccgcaactgaaattgtcaacagttaacatctggacatttggcaagatgcatctgaacctgaaatatttcattggtctgctactggtgctgctttgcagctcttttgcggtaagctagtatatttgaactatttcctagtgattaatttgtgacttatacatacataactgccatctacataggtggcctatccccaggggcctggatgtggtccaccaccaagtggaacacctccgtcgggaccgcgaccatcgggtccaccacctggaggtcgctgcggaccaccaccatcgaccacggctgcatctaccggttaaatttgtccacctctgcgattcccgactccaatttccctcataaggcttactgaaatgtcacctagaaaatccttttgttaagtcccttttttttttgacaaacaaattaaatgaaaagtatatgtatgtgtgtataactgctgaatctaaaatgactttccgtgggtggttcatatatttaatttaatccgatttaatcaatttactttacttcataatttttgaaacacggtaaacagctgtgggaggatcagtcataacctcctccttgcatttgaaataaaaagcgtatgccacaatccagaaataaatgcacaaaactatgatgggtattcaaaattaaacatatttgtagagtttttagcaactacttacgcagtccaatgatcgatatgcttatatcaatgatatctacatcccaaattaaaacttcagctaccagaaaagcaggatacagcacaatgtgtaaacagcttgtgataagaaaaataagcactaaaactgatgttttctgagcaattcgaaaagatttaattaaccagaattaagcttgatgacaaatcctcaccacaaatgaggccacgaatagcattagacagcccacaaaatgcaccatatccaaaattccatatacaactagcacgatactttcaagggtatcgcagcaaggacttgcatttctcatgggaacggcaataagttcgaagaaaaataatgatagagcactgatcatacaacccactcttagggatatgatacaacagcattttctcaagcggcatctcatggtttttagtttattttagttgattttaaaatttctgacgtgctaagcacagatagtatatatatattgaaatttgggaataaaatgaaattattaataattattcattacctgattgcaattcggtatcttaaaaaatatatttaagatatcttagaactctgtgtccccgttataaggatttgttatatgatgttaacattttcgaagctaacaaatatggtacaatttttcgtcaacatcaatttgttctcctctgcgtcgcaatttacccactggaaattttgtattccccagtcaatatgcaactggctgatgaggaatttccatgactttccacaattcatcctcccattttcgaccccgcc

SEQ ID NO: 23816 - DNA, 367 bp, DROSOPHILA
ggacatttggcaagatgcatctgaacctgaaatatttcattggtctgctactggtgctgctttgcagctcttttgcggtggcctatccccaggggcctggatgtggtccaccaccaagtggaacacctccgtcgggaccgcgaccatcgggtccaccacctggaggtcgctgcggaccaccaccatcgaccacggctgcatctaccggttaaatttgtccacctctgcgattcccgactccaatttccctcataaggcttactgaaatgtcacctagaaaatccttttgttaagtcccttttttttttgacaaacaaattaaatgaaaagtatatgtatgtgtgtataactgctgaatctaaaatga

SEQ ID NO: 23817 - protein, 65 aa, DROSOPHILA
MHLNLKYFIGLLLVLLCSSFAVAYPQGPGCGPPPSGTPPSGPRPSGPPPGGRCGPPPSTTAASTG

SEQ ID NO: 23818 - DNA, 4004 bp, DROSOPHILA
ccagcgaccatcatcattaataatattgaaaagccctaattacggttaagtggcccaaacgaggcaaaaaaaaaaaagaaatgagacagaagagaaggaggaccgacagaggggcttccgtatcgaactttgcaaagggttcggttccgttcggttcggttcagttcggttcagttttgggtttccaaactcccctttggcgttactgaagcgaatcatcatcatcagaactgtgtgtcccgctcattgcgtaaatcatttttcccacccctaagccaattgaggacgaactcacctgcccaaggtgcactaaaacttgcaggtgcatcaaccttcattcctgacctacgacgaccctcgatggttcgctctcgtcttaatgaaatcatttataatttttcttcctaccctgtgtgatgtcttgtgtgatgtcttgcggttgggctggctggttttcttcctggcccttaggtacttttttcccttgtacctctcttccccgttgagtttgtgttttcctcctgacgcttgattgctcatttggaggcccattgataggggatagtttcagtcttagcacgtggctactggtggatcacctgcttgcagcgggttcagctgcccacggatccgcctaatgcttgctcaaaaataagaaatacggagccacctcaacaggcattgaaatttcaaacacttaggcgcctggtaatactttgttaaatatactttttcaatgctatttagcataactgggtaatctttcagtaaacgcaagcattttcatttttacagtacacttcaaaacctacgggcattcgattgacagataaaaaaaaaaaattgaaaacaaaattagaaaacacacaaacaatacacattatattatacagttttagcaaaccagaacaagctcctttcggcccacgtttaaattaattgttttcgttactattcttggaagaccatctctatccccacaaatccattacccgaaggaatgcatcagaatatatggagcgcgccgcaggtgggtggttctggtggcgctttgaaggccttggccaggaatgtggccaatcatctgaagctgaaccgcagcaatatgaaacgagtggtggcccaggtggtcgccgagcaccataccctcggggaggtggccgactacaagggtcacatgtactttgccaagccggatcgcttgaattttcacgagctgattgcccagtccaaggaggccttcgatgatctgttgctccacgaaccgcgatctgtgaaaaagcaagcaatcacgaaacgttccaagcatccgaccaatcccaacgttaaactacagatgacagtatcaccaccgcaattagaaaaaccacaaaagaaacaattaacttttaaaaagtctggtctaccgaaaaaacattcaaggccaaaaattcggagtcggaagaagagttccaccaccatttttcagctggcggatgcaggtcgtcgtagtctaaatggtgtaatcattgacgaaactcatttgcccctagatggtgagcaaagggagatccttttgcatgtgccaccgtcgctagtcaagcggtcccgaaggcgtctccgatctgcccagatcaagaatacatcggagaaatgcccaccgcagaaaccggataaggatcccgatcagaagaagacaggatcacaacagaaggatggcgagaaattcaccgaggagaagattcttcaagttcaaaagcgtcaacccgagaagaaacgcagcgaagaaccgaaaccagtaaagaaaattcaggaaaaccaccagaaagagctgattcggtcaccttctcgcccccgatcggggtccccttcggttcctcagacccgacggtctccttcaccagttcgttcacaaaaactgacatctgttcagaaagcgagccaagctcttcgctcaccaccccacaagacattaaatgtcaagaatcaacgcatcagggcgggagacaccaaaatggcaacttccaagccttcggaaaagatcaaatcgagatcgatgctaagaacagtcaagaaaaaacttccattgccgcaaagaagctacgacaagccgtggatactgaaacgctctaaaaagagacgcttggcgggaggatctcaattaaagaaaaatctacagcgaccgatcaatatcgatgtgaagagaagggaaaagtcaggtaagggagggaaaatccagcattcagcaaggagcaccaaggtggagccaacgaaaatctctgcccagattaaagccacatcacatgttggacgccaaatgcaaagggtaaactttccgtggtatactccctatcaatttcaaggtgccgccggagcaacccaaataccaaatgccggggtcgccataccgccgtgtcaattgctaaaagataaaagccgtaaactcattcaaagactatcggtaacccaaccaattccccaaattaaacgtcccaatatcaccagtcgccaaaggcataatctccgtttgcgggagcgtttgatgagagatttgcaacgcgaagaggacatcgatgatccactaagtaatggatcgggggttcttcgccgagcccgcggtggaatgcaatcatctcagcaaattaaggaacctgagcaacctgaaaaggagcaggatcatcgttctgtggagcgcgtgagctcgcgaatcaagcgtttgccaaagggaagacgctatcgccagcccatcgccaccagcgagcggatcatgatcccgccaccgaaggtgaataataataataatactaataataaatcgatgtctccaagtcgccccaactccattccacgagtccgtcgaagatttcgatccgttctggtggacagcagtttgggaagtatcgccttaatgggtcagccggtgcaatcaaagcaaacactaactcccgctaaacgtcatcttaccattgcctttatgaacaagagatcagaacgaaccaatgcagccgttcagccctggaagtagaaactgtgaggttgaatgcctccactcagcaaaaacatattctttggcacccaccttttcaacgatgatgtattatctattgatactattcatttgtcggagctaataaattatcaagttggaatgccaattaaatggcgtcgtttccatgttgagtatcctttataaacacgtagtttttattattttgtaattgaaaaaccttttgggacctccgtcacatgttgccacacaggtgggttttttcctgattcctgatttttcggattgaagatctagcgacgaggtcaggaatcaaaccccaaatgccgagcgcttaaccccgtgtcaaatgtctttcactcgtattccaatatccttgcctttaacccacatcttccatcccatcctccttgaattatagcaattttttcatgcatgcaacaagacaatagcgccaaatgccatggggagtcaaaagtcaggcagtcgatgagctcaacagaaaactgacaacagtgaaacacaacaaagtacgtatataaagtataaaaaaggaagaaataatacgaataaagactgaggggcaacaacaagaccataatttaagtcgctaaagttttgcgccttttgttcgcccggcacaaaagttattgaaaatcgcgcaagggttgagttttcgtcgaaagggttcgaaattgaaaaagaaagcgaatgtcaggtggttgaaagttggaggttttttttttttttttggtttgggttgggtggctcattggtcgttggtgtgggtgatttagtgttaaataaaaacttttaaattgccatttgatcgtttgtttagcgacaataatgtcgtcgttgccagtcttgttcgcttttcgcttcaattgaatggaacctgggtcctgtgacaggtttataggacgcttccttcgcgatatttgtgcgagtattcctttaaaaaagggtgaggatttctgctcggaggtgggccacagggcaaaggacctcagtgagg

SEQ ID NO: 23819 - DNA, 2004 bp, DROSOPHILA
atgcatcagaatatatggagcgcgccgcaggtgggtggttctggtggcgctttgaaggccttggccaggaatgtggccaatcatctgaagctgaaccgcagcaatatgaaacgagtggtggcccaggtggtcgccgagcaccataccctcggggaggtggccgactacaagggtcacatgtactttgccaagccggatcgcttgaattttcacgagctgattgcccagtccaaggaggccttcgatgatctgttgctccacgaaccgcgatctgtgaaaaagcaagcaatcacgaaacgttccaagcatccgaccaatcccaacgttaaactacagatgacagtatcaccaccgcaattagaaaaaccacaaaagaaacaattaacttttaaaaagtctggtctaccgaaaaaacattcaaggccaaaaattcggagtcggaagaagagttccaccaccatttttcagctggcggatgcaggtcgtcgtagtctaaatggtgtaatcattgacgaaactcatttgcccctagatggtgagcaaagggagatccttttgcatgtgccaccgtcgctagtcaagcggtcccgaaggcgtctccgatctgcccagatcaagaatacatcggagaaatgcccaccgcagaaaccggataaggatcccgatcagaagaagacaggatcacaacagaaggatggcgagaaattcaccgaggagaagattcttcaagttcaaaagcgtcaacccgagaagaaacgcagcgaagaaccgaaaccagtaaagaaaattcaggaaaaccaccagaaagagctgattcggtcaccttctcgcccccgatcggggtccccttcggttcctcagacccgacggtctccttcaccagttcgttcacaaaaactgacatctgttcagaaagcgagccaagctcttcgctcaccaccccacaagacattaaatgtcaagaatcaacgcatcagggcgggagacaccaaaatggcaacttccaagccttcggaaaagatcaaatcgagatcgatgctaagaacagtcaagaaaaaacttccattgccgcaaagaagctacgacaagccgtggatactgaaacgctctaaaaagagacgcttggcgggaggatctcaattaaagaaaaatctacagcgaccgatcaatatcgatgtgaagagaagggaaaagtcaggtaagggagggaaaatccagcattcagcaaggagcaccaaggtggagccaacgaaaatctctgcccagattaaagccacatcacatgttggacgccaaatgcaaagggtaaactttccgtggtatactccctatcaatttcaaggtgccgccggagcaacccaaataccaaatgccggggtcgccataccgccgtgtcaattgctaaaagataaaagccgtaaactcattcaaagactatcggtaacccaaccaattccccaaattaaacgtcccaatatcaccagtcgccaaaggcataatctccgtttgcgggagcgtttgatgagagatttgcaacgcgaagaggacatcgatgatccactaagtaatggatcgggggttcttcgccgagcccgcggtggaatgcaatcatctcagcaaattaaggaacctgagcaacctgaaaaggagcaggatcatcgttctgtggagcgcgtgagctcgcgaatcaagcgtttgccaaagggaagacgctatcgccagcccatcgccaccagcgagcggatcatgatcccgccaccgaaggtgaataataataataatactaataataaatcgatgtctccaagtcgccccaactccattccacgagtccgtcgaagatttcgatccgttctggtggacagcagtttgggaagtatcgccttaatgggtcagccggtgcaatcaaagcaaacactaactcccgctaaacgtcatcttaccattgcctttatgaacaagagatcagaacgaaccaatgcagccgttcagccctggaagtag

SEQ ID NO: 23820 - protein, 667 aa, DROSOPHILA
MHQNIWSAPQVGGSGGALKALARNVANHLKLNRSNMKRVVAQVVAEHHTLGEVADYKGHMYFAKPDRLNFHELIAQSKEAFDDLLLHEPRSVKKQAITKRSKHPTNPNVKLQMTVSPPQLEKPQKKQLTFKKSGLPKKHSRPKIRSRKKSSTTIFQLADAGRRSLNGVIIDETHLPLDGEQREILLHVPPSLVKRSRRRLRSAQIKNTSEKCPPQKPDKDPDQKKTGSQQKDGEKFTEEKILQVQKRQPEKKRSEEPKPVKKIQENHQKELIRSPSRPRSGSPSVPQTRRSPSPVRSQKLTSVQKASQALRSPPHKTLNVKNQRIRAGDTKMATSKPSEKIKSRSMLRTVKKKLPLPQRSYDKPWILKRSKKRRLAGGSQLKKNLQRPINIDVKRREKSGKGGKIQHSARSTKVEPTKISAQIKATSHVGRQMQRVNFPWYTPYQFQGAAGATQIPNAGVAIPPCQLLKDKSRKLIQRLSVTQPIPQIKRPNITSRQRHNLRLRERLMRDLQREEDIDDPLSNGSGVLRRARGGMQSSQQIKEPEQPEKEQDHRSVERVSSRIKRLPKGRRYRQPIATSERIMIPPPKVNNNNNTNNKSMSPSRPNSIPRVRRRFRSVLVDSSLGSIALMGQPVQSKQTLTPAKRHLTIAFMNKRSERTNAAVQPWK

SEQ ID NO: 23821 - DNA, 12319 bp, DROSOPHILA
cccttgggccaaaatgctgtgcacacacgcattactcatacgcccgggctgttccgcccatttctcatttcccacttctcatttcccgcccattataatgggatatgtcccccgaatatctcgtaactacgccgccgggcctgtgcccgctgtctagtggccataaagcaatttggccaagtgcgtggcccaaacacgtgccgtgccacacaatatggcaatctcggagtggagagtccgccggttttattgcctctggtcggtgccattatctccagttccttgctggccgacaacacggatatccggtacgttttcatgcaaatacggagttattatagcaaccggattctgcgtaaatcgttgaagaacagagtagaagtaatctgttctagggaggagtttcgcaatccttgaatatggtttaaaagaaagatatctgaaacaataaaatgataataaatgaaaatgaatgaattagaattgctaagcgggatcatttatatatgtacgtttgtgcacttaggcatttaattacaccattttttaaaagataaactgataagtatccacattaattattgctaaatatgcttcaccaatttccattatcaattccattcttagaatatttagagttatctgttcgaaccagtgcctctcaaactgtgttatcacgcgctcgcagctttagcattttgttttgttttcttcgctgttcgctttgttggcggatttcattttgtcaattcttctggttatattttcatttaagtgtttgtttttgttgttttcgcattgttgcgcttggctgtttgcttttgcacttcgcttcgtgtttttgtgctgagaggtgtttgccttttatttcgttttctcgcgtctctctaaatccccgttgctctctctcgctttccgccgcctgctttttctgtgttttttgttagtcactctttggcagcggtcgcgaacggcgggtattttcaaaagcgcctgtttaacccacgaccgcccccttcgacacctacgcctgtgtctgcggaattatcaaatgccagtgtgtgagtgctgcttctgtctgtgtgtgcttgtgtttttgcgtctgtgtgggggtcttaacggttaacgtgctggaaaagtggagcgataaaaaaaaacagttgagcttcggaatataatgcgtgacatgtgttaaccccccgaggtaaagtgttgttgcttctgccgtcaatcacacaagggcatcaatcaaatgctgactctgaaactgagacacacaaagaagaagcatccagccgaagggctacggagagggagtcaaaaagaactttcacaatgtgctccaattctacagtcctacttccctatatctcactttcgcatatttctgtgaatcaaattctttagaattctatacaataatttgaatggactcagaccctatttgaattttacttgctaagtgaataaacgattttaaagtctcacactcttgacgtcaaacttatttagtgataacagcattaagattaaaattaatgaaattacaaagtcttgaacagtccacattccctttttcgcctattgtattacgaatttcctaatcctgaaatatttctatattgataaaagcatttggccgcttagttttcaatgttgacacaacttgaattttattcatattacattatcacttcaaatatcacgtttttcttcacaattctcatgataccggttcgatttaccgaagtttgactgtattgctctgccagtctgcatatcattttgcggcccgcttcacatttacaacttccgctactgttgtcacccccacctacttcagctcccccgactgccccctttcggccccctgactttttctttgtcaactcgatggccgcatttcgaaaatttaaaacttcgcgctgtcgaaatcgcatgcatacgaaaatgaatacgaatggcgaataaataaaaaacgcgagtaggcttaatttcgtgtgtacatatttacacacaatttacatttcgtacgatttcgttttcgtagtggctgttgccattgctagtcaagttgagtttgcagatacatggatgtatttccagctatgtagatgttatctagcgcatgaaaaccccccgacttgaccttatcgcccgccccaagcgattgcaaacagctgttcggctcaaacgtttatgattgaaagcagctgttggttgctcagcgaaaaattgggtcaaactgttgccgtgtttctgccgctctgcgttgccttttgccgctgtagtggcagtaaaccaaccaaacttgtctgttggccaacgaaaaaaaaaccgctcagcttgctgaggttagctttgcgcgatatcaggctcagatcaagatcggctgtaaaaacgtttgtcaagcggtttacggtgctgttggccaagtttagagatgcggccaatggaacagaaggcaactcgatcatgggttcccaccaacagaactaatttattccttaaccgcacagaaggagattggtgggaaaatagtgtgctaggtttataggaagtatagtataggaatttatgtacacatcaaatcataactaaatgtttatatttatagtgaaactcaattagcctttacaatcttcaagtgctacataggcacttaaaatattcagctggatcaacatggaaatattttcttaaaaacaaggcaaagctcaaagttcaagcgcatttagcactttttacccgttttgtcacatgactgtaatgctataaacaatttatattgcttttgctattatgaacactgttcttcaaaaggcttttattccttaatagaggtatctaattatgttatcatttgccttaattagttaatgaatctaaaatatagattgttttgcaaattaaccattgtaaagaatttagagtaatattcatttagcccatgccttttttatctttcaaaaccaactagactattattttttcaattacagataatgtgctcgacttatggactcttatcttttgagttttcaggtgaagtgtcttcttatcatttaacctgaaatgacattttaaaatgttttatagttctggccagaagtctctccattctgggtttctatcgaattcctatgatctcgaaaacattagtatagggatagggctaccattatatacaccttgtaggtacttctatctatatgcatatgtatgtatatgtaatactgatccgattgtgcccactgtttgattgcggttgggctgataatgaaggcaaagccttggctataaatattttatttataatgtacttacaaatgtgtgcgagtgaattattattacaccgactgcttgccataaggcgatggccacgtgtgtgcgtgaatcccttcccaccacgctccaccctccaacgctccccattggatgtgaacttatcagatgatcgcttacagccccactctcataattagaatccgcaaaatactagttttggcgattgcaccgaaaaaaataattatagtttggtattttacttaaaagttagcatatatagatcataaaagtaactttttagagatttacgcgtctgttaaatatttatctgttgaatatcaaaaacgaaatgatcataatatcttgcagtgcgtaatcagaatgcgatgccctgcgatcgtggtgtataagggtcattgcaaccgagactgggggcctctcaaactgtgagcacttttgtgctgtaagagcaataaataagcaaacaaacaaacaaacaaacaacgccaatggattttcattgttcttactgctgcgcgtgtgcctccagagcttgaactttcccagtacagtggtgattagctggcccaaactacaatcgtgggagtattaaactatacgcttgataggctaattaatagaagaattgagcagttgggtaacattatggctagtcttcgtatttaattatgtacttataatccatccatgctaagcatgaatacatgaatgtgttcggaaattattatagagttatgtatgagtttccagagatttctcaagcaacccctaatctataaattctgccaactttattcagtgcaaattgaagatagcactgcttgactgtatctgcagcaatatgcaagcaacagcaccatctgcggctatgaccacatatttacagttaatcggatggacgggcgagcgagcggtccccacaccacacgcccactttgtcttcgccgctcgtctgtcatcgtcacacagtttgacacgcactgtggggctcgcgctctctgtttttttttggctctcacactctccagccagcagaggcacagtggaacgaactagtaaattcagtaaaacatgttaaaagtacagatgtggatatatttcaaaataggaatagacaatatatttaaatttaaatagattcgaacacaaatctctgcagtgtggtgaacaaatttatggaagcacaaacgaattcatttagatttcgtagcttttgcgaccactgtgcgcagtcgctgcctgccgcgtttccccaaagcaaaacagcggttgggggtttcagtttagagaacgctgcactgccgctcggttcgtggcgcgatcgatggtcttggttggtccccccattttaaccgatccgatgtgttattttcaccgcttgcatattcattacacttacacgaaaacaattacgcgcctctgctctttgaataacagcaacaaagtgagcccagctgggcggtaaatggtaggccttaagaccgctctgccacatctacatattcacttaacgtgacgtaacagcgcggtttttgttattgtttggcctgctccccaaacgtgtgactatctatatacgaattcgaaaaaatatatatgtatgtatgtatgtatacacaaacgtgtatatgtatgtatctgagtgtggcgttttcatgaacgcgttcgtgatctttgaagcaaagctgtccatttcaccgcgaaacgcagcataaggcaacggcccaataatcatcggttttctatgtgtaaatataaactgaatacttacatatatatgtatatataactgaagaccaaaatcgctcacgtaaaccctaaagtatagacgtgcctacatatacattatttttctgccgacgtcatgccaacaaacaagcagtggccagcgatttatgtaaactgagaaacaactttgattctggccatgttcaagtaagtttcggccagcccaactgtggacaacaacacctgattgaggctctcaaactgtggcccagtcctaacaggttatcgcccaccttctccgccccctaattaccctgcccagtgcacagaatataaataaattaaggcacacataataattatcattaacatatgtgggcattcaattaaatcgttttgctttctgttcgctcgctcgttcgtgtgtttgtttttcaattcgaagtcaaataaataaaatcgggctacgaattattgcttatatggccacagcatcatcaacagcaacaattatctctcaattcataatcaatatttggcctacgaattctaactacccttcaaaacaaaatttatatgattcagtgttctgatagcagcgaaattattcgaaagtaacatttcaaaaacatttgagttgttttagaattcaagcactctagccttactagcccatatcaaaaaaaaaaagtataatcctttgctacatttattatattatagtatatatctgcagtatctgataaaatgtagtcgataaacgtatcattcgtcgtcgtctccccgccgaaattgcacgaatagtgaatacaacctgctccatataaatataaaatatttgtacgtatattcgtctatatgctatatagcgaattcaaggccaatatcacttgttttctcttcgtacattggcaagaggcattggccccgtaccccgaatcaaatgctttgcttttcaaattaaatttttcactttcggtttgtcgaaggcaaattcacttgcattcgaatctcgaaacaagtcgaggggagtctgcttagcattgattcagcactcgaatatccggtggagagtcgttcgaattttagagaactttgaaagctgaccaagaacccagcatagcactcatacgtggattagtcatgacggcgctgcttccgagttgtctacataggaggaaggtatagtgattaacacctgagcagcctgaccgtagcacgcacgcatataccgattatactacatacaaatatgtatgctgttgtattattatatttcctttaaaatgtgcaaattgccaagttctaagtttggcggctcagttgtttaccgcagaaattgcgtcttggctttatttgcgtcgacctggagtcgcaagaggaagcgggagcagccaaacagccatatatattgcgcatactccaaaaatgttggacctacgcgcgttatcgtcgtatcgataactgtggaaaataacaagaactttggtgtggggttggaaagtgtgaggaactgaaaagggtagggatgggaggggagggtatgggagggcatcgaagggggtgcggaatagtttgatggagcaggcttatcgcgccaacagcaaacatagtattcatgttgatgtttgtttaattgatttctaatcaattatcggctgtaacgcaactctctcactatagtaattcccatttttgtgctctatttgtagatacggctgctatggatccaattttcttctcgccaacgaatggaataccgtcagagagtaaactcgccacttatatggtaagctaacttcccattccctcaattagctcttatcagagtccctccaaaataagaaactcacgaaaacagggcgataagagttgaggggagattatgataacaccactgcccatcgaaaaccacccactgaaagcagctgttggcccccaaattaacagctggccacgtttgctcaagtatttttaattatgctttatttgttttcactcaatttactcgaaccatttcagtttcaacgctcagtcgctcataatatacacttgaccgactttttcggttttattttttttttttcaattttatttttgggtccactgacacacaaagtgccatataagtcgtatatgcaagttaaatatcaatttttgtttatgcatggattttgaattctctctggggtggcaaaaactgggcgtacatacatacatatatgtttggcgaatcttaaacagctcggcaattattaactataaaatattaatgtgccagccgcataattgccatggaatcgtgctaatggaaaagtatacggaatataatggcattaagtggcatatttgtcgctcaattcatttttacaatgcgaagatcagcaaatcgaatggagcaattcaatggcaatgtcatgcaaccaagacaggcgttaaacattttagtttaagatccgaataattagttacttaatacgtacaacaatgtctgatatatgaagttgtgctattcagataagataaaaatggcatagactagacaaaaacactctggttgaatcagtagtatttttagcaaactgcactcaaacaagaaatcaaagatatttcaagcaatcctccttgaaaaccccactcatatttgtaatttgtaagatccaattattatttgctctactatctttaatttgaactcccactacaactgaatttttcacttttttctttgtatctctccgaatttcaatctatccgtctactccgatttttggtctctcatcccagaatcgacagaatgtcgccacaccgagcggttatgggctgaataacgggttctcactacttaatttggattcgcccctaaataaaaagtcccaggtaaagccgtaaatatctggttccccatcccattgttctccgtgacatccatgaactgtgttagactagtgaatgcttccgtagaggtctataccccttattagccccttagcatagtagttagtttagttacgatcccatcctaaaaagtgtacaaaagtgtcttactgtgtgttatttacaggagtgtttcaattttcgattcggcaaccccttaaattgactcctgccgaataagaaaatcgaaacaatcgcatgaaaatcgtggctaataactctcatttaatgaatttcccatcccaggtcacgccgcagtcgcccgagttcattccaacgcgccttggctcgacgcccaacttctatgcaccatatcacaacgcgcccatgcaattaagtaatgggctcaatggcgtcaatgggttaacagccgccgcagcagcagcagcagcagccgccgccgccgccgcagcagcagttccctcctccacgtcatcggcgtcctccgcctcggtgaccatcagcaaaacggccaacggtggcgcctccatgctcgccctgcaaaagaccgcatccatcgcctctgtaaccatcgcacaacagcagccacagcatccacagaaacagcaacagcatccgccgtcggtgggcggaggagctgtgtccgccgcctccgcccccattgccattagtggcgctccaccgaatcccgccgcagctccgttcgtcagcagcatgtccgctcagacgccgctcaaggggaggggcgccatgatgcgccaggaatcaccaacggcagccatgatttcgggcgcagggccaggtgagaagtcgccaccgcacgggatgacgccgcacggagcatcgcccataccatcagcgctgcccaccagcgtgcaccaggtgggttaaatcaaactgcctgctttatgtactccctaattatcctttaataattcttttacaggagaacgtaggcggcaccatatacttctatccgactgccaacgcacagaacagccagcccgtcgtcaattccatggtggtggatggaacgcatccggctctccatggcgtgagtgctgtggcgccgatgagtgcgggcgttccggcggccatgatgtacacggggcatgtgtatccgggaccgtcctccaacgtggtcaccatgcagccaaagacgctgctggagtcggccttctttatgcccgacgagatgcgcgccgaagtcctcgcccgcaacgagatctctaacctgatcatggacgcagcggaggctgcgcagcacgctctaccgctggaggtggagaactaccatgccctgtatccactggaaccgccggcgcagccgttgcacgccaagctcacgttccccgccaccacttatagggccacgcacaacacgacgggctacaagtactgcctgcgaagaatacatggtgggtagatgttactcctttctcgattgtacattagtaaacattttaattgtacttttaggtttccgcctgcagtcgaccaagtgcatgacgctggtggagatgtggaagaagctgcagcacacgaatgtggtacaactgcgtgaggtgttcacgacgaaagcatttggtgataactgtaagtggggaaaggtctttggaaccattagctattagctataagtgtgtgtttaatgctgctcctggacattaaggatgttgtcacctgtataatactggggtattgttagaaggttaatacactatatttagagtacattaaactgataggattgccaagtttgcaaggaatgtattgtatacatgtcatgcatggcggaatgttgcgattactgctcctatttatagctctgcacttcaaattgggtaatcttaactagtcagtgaatatttattacaaatcgttagtcactgataaaaagaaagttaaaagttaaccttgattcttttgcaatattatggcttcacttagtctgaagatgaagtagggtattttaggtaaattcaaacctactagttaccatgtcaataatttttatcgggcacctacagctttagtattagtgtacgactatcatcccggctcacaaacattactggccaaatacttcactccggcgccagagaccaacgggtacactgatccattccaaggcgaggcccgccccttcaggttcgtttttctttgaccatgatcatattgttgctcaaattattaattatttacttattgcagtcataagagtaacatgcagcgaacgagcaatggaccgctgctaccggaggccaccatctggtcgatcatcatgcagctgaccgccggcttaaaagccatccaccatgccggtcttgcctgcaagtatgtaacaccccgcttgttatacagccagagtctaattgatcattcatcttagggttctggatcccacaaagattatagtgacgggcaagcgtgtacggtttagctcatgctgcatttcggatataacgcaattcgatccgaatgcatccaatcccttggcgctggttaatatgcatcagcaggtaagatagttttttctactttcctgtataactaatactaattacattggttcgcatgtctttaggacgatctgaccgctttgggtcgcttagtattagctttggcctgccgctgtcttcaatccgtgcaacgcgacaatgtccagtccagcatcgatatggtcacgcgaaactactccaccgatctgcgaaactttattgtgtatgtataatctggtataggtactcaactgacgaaataacccgtgtgattttcagttacctcttcaccaccaataatcgtcgctccgtgaccgacctgatgccgatgattggtgcccgcttctatacgcaactggatgcactgcagagcaaaattgatatgcaggaggacgagttggccaaggagatggagaacgggcggttatatcgcattttggtcaaacttaatagcatcaacgagcgacccgagtaagtttgcaaattaatgcacataagcttaaaatacaatcttcatatcaatgcattcatttacagctttaatctggactgcacttggtctgagactggtgatagatacatgttgaaattattccgtgattatttgttccattccgtcactgaggatggccggccctggctagatcacgcacacattgtacaatgcctcaacaagctggatgctggctccatagagcgcgtaagtaaagtcggaaaaggtcggccagctggttcggaggtctcacaaagctaacttggcccacatttgcaggtgcaactgatgtcccgcgacgagcaatcggtactcatcgtctcctatgctgaactcaagaattgtctggagaacgccttctccgaactgatgtcaagtgcggccaactgagcaacccgagggtaaaagaaaaacagaaaacacgcgcagctcacttagccaccatccgcacgaccacaaaacgactacgataaaggattagatactaagcaaaacattcattacgactaagacattttgagaaccataaacaagtaaaatacgaagatgtttattgttaagccaaaccgaaaaaggaacttaaaagaaaaaaaaaaagtgaaaaccgatatccaatgttatgttagctcttaactaaattttaggcatttaaaacaatacaaaaagaaacaaccgcaaccacaaaaaataaaccaacaactttttgaaaccgaaatctctccaaaagaaaaaagcaaaaacacaaaaaaatgcaaacattacaaaaaaaaaaacaagaaaaacgaactaaaagcaaaaaaatttgaaaaatttgttaaaaaatgcaaaaaatacataaaaaaaaaaggaaaaaagaaatcacgaaaaagagccgagaaaacatggatctatttttacagagctaagagaggatgaaagtatttataaatatgtattaaaaatcgaaagaaaaaaattgtaaaattttgcaacaataaataactgtaatgacaaacaatggcaacagtgcagcaaatcgttgagcaacaacaaaaaaagataaattcaatgcagagtagatggataaggataaagattatgagaaacgtagagaaactaagaaagtgaacaacaaggaaccacatcaaatgtttataaagcatgtctgacaatgatcgcctgcctcttctcccctacagtaaacaaaaaatacatggaaaagaagttacgaaaccgaaaacaattggataggaacgaaaagcgaaaggcgcagacgagctagaacgacagccgataacgttttttatttttcaaactgtattttttatagcaaaatattttaaaatggaaaaacacaaattttctaaatacaatttaaaatgtttacaaaaaccaaaaacaaaacgagatg

SEQ ID NO: 23822 - DNA, 2394 bp, DROSOPHILA
acccacgaccgcccccttcgacacctacgcctgtgtctgcggaattatcaaatgccagtgtatacggctgctatggatccaattttcttctcgccaacgaatggaataccgtcagagagtaaactcgccacttatatgaatcgacagaatgtcgccacaccgagcggttatgggctgaataacgggttctcactacttaatttggattcgcccctaaataaaaagtcccaggtcacgccgcagtcgcccgagttcattccaacgcgccttggctcgacgcccaacttctatgcaccatatcacaacgcgcccatgcaattaagtaatgggctcaatggcgtcaatgggttaacagccgccgcagcagcagcagcagcagccgccgccgccgccgcagcagcagttccctcctccacgtcatcggcgtcctccgcctcggtgaccatcagcaaaacggccaacggtggcgcctccatgctcgccctgcaaaagaccgcatccatcgcctctgtaaccatcgcacaacagcagccacagcatccacagaaacagcaacagcatccgccgtcggtgggcggaggagctgtgtccgccgcctccgcccccattgccattagtggcgctccaccgaatcccgccgcagctccgttcgtcagcagcatgtccgctcagacgccgctcaaggggaggggcgccatgatgcgccaggaatcaccaacggcagccatgatttcgggcgcagggccaggtgagaagtcgccaccgcacgggatgacgccgcacggagcatcgcccataccatcagcgctgcccaccagcgtgcaccaggagaacgtaggcggcaccatatacttctatccgactgccaacgcacagaacagccagcccgtcgtcaattccatggtggtggatggaacgcatccggctctccatggcgtgagtgctgtggcgccgatgagtgcgggcgttccggcggccatgatgtacacggggcatgtgtatccgggaccgtcctccaacgtggtcaccatgcagccaaagacgctgctggagtcggccttctttatgcccgacgagatgcgcgccgaagtcctcgcccgcaacgagatctctaacctgatcatggacgcagcggaggctgcgcagcacgctctaccgctggaggtggagaactaccatgccctgtatccactggaaccgccggcgcagccgttgcacgccaagctcacgttccccgccaccacttatagggccacgcacaacacgacgggctacaagtactgcctgcgaagaatacatggtttccgcctgcagtcgaccaagtgcatgacgctggtggagatgtggaagaagctgcagcacacgaatgtggtacaactgcgtgaggtgttcacgacgaaagcatttggtgataactctttagtattagtgtacgactatcatcccggctcacaaacattactggccaaatacttcactccggcgccagagaccaacgggtacactgatccattccaaggcgaggcccgccccttcagtcataagagtaacatgcagcgaacgagcaatggaccgctgctaccggaggccaccatctggtcgatcatcatgcagctgaccgccggcttaaaagccatccaccatgccggtcttgcctgcaaggttctggatcccacaaagattatagtgacgggcaagcgtgtacggtttagctcatgctgcatttcggatataacgcaattcgatccgaatgcatccaatcccttggcgctggttaatatgcatcagcaggacgatctgaccgctttgggtcgcttagtattagctttggcctgccgctgtcttcaatccgtgcaacgcgacaatgtccagtccagcatcgatatggtcacgcgaaactactccaccgatctgcgaaactttattgtttacctcttcaccaccaataatcgtcgctccgtgaccgacctgatgccgatgattggtgcccgcttctatacgcaactggatgcactgcagagcaaaattgatatgcaggaggacgagttggccaaggagatggagaacgggcggttatatcgcattttggtcaaacttaatagcatcaacgagcgacccgactttaatctggactgcacttggtctgagactggtgatagatacatgttgaaattattccgtgattatttgttccattccgtcactgaggatggccggccctggctagatcacgcacacattgtacaatgcctcaacaagctggatgctggctccatagagcgcgtgcaactgatgtcccgcgacgagcaatcggtactcatcgtctcctatgctgaactcaagaattgtctggagaacgccttctccgaactgatgtcaagtgcggccaactga

SEQ ID NO: 23823 - protein, 773 aa, DROSOPHILA
MDPIFFSPTNGIPSESKLATYMNRQNVATPSGYGLNNGFSLLNLDSPLNKKSQVTPQSPEFIPTRLGSTPNFYAPYHNAPMQLSNGLNGVNGLTAAAAAAAAAAAAAAAAVPSSTSSASSASVTISKTANGGASMLALQKTASIASVTIAQQQPQHPQKQQQHPPSVGGGAVSAASAPIAISGAPPNPAAAPFVSSMSAQTPLKGRGAMMRQESPTAAMISGAGPGEKSPPHGMTPHGASPIPSALPTSVHQENVGGTIYFYPTANAQNSQPVVNSMVVDGTHPALHGVSAVAPMSAGVPAAMMYTGHVYPGPSSNVVTMQPKTLLESAFFMPDEMRAEVLARNEISNLIMDAAEAAQHALPLEVENYHALYPLEPPAQPLHAKLTFPATTYRATHNTTGYKYCLRRIHGFRLQSTKCMTLVEMWKKLQHTNVVQLREVFTTKAFGDNSLVLVYDYHPGSQTLLAKYFTPAPETNGYTDPFQGEARPFSHKSNMQRTSNGPLLPEATIWSIIMQLTAGLKAIHHAGLACKVLDPTKIIVTGKRVRFSSCCISDITQFDPNASNPLALVNMHQQDDLTALGRLVLALACRCLQSVQRDNVQSSIDMVTRNYSTDLRNFIVYLFTTNNRRSVTDLMPMIGARFYTQLDALQSKIDMQEDELAKEMENGRLYRILVKLNSINERPDFNLDCTWSETGDRYMLKLFRDYLFHSVTEDGRPWLDHAHIVQCLNKLDAGSIERVQLMSRDEQSVLIVSYAELKNCLENAFSELMSSAAN

SEQ ID NO: 23824 - DNA, 3709 bp, DROSOPHILA
caggttggtaaactgcgcctgatgatgatccttaaggaactgcagcacgggcaccacgccctctggcgcaataagcacctccagctcatcgccggcggtcagctgcaccttctgcacgtacttgggcaggcactcggccacatagcgcccgaaatcggagagatgcgagcgagcgactgcgtccggctggcggacagtggctgtgggtggaatgtcttacatgtaattgacaccgcgataaagtcgacttttacctacgcttatccgccttcttaggctccactggcgttgtactggccatccgaagagcagtggatccagcagcgggcaccactgattgttgaagggttagaatagatcagttgaagctctagaggcaaggcatttaccaaccatgtttggccgacagagcggcgactgcggcacgggcacccagattcctgattaaggccgccattctacaaactgttcaatataaattcaacaatttgctccgtttttgacaatttatgtaatgctaaaatgtcaatatagttgttggagcctagggttgtcagtgcgccaaattaatctactcgacagccctacttcggtattttgacaatttcggtacaacacaaataccgcacatacattattgtatttcgtgtacgttaacaccgaattattcttcattaaaaacctcaacatttttttggaatatttgcttaaatgatttatataaaaaataaatataccctactacttgatttattatttaattaaaaataccaacacgttccttgaagtacagcagatggaaaacatttacaattattcttcattaccaaccacaaaacttttctagaatatttggttaaatgatttttaaaaaaaagaaatgtaccctactacttcatttattatttcattaaaaataccaacacgttccttgaagtacatctcatggaaaacataccgaaataccgagatcttaggtgcattcgactaccctggctgaaaactgtgacaacgcgttgcgtttggaattgcgagaattgaaaacttcttggaaatcaattggaaatcaaaacacaacaagatggtaagtgaaacgcgtcctcccaaatccccgggataagtgaaatttaaatctacaatcgtcgccgtttgcagaatcatcttaagtggatgggccactcatccacgataatggacatccagcgctcgctgcgtaatgataatcagcactgcgaggtggtgctggcctccagggacggcgttcgagtgcgcgcccatctattcgtgctaagcacttgcagcgaactgatgcgcaacctcctggtggacgttccgcgcggccaggaggcaaccataatgctgcccgacatccgcggagatttgctggagtgcatgctgtccttcatttacatgggcgagactagcctgccctccgcgtcgctccccgagttcctggaggccattaacctcctcggcatcaaatctgccatcagctttgagtgcaatccatcggctagtccacccagtgtcgatgtagagaaccattcgttagccgtggagtcggccaagtccattacaggactccaaatcgctgaggccgagctgctggacgacgaggaagagccacatccgatggtctccgtcccagccactacactcgcgggttctcaacaccagcccagccattccagtcggtcattggagtacattgatgtctacgagccgccgaagatcacctactccatcgagcacatggacggaagttccagcggcaaccaatttatactcaccgagaacacgggcactttcaccataacgcagtcagcatcgagtttgtccaaaattgaggcagatgaaacgggtaccagtggcgctgaagtggacctgggcgatgatgacgtggatgcggaccttgctgaggattctgaggagcacgaatcacaaatgatcgacgaggagttcgcgcaagccgatcctcttatggaactagaagctggtactgaaatggacgacgatgacgacgtgcacgaccaacttgtggacgaggaaatagacgataagccccgcaagttgggcgggggaaagacgcgaatccgtcgccccataagtgcgaaggctgtcaaacgattgtccgattgcaagccaacgcgaatccagcagttcgcagctctgaaacgtgaggtaaaagacgatatcaacgatgctttggatctggcggccgacgcggttatcatcgagggcttaagcctacaaaaggccgccgaccggtttgatatctccaagacagtcctctggagacgcgtgcgcactaatcccgcctacatgcgaaacaatcgggaacgaccatccctgcaagaggcctacgagcgactgaagaatggacattctttaaagagcatcagcagtgagttgcaaatccccatgtccacgttgcacagacacaaggttcgtctgtccgcccagggacgcctgcccaacttcgtgtcctgccgaaagcgcgacaatacgcccaaggatgagctgcgcgacaaattagccaaggcggtgcatgcctgcctgaatgagggaatgtcccaaaaccacgcggccaacctcttcgagatccccaagagcacgctctggagacacctgcagcgacgcacgacgagccagaataaaaaggtcaagaaggaattgaaggccaattacggagacgatatgctaaactagaaataagccttcggagttctggttttacaaacgttcagctggaatcaataagttaccattaagaagccataagcatagggtttaacttcatgttgtcccatcagtgtatgtacatcaaccatatcctatctcctgatgaaaccaaaattgagtccggaagagcagcaagagatgctattctagaggtagttttgtagacttagttctatatgtagataccattaccattttaactgctgctcttttattgttcactccatcgtaattggttaattaaatacaaccaaaaattaacaaaaacttctttttaaatgggtcaaatttataacatgagagaaatatgtacatgcatgtaattaaaatgccggtactcttctccagcaagggtataaaaatatcgatattttcgctggtttttcacatccctatcgcaatcttttcccggaatgaagagtccaaatcggtggtgtagtgatgtcaaggttaccagaccgatccctgctcacccgctgcgaaattttcgtctacttcggggtctatatagcgtatatagttgtgggcctgtacaagatctatgggctgcgggatcacatagtcaaggaggcaaagttccagtttccggagggctggagtttgtatcctttttcccagcggcgtcgggatgacagcaacgatgagctggagaactttggagactttatcgtcagcttttggcccttttacttgctgcacgtggctgtccaaggattcatacgctggaaacgtccccgccttcagtgtctgggattcatcggcgtctgtgccttggctcttagtgtaaacctggactggtcatcgatggtactactagtcacattgatagccagctactacatcgtttccctgctctcactaaaatttctcgtgtggcttttgtccgctggctggatactgtgcatcaatgtgatgcaaaagaatgtctggtggacagatcgcgttggttacacggaatacgtcctgg

SEQ ID NO: 23825 - DNA, 1638 bp, DROSOPHILA
aaactgtgacaacgcgttgcgtttggaattgcgagaattgaaaacttcttggaaatcaattggaaatcaaaacacaacaagatgaatcatcttaagtggatgggccactcatccacgataatggacatccagcgctcgctgcgtaatgataatcagcactgcgaggtggtgctggcctccagggacggcgttcgagtgcgcgcccatctattcgtgctaagcacttgcagcgaactgatgcgcaacctcctggtggacgttccgcgcggccaggaggcaaccataatgctgcccgacatccgcggagatttgctggagtgcatgctgtccttcatttacatgggcgagactagcctgccctccgcgtcgctccccgagttcctggaggccattaacctcctcggcatcaaatctgccatcagctttgagtgcaatccatcggctagtccacccagtgtcgatgtagagaaccattcgttagccgtggagtcggccaagtccattacaggactccaaatcgctgaggccgagctgctggacgacgaggaagagccacatccgatggtctccgtcccagccactacactcgcgggttctcaacaccagcccagccattccagtcggtcattggagtacattgatgtctacgagccgccgaagatcacctactccatcgagcacatggacggaagttccagcggcaaccaatttatactcaccgagaacacgggcactttcaccataacgcagtcagcatcgagtttgtccaaaattgaggcagatgaaacgggtaccagtggcgctgaagtggacctgggcgatgatgacgtggatgcggaccttgctgaggattctgaggagcacgaatcacaaatgatcgacgaggagttcgcgcaagccgatcctcttatggaactagaagctggtactgaaatggacgacgatgacgacgtgcacgaccaacttgtggacgaggaaatagacgataagccccgcaagttgggcgggggaaagacgcgaatccgtcgccccataagtgcgaaggctgtcaaacgattgtccgattgcaagccaacgcgaatccagcagttcgcagctctgaaacgtgaggtaaaagacgatatcaacgatgctttggatctggcggccgacgcggttatcatcgagggcttaagcctacaaaaggccgccgaccggtttgatatctccaagacagtcctctggagacgcgtgcgcactaatcccgcctacatgcgaaacaatcgggaacgaccatccctgcaagaggcctacgagcgactgaagaatggacattctttaaagagcatcagcagtgagttgcaaatccccatgtccacgttgcacagacacaaggttcgtctgtccgcccagggacgcctgcccaacttcgtgtcctgccgaaagcgcgacaatacgcccaaggatgagctgcgcgacaaattagccaaggcggtgcatgcctgcctgaatgagggaatgtcccaaaaccacgcggccaacctcttcgagatccccaagagcacgctctggagacacctgcagcgacgcacgacgagccagaataaaaaggtcaagaaggaattgaaggccaattacggagacgatatgctaaactag

SEQ ID NO: 23826 - protein, 512 aa, DROSOPHILA
MGHSSTIMDIQRSLRNDNQHCEVVLASRDGVRVRAHLFVLSTCSELMRNLLVDVPRGQEATIMLPDIRGDLLECMLSFIYMGETSLPSASLPEFLEAINLLGIKSAISFECNPSASPPSVDVENHSLAVESAKSITGLQIAEAELLDDEEEPHPMVSVPATTLAGSQHQPSHSSRSLEYIDVYEPPKITYSIEHMDGSSSGNQFILTENTGTFTITQSASSLSKIEADETGTSGAEVDLGDDDVDADLAEDSEEHESQMIDEEFAQADPLMELEAGTEMDDDDDVHDQLVDEEIDDKPRKLGGGKTRIRRPISAKAVKRLSDCKPTRIQQFAALKREVKDDINDALDLAADAVIIEGLSLQKAADRFDISKTVLWRRVRTNPAYMRNNRERPSLQEAYERLKNGHSLKSISSELQIPMSTLHRHKVRLSAQGRLPNFVSCRKRDNTPKDELRDKLAKAVHACLNEGMSQNHAANLFEIPKSTLWRHLQRRTTSQNKKVKKELKANYGDDMLN

SEQ ID NO: 23827 - DNA, 3534 bp, DROSOPHILA
aaaagacgatatcaacgatgctttggatctggcggccgacgcggttatcatcgagggcttaagcctacaaaaggccgccgaccggtttgatatctccaagacagtcctctggagacgcgtgcgcactaatcccgcctacatgcgaaacaatcgggaacgaccatccctgcaagaggcctacgagcgactgaagaatggacattctttaaagagcatcagcagtgagttgcaaatccccatgtccacgttgcacagacacaaggttcgtctgtccgcccagggacgcctgcccaacttcgtgtcctgccgaaagcgcgacaatacgcccaaggatgagctgcgcgacaaattagccaaggcggtgcatgcctgcctgaatgagggaatgtcccaaaaccacgcggccaacctcttcgagatccccaagagcacgctctggagacacctgcagcgacgcacgacgagccagaataaaaaggtcaagaaggaattgaaggccaattacggagacgatatgctaaactagaaataagccttcggagttctggttttacaaacgttcagctggaatcaataagttaccattaagaagccataagcatagggtttaacttcatgttgtcccatcagtgtatgtacatcaaccatatcctatctcctgatgaaaccaaaattgagtccggaagagcagcaagagatgctattctagaggtagttttgtagacttagttctatatgtagataccattaccattttaactgctgctcttttattgttcactccatcgtaattggttaattaaatacaaccaaaaattaacaaaaacttctttttaaatgggtcaaatttataacatgagagaaatatgtacatgcatgtaattaaaatgccggtactcttctccagcaagggtataaaaatatcgatattttcgctggtttttcacatccctatcgcaatcttttcccggaatgaagagtccaaatcggtggtgtagtgatgtcaaggttaccagaccgatccctgctcacccgctgcgaaattttcgtctacttcggggtctatatagcgtatatagttgtgggcctgtacaagatctatgggctgcgggatcacatagtcaaggaggcaaagttccagtttccggagggctggagtttgtatcctttttcccagcggcgtcgggatgacagcaacgatgagctggagaactttggagactttatcgtcagcttttggcccttttacttgctgcacgtggctgtccaaggattcatacgctggaaacgtccccgccttcagtgtctgggattcatcggcgtctgtgccttggctcttagtgtaaacctggactggtcatcgatggtactactagtcacattgatagccagctactacatcgtttccctgctctcactaaaatttctcgtgtggcttttgtccgctggctggatactgtgcatcaatgtgatgcaaaagaatgtctggtggacagatcgcgttggttacacggaatacgtcctggtgattgtcacaatgtcctggagtgtgcttcgcggatgcagttattccctgtccaagattggagctaagcaggaggatcttacgagatacagcctcgtccagtatctgggctacgccatgtactttccctgtctgacctatgggccgatcattagctaccagaggttcgcagcccggagggaggatgaagtgcaaaactggctgggattcgtcggaggagtcctgcgcagcgccatatggtggttggtgatgcagtgcgccctccactatttctatatacactacatgtcgcgggatgtgcgaatggtggagatgatggactcggtgttttggcagcactccgccggctatttcatgggccagttctttttcctgtactacgtggtgacatacggcttgggaatagcttttgctgtgcaggatggcatcccagcgcccaatagaccgcgctgcatcggacgcatccacttctactcggacatgtggaagtacttcgatgagggtctgtacgaattccttttccagaacatttacgcagagctgtgcggcaagcgatcatcggcagcggccaagttcggtgccaccgcattgaccttcgcctttgtgttcgtctggcatggatgctacacctatgtgcttatctggagcattctgaacttcctctgcctggctgcagagaaggtgtttaagacgtttaccgcgatgccggagtaccagcggtggacacagcgtcatctgggagccgtgggtgctcagcgcttgtacgcaatgctggccacccagctcttcattccggccgccttctccaatgtctactttatcggcggacaggagattggagactttctaatgcgtggcgcctatcttagtggagtgggcaactatgtggcactctgcttctgcagctattgtttttttcaatgctctgagttgctcctgaccaagtcggatggtcgctccaagaccaaaactttttgacctcgccaaaagtctgtctagatttacgtgaatctgactacttatgaacgaacttgtattataagacggctttagaattgttttgtgttttcacagaataataatttacttaattttcactttaacaaataataaatatataattgtatataatacaatgagttttttatctgttcattctaccttccgccttctcctagtatcctttcagtccagccacctggtttgcgtgcaagtggactgaaagttgtcggggaagagttcgtccattatttcatcgcatgtctgcgtgtgctgcgtgttgtacagaccatctggccagtgagtttgggtttggatgtgggacagccccagttcctcaaacaaatcgtcgcaagtttgggtgtacatgtgggcagaggtttgcaagtcaaacataggttcagtttctgaatacgcgtggaaatggcttccgaccgcaacaggctcctgttcctctgggaaatcatcggtcatcgttcctatgtcgcctctggtgtcgggcgtttgggtttctatatcgcgtaacaagggcgccagcacttcgttcctgatttcattcagatcgtcctcctccgtttgtgtttccatatctagtttctgggatgacatctctagcgcataggacacatccataatgggcaggaaacaaagaatatgttcctctgcagccggtaaattggtatccagttcaagagtggagggcatattggcctccggattgggtatttcagcatatagttcagtaacccccgccaagttggaaggcaggttgttaatatattcctctgacggatgtaaatcactgcctgttttcaaactgtgggcggttaaggaatctgcagaaacgggaattggctgtggattcagccttttccatgtggccagcgagggtatgggaaccttgtcggattcgtgatgcaccaaatggttcttgcgccgcatgtgggtcctgaggccagccttgctgttgtaggtcagttcacacactggacacttgtgttttgagcact

SEQ ID NO: 23828 - DNA, 1534 bp, DROSOPHILA
atgtcaaggttaccagaccgatccctgctcacccgctgcgaaattttcgtctacttcggggtctatatagcgtatatagttgtgggcctgtacaagatctatgggctgcgggatcacatagtcaaggaggcaaagttccagtttccggagggctggagtttgtatcctttttcccagcggcgtcgggatgacagcaacgatgagctggagaactttggagactttatcgtcagcttttggcccttttacttgctgcacgtggctgtccaaggattcatacgctggaaacgtccccgccttcagtgtctgggattcatcggcgtctgtgccttggctcttagtgtaaacctggactggtcatcgatggtactactagtcacattgatagccagctactacatcgtttccctgctctcactaaaatttctcgtgtggcttttgtccgctggctggatactgtgcatcaatgtgatgcaaaagaatgtctggtggacagatcgcgttggttacacggaatacgtcctggtgattgtcacaatgtcctggagtgtgcttcgcggatgcagttattccctgtccaagattggagctaagcaggaggatcttacgagatacagcctcgtccagtatctgggctacgccatgtactttccctgtctgacctatgggccgatcattagctaccagaggttcgcagcccggagggaggatgaagtgcaaaactggctgggattcgtcggaggagtcctgcgcagcgccatatggtggttggtgatgcagtgcgccctccactatttctatatacactacatgtcgcgggatgtgcgaatggtggagatgatggactcggtgttttggcagcactccgccggctatttcatgggccagttctttttcctgtactacgtggtgacatacggcttgggaatagcttttgctgtgcaggatggcatcccagcgcccaatagaccgcgctgcatcggacgcatccacttctactcggacatgtggaagtacttcgatgagggtctgtacgaattccttttccagaacatttacgcagagctgtgcggcaagcgatcatcggcagcggccaagttcggtgccaccgcattgaccttcgcctttgtgttcgtctggcatggatgctacacctatgtgcttatctggagcattctgaacttcctctgcctggctgcagagaaggtgtttaagacgtttaccgcgatgccggagtaccagcggtggacacagcgtcatctgggagccgtgggtgctcagcgcttgtacgcaatgctggccacccagctcttcattccggccgccttctccaatgtctactttatcggcggacaggagattggagactttctaatgcgtggcgcctatcttagtggagtgggcaactatgtggcactctgcttctgcagctattgtttttttcaatgctctgagttgctcctgaccaagtcggatggtcgctccaagaccaaaactttttgacctcgccaaaagtctgtctagatttacgtga

SEQ ID NO: 23829 - protein, 500 aa, DROSOPHILA
MSRLPDRSLLTRCEIFVYFGVYIAYIVVGLYKIYGLRDHIVKEAKFQFPEGWSLYPFSQRRRDDSNDELENFGDFIVSFWPFYLLHVAVQGFIRWKRPRLQCLGFIGVCALALSVNLDWSSMVLLVTLIASYYIVSLLSLKFLVWLLSAGWILCINVMQKNVWWTDRVGYTEYVLVIVTMSWSVLRGCSYSLSKIGAKQEDLTRYSLVQYLGYAMYFPCLTYGPIISYQRFAARREDEVQNWLGFVGGVLRSAIWWLVMQCALHYFYIHYMSRDVRMVEMMDSVFWQHSAGYFMGQFFFLYYVVTYGLGIAFAVQDGIPAPNRPRCIGRIHFYSDMWKYFDEGLYEFLFQNIYAELCGKRSSAAAKFGATALTFAFVFVWHGCYTYVLIWSILNFLCLAAEKVFKTFTAMPEYQRWTQRHLGAVGAQRLYAMLATQLFIPAAFSNVYFIGGQEIGDFLMRGAYLSGVGNYVALCFCSYCFFQCSELLLTKSDGRSKTKTF

SEQ ID NO: 23830 - DNA, 5815 bp, DROSOPHILA
ttgatgctaataattaaataaaaacaatattttattgaacaagtatatgttcttcattcttagaatcactggggcgttcacataaacctacatgtgtacatattttgacttgctcgatttcaacaaccgccacacgtcgcgaagcttttcaaactgatattttgttttgcacattatcattgtctgaatcagccattagacctcgcgctgtgtgctttgtaaaaagagattgatgtacatatgtacatacatatttacattcgtatgtgcaagtttttaaggcaattgcctattagctgttttcattcattttcctgctgtttctaaagcagatatatcacaaccgattttatcattaccgaaacatatacaaaagtggtgtatatcaaattgttattaatgatcgaaatgacctgtcgaagcttacattctttctgcttttgaacttaaataagtttgtgaactatcaattaagatgatgtttagaaaagacgttgcaattgttaaattttcagcatcattatttatttacattatttaaaattatttttcggtaccgttattattaaaaacaaaagtttaattaaaactacaaaaatacagcttagattcaagactgtaaaccaaataaatatcttccgttctgctgtctaaaggcatattctggattttatgttaacatacaccagaaggtacattatatgttcaaaacttaacccaaaagaaaacttaagcgctgaataattaatcgatttacatacgtaaggaaattttttcaaccaaatcgtgttattctttaaatagttgtactattcttgacttattttcgtgtgtagactccagccattgcttttaataaagttaatacaactatactagtttttaaatgggagtatacattgtacacaattacatgtgcatcttagagggacgtaaaataggtatttaatattttccaaaataaaaccacatattttatatgaaggatataaagcatatctcagcgctgtcgtgtcgagcgcgtacccatgctatgatgtgatttagaagttggtcctttataatactttgataacgttttgctagtacgggtcggtcgggcgttggtgctgttccgttctgaaggtttttccgtatctgcctttaacggcaagtcatcgtcttcatcccatctagagtcttttttttcttcatcgccaaaatcctcgacgttggaatcaatctttgatttacgtcctcggcggtttcttgatgatgaagaactaacatcagttcgctcccacttatcactaaaaaatacggtaaacattttaaataaagtccgtatcaataaatctacaactcactcttttagggaaatcgtgttttcttctcctgctttaaatccacgattcagcagggccagctcccgctcggcaattgcttttttatgctcatctgccgattctgctgcacttagcttggttgtggaatcggcaagttgcttcacaggttcttcatgattgcctcgcttcagctgaagctgttgctcctgggcctgttttatagagcgctttaacgcacttctaagagtgtcgcgggagttttcaggcgctgcatcggctcccaactgagaaagtccaatagcctccaaaagcttttgtccaagcgcagctttgacttccgacttccgaacggataccgagcctgctttgctatcatcaatatcgtcactacctccattgtccgggactggttcacacacttcgggattttctttcgcattaatggctctggctttaggatcgcaaatgtcttccgggacggtacttgtgggtgcctgctttagctgacccaaagattcttttctaacagttaccgcacttttctttgtttctctggataaagtctgtttcgtacttggaaatacttcttttgaattcttttcatttggggatccgctgttatcgagcacaacgacttcagacggctctgatgaccgaatgtctgttttgcgccttttaaaattgtattgggatccgggctgggactgcggagagacgtagtcatcctcaaggtacttcacattatgcggatcgactgcaagaggcggttggggatcgatcagtacaatgtcttctaaattaactgcactgtcagagccaatacaactctgacgagtttttcgctggtcttttgtttcttgttgttgctgcttaaggagtgagataagcgcttcattaatagcgtcggccggatttgattcgaactgcgaaaaaagcacagaattgatattcgacagttcgttgctgacataagctgcctttgaagtcgataacgaaattatgcggcgcgtcttgtcaacagcaggtaaatcaagggcacgcatctttcgttgatggcgtttgacagttggcacgctaaccgcctttttgtgacgcacaggctgcggttcctgttccgtgggactggaaggcactaattgaaccgacgtttctggtggaagtttataaggcattgcactagataagtcagccagcttaagtacatctttagtcgcctgcgatgaatggtttgaagaagcagacccgatagctgaggaaagtggatgctgatcttgttgctgaaccacaggcagcattggggccaaatatggacctaaaagttgtgtgagatctgtgtcttgaagaaggtttgtgtctgacattataacagcgaactttgaactttttaagcgggacatttgctcatcacagttttctgctgtcaccggccattttagagccttgagaataagcatcaacaagtctggatccctaataacgcttcccaggaatattgcatcagtgaggcttttaacattagaaattgacgttgacgggggtgaaacatgcgaatcaaccgatatagttaaatcgagttttgtggactttgtcttagattgacttggcacagttttctttagctgtggcagagccgtttgaagaaattgttcttcatcctcccttttcttttttggcgccgcaaagatcatgtgctctggcagtgcttcctccacggaaggttcaccaccatattggggtaccagtgtagttgtgaccagtggtctaacatcttcaatagggtttcgattttgcgcacccttaagcagtgatacctgtccggtacgcatggctttaatgttgtttaatgtgtttttaagatttctacttttctgcagaaacaaattactgtcctgagatttcgttcctggattgctaacgtttgaagaaataagaacggaagctgtaactgtgtttctgctatctgtcacgttgatgtttccggtattgtcctctgcttggacttcaggtatattgcccgtgatgcgcccatgagtctggatgaagtttattactcctttcggcgatagttttgtgtctgggctctttctcattgcgttgctacccaatgactctgtgtttaggggcaccaaagaaggcagacactgcatagttcgttgagcgatagacagtggggccgatccatacctagtgtctgtaaaaacgctgttgcgtctcccagtgttaagatagctctttactgatccagcgggtttgctcagagaagaggatgaggaagatgcagccaagtagttttcgccggtttttggggccagctccaggcaattggctggttggggcttggaagcggtgtttccggactccggcacgtgggtcagcaaaatggggcgaaattcatcgatttccgcttggacttcgtcgtgtcggtgtgggatttgggttgctggaacgctcagttgtgcagcagccgcttccctcgcattcttaggctggaagatttaataagttgtaagcttgctgattatatataagtggtatataatcgattaccagtgtactaaggagaaagtcccgaaacacgagctgagtatgttttgctatatttgaaagcgacgccgtggcctctacttggcggtaacaagatttgcagagcacttttggcagaggatcttcttcagctacctaaaaagaaatacgttttttaaatgtcgagtcttagcaagtacgcggaggtcttgttttgatacttattcagatctaggattaaatttgatgcagcgccaaacaggctgttcctttttatttacttacatttagataaaggtgtcgagatattttatccttcagtccctgtgttttaaaaataaacacactttcaaccacggaattcgtcttgcttttcgtgttggcagcgcaaatgcggcacaagtgctcaaactgagcatccatgttacgaatttgaatgcgccttttatttcctatctcaaagcgtcaagcccaacatgctgatgacaaaatgcagaaaaattttttaaaaatcccaggggttcggtgtaataggcttactcttgttaacaccaaatttagacacacacactaccatttgcaatgcagttcgccttgcccactacttcgttttcatgaattttttacacttgcaatttgagaaagtcgtcgcgcggttactgagagcgtgcaaaacaaaaggcaaaatgaaaaacaaataataacaaactgtaaatgtattgatcattgaaagcggagagcgcaagtccgagagagtgagaaacagaagcagatctttgctttcctcgttttacgctgttcacaattgctatgctatgtttttgtggaaaatagtatttttccatttattcttttctcgaaagctttgcagaagtcttttagtctcgacgaacgttttggaattacgaacatgagcacaataaaagatttattcacttaaaatagacttctgccacaacgatttcaccagcacttgcgttgcgacgaaaaaacgaaataaaactgagcgaaataaatgttgctgccgtttgccattacactcaccactcacacatactaatgcatttccgtacacacacagtttcgcgctgatggcttacagtactctttctttgctctcgcctctcctacgttgtttgcaccgccggtgatggtgtgcgtgctccctgactgttgcttgtattaaacacttacacgacttttgtttctatttttcgagcgctggtgtatatgtgtgcgggcttggtgtccgtctgtttcatggcgcacagccagttttccgctctatccatgtggcctcaatggcgtaaatgtagtcggctggtttttctttccaccagttttttcttgcgaccgggtatttaaggtgtatctaaataccgttgaaggcgattgcatattcaaaagctattacttcccttattaaaatacatacgtgcatacatattatgtattaatttgccgctcgtaaagtaaaagacgactcgctcacttatcaactgttggtgcctttatttacgttgattcctcgcatgaagcgctctccttgaactaaaactagttgtcattcattttgatagtgttggttgttctctgtttgcgtgccttagagcttatgcttctgatctttcttttgccattttagctattttcctgagattttgtgattcactatgtctatgtattcgtgcatttacgccaaaatgtgggcataagaaaaaatttaaaatcaagctttcgtattagcaataagtgcgatgtggacgtactggacttggaaaacacagtctcttcattttgacgtaaaacaaataagtaggcaaactttttgaattttcttcaagcctaaagtgtgcagaatttggatttttaggcgagttcctagtcatgtttatatatgcatttatatatgtgtgtacatatttacacatatcttaaataacaacagtcagaaatatgggtgatga

SEQ ID NO: 23831 - DNA, 3507 bp, DROSOPHILA
gtgaaatcgttgtggcagaagtctattttaagtgaataaatcttttattgtgctcatgttcgtaattccaaaacgttcgtcgagactaaaagacttctgcaaagctttcgagaaaagaataaatggaaaaatactattttccacaaaaacatagcatagcaattgtgaacagcgtaaaacgaggaaagcaaagatctgcttctgtttctcactctctcggacttgcgctctccgctttcaatgatcaatacatttacagtttgttattatttgtttttcattttgccttttgttttgcacgctctcagtaaccgcgcgacgactttctcaaattgcaagtgtaaaaaattcatgaaaacgaagtagtgggcaaggcgaactgcattgcaaatggtagtgtgtgtgtctaaatttggtgttaacaagacatgttgggcttgacgctttgagataggaaataaaaggcgcattcaaattcgtaacatggatgctcagtttgagcacttgtgccgcatttgcgctgccaacacgaaaagcaagacgaattccgtggttgaaagtgtgtttatttttaaaacacagggactgaaggataaaatatctcgacacctttatctaaatgtagctgaagaagatcctctgccaaaagtgctctgcaaatcttgttaccgccaagtagaggccacggcgtcgctttcaaatatagcaaaacatactcagctcgtgtttcgggactttctccttagtacactgcctaagaatgcgagggaagcggctgctgcacaactgagcgttccagcaacccaaatcccacaccgacacgacgaagtccaagcggaaatcgatgaatttcgccccattttgctgacccacgtgccggagtccggaaacaccgcttccaagccccaaccagccaattgcctggagctggccccaaaaaccggcgaaaactacttggctgcatcttcctcatcctcttctctgagcaaacccgctggatcagtaaagagctatcttaacactgggagacgcaacagcgtttttacagacactaggtatggatcggccccactgtctatcgctcaacgaactatgcagtgtctgccttctttggtgcccctaaacacagagtcattgggtagcaacgcaatgagaaagagcccagacacaaaactatcgccgaaaggagtaataaacttcatccagactcatgggcgcatcacgggcaatatacctgaagtccaagcagaggacaataccggaaacatcaacgtgacagatagcagaaacacagttacagcttccgttcttatttcttcaaacgttagcaatccaggaacgaaatctcaggacagtaatttgtttctgcagaaaagtagaaatcttaaaaacacattaaacaacattaaagccatgcgtaccggacaggtatcactgcttaagggtgcgcaaaatcgaaaccctattgaagatgttagaccactggtcacaactacactggtaccccaatatggtggtgaaccttccgtggaggaagcactgccagagcacatgatctttgcggcgccaaaaaagaaaagggaggatgaagaacaatttcttcaaacggctctgccacagctaaagaaaactgtgccaagtcaatctaagacaaagtccacaaaactcgatttaactatatcggttgattcgcatgtttcacccccgtcaacgtcaatttctaatgttaaaagcctcactgatgcaatattcctgggaagcgttattagggatccagacttgttgatgcttattctcaaggctctaaaatggccggtgacagcagaaaactgtgatgagcaaatgtcccgcttaaaaagttcaaagttcgctgttataatgtcagacacaaaccttcttcaagacacagatctcacacaacttttaggtccatatttggccccaatgctgcctgtggttcagcaacaagatcagcatccactttcctcagctatcgggtctgcttcttcaaaccattcatcgcaggcgactaaagatgtacttaagctggctgacttatctagtgcaatgccttataaacttccaccagaaacgtcggttcaattagtgccttccagtcccacggaacaggaaccgcagcctgtgcgtcacaaaaaggcggttagcgtgccaactgtcaaacgccatcaacgaaagatgcgtgcccttgatttacctgctgttgacaagacgcgccgcataatttcgttatcgacttcaaaggcagcttatgtcagcaacgaactgtcgaatatcaattctgtgcttttttcgcagttcgaatcaaatccggccgacgctattaatgaagcgcttatctcactccttaagcagcaacaacaagaaacaaaagaccagcgaaaaactcgtcagagttgtattggctctgacagtgcagttaatttagaagacattgtactgatcgatccccaaccgcctcttgcagtcgatccgcataatgtgaagtaccttgaggatgactacgtctctccgcagtcccagcccggatcccaatacaattttaaaaggcgcaaaacagacattcggtcatcagagccgtctgaagtcgttgtgctcgataacagcggatccccaaatgaaaagaattcaaaagaagtatttccaagtacgaaacagactttatccagagaaacaaagaaaagtgcggtaactgttagaaaagaatctttgggtcagctaaagcaggcacccacaagtaccgtcccggaagacatttgcgatcctaaagccagagccattaatgcgaaagaaaatcccgaagtgtgtgaaccagtcccggacaatggaggtagtgacgatattgatgatagcaaagcaggctcggtatccgttcggaagtcggaagtcaaagctgcgcttggacaaaagcttttggaggctattggactttctcagttgggagccgatgcagcgcctgaaaactcccgcgacactcttagaagtgcgttaaagcgctctataaaacaggcccaggagcaacagcttcagctgaagcgaggcaatcatgaagaacctgtgaagcaacttgccgattccacaaccaagctaagtgcagcagaatcggcagatgagcataaaaaagcaattgccgagcgggagctggccctgctgaatcgtggatttaaagcaggagaagaaaacacgatttccctaaaagatgataagtgggagcgaactgatgttagttcttcatcatcaagaaaccgccgaggacgtaaatcaaagattgattccaacgtcgaggattttggcgatgaagaaaaaaaagactctagatgggatgaagacgatgacttgccgttaaaggcagatacggaaaaaccttcagaacggaacagcaccaacgcccgaccgacccgtactagcaaaacgttatcaaagtattataaaggaccaacttctaaatcacatcatagcatgggtacgcgctcgacacgacagcgctga

SEQ ID NO: 23832 - protein, 1007 aa, DROSOPHILA
MDAQFEHLCRICAANTKSKTNSVVESVFIFKTQGLKDKISRHLYLNVAEEDPLPKVLCKSCYRQVEATASLSNIAKHTQLVFRDFLLSTLPKNAREAAAAQLSVPATQIPHRHDEVQAEIDEFRPILLTHVPESGNTASKPQPANCLELAPKTGENYLAASSSSSSLSKPAGSVKSYLNTGRRNSVFTDTRYGSAPLSIAQRTMQCLPSLVPLNTESLGSNAMRKSPDTKLSPKGVINFIQTHGRITGNIPEVQAEDNTGNINVTDSRNTVTASVLISSNVSNPGTKSQDSNLFLQKSRNLKNTLNNIKAMRTGQVSLLKGAQNRNPIEDVRPLVTTTLVPQYGGEPSVEEALPEHMIFAAPKKKREDEEQFLQTALPQLKKTVPSQSKTKSTKLDLTISVDSHVSPPSTSISNVKSLTDAIFLGSVIRDPDLLMLILKALKWPVTAENCDEQMSRLKSSKFAVIMSDTNLLQDTDLTQLLGPYLAPMLPVVQQQDQHPLSSAIGSASSNHSSQATKDVLKLADLSSAMPYKLPPETSVQLVPSSPTEQEPQPVRHKKAVSVPTVKRHQRKMRALDLPAVDKTRRIISLSTSKAAYVSNELSNINSVLFSQFESNPADAINEALISLLKQQQQETKDQRKTRQSCIGSDSAVNLEDIVLIDPQPPLAVDPHNVKYLEDDYVSPQSQPGSQYNFKRRKTDIRSSEPSEVVVLDNSGSPNEKNSKEVFPSTKQTLSRETKKSAVTVRKESLGQLKQAPTSTVPEDICDPKARAINAKENPEVCEPVPDNGGSDDIDDSKAGSVSVRKSEVKAALGQKLLEAIGLSQLGADAAPENSRDTLRSALKRSIKQAQEQQLQLKRGNHEEPVKQLADSTTKLSAAESADEHKKAIAERELALLNRGFKAGEENTISLKDDKWERTDVSSSSSRNRRGRKSKIDSNVEDFGDEEKKDSRWDEDDDLPLKADTEKPSERNSTNARPTRTSKTLSKYYKGPTSKSHHSMGTRSTRQR

SEQ ID NO: 23833 - DNA, 5501 bp, DROSOPHILA
aggaactttttagatgacatctttgccagagaagataaaaccatccattcagtttccacgttctctccatctcggggaagtttgtttgaatgtggaatgggtcgaggcaatgagtgtgttaggcgtataggatactcggaaacatagtatgtatcgataacgatgtcggagacatctccgagtacatccacagcttccaaccaccgataaggcatacggtgaaaatatttcgcaaaatgatagccgttgacagaaataaagaagcactcctcagtaagcaatatttgcatccaaaaagactttccccggttcagctggaaggttaaatatgaagaattttcctcgggtccccattttcccttaagacgagaattacgcgttatataattttgaggaagtcgtgatcctatttgcagtaggacatcgcactcctcgcatatttcacttccctgcttggtgagaaaatcaataacaaaatgctcacatgccattaggatcattccgtggaagacgaaacaaagtcctggccttggacattggatcactttaaaatgtttgcgtcgatgggcttctgaacgcttttcatagaacaacgacatcgcatccataactcgccttagagctacagtgcacgctccaggatacacgctcatacacttgctctccattttatacggcagtagtagggaaagaaacttcaaaattgttgttatacaagggagattaaaatatttataacatttgaataaatacccagagtttgacattaaaaaagaaaacgacattaccagaaacattgaaagctattttttactcaataaatacccatatagcgactatgcgttcaattatataaatacacatgtgtagggaagaataataaaaatcggatgacgttaccataattttatttattaacaaaaatattgtataatgaaacacgagcgtatcacttttttattgtcgctaaactactaaaaaataaaaacatgaacagctactactcactaaagaaccacggattctgatagactcgcatatttttgcctttaatcatctgatttttttccagcgttacattccaaagtttaacatctccttgtatgtagacagtgtccaccacctcagggctaaccttatatttaaaatcagtcataaactgccgattgacatacacctcaaaggatgttttggtacaaacaatggctaaacaaaaagaccgaccagggcgaaagtttgtgtcaaactccgaacgctcttcttgtgcccaagctccattaagccaggcattcctacacaccaccgcctttccaatagcgccgctgcttgctttcgaaaaacgtgggtttaagtggaatgcaattactggatgtggccatatgtcctgcccctgttgcaggtttatataaaacgagtggggaagtaatcgcactctcccttcaatcttcaagcatcgaccatcgaccaacgaatttggtggcaatgctccataataaggcaaagtaaggccaagatcattcgaactattgttacgcttaggcgaactgtccgactgtgtgttcggggcgctaataatgcaccactcatgaggtattttaacagtctcctcaacgctggcatcaatttcattaatcccatcatctatgtgaagctcaatgttattagcctctgactggggtaatcgctcaggatattttaagaccaaagttcgcttcatttccacgttacttacatctcccttcacttccagaatgcgaacatccctataagggattcgatgagtgtacgctgcaaagtgttgtccgtttaccgatatcatatagcatgcctcagtaactagcacttgaatggaaaactcctcgcctcgacttagtagaaacggcaatgccgaggacacttcctcgtttccccaaatgtcctgtactttggtgttgcggacaatatagttttgtggcaaccgtggattaatgtggagcgccacatctcgagagtcattgttataaaccagattgatggaaaacctaaaaaggacgaggaacagtttaaaaattaatcacgtaaacttggccacttaacatacctctcgcagtttacagagagattcccagtcaccgtgaaacttatcccttcgctcaatttccctatttggtcgttaaaatattttggcacagcatctgcatattcgtaaaatgaggcctagaatgggaatttaataagcagaacttttaaaaacttttaattactcttaaaacagtctttcacccctccagttcaaggtttatcgtaaaaggcagtgttcggattaaaatatagccaaattggaaagtagccttgtcagccattccatatataaagaaaatttaagattaacttaatttgtttatcgtttgcacaaacgataagactataagtcatttccaaaggacaatcaaaatactagttgcttacagatgtaagctatcattttactcttttgtacatttttagttataaattcttccgtcaatatgttcaatgcttgcttacctcattcaaacctccctttttcagcttgggacaacagcacatcattttttcatacaaaaccctaagacacattttacgttctgatttggaaatctgaatagccagaactaaaaaattaaatattcgtctaattcaagggatgtacttttttaaccacagaactctttatgaatcgcttatcgaaatgtatttgtttttagacattaaggaatgaatcaacatcgtacttgctcgctaccgcacattgaaaatcgaaaagtcactgtaacttaaatactgcgcatgtaaataatatacttttagttccttagaattcgctgttgatgaatatattctgccctaaaacgttcttttcagccttcaggagctcaaaggattttaatgttatttaacaaaatggtttggttgccagatatttagctgttattattgtctcccttttcgcgagttacacgcttgaagagaattgaagctacgccgctatgacaacgccaaaagctctttgaactcgacatataaaaacgacgatatatgtatgtatgtatacacccttaacagatgtgcaaataaatggcgagtaagctcctgaattgacttgtgttgagagcttatcgctttaaataattatgaagagtggctagggttcagacttgactaagtgctaaagccacccaccttgtcagaccacgactatgtcaaacagttgtttcgagctcccccagcacgcgaatgggggaattactgcggagtacgctaaaagccaagacaaagatgaaaaagagaagagcaattgtacatgatgtgacaaacgcacgcatgtacgtatataagcacaaccgctaagccacagcaattgcgctcaatttatccgattacgcacttttaattcatttccatccaccacctcgatgtcgctgatgcaatccaaaggaaagtgtgttgtgctctccacctgtagaaaactgttgtgcagttccattgtcgtaccgtccaaggcatccatatttcggtcacagtatacactcgcctcaatagctgcaaaatcaatgtgtgccttccgatgccttgagggctgacgctcgcggcaataaaatccaaacagttaaacttcgctcgattttgtaggtattctgccacagaacatctgacagatcaacgagttctataaacagcttttggaaaactatcgctttgatacacaaaagctttaaaaacacattgcactggcgacaccaatcctgctttaaaatcgcagtggcgccattatacacaactcatttaaactacatagtgaagtgcctgaacttaattaaaacaacagtggcgccattgtgtatattggcgtcagtgtggagtttttttaaattggtgtcagcgctaaagaaaccaccctgtccgaccgcgactgtgcgaacagctattaaaagctcccccacaacgcgaataggggaattactgcggagtacgctaaatgtcaaaacaaagacgaaaaaagagaaaaacatttgtacgtgatgcgtacaaacacatgtttacactttaagcactatcactaaaccactcagtatttgcgctatagtatcccgattacgcactttaaattcatttccatccaccacctcgatgccgctgatgcaatccgaaggaaagggtcttgtgccctccgcctgtaaaaacctcttgtgtagttccgttgtcgtatcgtcaaaggcatccatatttaggacacagtctgcacccgcctcaatggctgcaaaatctatgcctgccttccgatgcattggatcggatgtttttgacacctgacgcaaccaaagctcgcggcaatgaaatcgaaacagttccaaacggcgcttgatgcgataatagtttaaacttcgttcgatattaaaagtgttctgccacagagcatctgacagatcgacgagttcgcgaaccgagtggcaagccaggagtattattgccgtcatactgactatgcaaagatggggttaccgattttacccgatgcaaatgcggttttgagcacggagcttatacgctctctcgctcttttggtgcaattcagcgcgctttaatgtacgagattttttttggctgaatacatatatacatacacatgtatgtatgtatgcatctgaaagccaaaatacgtgtgcctttagcagcggtttgtgagcggactgtttggaatttgattttatgccggcctgaccgaggccacctatagctcaatactttttatcaaccccgagatatgtagcttttgcattctgataacattgtttgtctacacatacaaatttagtcatgcgtaggtgcgcctatacatatgtatctacattaagaaacttttctagtatgtatattcttcattcatatgtattagtacaggcgttgtctgtcgtattcgatagcggtggtagttctttttggctattaatgtaccataaagttgacgatgcaaagcaattagtatcgacaaacttacatcctcatttttaaacctctgataggtttcatcctggcttcgtttttgctttccacagcagcaagtcatttgtatgatggaaataaattgatctcggaacagttgaaaacgttgctattgttcattagatagctgaaaaataatatgttaccaatcgctaagaagaccttttttaacgttaaaagtttgatgctaataattaaataaaaacaatattttattgaacaagtatatgttcttcattcttagaatcactggggcgttcacataaacctacatgtgtacatattttgacttgctcgatttcaacaaccgccacacgtcgcgaagcttttcaaactgatattttgttttgcacattatcattgtctgaatcagccattagacctcgcgctgtgtgctttgtaaaaagagattgatgtacatatgtacatacatatttacattcgtatgtgcaagtttttaaggcaattgcctattagct

SEQ ID NO: 23834 - DNA, 1517 bp, DROSOPHILA
tcagtatgacggcaataatactcctggcttgccactcggttcgcgaactcgtcgatctgtcagatgctctgtggcagaacacttttaatatcgaacgaagtttaaactattatcgcatcaagcgccgtttggaactgtttcgatttcattgccgcgagctttggttgcgtcaggtgtcaaaaacatccgatccaatgcatcggaaggcaggcatagattttgcagccattgaggcgggtgcagactgtgtcctaaatatggatgcctttgacgatacgacaacggaactacacaagaggtttttacaggcggagggcacaagaccctttccttcggattgcatcagcggcatcgaggtggtggatggaaatgaatttaaagcctcattttacgaatatgcagatgctgtgccaaaatattttaacgaccaaatagggaaattgagcgaagggataagtttcacggtgactgggaatctctctgtaaactgcgagaggttttccatcaatctggtttataacaatgactctcgagatgtggcgctccacattaatccacggttgccacaaaactatattgtccgcaacaccaaagtacaggacatttggggaaacgaggaagtgtcctcggcattgccgtttctactaagtcgaggcgaggagttttccattcaagtgctagttactgaggcatgctatatgatatcggtaaacggacaacactttgcagcgtacactcatcgaatcccttatagggatgttcgcattctggaagtgaagggagatgtaagtaacgtggaaatgaagcgaactttggtcttaaaatatcctgagcgattaccccagtcagaggctaataacattgagcttcacatagatgatgggattaatgaaattgatgccagcgttgaggagactgttaaaatacctcatgagtggtgcattattagcgccccgaacacacagtcggacagttcgcctaagcgtaacaatagttcgaatgatcttggccttactttgccttattatggagcattgccaccaaattcgttggtcgatggtcgatgcttgaagattgaagggagagtgcgattacttccccactcgttttatataaacctgcaacaggggcaggacatatggccacatccagtaattgcattccacttaaacccacgtttttcgaaagcaagcagcggcgctattggaaaggcggtggtgtgtaggaatgcctggcttaatggagcttgggcacaagaagagcgttcggagtttgacacaaactttcgccctggtcggtctttttgtttagccattgtttgtaccaaaacatcctttgaggtgtatgtcaatcggcagtttatgactgattttaaatataaggttagccctgaggtggtggacactgtctacatacaaggagatgttaaactttggaatgtaacgctggaaaaaaatcagatgattaaaggcaaaaatatgcgagtctatcagaatccgtggttctttagtgagtag

SEQ ID NO: 23835 - protein, 503 aa, DROSOPHILA
MTAIILLACHSVRELVDLSDALWQNTFNIERSLNYYRIKRRLELFRFHCRELWLRQVSKTSDPMHRKAGIDFAAIEAGADCVLNMDAFDDTTTELHKRFLQAEGTRPFPSDCISGIEVVDGNEFKASFYEYADAVPKYFNDQIGKLSEGISFTVTGNLSVNCERFSINLVYNNDSRDVALHINPRLPQNYIVRNTKVQDIWGNEEVSSALPFLLSRGEEFSIQVLVTEACYMISVNGQHFAAYTHRIPYRDVRILEVKGDVSNVEMKRTLVLKYPERLPQSEANNIELHIDDGINEIDASVEETVKIPHEWCIISAPNTQSDSSPKRNNSSNDLGLTLPYYGALPPNSLVDGRCLKIEGRVRLLPHSFYINLQQGQDIWPHPVIAFHLNPRFSKASSGAIGKAVVCRNAWLNGAWAQEERSEFDTNFRPGRSFCLAIVCTKTSFEVYVNRQFMTDFKYKVSPEVVDTVYIQGDVKLWNVTLEKNQMIKGKNMRVYQNPWFFSE

SEQ ID NO: 23836 - DNA, 3338 bp, DROSOPHILA
aatcgactaaacaagtggaaaacgacctaagtagccaatatagtatagaccacagaaggagcatacccaacaatcgggtatttgattaatttcatctagggttggttgtgaccataatgcattatgcagccagcatttaaactttttaactatgcatattccttcttagatcggaaatgatacattataaagatcttaatatttccttattcaatacctatagagtaattttcataataattactgtaaattaacgtaaagcctagaatgattttaagaattacgaaacaaagcatgacaatgttcccttcgcgatttaacatcactattctacttcattagcaaaatggtccaaagcattcttgacacgaacagactggaatcataaataatattttttactttgcagatgcttttctacttccttggccgagccttgggaaatatttgaaggctggacgttttcggcatggctcttttgctactgtttttgctggccgtgaaaaaaaaatgtcaactgtctttggaaacacatgtagacatatacgtcaattcaggacagccttcccactggcgactcgagcagctcggccatactgcgtccttaatcgattatcatttttaataatcattttccgatgcctttaaggcggccttagtttgcggactcgctgaaagaagctgagtctccttttgctatccggcccacttatgggcagacaaccgcttgacgtctagagcgcattgacatttatgagcggagctctgcggtgccctaggatcagtgcgcataaatattttaattgcaaagttcttataagatccgtatatatgtggtgcaggcgcaatcaaaattatttggacgtcattgatttattaattcatgtaatttgcttttcacggaatgattgattttcaagtctgattgaattatatttgaagttgggggatttcagctcgcttccaggcacttattgctcgttccatagcagatcgaactttaataaataagaactgtaagttgaaatattaatttggcaagtttaatatctttaccttttggttttttgtaagtagtgttgccttggattgctacttcccaaagcttgatatctccacgaatattcacaatgtcgacgcactctggcctcatttgatacttaaaatgaaacaaggacctgttgtttacaaacagttcgtaatagctgtctctgcaagcaattactatgacaaaggcgcctcctggccttagacttgtatttaagcgagacactgtgcagttcacccaatcgccgtttaaataggcacgtcgtgtaataatagccgtgccgattttgtcatgtctactacgcaagaaacatgggctgaaatagaatgacactgtgggttgcggccaaatttcctgtcctttctgaaacgctatactgaatctttggggcatcaatcggacacgaccttctattcgtagtgaacttccttcaatgaggaagttttcttttaacagctttccatagaaaggaagagggaggctcggctggtagaggaactttttagatgacatctttgccagagaagataaaaccatccattcagtttccacgttctctccatctcggggaagtttgtttgaatgtggaatgggtcgaggcaatgagtgtgttaggcgtataggatactcggaaacatagtatgtatcgataacgatgtcggagacatctccgagtacatccacagcttccaaccaccgataaggcatacggtgaaaatatttcgcaaaatgatagccgttgacagaaataaagaagcactcctcagtaagcaatatttgcatccaaaaagactttccccggttcagctggaaggttaaatatgaagaattttcctcgggtccccattttcccttaagacgagaattacgcgttatataattttgaggaagtcgtgatcctatttgcagtaggacatcgcactcctcgcatatttcacttccctgcttggtgagaaaatcaataacaaaatgctcacatgccattaggatcattccgtggaagacgaaacaaagtcctggccttggacattggatcactttaaaatgtttgcgtcgatgggcttctgaacgcttttcatagaacaacgacatcgcatccataactcgccttagagctacagtgcacgctccaggatacacgctcatacacttgctctccattttatacggcagtagtagggaaagaaacttcaaaattgttgttatacaagggagattaaaatatttataacatttgaataaatacccagagtttgacattaaaaaagaaaacgacattaccagaaacattgaaagctattttttactcaataaatacccatatagcgactatgcgttcaattatataaatacacatgtgtagggaagaataataaaaatcggatgacgttaccataattttatttattaacaaaaatattgtataatgaaacacgagcgtatcacttttttattgtcgctaaactactaaaaaataaaaacatgaacagctactactcactaaagaaccacggattctgatagactcgcatatttttgcctttaatcatctgatttttttccagcgttacattccaaagtttaacatctccttgtatgtagacagtgtccaccacctcagggctaaccttatatttaaaatcagtcataaactgccgattgacatacacctcaaaggatgttttggtacaaacaatggctaaacaaaaagaccgaccagggcgaaagtttgtgtcaaactccgaacgctcttcttgtgcccaagctccattaagccaggcattcctacacaccaccgcctttccaatagcgccgctgcttgctttcgaaaaacgtgggtttaagtggaatgcaattactggatgtggccatatgtcctgcccctgttgcaggtttatataaaacgagtggggaagtaatcgcactctcccttcaatcttcaagcatcgaccatcgaccaacgaatttggtggcaatgctccataataaggcaaagtaaggccaagatcattcgaactattgttacgcttaggcgaactgtccgactgtgtgttcggggcgctaataatgcaccactcatgaggtattttaacagtctcctcaacgctggcatcaatttcattaatcccatcatctatgtgaagctcaatgttattagcctctgactggggtaatcgctcaggatattttaagaccaaagttcgcttcatttccacgttacttacatctcccttcacttccagaatgcgaacatccctataagggattcgatgagtgtacgctgcaaagt

SEQ ID NO: 23837 - DNA, 1338 bp, DROSOPHILA
atgtttctggtaatgtcgttttcttttttaatgtcaaactctgggtatttattcaaatgttataaatattttaatctcccttgtataacaacaattttgaagtttctttccctactactgccgtataaaatggagagcaagtgtatgagcgtgtatcctggagcgtgcactgtagctctaaggcgagttatggatgcgatgtcgttgttctatgaaaagcgttcagaagcccatcgacgcaaacattttaaagtgatccaatgtccaaggccaggactttgtttcgtcttccacggaatgatcctaatggcatgtgagcattttgttattgattttctcaccaagcagggaagtgaaatatgcgaggagtgcgatgtcctactgcaaataggatcacgacttcctcaaaattatataacgcgtaattctcgtcttaagggaaaatggggacccgaggaaaattcttcatatttaaccttccagctgaaccggggaaagtctttttggatgcaaatattgcttactgaggagtgcttctttatttctgtcaacggctatcattttgcgaaatattttcaccgtatgccttatcggtggttggaagctgtggatgtactcggagatgtctccgacatcgttatcgatacatactatgtttccgagtatcctatacgcctaacacactcattgcctcgacccattccacattcaaacaaacttccccgagatggagagaacgtggaaactgaatggatggttttatcttctctggcaaagatgtcatctaaaaagttcctctaccagccgagcctccctcttcctttctatggaaagctgttaaaagaaaacttcctcattgaaggaagttcactacgaatagaaggtcgtgtccgattgatgccccaaagattcagtatagcgtttcagaaaggacaggaaatttggccgcaacccacagtgtcattctatttcagcccatgtttcttgcgtagtagacatgacaaaatcggcacggctattattacacgacgtgcctatttaaacggcgattgggtgaactgcacagtgtctcgcttaaatacaagtctaaggccaggaggcgcctttgtcatagtaattgcttgcagagacagctattacgaactgtttgtaaacaacaggtccttgtttcattttaagtatcaaatgaggccagagtgcgtcgacattgtgaatattcgtggagatatcaagctttgggaagtagcaatccaaggcaacactacttacaaaaaaccaaaaggtaaagatattaaacttgccaaattaatatttcaacttacagttcttatttattaa

SEQ ID NO: 23838 - protein, 445 aa, DROSOPHILA
MFLVMSFSFLMSNSGYLFKCYKYFNLPCITTILKFLSLLLPYKMESKCMSVYPGACTVALRRVMDAMSLFYEKRSEAHRRKHFKVIQCPRPGLCFVFHGMILMACEHFVIDFLTKQGSEICEECDVLLQIGSRLPQNYITRNSRLKGKWGPEENSSYLTFQLNRGKSFWMQILLTEECFFISVNGYHFAKYFHRMPYRWLEAVDVLGDVSDIVIDTYYVSEYPIRLTHSLPRPIPHSNKLPRDGENVETEWMVLSSLAKMSSKKFLYQPSLPLPFYGKLLKENFLIEGSSLRIEGRVRLMPQRFSIAFQKGQEIWPQPTVSFYFSPCFLRSRHDKIGTAIITRRAYLNGDWVNCTVSRLNTSLRPGGAFVIVIACRDSYYELFVNNRSLFHFKYQMRPECVDIVNIRGDIKLWEVAIQGNTTYKKPKGKDIKLAKLIFQLTVLIY

SEQ ID NO: 23839 - DNA, 2522 bp, DROSOPHILA
caggggttggcaatgggcagagtaccgttgggtaccgctggatggcttactgggcggacaatgcccgtgcgaaaaatgcaaattgcgagtggcggaatgaagtgaatgaagtgaatgggcgccgaatgatggaatgaatgaatgagtgagtgattgttgctgtgagccgtgagcagtaagccagacatttagaggaatttgcgctgtcctgataaatagccaacgcttttggcctagcttcaacttggcctgccccatatgccataatttatgcaaattaatttataaaaatatatgtgtagctgtgctgttacggtggtagagccgtcatgaacgcggacatttttcatgcaagtgcgtcagttttttcgaaagtacataaacatagtgtgccttaaagtagacccatttatatggctttatgctttatgcgtaatttcaggcgctgacatttatgatgaatgtccatttacaccaaccttcaagccaatagaaactgcagatgattttaaatctgaacgcaaatcgatggagttacaaaacgttttgttttcaaaaaagcaagatactaaaagaaagatcataattttggaatattgttccacagctattgtttgatgatcaaatataatctttttgaaactcattgcatttaaaccttcattatgtttgttattgatttaatataatgacctatgtcccttgttgggtaataacaataacaatagatcattgtcatccgtctgctactagtgctgtgagctctgctgtaaacacaatatatttatgagtcttcagttatgttgccgtgacgactgacgagtgagtggactgccctttggcctgtgactggaagtcagactcatagtcagacgtgtattcgtttgcattctgaaagactttatatgaatttgattcgatatcctaggcatctagtgggcggccacattaaattcaatcggtgtagcacacaagtgattgaaacatgtgtaaattttactgtcaatagtctcagacaattttcgtaacgcgccgctaaaatgcccgaaaaaccatcagcaaagtcggctccgaggcccctgaccagcataaaggggaccaggccctccacatcctcatccaatcccaccaccagcaggagcaaacccacaggaactggagtggttcgaccaccattgccaaatgcacacgatagggtaagattttttagattttttgcaaatgagaatataatcgatgaattaatcactacatcctaatgtttggattcgattcgactaattgaattacaaacacctatgcatgagtaattgaatcccctcttttcattatacgttataaaaatggtggcaactgaataacaataacaatatctttatgaataattgctttttcaataatgagaaatgtacagctgtttttaactcagctatttcgataacaagaaagttgaatatattaactgttgaaaattttacagatttggaagattatgaagatgtaataatatctaaaaatattcggtaagttattaaaatttgaataactgttgacttatgattttatgatttcaggtccccaaattggatccacgttttaaatcctgatattctttttttataaaatgtacggattctttgacgtctaaagcgctgaataaagcgaataaatcccaaaagggaaattactcttataatttcttgataagctgactggaagttggaataagcgcaggcgcttgtcctcgcagagaagagagtagtgtttgagcttgttgggaaattttctctttaaggggtacttttcatctcagtttgcctgaagctggctttgagtcttaaaaaaatatttaagtcaataagagtgttaactggtattatttttactataaggggcttattaaaaacgtcaagaaacttgtccgctgtcctttttatggatacttaagacgtacaaaaagttgctgaataactttagataaataggatggttttaaaatgattagtgggttcatagcttgaagaaggatagttcttggtcacattggtaccagcaaagataaaaaaacgtcaataatacaaacatttgataaacataatggagatatttcattcgtaaataaaactgtaactcaacttatggacagttctctatttaaaatcatcctgcaggacgagaatgtaaaattgcttgggataggcctaccttggcagttccttaaatgcaatttaaaccaaaacaaactcaagctgccgatacactctcttcgccgagctcgtgccatttttactttcattcggtaattgagtgaaaacgaggttggtcctccgagggacctcttcgcgcgacgagcgcaaaagtccccgagatggaatcgaccgagccaaaggatattttggtgctcggcagcgtttttgccaatgccgtggctcagtttcgtattcgtgtcggaacgtggcgctacggtcttctgctcaacgatacgcgaaaatccaatccgctggaggagcaaaacgcggcgc

SEQ ID NO: 23840 - DNA, 238 bp, DROSOPHILA
tgtcaatagtctcagacaattttcgtaacgcgccgctaaaatgcccgaaaaaccatcagcaaagtcggctccgaggcccctgaccagcataaaggggaccaggccctccacatcctcatccaatcccaccaccagcaggagcaaacccacaggaactggagtggttcgaccaccattgccaaatgcacacgataggatttggaagattatgaagatgtaataatatctaaaaatattc

SEQ ID NO: 23841 - protein, 59 aa, DROSOPHILA
MPEKPSAKSAPRPLTSIKGTRPSTSSSNPTTSRSKPTGTGVVRPPLPNAHDRIWKIMKM

SEQ ID NO: 23842 - DNA, 7287 bp, DROSOPHILA
gagcgtagtggccgctctaccaatttaatgagacttccgagttcgacgcagcaaaagtgtgccatgacatcattggacgtcgtcgctggtggcctgggccgaaggtctccggcggctcattagcatgccagagtagagggcctagtcaagtgacttacctcagcgttgcctccgcagcagccttgtccttgaatcccaatcccggcaccgtctccaccttgtcctcgctctctgtcttggcattcttgctggacgcccctccgccattctcctccagccacttttcaaagactccaatggccgcattgatgttcttcagcttctcctccgccttggtcactagaatggtaggtttagtgctggattcaacgcatcccttgggcacaagcactcacttgtcaggactcttttggcccggccaagcaaaccgcgcaccgtcagcttgcgatactgcatgtcgtgactctccagcagcttcaacgtctctaacgccttctccatgtccttgaagccaaatttcgaatctccctctgccattgctgctcctttggttgctaatacttgggtgagtatctgtctgcttcctgtcagcgctagaatacgactgattttgcgtagccgtctccaactcgacggcatatggcacttaatcatgggaggaagacgcaaaatgagcaccactgagaggcactgatcagagctgagcgtggccaattagataagcaccacaaaataactgggtgactctatgtttggaaaccggtttgttgtcgtagcaccggagcaaaacaaaacccacgagaaaataatcgatacttagccatgacgtcagcgccacgagaaactgataacattgagaggaaataaacgatcttaagtattaattacctaattaaacgccgctctgcatattaaagcatgtaatatgacattgctgtcgttatatttgcaatcatatttattatgatatattttccccaatcaatacgaaaattgttataatttgtttgtgttgtttattaacatggaactcaaaaagctttgggcttagcggtgaacgatgggctagttgcaactgcgccgtatttgaagtatatcgtcgaccatgaagttgcgcaggtggcacagtgcctgcaccacgttgccctggtcgcgcagattcggtccgatccacttctcgggtagcgccgtcttggccaccacctgtgcgggtgtgatgtgggtcagtgcacgccgccaattgttgttgcaggtgaccacgttcagatggctgcccgtctgcaggctctcgatgtacttaatgtaggcctccgagtggatgacgcgagtggtgcgcggcggcactgtgacgaagagcggctctggtggcggacccaagacgatcgtttgctgttgctgcagttggtgcatgttctgctgcggatgctgctgctgctggagctgcactgcctcgagattgcttggagcgcgcggcgattgcgcaaggctgggcgggatgggcacagtagtggccagttgcgcatgcttctgccgacgcggcacgaaattcttgctgcggtctgccgccgaaatcgtcttgccacacttgctcagatggacctcgcgcacatgcttgatgaggcgcagaacgttaggaaaggcctgaacagacttcttgacccgcgggcagttgcgccacaggcagacatactccgtctccacgcccgcttgtggatggcgctggatgtgtccggtgctatcggacatgcaatgttccgtgcagtcgctaagctcctcgaactgaaagtcgcacttatcccactgacactcaaaggtgagcacctgtccaaagacatcctgcgaaacttgggatgagggactcgcactgttctggacgtcgtccaactcgcgccgtagggccgccgtctcctcattctgtcggctagccctatcctcccagctctgcttaacgctggagggcagattcttccattcggtgcccaccatgcgggatatgtctccaaaggttgcgtccgggttgctctggcaaatgcctgtaaaagaaagttcaacggttatacatgatctttaaagtatactaaataaacgtactttttcgaacttcactagagtacaaaatgtaaccggtaagacattttttggccgatttggcggccttaactttggacgtcagtggcgtggagtttactgaaggagccggcgaggacatggccgcaatgtctgagctcagcgagggtgtatccccatccattgaatcctctagcatgcccagttcattcaattcgttcttaaagtccttggagggcttaatgggagtcttaaagtaaaagatctcatcctcggtgacagaaggactgtgttggaacttgcgcatgttgcccgtaaccaacttgcgaagagctttctttagctcatcatagacggactcacaaatgtacacatcgctttcggatatctccgtgggtcgggagctgataaattcggagtactccaggacggcgcaacgacccacgatgcccaccaccggactgacctcttcgactgtgctcagcagcagttcctggcgataaaattgcttgcccaagccgggggtcgtctcgctgggtggtaacagccatggacctttaaagtatgattttccattctgctcccaaatctgctggacctgtgccaccgactgctttcctgtttgggtggccacgtaaacaaagtctcccgtttttatggccccactgcaaatggtgttgtactgctggtagtacgtgctgccaacctcagcatttggcggcggatcgcaagacacatttggtttctccttttcgaccagcgtctcttggagcttcagctcctccagttctcctttgtgcttttccaaacgctccttaaacacagacatcacacgttttaactccaatggctgctctcgtggaacgaacttcaccgagctgccttcacggactggcggccagctcttcagcttcttgaaccagcgaccttggatattgtaacgagactcgcaaacgtaaacatccttttcaggcaagttttccggacgcatcttgatgtaatcctttatgttcattacgtagcacatgccctgcactttatccatcgagatggtctgcgaaaggctgctcttgaacacttccttttcgaggaacttgcgagtggttacatggtacgtttcgtggggccgtacaaagatcgaagcctgcatcagcttctcattggtgggtgatgtccagaggcgctctatgcagcatatcgagggaatcttgttttccggcatttgcacgtatacgtaatcgccgggagaaaacacctgctggtttattgtcatgctttcacccttggctgcattgaattcatccttctccttatcctgctcttggtcctgttcctcttgttgcattttttgctggcgacacagctccacatcagccataaggcgttctagactaaaatttaaagcggatgagctaagtgtgtccttgcataactcgtctctcttgcgaatgaagtatgtttgcaactcgatggagtcctggaaaagtttgttcttagaatagtacaatgcttctattattgtagttattactcacctgaaaaatatccgaatctgtgcgggacaactttcttgcacgttccaaacaggcaaaaatatcttcctggtaaacatcaagccgtttgtaagctcctttgtcaagccttcgttttacaaggtccagcgaaatgccgcgaaccttgggtccttcgccaatctcatcgtactccggcagttcggccagggaatccgagtagcaacgtccctcctcgtcctggtgattgtaaatagtcgtgaacagtgtgaggaacagctcctgaacagccaaaggaacatccggaagagaatcgcgctcggtgcgcagttgttgcttcagctgcagtgtcaattgttgtagcacgagcgcatccttgtagatctgcgagtctggctcgttatacttgcaggcgttctccagcatcagcagaaagtccgctgccaagtcatctaaggtatcataagcgccctgtttaagtttctgagcgattcggtccatgtcaataggttccctgataatgtcgtagtagtccggatactcgctcttggatggcaacttcgtaaatataagcgacagctgcctcttacccttgggctcctggtactcctttactgtttcatagaattgccacagccgctctgtaattacagcggtctttaactttcttcccaccttgctgtacttctgctggctttttttgccctctgtaagaccagggaactccttgagcttttcatttagagctcgttccaatatattggcatcctcgtatatgttagagccctcctcattatactgtcggcagttggaaaacataagtcgatagtcggataccacgtcctccacggcggcatagcgatctgtgcgaatgttatgctcgatagtgttcatgtcaatggggttttgaatgatatcgtagtagtccggataaatcttgcgaggcggcttttccataaacatttcgatgggacgacgattgcccaaggagtagtccaccaaatatttctgtatgctcagaatcttctttttaatagccgcgttgatggcaatgcgatttgatttgggtgaattcgagttatttggtgtatgggaggcgttagagttcgaattggagttgatgcggggtctgcccggcttgcgcttttccggctgcgtgctaaccgtaaatacctctgtgtccatttcctctgcatcctcgtcatccagatcactgccctcctcgagagactcctccaccagcttggcattcattagctttaacattttcagcgcatccttgtgagtgcgatgggacgtcggaaacgcctttttggcgttgtccagcatgagatatagatcggcggtgagatcactaatgttcgcataatcgccctttttgagctttgtgtggatttggctcatagatatgggtcgtttgatcagctcaaaatattcgggatggaaacgacgaactggcagtttccatagagagtttcccaatggaggaccagtaactcccggatgttccgaagttcctggtgcgttgtacaagtgatcgaacaatgcccacatgggcccctcgccctttttgctggtctcctcgtcgtccgagctgtcaacctcctcttttagtgctggaaaaagaataatttatatacaaaaaagaaaaaaaaatgttttttttaatcttaccagcaattgctgcactggagagactcttgacgcgcttagccagcttgcctttgcccatctccagctcaatacgccgctgcgtaaagatccgtttcagggatttggcgtccttatagatctgagaaccaggctcgttgaacagacatgcgtttttggtcatttgtagcagatcccgttccatctccgccagcgaggagtaagcgttcatttgtattttggtcgcaatcaggcgcagatcaatgggatgctcaatgacatcgtagtagtctggatagattttcttggagggcagcagttggaacatgcggtgcattaaccgatcgcccacgggatcggtagcggtcataacggaggcgaagagctcctcgtactggttgtactcgtcatcagttgctccatcgccaccaggttcagtgctgctggtcattcggcgcacttggcgcgacatgcgtctggcacgcggctcctcctccgccaatccatttgcctccataatgcgctgtctctgcgaatgaatgtgctgccacagagagactgcgtcctggtgctcgctactgcccggtatgtagaaggccttggcattgccaataagcagctccaggtcggccatcagatcatccaaatcgtcgtaggaatcggttttcagcttctgctgaaccttgagcagatcaatgggattgaccaccacgtcatagtacgagggctcttgccggcgcttcggcacgcggatgaaggtgtcgcacagcattgaaccgtcctccttctttatgttccttatggaatcgtacaattgctggcacagttctgtgggatcgagacggcgcttttttcgcgccgattgtgtcgtcgtctgctgcaccggtgactgctccggcgtcgagtcgtccagctgcagcggatcctcgtcctgccggctggatatgctgctcgcccggcgcttgcggctcagcatcgtgttatccctgttcttattacagttaaaatctaaatatccgataataagacgccacacaaaatgccacaaattctgggaatgagcgaaaaagtagtggtgggcgaaaggttcgatagtgcgcggtcgatatatagttcgatagccggccacttgcgtggtgagttatcgtaatcgaagcgcgcggtggtgaatattattttaaatggtatgttcccaccaaaaatcatatttcttaaccaaataaacaagctgaacatcattttacttaagttctttattatagcatccctaaagcatcatttaaagttttaattaagtcattgaatcacagcaatatcgtaggtagttttccttaaattagctccttctcgaaaaaaggcattcaagccaatagaaacaacgaagttaggctgaaaaaaaagttaaacagaacaatatttaatttaaaagtcagcaaaacgcaagcgcgcaattaaaaagccatgatatttcgattaatttagtaaaatgctttgtttattattattttttatcacataagttttagacgcttgttagtgtgtgattgtgtgaatattgggttacagatttgagtatgccgtaaaatgaaatgaacacgcctcatcgtttcgctgcttaaggaacattgttaaaatcttataaaaataactgaaatatacgtggataaatagcgaaaaacatgtatgaaatggaattcactctgaacgacaagaaacgaaattctaaactacgcctactgcaaattgactgcggcttatgttgcacaattacatcttctatttacatgctagttattggcgagatttctgcgaatatcatggtacacgagtgccattgttctgtgtttactggcaccacagtgatatgctggtgcactgtgaggactctgtctgtataaagtacaacaattaagcacaacagttaacattgcaaaatttaaatattagtatcagttctgcacaactatacgtgatcatataacatatgtaaaggtatattatatagtttcagctgcccatctcccatgtttttctcgtgtcttaacagttcatttcgttt

SEQ ID NO: 23843 - DNA, 5113 bp, DROSOPHILA
attcccagaatttgtggcattttgtgtggcgtcttattatcggatatttagattttaactgtaataagaacagggataacacgatgctgagccgcaagcgccgggcgagcagcatatccagccggcaggacgaggatccgctgcagctggacgactcgacgccggagcagtcaccggtgcagcagacgacgacacaatcggcgcgaaaaaagcgccgtctcgatcccacagaactgtgccagcaattgtacgattccataaggaacataaagaaggaggacggttcaatgctgtgcgacaccttcatccgcgtgccgaagcgccggcaagagccctcgtactatgacgtggtggtcaatcccattgatctgctcaaggttcagcagaagctgaaaaccgattcctacgacgatttggatgatctgatggccgacctggagctgcttattggcaatgccaaggccttctacataccgggcagtagcgagcaccaggacgcagtctctctgtggcagcacattcattcgcagagacagcgcattatggaggcaaatggattggcggaggaggagccgcgtgccagacgcatgtcgcgccaagtgcgccgaatgaccagcagcactgaacctggtggcgatggagcaactgatgacgagtacaaccagtacgaggagctcttcgcctccgttatgaccgctaccgatcccgtgggcgatcggttaatgcaccgcatgttccaactgctgccctccaagaaaatctatccagactactacgatgtcattgagcatcccattgatctgcgcctgattgcgaccaaaatacaaatgaacgcttactcctcgctggcggagatggaacgggatctgctacaaatgaccaaaaacgcatgtctgttcaacgagcctggttctcagatctataaggacgccaaatccctgaaacggatctttacgcagcggcgtattgagctggagatgggcaaaggcaagctggctaagcgcgtcaagagtctctccagtgcagcaattgctgcactaaaagaggaggttgacagctcggacgacgaggagaccagcaaaaagggcgaggggcccatgtgggcattgttcgatcacttgtacaacgcaccaggaacttcggaacatccgggagttactggtcctccattgggaaactctctatggaaactgccagttcgtcgtttccatcccgaatattttgagctgatcaaacgacccatatctatgagccaaatccacacaaagctcaaaaagggcgattatgcgaacattagtgatctcaccgccgatctatatctcatgctggacaacgccaaaaaggcgtttccgacgtcccatcgcactcacaaggatgcgctgaaaatgttaaagctaatgaatgccaagctggtggaggagtctctcgaggagggcagtgatctggatgacgaggatgcagaggaaatggacacagaggtatttacggttagcacgcagccggaaaagcgcaagccgggcagaccccgcatcaactccaattcgaactctaacgcctcccatacaccaaataactcgaattcacccaaatcaaatcgcattgccatcaacgcggctattaaaaagaagattctgagcatacagaaatatttggtggactactccttgggcaatcgtcgtcccatcgaaatgtttatggaaaagccgcctcgcaagatttatccggactactacgatatcattcaaaaccccattgacatgaacactatcgagcataacattcgcacagatcgctatgccgccgtggaggacgtggtatccgactatcgacttatgttttccaactgccgacagtataatgaggagggctctaacatatacgaggatgccaatatattggaacgagctctaaatgaaaagctcaaggagttccctggtcttacagagggcaaaaaaagccagcagaagtacagcaaggtgggaagaaagttaaagaccgctgtaattacagagcggctgtggcaattctatgaaacagtaaaggagtaccaggagcccaagggtaagaggcagctgtcgcttatatttacgaagttgccatccaagagcgagtatccggactactacgacattatcagggaacctattgacatggaccgaatcgctcagaaacttaaacagggcgcttatgataccttagatgacttggcagcggactttctgctgatgctggagaacgcctgcaagtataacgagccagactcgcagatctacaaggatgcgctcgtgctacaacaattgacactgcagctgaagcaacaactgcgcaccgagcgcgattctcttccggatgttcctttggctgttcaggagctgttcctcacactgttcacgactatttacaatcaccaggacgaggagggacgttgctactcggattccctggccgaactgccggagtacgatgagattggcgaaggacccaaggttcgcggcatttcgctggaccttgtaaaacgaaggcttgacaaaggagcttacaaacggcttgatgtttaccaggaagatatttttgcctgtttggaacgtgcaagaaagttgtcccgcacagattcggatatttttcaggactccatcgagttgcaaacatacttcattcgcaagagagacgagttatgcaaggacacacttagctcatccgctttaaattttagtctagaacgccttatggctgatgtggagctgtgtcgccagcaaaaaatgcaacaagaggaacaggaccaagagcaggataaggagaaggatgaattcaatgcagccaagggtgaaagcatgacaataaaccagcaggtgttttctcccggcgattacgtatacgtgcaaatgccggaaaacaagattccctcgatatgctgcatagagcgcctctggacatcacccaccaatgagaagctgatgcaggcttcgatctttgtacggccccacgaaacgtaccatgtaaccactcgcaagttcctcgaaaaggaagtgttcaagagcagcctttcgcagaccatctcgatggataaagtgcagggcatgtgctacgtaatgaacataaaggattacatcaagatgcgtccggaaaacttgcctgaaaaggatgtttacgtttgcgagtctcgttacaatatccaaggtcgctggttcaagaagctgaagagctggccgccagtccgtgaaggcagctcggtgaagttcgttccacgagagcagccattggagttaaaacgtgtgatgtctgtgtttaaggagcgtttggaaaagcacaaaggagaactggaggagctgaagctccaagagacgctggtcgaaaaggagaaaccaaatgtgtcttgcgatccgccgccaaatgctgaggttggcagcacgtactaccagcagtacaacaccatttgcagtggggccataaaaacgggagactttgtttacgtggccacccaaacaggaaagcagtcggtggcacaggtccagcagatttgggagcagaatggaaaatcatactttaaaggtccatggctgttaccacccagcgagacgacccccggcttgggcaagcaattttatcgccaggaactgctgctgagcacagtcgaagaggtcagtccggtggtgggcatcgtgggtcgttgcgccgtcctggagtactccgaatttatcagctcccgacccacggagatatccgaaagcgatgtgtacatttgtgagtccgtctatgatgagctaaagaaagctcttcgcaagttggttacgggcaacatgcgcaagttccaacacagtccttctgtcaccgaggatgagatcttttactttaagactcccattaagccctccaaggactttaagaacgaattgaatgaactgggcatgctagaggattcaatggatggggatacaccctcgctgagctcagacattgcggccatgtcctcgccggctccttcagtaaactccacgccactgacgtccaaagttaaggccgccaaatcggccaaaaaatgtcttaccggttacattttgtactctagtgaagttcgaaaaagcatttgccagagcaacccggacgcaacctttggagacatatcccgcatggtgggcaccgaatggaagaatctgccctccagcgttaagcagagctgggaggatagggctagccgacagaatgaggagacggcggccctacggcgcgagttggacgacgtccagaacagtgcgagtccctcatcccaagtttcgcaggatgtctttggacaggtgctcacctttgagtgtcagtgggataagtgcgactttcagttcgaggagcttagcgactgcacggaacattgcatgtccgatagcaccggacacatccagcgccatccacaagcgggcgtggagacggagtatgtctgcctgtggcgcaactgcccgcgggtcaagaagtctgttcaggcctttcctaacgttctgcgcctcatcaagcatgtgcgcgaggtccatctgagcaagtgtggcaagacgatttcggcggcagaccgcagcaagaatttcgtgccgcgtcggcagaagcatgcgcaactggccactactgtgcccatcccgcccagccttgcgcaatcgccgcgcgctccaagcaatctcgaggcagtgcagctccagcagcagcagcatccgcagcagaacatgcaccaactgcagcaacagcaaacgatcgtcttgggtccgccaccagagccgctcttcgtcacagtgccgccgcgcaccactcgcgtcatccactcggaggcctacattaagtacatcgagagcctgcagacgggcagccatctgaacgtggtcacctgcaacaacaattggcggcgtgcactgacccacatcacacccgcacaggtggtggccaagacggcgctacccgagaagtggatcggaccgaatctgcgcgaccagggcaacgtggtgcaggcactgtgccacctgcgcaacttcatggtcgacgatatacttcaaatacggcgcagttgcaactagcccatcgttcaccgctaagcccaaagctttttgagttccatgttaataaacaacacaaacaaatt

SEQ ID NO: 23844 - protein, 1654 aa, DROSOPHILA
MLSRKRRASSISSRQDEDPLQLDDSTPEQSPVQQTTTQSARKKRRLDPTELCQQLYDSIRNIKKEDGSMLCDTFIRVPKRRQEPSYYDVVVNPIDLLKVQQKLKTDSYDDLDDLMADLELLIGNAKAFYIPGSSEHQDAVSLWQHIHSQRQRIMEANGLAEEEPRARRMSRQVRRMTSSTEPGGDGATDDEYNQYEELFASVMTATDPVGDRLMHRMFQLLPSKKIYPDYYDVIEHPIDLRLIATKIQMNAYSSLAEMERDLLQMTKNACLFNEPGSQIYKDAKSLKRIFTQRRIELEMGKGKLAKRVKSLSSAAIAALKEEVDSSDDEETSKKGEGPMWALFDHLYNAPGTSEHPGVTGPPLGNSLWKLPVRRFHPEYFELIKRPISMSQIHTKLKKGDYANISDLTADLYLMLDNAKKAFPTSHRTHKDALKMLKLMNAKLVEESLEEGSDLDDEDAEEMDTEVFTVSTQPEKRKPGRPRINSNSNSNASHTPNNSNSPKSNRIAINAAIKKKILSIQKYLVDYSLGNRRPIEMFMEKPPRKIYPDYYDIIQNPIDMNTIEHNIRTDRYAAVEDVVSDYRLMFSNCRQYNEEGSNIYEDANILERALNEKLKEFPGLTEGKKSQQKYSKVGRKLKTAVITERLWQFYETVKEYQEPKGKRQLSLIFTKLPSKSEYPDYYDIIREPIDMDRIAQKLKQGAYDTLDDLAADFLLMLENACKYNEPDSQIYKDALVLQQLTLQLKQQLRTERDSLPDVPLAVQELFLTLFTTIYNHQDEEGRCYSDSLAELPEYDEIGEGPKVRGISLDLVKRRLDKGAYKRLDVYQEDIFACLERARKLSRTDSDIFQDSIELQTYFIRKRDELCKDTLSSSALNFSLERLMADVELCRQQKMQQEEQDQEQDKEKDEFNAAKGESMTINQQVFSPGDYVYVQMPENKIPSICCIERLWTSPTNEKLMQASIFVRPHETYHVTTRKFLEKEVFKSSLSQTISMDKVQGMCYVMNIKDYIKMRPENLPEKDVYVCESRYNIQGRWFKKLKSWPPVREGSSVKFVPREQPLELKRVMSVFKERLEKHKGELEELKLQETLVEKEKPNVSCDPPPNAEVGSTYYQQYNTICSGAIKTGDFVYVATQTGKQSVAQVQQIWEQNGKSYFKGPWLLPPSETTPGLGKQFYRQELLLSTVEEVSPVVGIVGRCAVLEYSEFISSRPTEISESDVYICESVYDELKKALRKLVTGNMRKFQHSPSVTEDEIFYFKTPIKPSKDFKNELNELGMLEDSMDGDTPSLSSDIAAMSSPAPSVNSTPLTSKVKAAKSAKKCLTGYILYSSEVRKSICQSNPDATFGDISRMVGTEWKNLPSSVKQSWEDRASRQNEETAALRRELDDVQNSASPSSQVSQDVFGQVLTFECQWDKCDFQFEELSDCTEHCMSDSTGHIQRHPQAGVETEYVCLWRNCPRVKKSVQAFPNVLRLIKHVREVHLSKCGKTISAADRSKNFVPRRQKHAQLATTVPIPPSLAQSPRAPSNLEAVQLQQQQHPQQNMHQLQQQQTIVLGPPPEPLFVTVPPRTTRVIHSEAYIKYIESLQTGSHLNVVTCNNNWRRALTHITPAQVVAKTALPEKWIGPNLRDQGNVVQALCHLRNFMVDDILQIRRSCN

SEQ ID NO: 23845 - DNA, 9389 bp, DROSOPHILA
tacacagcaatttcttttcgtcacggaatgattcgtagtgctccggtccacattcgttgcagtttggacccgcatagccgggatcacatttgcactttccgttaccctttctagttccgtctcctttgcattttcctgaaatttgtcatgtgggtaaaattaacgaagacggcaatcttaagttgacacacttatgtaagttgtggcctgtaatacttggttatcattacttaccatttccattgcactcggtgcaggtcaggcagtctggtccgtaggtgttcagcggacagcagactgttagctgatcgatgcaaagccatgactgcaggtcgggactctctgtttgtttgtggataaaccagtcctcgagaagcgcctcgtgctcgttagccaggttgtggcagtgatccttgtttatcacttctccttccgaacatagcttctcctggatctccactagccgtacctcgctgttcttgtacgaacgcaacttttcctcctcccatgccgtgtccccgcccgcgtgtccgcgttttgtcctttcgagtcctgccctgaaagagctaacaagctgggtacatgccctgcagggcggcggaacaggcttttcgggagaatatgacgccgaagcagcggctatgaatactagcgttgcgagccaacaatacttgattctcatttttatttatttattgtctttttaaccggcaaactatctgagtttacgtgtaattaaagccgacactatcgataaataaaaacatcgatagtatactcgaaagtttcgcgaataccgataggtcgcgttcgataccattgcctcacggagctcactcttagtcaatctaacaaccgttaacgacccatgcgaaattcgaggattatcattttcgaatacttcccttttctggtaatcgacaattaaattttgttgctgtaggatacgatttgtttcactcactttaactgcacctccttgtagcttgaaacatgttgctttaactattttcgtaaaagtaaaaaagtgtaaactttatttttttcgctttttaatattttgcttaatctattagatgcataaaaaagttatgctattacattagcaattatagagatcgataatttaaaatgtaagatttacttaaaataatccgatacgctagacatgaaagaccaaaagtatgataatttgattgcagactaagtcgtgtgcaagaagttaccatttcaaaggagtacttttgttgttgtacgcgttggccctattggatgtatttagaaaagaaataaaaaattatataagttaatgtttactttttgcactggtggtttttaatatagtcatatagtaaagtaatatctatattaggctggattctataaatatctaattaagcatcttatgtctattatttagagcactccgttgaggaacaaaataagaaagacatgagaattttaatacatatgtatacacaatgtaactttccttttcactgtataacaataaaaacttacttgacaacgccatgattctgaactgatgtaagagtaataaagggagtcaatcgttcaatgaaccgatcgttgttacgttccagttctcgttggtaatctttttgatctgaaagtattagattgcgattctttttcaaagcatcagcacaacgctttgaaaactcgcgaaagcacaaccgaagtttgttttggtgttttgtcggtacagttgttccgtcggataaattggaaaggaacacactcgccatttccatcggtccttggttaacagtggttccaatacatccctgcagtaccatttgcaatattttggggtctgctggctcttgattcgtggcagctgccaattccaatgtttttttttgaatatcctaggcaataacgtttaattttattaacttttgggattttacaacataacttacttcaattgccacttcaatcggttccaggactatttgctgtcggctaattaccataatgcgagtttttacgtatggaaagtgattcgccgtggtcaaaatcgttttccgtttacactgctcatttagttcgccatgtgcctttccatttttagtaaaaggcgtggcatatataaaacgttctgcataaaccaaaaatgttaaaattataattttaaatttcgatttaaattatctgtttaattcatatcatacttatattgaaattccgctcaaagtatgtctcacgatgacgcatttcatatgtttcaaagtagggttcaacataagtaatttgaatgtaagccttatcgggatccaagctattaatatcaacggtattggaatctttaatgatatgcacagagtccggtccgaatcgttcagtgtaaaagttctaacgtatgttgaaacaaaattgattagttctattttttccaatttgcaatatatacctgaagccgactaaatatttcgggcaacttcgtcaatgttggctctttataaatgaattcctgctgatccaagtccccaaattttccgccatagaagccaacacgaaagtatgttccaaaaactctcttaccctgtttataaatatgtatatattttccgttggtaaaatttacacaatattgttacctgtagttgggatattcgattaaatgcctcctgcaatttgccatgaactttgcttagcttttgaaaatctctgttagcctcgcatatgggtattagaattttgtacacttcgttcattgcttcatacatgccagcaacttgaaaagaattggaggcttcttccagcaaggccttcaacccagtttcagtgaaatgatttcctaggcagataccatcttcgccgggacttagcacatcatccgatacggccgactccattagtgtgttgggagaaattcgttgaaaacttacagctccaacaggcaaatgtttttgtgactccaacatgctaagatattcagaaactaaagaagcagcatgtacataacacatggctgcttccgtgtgatttgctcgctcgcggtgttttttagccatattttccaaccaagtcagtcgtagatcagggttattttggtatcccttggcaatacgattcatgaggtcaagcaacatttctgggtcttcctgatactccttcattttaacagtatctgacaggatcatatgcagattaaaaagcaaatcttgtacttgttcaggaaaagaagtatcctgcaggtcggagtcggattcagcataaaccaggacggttttaagcgcacggcgtaaggattgctcactaaagaccgaacttgttccaactagggagcttaaagacatcgtcacttgcatcttaactcgggcaaagttctatacgaataagtgaccattaatttagttaaataaacctaaacaataaaataaaacttacatttccaatttcaaaattttgtctcattagtaaatatagtgatgcagctgcctgtgatcgtattcctggcaatagggacccacaatgtttcagtaaaattagacacaaatccgcacatatatcggtctcgtcatcaaataataagtttggaaatttaaagattaacgcgcgttgggaggcaaacaagttttgcagggccaaaacagattgattccgggacaaagaatgaagaagcacctttagcacagttccaagaagattgtgataaaggttggcagcagcatgaacaattatttcaagggtatcgagaagtacaagtgcaacttcagttgccaaagagccttcgatgaaatgacttaattcaagttcatgctcactttttcccacagcatccgcatattgagagcgatatggcatctggtctttcctccatcggaatttttctgttgaattacgatcttttcgacgatttattaaatcataacgtgctgaatttgtgcctctaatacattcttccagcttttccttaacatcagtagatccagttttcctaaaactttgtgtattcgttcgtttaagggtggccacgtttttttgtcctgtgtactcgaaagttttcaagcaaacgttaacaccttgaagcatttggtgcactctatgcggacttaaatccataagccagcgatataaaacgttgcgctccaagttttttagcacccacagaaaacacaccaataaatggcgggtattctccgagctgaggggcaatttgtttttaacttgttcattcaagtaggagtagggacgacttcccgatatcgcaaatgccacttccggatttatggttgatgctgtaatagtttgatgtggcccttgatagtcttcaagttgaccgatttgctgcagacgatcctgctcaaggccgtgctgatgcaactgaggaatgcaatccatcactatagaaagtagcggtatatataaagcagccacccttgcacgtgcatcagtttcgctataccgcgcgtccaaatcgtgagatgtcatcaggttgcgaatacaccttattgcttttccatgtaattgggggtttggcacctccattactgctgctaagtcgctcagaacaagtccgactagaaaatgttgctggaggaattcttgactaaggtcggcgtgaagggctctctctagtgatcccttttaaaagaagccacaaataagtaaaaattaaagtgtattgtttttttacttacgcaagaagtttggctgttgctcgacgttgtgcttggcgtggggctgcatggcgctgttaccattgtgtatgaagtaccaaacggcaagtttaaggctacaaaatgctcatgactacacacaattctcaaaaagtctattttatagttcattagatccggtattgaagcatttttagaaatcagaacctttgtgtacgttttgatgaggccgaaaacaaatccccgatccatgatgcttagtatgtcaaatataaaaaagcctaaacttgcatttaatgactgcgctaatttaggttcgttgctgtggtagccgaccacttttgttgtaactaagtgcaccagggtggatagatcatcattaaactgatgtggaaatcgatgtttgcggggaccatttaaagtatttgaacaatgcaaatgttcaatcatagatttgacaataagctcaaataaaaaccacgaatttgacatggctaagtcagctgcctttccacttgcaacaacccaatgcaaggctaattcttcgtgaagcagccgcacttggacatcccgtgcagccatcgagtgaaggacatctatggacagctctgaaaggaaaaaggttatatttaaagcctttacaaaatatgtattttacctttgcgatccaagcttcggccacttgctaaaacattatcatatatggtgtacgattcgcttaattgcaagtcttctgttgtgctgcgactgcatgttagtcgctgtttgctttgaaaggggtgcggaattttacattgaaagtgcacatatgttgatagcaaactttgccgaccgtattggtcatattgatcgtcgttaagtattgataacaaagatgataccaaacaaagaacttcgaaaaccgtagatcccagagacattgcttgtccaccaactttgtgggtgacaactaacaattcgataagcttatccaagactaatggtagatgcctcactaatggctcacgatttgcatattcgatatccagcaagcatttctttaattctgtttctatattattctcgccaatatgggaaggtatatttcgagtgtctagatattcgcaaattaagaagaatcgatcgaggaaagaatccaaagtatgaattgcggtgactgcttctacattaatagaaaacacggctctgtgattgtccagccatttaattccaggcaggtgaacattcggtggtataaatgagtaattttccggcggtgattctaccataacaggaagattaaattccccaaacttaagttttccatcttccagtaagggcaaccatgtgtagccgataggagtctctactgacggctgcaagtcctgtggtttcttttgacatgaaacatggtaaatggtgaacaataaatggtgatgctgctttattgatgcaggcagcgcaatttttatttcatcgtagaatgatgggcatttgttatgataattgacagctgtaaatgcttcagtagaaaatttgggacaagacgacttgccgtagatggcattgaccgcatcttttggcgtttctccagccattagttgaacgcgaacggcaatgtttcgagcagaacctgcacgcgaagaaaaatttagctcctttggtgacacaaataggagattgcgatagctataatgtggattgtaaatcgccgattgcggaaattctaagatttccttaactgggcgcacattatctgcactttgagggtttataggtgctaactctggcgttaatgcattcttggcttcctcgacgcaaggtgatatttctaatttaatagaaccaggtatgcatttgtacttcttcataactgagctcggtcgttttaactctggtaaaattttgtacaaatcctcgtctttcattttatctgcctcttgtttaaagaagcttggtactgttatagtgataggacgaaagttttctacaacgtttgcaaaatcatctggggaccaggatcggtgcttttccttccgttcaagcgaaccacgtcgtgtaagtgttccgctcatatcgttagcttttcgccttagttgatcaaagctacttgtggaagattttcgatctaagctattggagcttggcgctgtgcccaagctgctgccacaagcatttccaaaggaatcccgttccgcggcgccagcgtctttgctttcaaagttatcgccattaaaaacatttgttaggtagattcctgtccatgcaaacggcattcggtatttgcctagtcgttcacagtagtccacagcgttggattttactttctctcggtatttatctttgtcttctttgagatacggctcgacggaattgtttatgtcaccctgcaaaactttttccagacgaatcacgagaaataaatcgttactcggatatgaaatttcgaatatggctgagtggctctgggtacttatgtcggcgcactgtacatgacttgacaacatgcgtttaagactatctgcgttcatgtcaaaatagaaattttcagaaattttttgccgttccttagcatcataaatagccatcgatgcaaaaattggctccacttccagctcaagccgaagctgtaggcagttaacctgaatgcgatgacccatatgttcaactggaatctctgcgagcaggcggcgttcaatgttttcctccgcttcagattccggatacagtgagaaaagagccatttgtcgatcttgctgccggcgtgcttcattggattgatcaatatgctccggaggtacattgtcaagcaaattgggtattagtgggtcattaaccgaacgtcgaagatcaaagctagcccaagaaccacgcggggtcaaagtgtccgtacaagagcttactgaagccaaacttgcaatggattgtcgagaacttggagtgcagctctcgcttttataagcgaacgcctcttcaaatgacgaaaaatccttgtcgatctcgaattcctgctggtacgcagagggacttatggttccgcggtcgatacgctcgcggatatagcaagaactggaaaggtgccgctgtgcatattcaaccaccttccatgggcgcgtatagcagttaacacattcttgtacgtgatggggcaaatcagacctaaaagagactgtagctatgtagctgttgtataagttaggtgcatacatacaaattctcattgggaacaacgtgatcaacagttctgatttttcggggaatgattttaacagttacatccccttgaggaaagtccaatatatgtttcaagggatcccggttgatgatgttcatatgctgggatagaaattcttcgtaatcaaggggctctgtcggggagatctattgaaaaaatggaatccttaacagaaaaattgtatattttaaacaatagtgctcttaccgaagaaccacacaatgatgggtccattgcctttgatagatggcaaccagaaacattttttcgtacatccgcagccgactgcctagggatttacaaattgatatatgtacatatgtatacaagcattaagggcgtttctttgtttaaaataaactatttcctttagtgaaaaacttacttggaaactttttgcacaaacgagcgctgggcactcgacattttgggaaattcgtatgctaaagtggtccaattcttttcttatttattttatgacaaataaaccctgactttatattggtttacttgcagcgccgtcgataaccgtactcatcgattaatcttaacataccagagatgagctggaggcccgtatagatgaactggttccgattctaatatgattgcattttttcatagtctttatcaaatattgaattagattaagtacacgaagtacattttttcatagtatttatctaacacacaattattattaaaatcgtactttattaaaacttatcatccatatggtggtttattttgattttctttagcttttttttaacattttttcatagtctttatcaaatattgaattagattaagtacacgaagtacattttttcatagtatttatctaacagacaattattatgaaaaacgtactttattaaaacttatcatccatatggtggtttattttgattttctttagcttccggccgaacatgtgccacaagttttcactttcacccacgagcaacagctgcagtgagtttggcgagtttttttttagattaacagcaagcccccgcattccgaccgccttaggatgcgctatgtttttacgagttgcataccacatgcatggaatgggcttgatgtcagtgggaggctgtttagaatttgacggcggtaaaataagagaaagagatgacgttaaatagcttttgattggcctatttgctgatcagcctaacaaaggtttactttgggccaaccaaaagttcagaccaatacttttaaatataaaaccattaaagttaagagcacaaaaaaataattaatttgactgaataaatttacccattatttatataaatggtagtggcgaagttgttaatgaattctttaactgcatagtactttcgttttatccatttttacaataaattctcatgcactgaacaaacttgaaagcttaaaaacaattaccaaaacaaaaaaaaaactataatgagctattaatccacatatgagagttgagattttatatacgcttgtttttaatttataggaaacattattctctaatataa
